United States Patent Application Publication US 2007/0067865 A1 - sequence listing, part 46

SEQ ID NO: 278033 - DNA, 463 bp, Zea mays
cccacgcgtccgcccacgcgtccgcccacgcgtccgcccacgcgtccgaggaaagggggtggaggccgtgggggggtcccttgcgaccggttctggtcgatttctcgggcagctccagctgaattcaagatgccgctgtgacccaccgctgcctggcttcttggaggaaggaaattttgcttcaattgggccgttgggcgtcgttgagctagacccctcctccagctcttgatccggtccatggggctctgccatggcaagccgacgcaaatcccggaggccgaggcggaggaggatccccacgtagcctccggcgcgggcgacggcggcgacggggcgacctcgccgtcggcggcggcgcccgcggcgaagccaggcacgcccaaacagcccaagtgccagttctacctgccgagcccgatcgcggccgccagctacaagggctcgcctgcaaactcgagcg

SEQ ID NO: 278034 - DNA, 457 bp, Zea mays
gtcacggggactcctgccgctacgcgcacaccgaggaggagctccgcccacggcccgacggcacctgggaccccacctccgaccgcgccaaggagctgcgcaaggtcgccgcggaggcccaggaggaggccgaggaggaggtcacggtggatgagcagtcactcgacaagtgcctcgtcgggctccccaggggctggacggctgataggctcaagtccttgctccaggatcagggaatctcgtatgcaacagcaaagaaaaagaagggaatgacagttggttttgtgacttttcagagtgttgaacaactaacaaatgcagttcagatccttaaggagaacccttctggtggaaagcaaattaagatagtagatgccaatcgtaggtcccatcaaaaggcacatgctggagcacctgtatccaatactggaactgcaacagaaaatggtagtagtcc

SEQ ID NO: 278035 - DNA, 454 bp, Zea mays
cccacgcgtccgcccacgcgtccgctcggattgaagagaagctggttcaacaagctgagggaaatcaggacgtggattcaataccaaaacgttccacggagcatgctgatcaagaacttgaagtagagagaactgcacaggctgggttggaacaagagtgtgactctgtgccaattgattctgaggaacacggttgcctgacttcatatgctcatactgatgatgagcaagatgaggtgaagcagaaagtcacttctgaaacagcagatgttctacattatgcagcagacacttttaatgttaacacaaactcatggaaagaagatattgaagaggatccaactgaagctgctctaacagccatacatcaaatttgttacgaacctttgacgagcatagtcaagttctctctagatcacagtgtctccgaagaagacagagagcctgatacgcc

SEQ ID NO: 278036 - DNA, 740 bp, Zea mays
  unsure (1)..(740): unsure at all n locations
ggaaagaccatgcctaataatggtggatctctggctattatgtggggccgtgcatcaactaaacctaagcctccaagtaccactaattctacagttgtagaaagtgttgcagctactcttgatgcacaaatatgtgcaaaggaagaagcagatggaaatagcagtgatgacgaacagggaataaagtacaagagggaatccaccaatgcaaataacagaaagcgaagagcagtatttgatttttcggacgatgaggaagatgagaatattataagcattgcatctcctgaggtactaaaacagcgtaccccgcccccgcgtccggaaactgctgaagacgctgaagtggatcaaaagaacttggaaaataaagatgatgtaccgaacactgagaaaggttcctccaatgggggtggattctgacttcacttctgaatgtaaaaccaaaactgtcaatactatgaaccattctgggattactttaaaagaaaagagcagcgatcctcctgtcagtaacaagaaacaggattctgcagttgagcctgcctccaccgcaccaaagagaagaaaggttttgaagacacgcatagatgagaggggaagggaagttactgaggctgtttgggagggtgaaggttctgcagatgacaaggcagagaagaatgtcagcacaactgctgcgagcggngcgactatcccaagcaaaccgaaaccagcaacaagcaccgacaaaatcaaag

SEQ ID NO: 278037 - DNA, 419 bp, Zea mays
cgttccattctttcttaaactttttactacgctttattgggttatattaaggtggaatttttttatgatgtaccctacactgaatatggtttctaaatggaggtggataatgacttcacttatgaatgtataaccaatactgtcaatattatgaaccattctgggattactttaacagaaaagagcagcgatcctcctgtcagtaacaagaaacaggattctgcagctgaccctgcctccaccgcaccaaagagaagaaaggttttgaagccacccacaggccccggcggaagcgaagttactgacgctgtctgagacggtgaaggttctgcacatgacaaggcagagaagaatgtcagcacaactgctgcgagcggtgcgactatcccaagcaaaccgtagccattaccaagcaccga

SEQ ID NO: 278038 - DNA, 699 bp, Zea mays
cccttcttccgggtgaccgcagagccaattggtgatgaagctgtgaagcggatgtgcttgcattatttaggagagagccctggaaatggagagcaactgtgtggcttaattaggctgacttggttgtataggaattttcagcaactacctgaacatccaaccatcaattaagattgcatatagcacccgagcttaccttctataccttgttggttccaccttgtttcctgacaccatgaggggatttgtatccccaagatatctaccactgttggcagattttgggaagatccgtgagtatgcttggggggctgcagcccttgctcatttgtataggggattgtctgttgcagtaacacctaatgccacaacacagtttctcggcagtgcaactttgctcatggcctggatttatgagtatcttcctattactcaaccacaacagaagaaccagagcacattgctgccccgggctcgccggtggaactttggaggagcaacacgtggacagagaaaaaaagtcatggactggagaaaagtttttgagcaacttcaattgtccgaggtcaactggaacccttacaaggacatgaatccagcaattgttccggaatattgcattgcagcagataacatctgctactctcgtacttggctaatcagctttaacataaaggaggcgtatgtgcctgacaggtt

SEQ ID NO: 278039 - DNA, 653 bp, Zea mays
  unsure (1)..(653): unsure at all n locations
cggacgcgtggggtccaggtctcgctcaccctggccgcgtcgctcgcctacgtctgcgtccgcgcgctccttcaccgcgcggggggcctccgccgtctgctccacctcgacagcctacgccgcgactccgaggacgtgcatgcgggctacgccgcgcagctcgcgcgctccttccgcgtcctcgcctgcttcgtgctcccctgcgccctcgccgaggccgcgtacaaggcctactggtaccgcgccgccgcggcctgcgccgtcgaggtcgcctcctgggtgtaccgcgtcgcgctcttcttcatggtctgcgtcctcttccgggtcatctgctacctgcagatcctgcggatggtcgggttcgcgcgcgagttcggcaggttcgccgacgtcgccaccgtgctgcagcaccaccgccggatcagggagcagctcacgaagatcagccaccggtaccgcaagttcatagtctgcagcctcgtgcttgtctccgccagccagttcgccgcgctactcgccaccactaggccgcacgccatcgtcaatctcngtaccgcagcgagctcgcgttgtgctcggtcagccttgtggcgggtctgctgatgtgcctgtacagcgcggcgaagatcacgcacaagactgcagcgatgacg

SEQ ID NO: 278040 - DNA, 472 bp, Zea mays
gagctccatccatttcatttcctccactctctaaaaagtagaccagccaggggagagaagtgaggcatcgaaggaagcccccaccatggcggccaacggcaagagcagcttggcgaacggcgcctccaccgggggaaagcccatcaaatgcaaagcggcggtggcgtgggggcccggcgagccgcttgtgatggaggaggtggaggtggcgccgccggggcgcctggaggtgcgcgtgaagctgctcttcacctccatctgccacaccgatctcagtttcttgaagggagagaacgagctgcaccgcaagttcccccgcatcctgagccatgaggcatccggagtggtggagagcgtgggggacggggtggaggatctggccgccggcgaccatgtgatccccatcttcaacggcgagtgcggggcgtgcgcctactgcgagtccgatcggacaaacctgtgcgggacctac

SEQ ID NO: 278041 - DNA, 258 bp, Zea mays
cgttatttctttatgcagttacaagccagatgtaatcaaaggggatatggactcagtaagaccagaagtgaaggagcattattccaacttggtaaagctgctttaatttacattcattactggtatgaatcgaataaaaagataaaacgaattttaatttgggaccgaggggagtactagctagtttaacttctctagtgcctcttttagttctggtgatcaaattggcatttcccttgtaccaatccttgttgagag

SEQ ID NO: 278042 - DNA, 924 bp, Zea mays
gctaatgttgatgatgtagggtataggcttgttgcaatttatacacctgtaagagaggatggagttgagggacaacctgtttctgtttcaacagaacagattgcagttgagcctgtactttacagggaagtgaaacagaagctcgatgatggttcagtcaaatttgaggttctgtgtgacaaggaccgaacacccaaaaaggcacaagtaatgggccatttggagcggagggttttggaagtcaaccgaaagaggataaaagtagtaaagcctggatctaagacatcattcccgagtactgaagtacgaggaacctacgctccaccgttccatgtcgagctgtatcgcaatgaccagcaccgcttcaagattgttgtcgacggtgatactgaagttgacttaatggtgcaaacacggcacatgcgagaccgcatcatcctcacgatcagaggcctcgcccagaagttcaacagcacctccctcaacacacttctcaggatcgagtcatgatagacctgacagtgtaaaaaccaactattacgggaagctgtaccccttgttccgattggttagagtgcgtggttttagtaggattcgtgacatgccagccttttgtgtgtatgggtgtgggacgggccgagcgtgttggattacaattttttccctgacacatctctcaaatcagagcagcatcagctggttgctctgactggtgccgtcgtgcgtcatgaaatgtacatagggtcgttagagcgagaaagagagtggtgtttcttggtgctgtatttattatgcactggttgggttgggttttttcgactgccattctcatactaagtattggttctttcttttttcggtcgttgggtttgcatatacttgtaccgacaacacagcttcggggtgattgggcgagtgctgttc

SEQ ID NO: 278043 - DNA, 587 bp, Zea mays
  unsure (1)..(587): unsure at all n locations
aagcagggggacgtcagcaaggactcgaccgctccaacagctgtcacctccgccaagctccgttgctcctccgatagccacgacaccacaccagccgggcgccaagacctctccggctgccacgatggcatgtacttagggcactagctctcctccgctagacacgtagcactctgctacaccccccattgtacacctggatcctctccttacgcctataaaaggaaggaccagggccctcttacagagggttggccgcgcggggacgaggacgggacaggcgctcgcgtgaggccgctcgctccttctcccgcgtggacgcttgtaaccccctactgcaagcgcacccgacctgggcgcgggacgaacacgaaggccgcgggatttccacctctctcacgcccgtctccggccacctcgcttccccccttcgcgctcgccctcgcgctcgacccatctgggctggggcacgcggcgacactcactcgtcggcttagggaccccccggtctcggaacgccgacacctgtcgtcttcgcacagactctatatgcccttgngtttgaatcatacccaagtaaaaagcct

SEQ ID NO: 278044 - DNA, 944 bp, Zea mays
cccacgcgtttgccctctcgtccgataattgtagcaggtgctacattacctctcgtctgtttggcccatccagccattggccttggtctgctacttctctctcatgctttccatgctcattcaaatctatgcagttctttagcagctgcttttcgtagcatcactcagaaaaaggacctgtgcaagtccaagatgggcgatggttcagctctgctatccaaaagtaaatccgatgggctgcagcaacttctgccaatggatgatagcccaacagcttcaaaatgttttaccgacagccaactagaactgtttgattatcggcatggcgtcatgatcttgcatcttctaagcacactcatgtttgtgccttcactcgctgcctggctacagagaattggtatgggacaaaattctccctggtccattgattctgctatttgcgttggtgctatactgcatggactttttggatcccaaccaaatgtcagctgctgcatatttttcaagttacctggcaggagaggccgtgaaattggtctgagtttcctctacctcgtgggtggctattattcctttgtcagctccatggcgttggcaccttatagggccttgtatgccatggcgaccattggttatatatgtttcatttccagaattctcgagagaagaaatatggtaaggggtgacattaactctaggaggactcggaagcactcacacagacactgacacaccacagaaagtgtgatttctttaaaattatttgtaagagatagagaatagggttgaggaacctttcctccaacctaagttatctccttttttgttttttttttccaaatcttgcttatgtgcatgtgattgtgtacggccatggttttgaaagttgttatcggatatggttatcctcggtgtgtggggtcttcataaattgcatcaagaat

SEQ ID NO: 278045 - DNA, 983 bp, Zea mays
  unsure (1)..(983): unsure at all n locations
aattanctcttgcttggaatgtgtcaatcttaattaagctaatcctgggatatgcatgacacagactgctctggttcctgtagcagattaattgacccaccgttgcacttcttattgcagaaatcactgacctttgcgcctgaagcgtctgaggatgttctgccactggatttaggggaacttcttgcttattttgtaaagcaatctgtaccactattcgaccaacttggtataaaaagagatgtatgtgacaagttggtggagtctctgtgcagcaagcgcaaggaccaccctgcatatagttttttgtcagcaactgaatcatcttcattgaaaaatgacaatgttgggaatgaactcgacctaagaatagctagcgccctacagagtacaggacaccattatgaaggtggattttggagtgatggccataagtctgacatatctggcaagagacatgttgccatagtcaccactgccagtcttccctggatgactggaacggctgtgaatcctttgtttcgagctgcatacttggctaaatcttgcaaggcagatgtaactttgtagtgccctggctttgtaagtcggatcaggaacttgtgtaccccaacagcatgacttttagttcaccagaagagcaagaaacatatatgaggaattggctggaagaaagagttggtttcaagacagacttcaaaatatcattttatcctggaaagtttcaaaaggaaaggagaagcataattcctgctggggacacttcacagttcataccatcaaaggaagctgatattgcaatcttggaagagcccgagcacctcaactggtatcatcaccggaaacgatggacagataaattcaatcatgtgatcggtgtagtgcatacaaattatttggagtacatcaagagggagaagaatggtgctattcaggcctttttcgttaagcacattaataacctggtcgccagagcttattgc

SEQ ID NO: 278046 - DNA, 537 bp, Zea mays
ggcgagggagagtgtgaagattgagcatgagaaaaagctttctactctgcagagcctggagtacagagggagggatagcgcaaagctggacaagaccaaggcctccataaacaggctgcaatccctgatcgttgttacctctcaggctgccacaaccacatcatcagccatcgttagagtccgtgacaatgagcttgcaccacagcttgtccagctctgttttgcgctactgggcatgtggaggtcaatgaaccatttccacgagatacaaaacgagattgttcagcaagtccgcggcctggtggacaactccatggccgagtcaacatccgacctccacaggcttgcgactcgtgatctcgaggccgctgtcgcggcatggcactcgaacttcaaccgcctcatcaagtaccaacgcgactacatccgctctctgtacggctggctgaagctcacgctctgccaggtggacagctgtgtgccacagggagcccatgcctcgatgatctcgcgcgaactcaccagcttctgtgacga

SEQ ID NO: 278047 - DNA, 703 bp, Zea mays
  unsure (1)..(703): unsure at all n locations
atcctggtgctcagagcaatggcatgggaaactatctaagcgatgaacaacggatagaagctgctcatcgtgcaaattttgtccgtgaactgataatagataaagccccatctccactagtgagtcttgttggtcgaaaggattatgaaagatgtgctcatgatatctatttctttcttcagtccccggtttgtttgaagcagttagcgttcgaactccttggagctgcttgttctttcttcatttccggagttggatggcactgtgaggaagtggcacgaagataaagagcaattctgcgcccagtaatgtttatcaaacgtttgaatttgtcacggggcggtgtttgtttccaacacatatcgtctttccagagtggtgtggcctgtgaattctgcgaaaataaggtggtggcttcagaggagtgcccgtggatatctcagtttgaagtggggtggtggctttgtgcagtgtgaatatggttagatagtgcgaggatatggtccctttttccaccgggccatggcagaacggtttttgtgcccgatagagttcattttcccccctccagatttggtatacgtaatgctgctgcctgaaaggaaaaagatggtggcgcattttttttgcacccgttttggtggtacactggtacccgtcttgtgtaaatctgcatagacataaattaagattngacccggtc

SEQ ID NO: 278048 - DNA, 571 bp, Zea mays
tcatcaagaaagtgggaatcaaatgtggatgtagaaatgttcaagaatcatatgaaggccatgtggctaaagaggtgaaatctgatggtaacaaaaagaggctgatagatgcaaaaaattcaaagaccaaaaatgatattagcgcagttgtgaaaaaggagattgatatggaattagttgctggtcaaaagatagtatctgaagctctcaaaatatcattgctgtctgaccccagagctatggatgcaaaaggtgagaatcgtcttgaagaggagccagcagaaaacaacttggttggaattagagatgctcgattgaaagagcggtgcaccaagactgactccatgacagtcaaagtggagcctgccaaagcagaggcgatggaatgtttagagaacagtagttttggcagttcggaaatggatctttcagcagtgaaagggaaatcaaagcccaagacagaaaagggtgaggcaactttagaagataggaatccaactaatgacaaagacctaatatcagataggaagcaaagccaaaaaaaaagggcgccgctcgcgatattaaaaag

SEQ ID NO: 278049 - DNA, 281 bp, Zea mays
ggctaattctgcatttgtatgaaagtttaatatgcttgacgtgttaatcacactgctagagcatgcgataaatcgcagttggttcattattaggaaattgcattgagctgtaatcagatatgcttctctcctctcagttggtacaccgaaattcatacaatattgtgtgctaattctgcatttatgtatgaaagtttaatatgcttgacgtgttgattaaataacactgttagagcaaaaaaaaaaaaaaaaaaagaaaaaaaaaatgaaaaagggggggg

SEQ ID NO: 278050 - DNA, 459 bp, Zea mays
gactctgagatcaagaagcacccgtggttcctgattaatctttccatcgagatgaccgacgagtaccagcggagcatgcagttggcagacatgaacaccccggggcaaagcctggaggaggtgatggcgatcatccaggaggcgcggaagccaggggacgccatgaaccttgccgggcagctgccctgcctggggagcgtggaccttgacgacattgattttgacgatattgacgacatcgacactgagaacagcggcgacttcgtttgtgcagtgtgactgtgtgaggctcagcagggcaggagctagcttcctttgatcgttggtgtctgtagatccttgttgtgctatgcttccattcgttcctggatcagatatgttgttgtgtaaccgagaaaattggcgttgctgtggacaacagaaacagacccataaacttatgcggaaatctaccccccc

SEQ ID NO: 278051 - DNA, 275 bp, Zea mays
gaggaaaccgaggagcaatgataagggcgggtgtggtcagcttcgaaggcttcaaacgtggaggggccgcgcagatgaagtggcttcgtgcacttggcgtgtacggagctcaatatgtgggaccttggagccacttggacttggtggttgtggcagttaaattggggtgttcacaagtgagtaatcttttttttttgtgatgacgcctagcatgtaaaaatgtgagctatgacacactgatgggttacacattttgcaaaaaaaagaattaaaaa

SEQ ID NO: 278052 - DNA, 438 bp, Zea mays
cccacgcgtccgaaacttcctgacttcgctcccttgagcgtagtaaatttgacaagctgtggagagctattccagggtctcatactcctgaaccatcagaagctggatcatcaacaaaagagaactactttggagaccatcatgacgccagaagtatacatgatggaggatcaagagatacttcttttaggagaacagatcatgggccttctgtatctgttatcagtggtagttctctcagttcagcaaagcggaggtctcctttatctattaacaaagtagccataaacaatgctgcaaatttgcaacaaatgaagactggtgattggcgtgttgaggtgtcagttccaaagcagagtatgatactgctggttgataatgacgagaaggggtccattaaagtctgcagcctaaaagatacaaagagaaatgcatatg

SEQ ID NO: 278053 - DNA, 907 bp, Zea mays
cccacgcgtccgcccacgcgtccgtctagatcgcgagggccgcccttttttttttttttgaaagaggacaagaatagtaccagcagcagcaagcttacacaatccaagcacccaacacagagatatcatcgtcgtctccccagtacgtcccgacccggcacctggttcaaccgggctttggactttggagaggtcgactttgacgaaacaaatttgccaggaaaccgtaacagacgcgtcatcacatcagcaagcagtaggtggaggaaggtaacgcttcaggagatggatgcgggcgctacgagcccccttttccctcttctgctcctcctgctgctgctgctggcggcgtggcggcgccggcgtctcctcctctgccgtagccgagctccgagatctcccagctcgtcgctggggctacctcctggtgcacccgggtgtattgctccatctttgtgagcagctcgctcgcggttggcgccgagacgaatatctggctgcagtcggtgctgatgaaaccctcggcggcgcctttctcgaacagggcgagcagcgggtcgtagtagccgtcgacgttcagcaacccaactggtttgtcatggatcccgagctggcaccaggtgatcatctccagcagctcctccatcgtcccgtacccccctgggagagcgatgaaggcttgggactgacgagccatctcggctttcctctggtgcatgtcgtccacgaccctcacctctcccacgctttcacctgatatctcaataggcctgagcgctttaggaatcacccccaggacatggcagccgccgtgacgaaccgtccgagcaatcacgcccatcagaccgatgctgccgccgccatagacgaggttgatgcccctccgcaccagtcgtggccgagcttg

SEQ ID NO: 278054 - DNA, 343 bp, Zea mays
ccacaagcaccacacaccgggggaaaaagaaaaagaaaacaggaataataccagcagcagctagcttacacaatccaagcacccaacacagagatatcatcgtctccccagtacgtcccgacccggccggcacctggttcaaccgggttttggactttggaggagagatcgactttgacgaaacaaatttgccaggaaaccgtaacagacgcgtcatcacatcagcaagcagtaggtggaggaaggtgagctccgatccgatccgacccgatccgcttcatgagatggatgggtgctacgagccgccttttccctcttctgctcctgcatctgctggcggcgt

SEQ ID NO: 278055 - DNA, 394 bp, Zea mays
agcttggtaaacaatgacaccaaacagttcatcattagttcagagacaggcgctattagggaggctgaagaccggcgtgaccctgtggaaattgcacgtgtgattaaagatggagtaaaacagaatctgaaaagatttcacgaggaagcccggcattctttaattagcacccctgaaaggaagttggctctcattattgatggtagatgcctaatgtacgcactggacccaactcttcgtgttgatcttcttggattgagtctaagttgccactctgttatatgctgccgagtttctccgctgcagaaggcacaggttacaagcttagttaggaagggtgctgagaaaataactctcagcattggtgacggtgctcatgatgtgagtatgactc

SEQ ID NO: 278056 - DNA, 773 bp, Zea mays
  unsure (1)..(773): unsure at all n locations
gcagctacctctgttcaggccaaaataaaaagtattcatgatgtgttggacgatccccgttttcttaaaggggaaccggaggatgtacagttgtccaaggagcaagaggagatgaaaaaggttactgttcaaactgtcagggatgctttgatctcaaagaaagttgaatcaagggagcaagataatgctccattatctgatgattttcctgaagacgagaatgaagaggattttggtaacaggatgcgcgcacaaatccttaaaaaacgtagagagcttggtgatgtttgccctcgtgaaacctctaaagcagataaacctcatcataaggataaggaattatcagaccgcaggtccaatattgaacataggagggacactgatgaggacgatgatcaggagcatgagctccaaaaagctaaaaaactatccttgaagaaaaaaggtgctggctcagaagcgagtgctgagaggatgtccaaagcagatgctaatttgcagctactaaatccagctgaacaagagagacatttgcaaaaacagaaaaaacgtcggctccaaggccgtgaagatgagactctagcgaagttacagaagttcaagtcttctttcctcagtaagaatcttgctaccaatcatgtcgaagaaaagaatccttctactgataaggcggaaaaggaagatgaagaggaggatgactacaaagggtggcacacaaacctactgtctttcttacccagttcttccaaggacggaatggctangaaagatga

SEQ ID NO: 278057 - DNA, 537 bp, Zea mays
gggtacattctcttcctcgactcctcattctcccctctcctagtctttggcgcgtagtggcgaactggagaggtgtacaatcgtccggcgatccggacttcgattggttctctgctgttggtctgatgggaagtaaagacggcaccggtgacatatcggaagcccaaggctatgctgccgacattgattccatcagggaggcgcaggcccgcattgcgccgtacgttcacaggacgcccgttatgtcgtcgacgtccatcgatgccatggtggggaagaagctcttcttcaagtgcgagtgcttccagaaagcgggcgcattcaagatccgaggtgcttcgaattcgatattcgcacttgacgatgagcaggtatcaaagggcgttgtgacacatagcagtgggaaccatgccgctgctgtggctttggctgcaaagctgcgtggcatacctgcgcacattgtcattccaagaaatgcaccagcgtgtaaggttgaaaatgttaagcgctacggtggtcatattatttggagcgatg

SEQ ID NO: 278058 - DNA, 629 bp, Zea mays
agaagctgagaggtgatgcgtgggctggggggggggggttggtggccctgcatgcccctgtttcagcttcggtctcggtgcttttgcttgctctcacagattgagatgctggaggagcacatcttgccctcgttgaatgggctctgttgttgaaggactgatagtgttggtaaaaaaaatgggattgcgcagtgagcgggtgattggcaaggggaaagattgggatggtccagtatgtgaacaggcgacagggatgtggccttaagccccgttgcccatgggatggttgccgggttgagctgaggtggcatgatgacgatgctggttcttgctttgcctagtgcaatcgtggcaccattcttggtcaggtttagaagcagaggcatctctgtgcagctgctgttcacggagctggtgtttttaagttctttgtagtcagtgttgtgttgtaaatcaatcagtgttagtttgagtgaacaaacctatttcttgtaccatgtgcatgacaagcaacgactatagttgctaaagatgatgacgaatcgtgtatgcctcacaggcctatttactacaaaagtgtttggggttggaacaatctgatggagtgatgatcttggatttgtgcgttt

SEQ ID NO: 278059 - DNA, 437 bp, Zea mays
gcgaaaccgaactcggggagaggaaggaatctcctaccagccggcagccaacacccagcattcgtgctcccagtagccgccgtcgtccccagccccacggccgctgcgtcgccttcccctctcggtcgaaaccacaacggcctcttccggcataacaatatgcaccgaatattcagctcatccgctctcctataaaaacgaagcgcaaatccaaaaaaaaaaaaaccccgcccgcacgacgcattgtccgttccgtttggacccatgatatatctcgctgggatcttgaccgtgcgcgagacgaatctcctcgtgcggtaaccgataccccccaagtcaaaaatcagcccataaaatttttatgggcggaggatcacccgtcgccgcagttcacgacgcgagcgacgacggcgccagggtcgtggtgctagtcgcgg

SEQ ID NO: 278060 - DNA, 673 bp, Zea mays
tttttacgcgtgggttgcgacctgcagagagggggggttatctgagccctaggcaccaaaaaagaaaagccgagagacaaggagaaggcacattattatggatccgggccgcctagccggtggcgcaacaccgccggaagcgtggcgcgctgcagcagcagcagcctgagcctgagcccggtgctcctggcggtcaccctggcgctgacgcccgccgaggccagcagagccatgccaacgacgaccaccacgacggccataggcggcactactactaacagcaacgacagccagcagaagcatggtcagagagctgctgccgccggcgtgaacgccgaccagaagaccttcctgccgggctacgtcggcggcgtcggagggttcgctggcgccggcgccggcctcgggggcatcggaggcgttgcgggaggcattggcggtatgactggcggtggcctcggaggtgtcgtcggtggtggactcggagggtttggaccgcttggtggtgctggaggcggatcaggccttggtggcgggtcaggtctcggcggccttggtggtctcggcggcggcggcggccttggcggtggcggcggccttggtggcggctcaggatcgggtctgggccgcagcggcggccttggcggtggcagtgggctcggtggcggcggtg

SEQ ID NO: 278061 - DNA, 747 bp, Zea mays
gaatctcctcctttgaaacaaagcgttgcagtttttaaggaatctcctcctttgaaacaaagcatttcagtttttaaggaatctcctccactggaggaaactactcctaaagaagctgttatgctaagtgaccgagggcttttcaatgtgcagaatcatcaattatcccatgtaacagaagatgttcagaatatgaaatcaaagctcaacaatcttgaatcaaaattggaagaggctgaaaagatgataataaggctaagagaagagagcagaaataccacccaggagcgggatgagctacagcaagaaatggtattcctaagaaagaagggaaccccaaggagtcaaatgggtttccccctgctctttgtggtgtacgtggcgcttcttggtacctgtatcggttacctgctccgcatatgagttccaaacttcaaaaaagttcagcagatgggatatgcttcgtatgtgggcaagacaattgaacggcagttgcactccaaaatgttgaggggtgaatttattagcattattagttcggaacttcatatggttttgcacataacagcagtgccaaactaccatctgcctgtatgtatagaacagttactttttttcgcgttttatagaacccacccaaaagatgtctgctgcctcgtagactaacctgggattcttcttccatctacctaagattttttttacactttactggattcgcttgccctgaatcggtattggtctttt

SEQ ID NO: 278062 - DNA, 1608 bp, Zea mays
cccacgcgtccggcaccgcagagccgcagccaagcaagctgcgcccctggacttggcctcaccggtgaagcggagcttgaggataggcggtgctcgggagataccaagcggtcggccgcaggcgccacgtcggcggagatgacggacggtcaccacttcaacaacatcctcctcggagggcgcggcggcacaaaccctggtcagtttaaagtgcattctggtggacttgcatggaagagacaaggtggaggaaagaccattgagatcgacaaagctgatgtaactgcagttacttggatgaaagtccccagagcatatcagcttggagtcaggattaaggctggcctgttctacagatttattggcttccgtgaacaggatgtaagcaacttgaccaacttcatacaaaagaatatgggtgtcacaccagatgaaaaacagctttctgttagtggccagaattggggagggattgatatagatggaaacatgctaacctttatggttggttcaaagcaagcatttgaggtgtccctaccagatgttgcacaaacccagatgcaaggaaaaacagatgttctcttagagcttcatgttgatgatactactggagccaatgacaaagactccctcatggatttgagttttcatgtgcctacttcgaatactcagcttgctggggatgagagtcgccccccggctcatattttatgggagaccatattgaaattcgccgatgttggtccttctgaagaaccagttgtcacatttgaaggaactgcgatccttacaccaagaggacgttatagtgtctgaacttcatcctgtcatttctgcgactccaaggacaagctaacgattttaaaatccaatacagcagtattgttcgcctctttcttttgccgaagtcaaacaatcctcatacatttgttgttatcactcttgatccaccaatccgtaaaggacaaacattgtatcctcacattgttattcagtttgagacagaggcagtagtggaaagagatctggcattgagtaaagaactgttggttgaaaaatacaaggacaggcttgaggaatcttacaagggtctaatacatgaggtatttaccaaagtccttcgtggtctatctggtgctaaagtcacaaggccaggttctttcagaagttgccaagatggatatgcagttaaatcatctctcaaagctgaagatggactgttgtatccactggaaaagggtttcttcttcctgccaaagccacctacactcattcttcatgaggagattgagtttgttgagtttgaacgtcatggtgctgggggtgccagtatatcatctcactattttgacctccttgtcaaactgaaaaatgaccaagagcatctcttcagaaacattcaaaggaatgaataccacaacctcttcaatttcatcaatggaaagaacattaaaataatgaaccttggaggagatggtcaaggtgcaagtggtgtagttacagatgttctacgagacactgatgatgatgctgttgatccacatctagagcgtattaagaatcaggccggggatgaggaaagcgatgaagaggatgaagatttttgtg

SEQ ID NO: 278063 - DNA, 469 bp, Zea mays
agcactcgcccgacctgttcgaaagcttcggcaggcgcgcggccgacgcaggaagagcgcacgtcggcgggaagggcaaaggcgtttgcgtggcagagaacgacgcgtgcgagcgagacggtggtgcggtggagagatcgaaggtgaggagtggtggttggccggtccatgggatcctgaagaaggggatccacggcctggaatcactcaagctcaggtcgtagctggtggttttcgtttggcggggctctggcgatcatgtttagagttcagtggcagtgtagtcatgcttattagtggttagcttgtgtgtgagttgtttgcgattcatctctgtgtctgtgtgtgccgagttggttggtttgcaatttttgtcatgtgtgtaaagccttgcacgccgagcaatgctcgatggtgtgaatgtatatacagaattactatttggttcaattcaagataaatagtactc

SEQ ID NO: 278064 - DNA, 504 bp, Zea mays
tcgggccggagaccaggacgacggcaggagaccgagaacaagacgcccgcgacgcggagccacgcagcggcgaggctcctcgtgctcggcggcgcggtcgctctggcctgctgcacccttgaccaggggctcctgaccaaggctctcatcttcggcgtcgcgcggaggttcgtcgggcagaggaagacgttgtagcgtcccacacaccttgtcgctcgtacggtcgtgccgtgtgctgatcgccgacgtcgagaagcgggggaaggaggtggtttgtgtgggctttgtggatgtgtaattggtgctgatgccattgtggctgaaagagagcggacgaagagcgttttggtgtctacgtgtgtatacgctgccggctgtcggatcacgagggagaggggtttcctactatatacatgtgtaaaaatttgtttcatgtaatcttgtatctgagtgaccagatcaggtgattatgcagatgagaagaacagagttttttttcggtct

SEQ ID NO: 278065 - DNA, 834 bp, Zea mays
cagactggctccgagcctccgagtgagtccgtggttccaaccagcatcgcattcttcctgctgctcgcctgctccagaatgttcccctccagctccgccaccggcccccgcttccttcgccccttcaccgccaccgcaccccgccgtgccatggcggcatgcacgggcgccccaagcgacccgccgatgcagcagtcttctcccaccaaggcggtgcgcgtggtggtgaaggggcgcgtgcagggcgtcttcttccgggactggaccgtggagatggcgcgctccctggggctcgccgggtgggtccgcaaccgccgcgacggcaccgtggaggcgctactctccggggacccggacaaggtggacgagatggtgtcccggcggatccccgtcggcccgcccgccgccgtcgtcaccgctgttgtaccctcccccgctgaaccggtctcccccgacgagggcttccaccgcaagcccaccgcctgatttatggctggttcgtcggccatccgtggggcgtggtcattggcgagcggcgccactcgcctgtggtaatcaatctactgaagaacactgaagaacacgtacattcttttcctggagattgctagcgctaatttatggtgttgaatcaaataatcgcaatcttgacgaggagctgcttcgatgagtggacaaggattgtgactgctcgatacactcggttcttgtgatcatgtcttatgcagacctgtgaactgtggtgtttctgacaactatgccgtgcctgtaattatctactatgttccgagagaaacggttatgtatggcttccccgcgcttactttgctttaa

SEQ ID NO: 278066 - DNA, 460 bp, Zea mays
cccacgcgtccgcggacgcgtgggatgggaagcaaaaggcttctatacgaagcgcttattgagcctcgcagccgtccgaggaaactcaaggggtcaactggttcagcagcgccttagacttagatgggcagtttgctggccgttgatcttctagacatgaacagggtagctcgctgaccgcgtttcctcaagcagagtaggctgcgtttacctagaaaacctagttttggctggttacttgcatgatggtcgaccgtttcagatggagtttgacagcaaacccgttgtgttaaccatgcgtggcgtatcagccgatgtttcatgcatgctactgtctttttctttggttggtttcgtaccatagatagacgtgtgtagcgaccatcgatggaaagaaaccttgcacatctggacccccatgcatctcagttattagcccctgctgttgcacatgcaaaaa

SEQ ID NO: 278067 - DNA, 347 bp, Zea mays
acgcccacgcgtccggagccaaagctagctagctcctctcggtgcacgatcgagttacgagtacgagcacacgtcgccgttcctaccgttgccaacaagcaacagagccaagaaatcagtcgcgctagagcgagcaaggacgatgctgggatgcttctcgcggctgcggcggccgacgacagcggcgccggagcccatgccggcggcgtccgacgacgcgtccacgtcgacggcctcggcggcgggctccacctcgccgtgctcgtggtcgtcctcggcgcgctgcaaggacgacgaggaccacggcggcggcgcggtgggcaaggacccgtcggcgctgtccgagc

SEQ ID NO: 278068 - DNA, 658 bp, Zea mays
  unsure (1)..(658): unsure at all n locations
ttttcacgcgtccgccgtctctctctcctaacggagaggagagggggcagaagaaaacctcgcgcgggggaggcgcgagaggaatcgcgggggccggaggagcagcggccggtggaggtggcgcgcgcggtggccgtccgagatggagtacatatcccctgagagaaatctggaggggacttgtggagatcctgggccgttatttgccgaccaaggtggcagcttgttggaccacttgggttatcaagggggaggaattccacaacatgagtctccaacactggatcatggacttttggttgatccagctggtgcaattccgtatttatctacagattctccgcccttcatgaatgatcaaatcacctgcaatgttataaaatctgcttcagctagtccagaatcttgtacaaaacaacctcaagaacctcttaatatagaatctgatgtacagaatgacgcagctgaacaaaatgttcacaatagtaactctgaagaacagatcacttctctgggctgtgatgtacagcagaacacagaagtaattgatgaactgttgcctccaaagcttnctgnaagcagtggtaatgatatatcaaactttcanaccgaaactatatattctgatgcctaccatggtgactctttgtaactgaaa

SEQ ID NO: 278069 - DNA, 522 bp, Zea mays
aaaaacgctcgaaacggtacctaaacacaaagcatctaataactagcacatcaagatcgacagaagggggccttgcaaagtcgtcagctgcttgtcgcgccactaccacatgttcttcacctgcccggcttacttcatcagctccggcgccggctccggctaccgcggcgctgtcggcgcgcacgggctcaggttccagaccaccacgtactgccgcgtcgaggtctagactctagcgagcgagaggtcgatcaccgagaccgcccgacctccacgtgctctgctccggccgcgccgccgaggtaggccacaccttgtcatgtcgcatactgcaaagcggaaacaaatgaagtgatacagaggttggaaaaaaagaaaaagaacaagtgtgaggtgatttagtgagggttaaccagtgtatcgttgtgattacatatatgttttttgttttgttttgtgtcgcgatctttgttcaattcagcgttcagttgttcataatataaattctaaaaagttcattcc

SEQ ID NO: 278070 - DNA, 569 bp, Zea mays
ttttctttgcgtccgaacagattcaagttagcccagggtagatccttggaaaagcagttcaaagcaaaggttttgttattgaaagcactacttttacatatacatatatatgaagatgagctttatcaaatcctgtggtgacttcccaagccaaggttaaaatgtgaagtaaggatttcccatatatatgaaactaaacatgaaccctcctcggctaagggggaatcagatatagaagaagcggaagcaggaagctgaaggatatccgcagcgaatgaggaataggacatgcatgtgagctagcgaaaagggaatagcacattctctagggttcgtatcaagcgctcgcaaatggagagggtcaatcgaatccgtatcctcgagcgctgggtctgtcctctaatgaggagctccttgctttcttgatccgtgaatccggatctgtaccttcatctgaaaactattcgccggttgtccgcattcctctcctcgagcgaaaggtgttcccacgcaatcgctatcgctgttcctacgacgtagtcaatacgcattggaataatggcatcccc

SEQ ID NO: 278071 - DNA, 369 bp, Zea mays
  unsure (1)..(369): unsure at all n locations
cgggccgacgcacgcgnncggnnaaaaagcncgaaganggaccccgggccgggccggccggnccgccncacggcgagagccgaccggcncgacccnncngccggcgaagcgccccnggccanaacaggccgggncgngccnccggcgccgnnaccccgaagaaannagagngcncaaagcaagccancgcncgggagacacnagcacgggaaaacancanaggannccggccccaccgggggggccggcgggaccggagnaangannaagagggacagncgggggcaagcgaaaaacacagccagaggcgaaannccggggaccaggaaagacgaacaacngcgaaagcacccgccaaggagggggnca

SEQ ID NO: 278072 - DNA, 1068 bp, Zea mays
  unsure (1)..(1068): unsure at all n locations
aaaaaaaaaaaaaaaaaaaaaaaaaaaaaaaaaaaaaaaaaaaaaaaaagggcggccgttcgcgatctagaactagtcttctggccgaagtcgccgtcctggaggaggaggtcgtccggctggaggagcaggtcgtcaatttccggcaaggactgtaccgggaggccgtcatcaccacctccatggcggcgaagagcgcgtacttcccggacggttaccggagcacgccggcacggcacaagccatctgcaaaaccgcagagttcagagctgtccacctcgacgcgccaaggctccgatcaagatgccgctgattggccgccatctttgaggcgatccaccaatgcgatgcggacaccaagaaggcccggccgttccctgagccaaggcgactgtccggggaaggagaaccagtcgttcggcagtggcactaactcgtgcagagagttcggcctggcgcccttgagtatcgtgccaggatgcagggtagtacaggtaggcgccgagacacgcgcaggttttcagacaaccagtgcagtggaagaccacaaagctgttgagggcagcaatggcactggtccaggcaaggcctccacggcggcgaacgaagtctcggaggagctactggcgtgcctgctggccatcttctcgcagaagagcgcatccagcggccaggacgacgagcgggtgtcgccgccgtcggtctccggctcctgcggaagcagctcagcagacccctacggtgtcccagaattcgggtggcgggacgttggccggtacaagcagttcctgtcagtcgacacgaacatttctgccggcgacgactccgctcttgaccagagactgaaggcgctgctcaggaagctctctttggttgacctagcaggcctctcccaccagcataataggctggcgttctggatcaacacctactactcctgcatgatgaacgcatttctcgagcagggagcgcctagcgacccccgtatgctggtggccatgatgcccaaggcgaccatcaacgtcngcgggcgcgtgctgagcgccgtggcgatcgagcacttcattc

SEQ ID NO: 278073 - DNA, 522 bp, Zea mays
cacacgcaagagatctgtcataccatcgctgaacaagcttgcgtgaaataaatttgctggtcaccagcagatcccagggagaacaaatagaggcagcaccagctacaggtgtattttcaccttcttcgcctagagacttgaccacaatattggcacctatgcttgtcccaacagtgaatagtggagccttaggatactcttgatgaaggaaactaacaacttcacgcatatctgccgtccacccggcattgtaaacgcaatcagatgttgtggagctgccaccaagacccctgtggttgcttacaacaacattccatcctttgattgccatagaaaagaccaagtgcttcacataagcagcactagaatcactagttaatccaggtatcacaacaagaaggggtgttgaatcatccttagaaatggttccgtcagaagtgccaatatctccatcttctagatcagaagctagtaaccaatctaaggcaatggtaccgcttccacgaacagtgtacgactgct

SEQ ID NO: 278074 - DNA, 453 bp, Zea mays
  unsure (1)..(453): unsure at all n locations
gacgtcctcccctcgcgagcggcgtgcatctcaccgcgtgcgtcagcgcggcgtgcgaactaaccctagtcccggggggccagcggcgcgaccagcggtgcagccaaatcgaggaaggagttgggcagtggcgcggccagcatctccacggcgcacgggtgctaccagttcagtaggcaggcgagaggaacgcggtgctgcgacggctcggccgctcggcgcctcctgcgtgctgcgcagttctgtataagcgcagagcagcagagcagacaacactcagctacaacaggaagccacatggtgttgaatgctgntatctgttagactttctgagtaggctaggttagataagatatcattgtttttgacaaaaaattctgggttcaggatcaagatgagtagaaaaatatatggtgaaaatgactctgagagaattgctagtgatgggacagc

SEQ ID NO: 278075 - DNA, 703 bp, Zea mays
ctgttgttaatgttccttcctgacccacatggtgtttatttgtagttacttgatgattgttgccgcacttgtgtgactgcattacttgttcttgcatcacttgttcactagtcactgcgcccgaacattgagatatgagttttgttactaagaaagatgcaataaaggttctgtcctgtcttccatgctgcacctgtttcacattacaccagcacgttttaaacaatatacaaggattatgtcccacagtgctcatgaaggacataatggatgagaatattttatttcaacttctgctgttatgtctttctataatcttttaaactagtctcacttgctctatattcttaaaagctgctagcgatgtgtatcatctttattggttcttgacacctctaagctgctcattttgtagtgtgatctggtggccacttggaaagcatgataaactaattagcattgatgaccgaaatatttttctttggaacgtagacatgtcaaataaatcagctaaggtgatctcacagggatcagctgacatgcttccaaatttgagtggtggggcttgggatccacacaatcataattcaaattgcgtcaatatctgattcatcacttcatttgtgggatctacgttctatggaaaaatcatctgcaattgaaatgcacatatacgggatgtggattataaccccaaaaagca

SEQ ID NO: 278076 - DNA, 456 bp, Zea mays
cggacgcgtgggcaacaccagcttctctaaagatcacaatgatgagagccctggcggtggtggccatgctggccaccgccttcttcgctgtgcccgctcgcgccgagcagtgcgggtcgcaggccggcggcgcgctgtgccccaactgcctgtgctgcagccagttcgggtggtgcggcagcacctccgactactgcggcagcgggtgccagagccagtgcagcggcagctgcggcagcaccccgaacccgccgagcagcggcggcgtggcgtccatcatccccgagtcgctcttcaaccagatgctgctgcaccgcaacgacgcggcgtgccccgccaacggcttctacacctacgcgggcttcatcgcggcggccaacgcgttcccgggcttcggcaccacgggtgcgcccgacgtgcagaagcgcgagctggcggcgttcctggcgcagacgt

SEQ ID NO: 278077 - DNA, 449 bp, Zea mays
  unsure (1)..(449): unsure at all n locations
cccacgcgtccgggacactggaacttaccatgaaaaaacaatatctacttcagaggacacagtacaggataatttgacagaggatgagccaagttttggtagtcaagaagtcctatgatgcagagtcaacagaagatactaagcaaagcatagctgagaatattgcagaagtctctgatgtggcgattgttgatgacgcaattgaacagaatgtgctacagactgaggatatcgttcaaatgcataaacaggagctggaacgagaagaaacagacagaatagaacctgttgaatcagaggaagcttctgatcagaggaatgatgcaccattcgattattcagctcgagaagataatacataggaaagtgagatacagcagacagaatcagcaacgganacaaatgaaattgaacccactgaaattgaagcagttcctcgagaaaagcat

SEQ ID NO: 278078 - DNA, 568 bp, Zea mays
tcgtctcactagctgaagagcggcggcagcaagccagcaaggctcctgtgaacccgaagtgccgcaccgccgctgttgccagaagttgcctctccttttcgtcttgtttctcctccaccccggcgacgcgaatggagaagggcagtggaggcagcaatcctccgccgccaccgctccacatggaggacttccaactggaggggaagaagcccgtcaagaacccctttgtgcccatcggcgcactggttactgctggagttctgactgctggtctgatcagtttccgatatgggaactctcagctgggtcagaaactgatgagggcacgtgtagttgctcaaggcgctacagtcgctctgatgattggcagtgcttactactatggcgatcaaatcaagctgttcaagaaagggtcgagcccatgatcttcccgtgaatattgctggttttggtgtatggaggaatgccttgtatacgcataaattttacctggactctgctgcccctttttacatcattttggcctgacacgtggtagctaacaagaaatcgcttgtggtccgatcgg

SEQ ID NO: 278079 - DNA, 443 bp, Zea mays
ctcactggagagatctgcttggacagtgactcgtagaaaatcctgagaggctccctctcctccggaggatcgaacttctggccgggcaaggagtagaccttcttgtcggccttccctctacctctacctctgctgctgctggtggtggttccacgcttggtagctgccgcagctggggaggaggaggaggagaatttccccttggcctcgaatttggcagatccggctgcggatccgattgccgacttgcctttggccagcgcggaagacgaagacgacatcgccggccggggaggaagaggggatgtcaggcgtgggttcctgagctaaatcccacgcacgggccacggcagcagagcagccgagcccccgctccacatggaggacttccaactacacgtgccctcatcagtttctgacccagctgagagttcccatatcgg

SEQ ID NO: 278080 - DNA, 814 bp, Zea mays
ttccacgcgtccgcccacgcgtccgggcccgtgctcgcctggtaaaagtgctagggttcttctcgcccatcgcagccgccgccgcggctctcgcctcttgactcgctctcgcctctcggagcaaaagctgtgtccgctcctcctggtgatcccggagccagtcctcgccgcaccgcgctgtgtctgctcctcctggtgatcccgcaccgtgctgtgtccgctccatcttcctccgccgccacactcagcgccggtgaggactaccctcttcctcttcctctccttctccctcaccctctccctctccctgtggttcactaccgggtcgtcggcgaagggcgaacgacgccatgccggcggatccatgtagggctccactaaagctggatccgtggagggttggattctctctgtagggctggatccagggagggagtgcacggcgctcgtcgcccagctcgaggtgcgagggcatgtctacctacccgaggacctacgatctcatccatgcggactcggtgttcaccctgtacaggaacagggagaagatcctcctggttgtcaagacgtattggactacccatgaggccatgaccaagatcagtagcaggactgtcaagtaaaattctcaatgttgataagaatttttcatgtttggagttgtaccaccgtttctagctccttgaactagtgatctcttgacggtttgtgcttgctgttctttctggacagtacttgctcggataggaaatttaacatgtggggggaaggaagggtaggtagtaagacccctggcccctgcaaagttttcttc

SEQ ID NO: 278081 - DNA, 486 bp, Zea mays
cttcggtcttcgtttcgcggacgtttctacggaggaaggtccatccttctccctcctaggctccgtcggtctctctctttccttatccccggcccgtggcccgtgctaacggcgattagggttccgaatcgtgtttaagcgctgcgaaatcaccgctggggcttcgtcctcgagtcgtcgtcctgctggatgtcacctcgtgtcccgcgccgacgccagtgcccgtcctcggagccgcctctctccgacgatcgccggagacggatacggtcgaagccgtcactgcaggccgcgctcgtgcgccgtagcagatgtctagtagctccaacggccattatcctgctaatggtgcaaagattcttcatagaaaagaaaagaatatagagaaagtacagctcgaccaaaattcagccacttgggtgtgccagaaggacaggcattatgttgaaaaattagaaacagaattgatgaactgctatcaggaaa

SEQ ID NO: 278082 - DNA, 426 bp, Zea mays
cccacgcgtccgcccacgcgtccgcagcatcggccactaccgcccgcccagcgctcgtgaacgaccatggcgtcccaggccatcgagagccaccgtgccggcgctgaggtcgtcaccggaggagacgccatctgcaggaagaagtcaatcgagctgctggaggagctcggcctccccaagggcttcctgcccctcgtggacatccaggagttcgggtacaaccgcgtgacagggttcatgtggctggtgcaggggaagaaggtggagcacaccttcaaaaagatcaagcagactgtgtcgtacgccactgaggtgacggcattcgccgagaagggcaagctgaggaagatcaccggcgtgaagacataggagctgatgctctggctcagcgtcgtcgaggtctacgttcccgaggcctcaccagag

SEQ ID NO: 278083 - DNA, 288 bp, Zea mays
catcgcctcctaattcctaaagcagcatcggctactaccactgtctcttgctcacacagctcgtctgtgcagcacatagctagtgaacgagaacgaccatggcgtcccaggccatcgagagccaccgtgccggcgctgaggtcgtcaccggaggagacgccatctgcaggaagaagtcaatcgaactgctggaggagctcggcctccccaagggcttcctgcccctcgtggacatccaggagttcgggtacaaccgcgagacagggttcatgtggctggtgcagggga

SEQ ID NO: 278084 - DNA, 546 bp, Zea mays
cccacgcgtccgcggacgcgtgggttcgagaacccgcaagcaacctatatagcccgccgcgaattccgcctggcttcctcgtcgcccgcctcgtcgtcgcgccgcagtgagaggagggggaggcgatggatctcaacgaatgcgagaggagggggccggcggggccggatccgctgtcgaggcaggggtcgatctactcgctcacgttcgacgagttccagaacacgctcggcgggatggggggagggcttggcaaggacttcggctccatgaacatggacgagctgctgcggagcatctggaccgccgaggagagccaggccatggcgtcggcttcggcctcggcctcggcctcggtgtccgcgctgggggcagccgtcgacggcggggcggcgctgcagagacaggggtctctcgcgctgccgcgcactctcagcgtcaagacggtggacgaggtctggcgggacttcgtgcgggaggcgccgcccgggacggctggcggcgaggagccgcagcccaaccgacagccgactctcggggagatga

SEQ ID NO: 278085 - DNA, 498 bp, Zea mays
acgggcatcgaccaacgagagagccatggccatcatcatctgctcctcgaagctatcaggaacactaacagaatcaatgttggacccagccagagtggatgaattgtcaacaccagcctccgctgtaccatcagattcagcaatactggtcccagcctcggccacctcggaccactggacattagaattagaatactctgcagcctctattgttcggtgtgtattgctggttggtggttcctcaactctggagtccgaagaactgctcccagctacactcagatcctgtgtagtggatctgtctggtctgctaagggtgccaaaccttattgtttggcaaggtgatgcgctagaagactctccatgcatatgctgctgttcagctaaagctgcgactgcacaagcaaatccaccagaagaagctgcttcagcggtcgttgtcatatcaccatcatcaaaaggccttgaaggaattgatgacggtgtagtgcttacaca

SEQ ID NO: 278086 - DNA, 429 bp, Zea mays
ctatgacggacatgtggtaggagaaaaggagattgacagcaggctaattcaggaaaatgatgtgatcaaagtagtcccaggtggaaaagttgcttctgatggattcgttatttggggccagagccatgtgaatgaaagcatgattactggagaatcacggccagtagcgaagaggaagggcgatactgtaattggaggaacagtgaatgagaatggtgtgctgcatgtccgggcaacatttgtcggatcagagactgcactggcacagatcgtaagactagttgagtccgcacaaatggcaaaagctcctgtccagaagttcgctgatcagatatctagagtctttgtcccactgggtatcgttctctctttgcttacttggcttgtgtggttcttagctgtgagattccatggttacccatacttatg

SEQ ID NO: 278087 - DNA, 725 bp, Zea mays
  unsure (1)..(725): unsure at all n locations
gaatggactccatggccagcgagcgtangtaatcaaggagcagcagccaagccgaagccgaagccaccaccgctaccgctgtccgtgcgcctccagctggccgggctgacagcggccatcgacgccgtggagcgccgcgacgggacggtgaaccgctgcctgtacggcgtgatcgaccggctcctgagcgcgcgcgccagcccgcgcccggacgcctccggggtgcgctcctacgacgtgaccatggacgcgtcccgcggcatctgggcgcgcgtcttcgcgccggccgcggcggaccgcccgctccccgtggtggtgtacttccacggcggcggcttcgcgctcttctccccggccatcgggcccttcaacggcgtgtgccgccgcctctgcgccgcgctcggcgccgtcgtggtgtccgtcaactaccgcctggccccggagcaccgctggcccgccgcctacgacgacggcgtcgacgcgctgcgcttcctcgacgcccgcggcggcgtcccgggcctggacgacggcgtgcccgtcgacctcggcacctgcttcctggccggggagagcgcgggcggaaacatcgtgcaccacgtcgccaaccgctgggcggcggcgtggcagccgtccgcgcgggcccttcgcgtcgcgggcgtcttccccgtgcagccctacttcggcggcgtggagcgcacgccgtcggagctggagctagagggcgt

SEQ ID NO: 278088 - DNA, 564 bp, Zea mays
cccacgcgtccgcaagaacaactccaactcccatctctcactacggcaacactttgcgagctgagccatcaaagctcggggcggatggcggggcggcggcagatcaagaaggagtgggtgcaggcggcggcggacgcggcgtcgtggtgcgtggcgctgtcgctggtggcgatgctggtggtgctgtgcacgctgggcgccggggaaggcggcggcggcggcgcgccggtggtggtggtgcgcggcgcggcgctgtcggcgcggccgtgcgaggagatctacgtggtggcggagggcgagacgctgcacagcatcagcgacaagtgcggcgaccctctcatcctggagcggaacccgcacgtgcacgacccggacgacgtcttccccggcctcgtcatccggatcacaccgtccaagcccaggtagatcgatggcgatccatcggtcgtcgtgaaccgaacagaatgccgtcgctgacttgctgcggtgtcgtcaagcaccccgtgatctgcatgccgagtacgtactacggtgtgcagactgcactgcacagggatcggagag

SEQ ID NO: 278089 - DNA, 1014 bp, Zea mays
atcatttatcccattgttcaagttcggagagatgttgtccagaaatacgtggaaggtctttgttgggttatgagatactactatcaaggtgtttgttcatggcagtggttttatccctatcattatgcgcctttcgcatctgatctaaaaggcttggctgaattggaaataaccttttttttgggtcaacctttcaagccatttgatcaactaatgggaaccctaccagctgcaagctccaatgcactgccaaaatactatggggatttgatgagtgatccagattcaccgttgaagtctttctacccaaaagattttgagatagacatgaatgggaaacgttttgcatggcagggtgttgcaaaattgccttttattgatgaaaggcgtctgcttgcggaaacaagaaaacttgaagatactttgacagaagaagagaaattcaggaataggactatgcttgacataatttacgttagagatactcatccattgatcactcagattatcttcctgtatcagaactattaccatctatcaagaacagacccttatgttattcccattgagcctgctgctagtggtggaatgaatggattcctatgtttatctgaaaggaactggtatagtgtcactgtcacttctccagttaaggggttcaatggcattgctcagaacagagttttgaatgctgcctatctcaatcctcagtatcacaaacacatcccagagcctccagcgggggtcatcatacctgcgaagatactgaagcctagtgatttcaaaccctttcctgtgttgtggcatcaagataatagtcgtcgacaagtaagagaaaggcctcaggtttctggagccctgtccggttctctcttaggagaagctgcacaccgactggtgaaaaactccctccagatcagatctggcaatgctgctgggttactttatatgccatacagaggtgcaccctatggccctggaaacagaccaaggcctgctgggccattggggtat

SEQ ID NO: 278090 - DNA, 551 bp, Zea mays
gcgagcggccgccctttttttttttttttttatttatgctgaatgccaagatgagattatgcgaaatcattacatttcggtcacctgcaagatgtcatattctgaaatgaaatacggctacagactctgccccaacacataacgataggccagatgtacaattaacaggcttccggtcctccacggaatgaaatttacagtgctgtcgccgccacccacccggcccccgctcgtcagcgaactgcgatccttttcgccttggacgatttgtgtctgatgaagagagccgccagcatgcttttagtgccaacaggggccttttggatcgcacgacctttggggttgtcgaaggaatggaatgttgaaagttcctttacaccagatatgttcttagcgccaaccttctgcgtagtgtcagaactggtgctcctgttgaactgcagcggcctgcgcataggagaagcagaccgctccttacctgatgaaggttttgatggtgccgtgtccactagggcaaatgtaggcttatgtgcgtttgctttggtgctgtt

SEQ ID NO: 278091 - DNA, 632 bp, Zea mays
caccgtccaagaatcggcgctgatgctgaacacgcggtggaaggtgttccggggcgacacacccgccggcgggacctcatgttcagcgtcgtgaagccgtccgtgatccagctgcggggccccaccaaggtcagcgtcttcctcgccagcaacgacgccgagcaggcctgcgacttcaggatcaccggcagctaccacgacggcgcctgcgctgtctccctcggcgactccgacaccgtcatcgccaagatcgaccggcggttcagcgtggtcagcgcgctgctggggaagaactcgtacagcgtcaccgtcaacccggggatcgactacgccttcgtcgtcgcgctcgtcgtcatcctcgacgagatgcattaccagcgatgacacgcacgcttcagttttggttccaagccgcgcgccttcccttctgctgttgcgtggaatcaacgctcgccccgttctccaatgtttgtcgcccgatagttcatagagagatacgaggatcttagccttcctaggcacttggcagttccatctggccgtgtactctacgcggactctatatgttaaatacctatgctatttattgtacacttaaatattctacgtattttagttttatttaatttatt

SEQ ID NO: 278092 - DNA, 579 bp, Zea mays
aacactgcatgtgttccgtattgtgaggccattttaaggaatgcagaaagatgtgtctgagtgaggaagatttctgctctgaagaggagcacatttctccaataaatttcaaatcgctaataattcttgatgagcgaggatttcaagcacacattagacgcatagtagaaaatagctgtgatgcaactgatgtcagaagaaatatcgcaatgctatgtcatataatttctgaagacggctgaagttctctctttaccgacttgtcgtcctacgagttcctacaatcagttggtagcaggtgtctatatatataatatgatggaagcagagaagaatggaaacattcttatgcaaaagtatgaggttggaaaattattggggcaaggaacatttgccaaggtataccatgctaggaacatagagacctctcaaagtgttgctatcaaggttattgacaaggacaaaatttttaaggttgggctaatggagcagatcaaacgagagatatcggtgatgaaactggtgaggcacccaaacatcgggcaactttatgaggtcatggctactaaatcaaagata

SEQ ID NO: 278093 - DNA, 1289 bp, Zea mays
caccggcacacggctcctccaggatcgagagctgtagctgcaacctgcagcagacgcatatgtccgtagccgccgccgccgccttgggccgcgccgatgagctccgcgcgctggacgacaccctcgccggcgtccgcggccttgtagcgtctggtgcgaagcaagttcctcgcatctttcgcgtcccctacccggaggagctactccaccatgaacaaccgccagcggcggcgaccgtcccggtgatcgatctcagcggcgaccgcgcagccgtgatcgacgccgtccgtggggcggcggcggggtgggggttcttccaggtcacgggccacgcggggcccgagcaggtgatgtcagcagccgtggcggcgatgcgggcgttccacgaagccgacggcggggagggcagcgacaaggcgcggctctactcgcgagagcccgggagggcgctcaagtaccactgcaacttcgacctgtaccagtctcccgtggccaactggcgcgacacggtctacctgcggatggcacctgaccctcccgccgccgacgagctgccggagatctgccgagatgcactgtttgaatacgccaaacaagtgaaagatttggggcacaggttgtttgggctgctctccgaatccctcgggctcaacccgagctacttgacagatattgagtgcgaccagggacagattatacttgggcactactaccctccatgcccccagcctgaactcgccattgggacaagccggcattcagactccggcttcctgaccatactactgcagagacgaagttggcggcctccagatcctccatgatggtcagtggggcggacgttgcaccgacgcctggagcattcatcgtcaacataggggatctcttgcagctggtctctaacgacaagttcagcagcgtcgagcacagggtggtagccaagaatgctgaagcaagagtttcgatcgcgtgctttttcagcacccatttccatcccgcttcgacaagaatgtatggcccaatcaaggagctgctgtccgaggagaaccctcctttgtatagggaaacactcgtgagagagtatgttgcacgttactactctgttggcttggatggaaaacataagactgctctagctgatttcaggttgtgaattctgaacgacatcttatttaacagcaagatgcaaatgttggggcggtatgtatcgtgtgataataccaaggggaagattagctgcttgtaacattccctaattaatgtaaatttatgatcgatcgccacaacag

SEQ ID NO: 278094 - DNA, 471 bp, Zea mays
gacgcatcgtcatcattcgagcagaggggagagagagagagagagagagagagatgaaggagggcacggcgaactgcatcgacatcctcatcgccatcatcctcccgcctctcggcgtcttcctcaagttcggctgcaaggtcgaattctggctctgcctcctgctcaccttcctcgcctatctccccgggatcatctacgcgatatacgttatcaccaaggactagccagctagcgccgtaaaccgggacaaggtgagagagctagctgatcagccagcggagtaatggagatgaactgctgagatcacttgccctgctgctcaatgtttctgaatgtaaagttcgtagcacgtacgtacgaagtgtgttttggatggagactgaatctcagctgtgctgtgctgtgatgctgctatatagcttgtgccgcctgttctctattcactaaaaaaaaaaaaataaccttcac

SEQ ID NO: 278095 - DNA, 470 bp, Zea mays
cccacgcgtccgcaaacaggagacgcatccagcctccagcagagggctccagagatcgagcaagatgaaggagggcacggcgaactgtgtggacatcctcatcgccatcatcctgcccccactcggcgtcttcctcaagttcggatgcaaggtcgagttctggctctgcctcttgctcaccttcctcgcctatcttccggggatcatctacgcgatctacgccatcaccaaggactagcgcggttccagttgggtgagagctgcaggctcctccttctcttctcagctgtgaagctactactactagtctactaccgattggtgaacctgaacctgtcgcttcgttcgtgtccttcgatcgctctctggttatattggtcgtggatcttgttaccgatttatttatcgtacagtaacttgtaccatgtgctgttctgtatttattcagtggtccgcgtaaaatctgcctc

SEQ ID NO: 278096 - DNA, 462 bp, Zea mays
  unsure (1)..(462): unsure at all n locations
cgcatcgtcatcaatcgagcagaggcgagggagagagatgacggagggcacggcgagcggcggcgacatcctcatcgccatcatcctcccgcctctcggcgtcttcctcaagttcggctgcaaggtcgaattctggctctgcctcctgctcaccttcctcgcctatctccccgggatcatctacgccatatacgttatcaccaaggactacccagctagcgccgtcataccgcgacaaggtgagagagctagccgatcacccagcggacgtaatggagacgaacgtactgctgagatcactttaatttgccctgtcgctcaatgcttctggatggagactgaatctcagctgtgctgtgattctgctatatagcttgtgccgcctgttctctattcactagtcggtgctcccgcgtaatatttctctcagactctngtgctatagtatgtgatgcatgcaaa

SEQ ID NO: 278097 - DNA, 627 bp, Zea mays
cgtattttgcatatagacgaagcacaatagatatgtctagtcttggagacttgtgggcacttgcacctgtcattgttgtaaatatgcaattggccatggacattattaggtggaactggataatacatgcgtttgtatggggcacaatagccgcaacaacagtttgtctctttgtgatagattcgatatgggttcttccagggtatggggcaatttttcatataatggggactggtctgttttggttgttgctgcttatcattgttgttacagcaatggtcccacattttgtgttcaaggctttcacagaacactttaggcccagcgatattcaaatcgcccgtgagatggaaaaatttgcaaatggcaattaagtgaacccggtggaatttccaaccagaggactttcatgacaatagtagggaaactatagtatttcgttcttttcttattttcacgtctttcccccctactggtgtgaataggagctgattcatttagctgtaaggtgataggtttaatctctaatgtgcatgtatgtattcgtataaaatttacagaaaaggaaatagaagtccacgtacaagttttcatctgcttgttgcagcattattgcaggctaaattt

SEQ ID NO: 278098 - DNA, 383 bp, Zea mays
gtcacggaggcgctccccgggaactccacgcagcagaacacggtgtggcaggcgggcccgctcagcgccggccagattgcgccgcacccgatcgccgggccaaacgtgcagagcaccatggtgctggacttcctgtctggcggcaaaagcacagcgctacccaacttcgtgcaccgtcgcagcttgaggagtttccggggatgaaaggctatcccatgcaacatcgtctagttcatgtctcgagcacagagcagagacatatgtgacgtgtctaaaacatatgtcgtactttatgtattgtaccaattaaacatttaatgaacttaattgatcaaataagttaatggtctgaatgatccttagtttgaatccatgttttgagt

SEQ ID NO: 278099 - DNA, 497 bp, Zea mays
cccacgcgtccgcggacgcgtccgcccactcgtccgcatcaacacttccaatgtctcatagttcatgggtcaaatggccatttgctgaaagtagttctactctacatctgattagcccatgacaacgacagctattttgcagaacgcaatcaccatatgcaatgccacatcaattttcacattgtcctggatcggtctcctttttctagtttggatttgttttgctagctaagtagctctcttattcttccagttcataggtgtgctattccctttttcctttttttgtcaagtgctcttcattgattcaaggtcacacaggtttgattctgaggcttgattttttttgtgtatcaactctgcctgctgtgttcttttttgtttttgagatgagttgcggtttgagggagcgataagtatgtacagcagagtgccggcactgtaacatcacaataccgttatctttgatcaatataattattttttgtgtgtacctt

SEQ ID NO: 278100 - DNA, 509 bp, Zea mays
gttcatatatgagcaattaatatttgtgattttgaattgtttgatgagtcatactgtaccttcctataaaatgggatatttaaagttcatgtgaaagttcaatcttgttttctctaatcgtgtgacttggactgttggagaaatgttggctaatttcacttgttttcaggaaataggtggattgctctggttgttgagaagtttgttgaacccgatgtttccttggttccaacactgtcatgctccatcgattattttggagagttgatcagtgggcagaaaccgtggaagaaaagctgacatttgcactcacccgagccctatcagcagcgccggccctggcaggggtcgagcagtgccctcaaccaggcccccagattaatggagcctccctttaggtactaaataacattacgtatatacatgcatatatcatatattgtatatgtatgtctgctggctctacagaactttgaaagacgtaattataagcaaggagaattaggcgt

SEQ ID NO: 278101 - DNA, 589 bp, Zea mays
cccacgcgtccgcccacgcgtccggaatgaaatgagttgatcaagctggcttcgacaagtggcaacctcgtgctatacaagtaatcatgtttttttgtcagtgagttcgtttcttttgtcacctacggtgcatctggctataagaagataagatttggaaataggtggattgctctggttgttgagaagtttgttgaacccgatgtttccttggttccaacactgtcatgctccatcgattattttggagagttgatcagtgggcagaaaccgtggaagaaaagctgacatttgcactcaccccagccctatcagcagcgccggccctggcaggggtcgagcagtgccctgaaccaggcccccagattaatggagcccccctttagcttcaggatcctcaaagaggaagacgtcggcgcgcgcgcctgcctgaagctgaggccggtgagcgtgctgatgcagctcatcacctgtggctcgctctcggtgaaggatcacgggaacgctggggtcgttcagatgtgcaagccgaggttcccgaaccttaggttgctcacctcgccgctgatctcgggcaccatgatgatgg

SEQ ID NO: 278102 - DNA, 396 bp, Zea mays
cggacgcgtgggctggcacatgagtatttttgttcaaactttaacggtggctgtctgttatcagaaatgcgtcaagagagttgagaatgatgatactggtcacaaacactgcactgggcaatactttgattactggtcatgcatcgacaaatgtgtagcatcaaagctctttaagaagctcaaatgatttgtgcgatgtgatgcgacttctgacaaagtgaatcgaatttgcataccttacacctttggaaagtgtatgagctcgtacatcttggaataaaacatcaatttttctttgctagcatgtggactggactgtgcataaatttcatgtgcatgcatctggtgtcaatcttgctcatttacgtgctgttttgtgagaaaacatattatcaa

SEQ ID NO: 278103 - DNA, 464 bp, Zea mays
  unsure (1)..(464): unsure at all n locations
tttttcccctccctcccacacgcaccgccgcgtccgcccccttcgctgcccctgcccggtcggttccgatggggtacgtgctgtcggcggtggcgagggtgctggagcagcccacggcgtggggggcggcccgggagatggcgctcctcgcggggccgctctgggcggcggtcctcctcggcctcctgctcggctgggcctggcgcccgcgctgggcagctggcctcgtcgccgcccccgcccccgccgccgctgcgcagccgcccttcgccacgctcggtttctggaaggcccagctccccgcccgtctccgcgccccgctcggctccgccgccgccgtgcggcacggggaggaggacgaggaggacccgggaggtggcaggtcgtcggaggcggngagcgaggagctggcggtggggaagcgtgacctggcgaacctctggaggctggtggagggcatggac

SEQ ID NO: 278104 - DNA, 667 bp, Zea mays
caagatttttggtctcagcgagaggatctgcaaagaacaaacgtttccgctgaggctgagaaatggtagcaacggagattgtgataccggtgaaataactgtctatgactactatgcaaagaaaggaatcgatctaaagtattctggtgatttcccctgtataaatacagggaaggcaaagcgcccaacatattttccaatcgagctatgctcgcttgttccgcttcaaagatacaccaaagctttgtctacgctacaaaggtcatcccttgtggagaagtctagacagaagcctgaagaaaggatgaccgttctaaatgatgcactgcaacgcagtaactacgattctgaccccatgttgagggcatgtggtgtttcagttgctccaaaatttacccaagttgaaggaaggatccttcaagccccaaagctgaaagccggcaatggtgatgatatcttttcacgaaatggacggtggaatttcactaataggaagttttatgaaacctgctctgtgaataagtgggcggtcgttaatttctctgcacgttgtgatgttcggaatcttatccgtgacctgatgaggaatgcatctgcaaagggaattcaaatggaggaaccttttgatgtgtttgaagagagtccctctatgaggcgtgcacctgtg

SEQ ID NO: 278105 - DNA, 458 bp, Zea mays
aggatatgttgagagtttgtgcacttcagcatggaggaagttgggataaaagtttaccttgtgctgagttctcatataataatagttaacatgccagtctgaagatgtcaccgttcgagactctatatgacaggaaatgcagaactcctctatttttggaccagactagaggaagacagttctttggacctgaacttattcaagaggcagaagaacaagttcgtataattcgagagaatttgagggtagctcaaaccaggcaaaagagctacgctgataatagaagaagaccactggaatttgaagaaagagatcatgtgtacctcaaggtgtcaccacttcgtggaatgaggagattcaaagttaagggcagattgtcccctcgcttcattggaccattctgagttttttaggcaattggagagatggcataccaactcgagttacctgctagtcta

SEQ ID NO: 278106 - DNA, 841 bp, Zea mays
ctggttttgttattacagataaagacttccaaggaaaagctgcacgctcagggaccactgtgacttttgttataatagatggatgggttgtcactgtagcatcagttggcgattcacgatgcattctagaatctgctgagggttcaatatattttttatcagcagatcatcgcctggatgctaatgaagaggaggtggagcgtgtaacagcaagtggtggtgaagttgggagaataaatatcgctgggggtgccgggattggtccactcagatgctggccaggtggattgtgtttatcaaggtcaataggtgatatcgacgtcggggaatttatagttcctgtcccacacgtgaagcaagtaaagttgtccaatgctggtgggcggcttgtcattgccagtgatggtgtgtgggatgcgctgtgttttcaagaggctctgaactacatcaggggtctaccagccgaagctgctgctaatcgaattgtgaaggaagctgtcacttcaaagggattaagagatgatactacttgcatagtagttgacatactacctccagaaaagttaagccccccactaaagcgacctggaaaaggagtcatcaaaactctgttccgtcggaggccctccgatgaaatgtctgaagatcagatggacagaggatgtttagaacctgatgtcgtggaggaaatatacgaggagggctctgcaatgcttgctcgaaggttgaatataaattacccatctggaaatatgttcaagctgcatgattgtgctgtctgccaattggagatgaaacctggtgagggcacctctgttcatggtaacatgcccaagcattc

SEQ ID NO: 278107 - DNA, 552 bp, Zea mays
cccacgcgtccttctacgcgtccggatgaactcctccttgccaagaaaactactacactgaaaaggcgtcggcacgcgggcggtgaggatagcgtagcgtagcgtagcatagcataccgcaggcgctgctggttgacaaatggcaagcttattcccacagctcgcgcagacggagcacggcgtagccggcgcctcccatggcgcgccgagcttcctgttctgccatggcgcaggtgcagccacggcagactcagcctcgctagagacctcgtccggtgttctcgacacctccccacgaggcggaggcgctgattctggcggtaggaaggcccggacgaagcccagggaagacagcgccagcgccagcccagcttcagcttcagctctgcgcactccaaggactcgagctcgaagggaagcaccaagaataggggagggaaaagaggcagaagcagcaaggaggtagaagacgacgaggaggagcccaaggtgtacatacacgtcagggcaaggagagggcaagccacggacaagccacaccttgccgagagg

SEQ ID NO: 278108 - DNA, 451 bp, Zea mays
gtggaatggccgcatagtcacaagctccaccgtagcctggttcggttgcatctgaattggagacgcaaccaacaagcccttgctcaagatgctggtgaatgtattggtctcatgccattttcaagatgctggtggaaagcagttctttcggtggctaccattcataagtagagttctgtcgagatcgttcaacctgtatcatactcttgtatacccgattcccaccggttcatcttataaactgggggcaaatggagaaaaagattggttagggcttgtttggtgaaaaagattggttagggcttgtttggttacaacttacaagggaggtggaggggactggagggaaataaactaatttttcccttaatccccacatttcccttctaaccaaaacaaattattatccctgctctcagtccacaaattgggcgcaacaacttttttaatc

SEQ ID NO: 278109 - DNA, 775 bp, Zea mays
gacagattgattctcaatcgtcagagatagagaaactgtttgaggagaactcagccttatctgcttcttatcaagaagccattgctgttactgtacaatgggaaaaccaggttagagactgtctgaagcaaaatgaagagctccgttctcacttggagaaactaagacttgaacaagctagcctgttggaagtaagcaatatcgctacccaatcagatgggcaaactgaaaacagtatctcaaacccaccacaaatggtcatcgagaatatttctctgaagggtcagcttgtaaaagaacagagcagatctgaggggttgtcggcagagataatgaaactttcagctgagcttaggaaagcagtccatgcacagaataaccttgcacgcttatacagacctgtattaagagacattgagagcaatctgatgaaaatgaaacaagaaacttatgcgacgatccagtgatacatgttgacatgttgtgaaactcagtcctctggcatgggctccacgttaggccttgttcggttaatcccgttacccatggattgggtgggattggaaaaaattaagaaaaggtttgacttagttgggatttaaactcacccaatcccactcaatccatgtggattgggagctatccgaacagacccttactgattttcgttggggatgtatttatctcatgccatcttcaaagatgctggtgcaaaacagttcttttcgtggccaccatttataagtagagttcacgtcgagatcgttgtacttgt

SEQ ID NO: 278110 - DNA, 465 bp, Zea mays
tgttgtgaaactcagtcctctggcatggccgcatgggctccacgttactgattttcgtcgtggatgtatttatctcatgccatcttcaagatgctggtgcaaagcagttcttttcgtggccaccatttataagtagagttcagtcgagatcgttgtacttgtatcatactcatgtatacccgattcccagactggttcatctcgtaaattggaagcgatgtttggatgcctatgtatcaagtggatcataaacatccaaacaacgccttaaaatagatcgtttcgacattattattttcctgcttgcaatccaggctctaacaacttctcggtcttgtttaaaaaaaaaaaaaaaaaaaaaaaaaaaaaaaaaaaaaaaaaaaaaaaaaaaaaaaaaaaaaactaacaaaaaaaaaaaaaaaaaaaaaaaaaaaataaaaaaaaataaaggactgtctttaaaaa

SEQ ID NO: 278111 - DNA, 438 bp, Zea mays
tcgtcacggcggttttgcccggcgacgagatcgacagcctccgcgcagcgctcggtagcgcgctgcacgtcgcctgaaagctctagtacgtatcataatagtacgctgctgcctacgtgctcgttgcgtcgttcggtttcgcgatatcagagtaccacctcttgaagaaagtgtagtagcgtaatgaggcgtgactagtgatgtgatgtattgtactgtattgcaggatgttgcgctaatactgtggtcgatttgcgatgtttgttctgtatcggatgatgtttccttaataagctgctcgaatagatcatgctcaatgtaccattatttacactggagactagacaaaaacaatcgtttgataaaaaaaaaattattaaaattaaaaaaaaatatattaaaaataaaatataaaaataaaaaggtctgcctttttaa

SEQ ID NO: 278112 - DNA, 657 bp, Zea mays
ggcgtcctttttttccgccgggagataaaccgaccggacccctgactgcgacccgcagctgctcctgcttccgatccgaacttctctcgcccgccggttcttcgcgagcaattctcataaatcattgtcctcataacttgtaatgggtggaagccagtatgatgatgactgggtgttgcccagtgccgatatcactcttgttctggttgggaaacttggctatggcaagagtgcaactggaaatagcatccttggacgggaagcatttgtatcagaatattcacatgccagtgttactaatacttgtcagctgggaagcactaccctgatggacggccgcaccatcaatgttattgatacaccagggttatttgatatgagcattgcatcagacgatgctggtaaagagattgttaaatgtatgaacatggctaaagatgggatacatgcagttctaatggtttttagtggcacatctcggttttctcgagaggatgcaagtacaattgagactattaaggtcttttttggagaaaagattgttgaccacatggttttagtttttacttatggtgatctagttggtgaatctaagttgaagaacatgctcaatgatgcgccagagtatttgcagaatgttgatgagctatgccaaaa

SEQ ID NO: 278113 - DNA, 382 bp, Zea mays
ttttgcaccgggagtaaatcgacagcaccctgacctcaagtcctcaacccgcaggccgcagctgctcccgcccgccgcgcaagcgccaaggcgccgccggttcttctcgagcaagagtacatgacttttgagctaagtgtttttcgtgagtatggatgatgactgggtgttgcccagtgccgatatcactcttgttctggttgggaaacttggctatggcaagagtgcaactggagatagcatccttggacgggaagcatttgtatcagaatattcacatgccagtgttactaatacttgtcagttgggaagcactaccctgaaggacggccgcaccatcaatgttattgatacaccagggttatttgatatgagcattaca

SEQ ID NO: 278114 - DNA, 625 bp, Zea mays
  unsure (1)..(625): unsure at all n locations
gtcaaggccaagatccaggacaaggagggcatgcctccagaccagcagcggctcatttgggccggcaagcagctcgaggacgggcgcacgctggccgactacaacattcagaaggagagcaccctccacttggtgctgcgtctcaggggcggcatgcagatcttcgtgaagactctgaccggcaagactatcacccttgaggtcgagtcttctgataccattgataatgtcaaggccaagatccaggacaaggagggcatccctccggaccagcagcggctcatttttgccggcaagcagctcgacgacgggcgcacgctggccgactacaacattcagaaggagagcaccctccacttggtgctgcgtctcaggggtggcatgcagatcttcgtgaagacacttactggcaagacgatcacccttgaggtggagtcctcagacaccattgacaacgtcaaggccaagatccaggacaaggagggcattccaccggaccagcagcggctgatcttcgccggcaagcagctggaggatggtcgcaccttggctgactacaacatccagaaggagagcaccctncacctgggtgctcgnnctcagggtggtatgcagatttttgtga

SEQ ID NO: 278115 - DNA, 423 bp, Zea mays
gaaaggttttcatgatatggcagaggcaataaataacgattgtcaaaaatccttcctttttctttcatttgaaaagtgcataaaaattatattgccaattccattttaattatattcttttttctgaatgggaataaaaaaaagaagaaaattctggttttttctttccaaaattcgatataggctgaaagacaatcagatcttttttctcttcagcgggcagttccatatagaatttgttagaataaaacaagcgggttaaaaaaaaaaactctttttttttatttatccacaaagcaaaaaaggttcttatcaaacccacaataaaatgggaaagaaagataaagtaagtagacctgaccccttgaataatgcctctatctgctattctgatatataaattcgatgtggatgaaattggtg

SEQ ID NO: 278116 - DNA, 797 bp, Zea mays
acggcgtcggcgcgtacgtggacctgatgcagggcctggtctcgggcatgcgcgacggcaccgtccgcaccgcgctcgacaccggctgcagcgtcgccagctggggcggcgacctgctggggcggggcatcctcaccgtgtcgctggcgcccagggacggccacgtggcccaggcgcggctcgcgctgcagcgcggcatcccggccatcctcggcatcatctccacgcagcgcctgccgttcccgtccgccgccttcgacatggcgcactgctcgcgctgcctcatcccctggaccgagttcggcggcctctacctcctggagatccaccgcgtcctccgcccgggcggcttctgggtgctctccggcccgcccgtcaactacgagaaccgctggcacggctggaacaccaccgcgcaggcgcagaaggccgacctggacaggctcaagaagatgctggccagcatgtgcttcaagctctacagcatgaagggggacatcgccgtgtggcagaagtccgccgacgcctgctacgacaagctcaccccggtcaccacgcccgccaagtgcgacgacagcgtcgaccccgacgccgcctggtacgtgcccatgcgctcctgcgtcacggctcccagccccaagtacaggaagctggggctcaacgccacgcccaagtggccccagaggctcagcgtcgcgccggagcgcatcagcgtcgtcccgggcagcagcgccgccgccttcaagcaggacgacgcccggtggaagctcagggccaagcactacaagacgctgctg

SEQ ID NO: 278117 - DNA, 301 bp, Zea mays
gggtcgaccgcgacgcgtccgcccacgcgtccgtagatagtgaactgacaaaccacatcacagttgtgaagtatgaacttgaccctgctgattcctcaaatgctaaccaggagttgatcattgatgggaagcatggtgaagaacctgatcctgatgatacttgtcaagatgttttaaaatctggtaatgggacagaaatgataacagaacagagtggaaattccatggttctgaaagctgaacctgatcctgacgatcatgttggtgactcaaacatcaatgatctgcaaagggttgaaga

SEQ ID NO: 278118 - DNA, 516 bp, Zea mays
gagcttcttcttcttggccttctctgcttcgctgttcttgttcttgagatcgcgctttctgaccggggagtgccgtgccggagatcctgaaaagagacacacaccacacaccacggttgcgcgcgagaagtccgagacatggacagggagcagatgaggatggccatcctgaaccaagaacggatcttcagacaccaggtacacgagctgcaccggctgtaccacgcccagaagcagctgatgacgcagcaggcgcagacggttcctgctccggcggtcgtcgacgccgagccgagaccgagaccgccgcagctggatatctggtgcggcgagagggcgacagcaagtcctcagcagcacatcatcagcttccacgaggccgcagcacctgcggctgcgctggccaaggaatgcaaccttgagctgacactggcgaccggccgggcaagcagcagcagcagctgctgcgacgcggaaaggcgacagggaataatacagcgggctcaggcggcgcgt

SEQ ID NO: 278119 - DNA, 975 bp, Zea mays
  unsure (1)..(975): unsure at all n locations
ggagaatctccttcctcctcttcctcncctgcctcgctagatataacaaaccatgccggcctacttgccagctcgcagtcccagcagagaccagagcctccggaaaccgcagcctcttggcctttgcttcctcgcttatctggcgtacaggctaagctagagagggagggagggagagctcgccgtttccgacccatcggcagcgccggagatcctgaaaagagtgccagctgagtacctcctgctgctcgaattttctcgtgggacagacaattttcagataaggacgtcagggagcatcatggacgacagggagcagatgaggatgaccgtcctgaaccaagaacaggtcttcagacatcaggtacacgagctgcaccggctgtaccacgtccagaagcagctgatgatgcagcaggcacacacgcctgctccggcgacccgtgctccagcagtgctcgacgacgccaaggccaagccaagaagaccgcacctagacatctggtgcagcgagacggcgagaaacccccctcagcaacggatcatcagcttcaacacggccacagcaccggcacccgcgccggcaagggccgaggactgcaaccttgagctgacactggcaacgggacgaccgagcagcagcagcggtagcagcagctgtgacgccggaaggcggcgggggaagcggctcaaggtgtcaaccaactcggactccggcgccaccgcggtgtcgtccacgtcgacggactcggagctggcgcagttcggggacatcgacgcggcgattctgccggtggtcaggtttcagggcgaggttactaggaggatgggcgaggtgcggcagggcccgtggatgtaccggtgcctgagcttgaagaccgcgtgacgagtttgtgctgtatgtagttgtaggtaggacatggggagttgcggttgtagagttcagacttcagaggattgaaaaggagccccctc

SEQ ID NO: 278120 - DNA, 312 bp, Zea mays
ggctagcctcccagtcccagcagagaccagagcttcttcttcttggccttctctgcttcgctgttcttgttcttgagatcgcgctttctgaccggggagtgccgtgccggagatcctgaaaagagattgcgcgcgagaaggggggaaacatcggcttgaaccttcaccgacaacaggtactaaccgaggcatggacagggagcagatgaggatggccatcctgaaccaagaacggatcttcagacaacaggtacacgagctgcaccggctgtaccacgcccagaagcagctgatgatgcagcaggcgcagac

SEQ ID NO: 278121 - DNA, 286 bp, Zea mays
gaaagtatctcaaggtacggcaaatgtcagtgttctgaagctgaggccctttatcatttctggttcaaatttcgaaggatgatctgcaacattgttttgtagtgtttgtattagggagatgcccatcttcacatcaatgttcagaagttatgtgcgctatgagatttaaattatgagctgcacgattgttttgtagagtttgtgattggtcattgtcgtgtcaatgttcagaagcatgctcttatacaactgagttttgtttgcatcagcagattgctgccttgca

SEQ ID NO: 278122 - DNA, 463 bp, Zea mays
cccgctcggggctcgggcatccgccacacggccaccccccacacggccacaccaacactgcactccaccgcggcccgccacagtcctcctcctccgtcgccgtcgttcttcagcggcgccttcgcttccccagcacggtaccctagcatcagcgattcagcgctcaatacaagccaccgcggccatggcgcccgcaccggcagctctctccgcggccaacgccctctcgctgctcgcgcccgctagagtctcctccggaaggtggagcagcctgtccgtctccgtctcagcccggcccgtgaccggggtggtgtctgtcgcggcggccacggcgcagaggaggctggtcgccgcggcggcggcgacggagatggcgcccgcggcgagcggggaagaagggagcaagccgttcgtggaggagatgcgggcggtcgcgatgaagctccacaccaaggaccaggcc

SEQ ID NO: 278123 - DNA, 1020 bp, Zea mays
cgcttgggcgcgtcgctgcactggtcctacgacgccgcggcggcgtccctgtccgtggcgttcctggcggccccgccttccgcgggcggctgggtcgcctggggcctcaaccccagggcgcagagcatggacggcacgcaggcgctggtcgccgtccccagctccggcggcggcggcgcgtacgaggtgcagacctacagcatctccgggacctcgctcggcgccccgggcccgctctccgcctaccggacgtcgggcctcgccgccgaggtcggcggcgacggccgcgtccgcgtgttcgcgaccctcgtgctccccaacggcacgggcgccgaggtcaaccacgtctggcaggtcgggccctactccggcgggatccagatacacgacaccaagggcgacaacatgaacgccaaggggaccctcaaccttctcaccggcgccactcccgccgccagcggagggggcagcatcatcaggcagaaaaatactcatgggatcctgaatgcggtgagctgggggcttctgctgcccatgggagccatcttcgcgagatacctcaagacgttcaggtcggctgacccggcgtggttctacctgcacgtcgcttgccagctgctcgggtacggcgtcggggtgtccggctgggcgaccggcatccatctcggaaacctgtccaaggggatcacctactcgctccacaggaacatcgggatcacagtcttcgctctcggcactctgcagatcttcgcgctcttcctgaggccgaagaaggaccacaagtaccgggtgtactggaacgcctaccaccactcggtcggctacaccgtcatcgtgctgggcgtcgtcaacatcttcaagggcatggccatcctcgacgtggagcagaggtggaagacgggctacatcgccgccatctccgtcctcggcgccgtcgccgtggccctggaggccgtcacgtggggcgtcgttctgaggcggaggaaggaggaaagcaagagctacaacgacacctcaaac

SEQ ID NO: 278124 - DNA, 453 bp, Zea mays
  unsure (1)..(453): unsure at all n locations
cccacgcgtccgccctcgcgtccgcccactcctccggcaggtgttacgtcttttgcgcctctgttacatgtcactgctttctctacatattatacttccgtcctgacaatcctacacgttcctgttcactggcaaaccatatcacggtgtctaacaattcactcatatgatcatctaatacactgttttgcactgtacattgtgcaattcgcagattgaaatctcaatataggtacaacgatgggtaaacactggcgatagctagcccaaagatgaattttagatatattatgtatgagatagctagcctaaagagggagttttagatatattctgtagttgatattcgagtggtcatgcagttacgatccctcatgtttagagataaatgataggaagacaccttgtctttcgntcatgtttaggttgaagtttagaaattacgatgtatat

SEQ ID NO: 278125 - DNA, 440 bp, Zea mays
cggacgcgtgcgcggcgccaccgcgctgcgcgtcgcgatggccgagggccacgcggacgcggccagcttcctgatcttgaacggggccagcgtggtcaaggccagcctcgacgacgacgacggctcaggttcaggctccggctctggcgccgcgcggctagcaatgtcgcccaccgagctgcgcgagctgctgcagaagcgggagctcggccactcgataacgatccacgactcgccagcggtggtcccgaacggcggctcgtcggggcacagccgtccaggcagattacagagcacaagttcggacagccagcgctggcctcgggtgagcgtatacaagggccaccctttcctcagaaaccgcacctctgaagctggcaagctgatcaacctaccaggcaccatggaagaattcaaagtcatcgtcggtgagaaactga

SEQ ID NO: 278126 - DNA, 811 bp, Zea mays
cgagaacaggcatggagtgccttccactggtgccacagatgatggagctctctgacactggaacatccatctgtccctcgaagagtgtgagctttacaacagctgcaaatgtcgacgggttcttgccatgccacctcaacctcagccttgcatcatgtccaatggatgtggtcagaagccaaatccccgatgcaaacgtgaacactgtggatgagaaggatggcccaccggaggtgaccacacccaccatggagaaggacgacggcatgcctgacagatgccatgatgctacccagaaccagaaggaggcttcaggtcacgctggggccgcagcagatgcaacgggtaggccgcatcggggcagccaagctccccctgaagaacatacaggtccccaggtggtggtgaacgacaagttctgggagcagttccttaccgagaggccgggctgccccgaagccgaggaagcaagcttcaccctgaggagggatccagaccacacgcatgcgtacgacgagggcactggaagtgacacgagagatatggggcagctgaaactctgaccttgagtttttctagcatgaccttgagtttttgctggaaattggaatggcacgaaggtctgtctaggattgtgtgtaaacagcatcgcaagaatgccctgtacatattatcccagtatacataccggagacagaagcaatgcgactacggaattgctggtctgttgtggttaatatgtatatggttatacttagttacagcaaagcgaccagtttacgcaagccgcgttgacagaattcgatgtaac

SEQ ID NO: 278127 - DNA, 584 bp, Zea mays
cccacgcgtcggcccatgcgtccgcccccgcgtgttgaggcctccatcatctatctcctctctcgtcgtgctggccgaccggcgacgacctatagctcctgccgcctcacgtcgaacgcgccatggccgccaactcaacagctaccaagcatgctttcaagcgtatattgacgagcctgattaagcctggcggtggtgaatacggcaagttcttcagccttcccgcactaaatgatccaaggatcgataagcttccctactctatacgtgttctcctggaatcagctatccgccattgtgataacttccaagttacagagagtgatgtcgagaaaatcattgattgggagaacacatctcccaagctggctgagatacctttcaagccagcgagatgcattctaatggacaacactggagtcccagctgttgtagaccttgcagctatgcgtgatatgatgccaaagttgggttgtgatccctacaagatcaatccattgattcccgtggatgctgttattgaccatgcagtgcgagtggatgtagcacggacctatgatgcattggatagaaacgaggagttg

SEQ ID NO: 278128 - DNA, 466 bp, Zea mays
ctcctctcctcttcctgtcgtcgtgtgcctgggtcgaccagcgacctggctagctagctctccagctgcgcgcgccatggccaacccaacagctaccaagcatgctttcaagcgtattttgacgagcctgcttaagcctggcggtggtgaatacggcaagttcttcagccttccggcgctaaatgatccaaggatcgataagcttccctactctatacgtgttctcctggaatcagctatccgccattgtgataacttccaagttacagagagtgatgttgagaaaatcattgattgggagaacacatctccaaagctggctgagatacctttcaagccagcgagatgcattctaatggacaacactggagtcccagcagttgtagaccttgcagctatgcgtgatatgatgccaaagttgggatgtgatccctacaagatcaatccattgatttccgtggatgct

SEQ ID NO: 278129 - DNA, 509 bp, Zea mays
tgtagattcggtgcaccaatggtggtcgaatcttgcagcatccgcagtgagaagcgtgaagggattgcgaaccctcatcatcctcgtgtcttggacaatttggtgtgagagaaactcgcgaatctttgagcacaaagagaagaccgtgacacagactatagcgatcattaaggagcaaatccgcctgtggattctaggaggagcaaaacacttagcaaggctggtgtaggttttggggaaggggaggggttggttttggaacatttgtgtcaccatacttaatgtctccttccctagtgtgatgtacttgtatattttagccctcgctggctctcaccttctttttaatataacaggcaattctcttgccagatttttttttaaaaaagaaggcaggaacgtgatactgcccagaggggccagggactccttttagctagcctaaatgcgtgtcactctccttgctgtagctgattgcagcttccatgtgttcctgattgctaaatgct

SEQ ID NO: 278130 - DNA, 374 bp, Zea mays
ggagagagtgaggcgtcgactctagctcgacgcagcaggcgccccctagtcgccacccctgccgctgccaaggagacctcccccgccctgcaaatcatctcacgaaggaggattcgagggctgatgcaacgggattcgagggctcatggttaggatggacgctcctgattccctacgaaggtggtttctattggccctaaacatgattgcgcaagcactagcaaggtgacaggaaaggaagcttctgcagcttggattgccaatagagtgaagcctatgttgattaaaaagccaaggcttggtgcaagagaaatgcagtatatgttggaggatcaattcacagtcactttgtcatataacaaggtctgggaaag

SEQ ID NO: 278131 - DNA, 812 bp, Zea mays
tgatgcaagggtaagccttggattagtttcaccggaagacaagggcttccctaacatacatgtaagaagaatacacagagcactggattctgatgacgtggagctagtccggatgctactcaaggaaggaaaaactaatcttgatgatgcatatgcattacactatgccgtcgaacattgcgactcaaagatcacaacagaacttctggatctcgcgcttgcagatgtcaatcataggaacccaagaggttatacggtccttcacattgctgctatgaggagggaacctaaaatcattgtctctcttttgaccaagggagctcggccatcagacctcacatttgatgacagaaaagcagtgcagatctccaaacgacttacaaagcatggggattactttgggcctactgaggacggaaagccttctcctaaagatagattatgtattgaggtactagagcaagctgaaagaagggacccgcaacttggagaagcatcagtttctcttgcgatagaaggagactctgcgcgtgggaggctactctaccttgaaaaccgagttgctctagcaagaatactgtttcctatggaggcaagggtagcaatggacattgctcaagtcgatggaacactggaattcacccttgtttctagtgtgaatctgcctgccgagatacaacggacagttgacctgaacgatactcctttcacaatgaaggaagaacacctggctcggatgagagccctatccaagacagtggaagtcgggaagcgtttctttccgcggtgttcgaaagtacttgacacgatca

SEQ ID NO: 278132 - DNA, 328 bp, Zea mays
agcttttccaagaaacctagctagctagctagtaagaggcacaggccggcaccatgtcgcaccaccattcccaccacaattctcattctcacaaccgtacccaccaccactctcactctcactccggaggaggtggaggcggcggcggcggtggcggtgccggtggaggcggaggcggagtggctaaatgccactgtgattgctcacaccatgatcattcaccgccaaggcaaccgttcttcccgccaccgcagcttccaccaccacaaatctttcttcctgcaagaccaccgctccctccgtctgggccggtcccattttcgtcacc

SEQ ID NO: 278133 - DNA, 374 bp, Zea mays
ggcgattgaagcagaaaaaatcagtcgccgtagcagcgccgcctccgccgccgtggggaggtagcatctaggcccattccgccgcctccatctccggccagcaatggcttcggcggtggagcggcggagggaggagcacgcgcggagatcgcgttccccagcacggggcagggagcggaggggaacgccgccacgcatgcggagttccccagagcggaggaagggttcgcctgctagggcacggtctcctgctgcgaagtcaagtgcgtcgcatagggacagggagaggtcgccttcgagggagaaggtgaatgagcgtgtcaggtcgccagagtctcctgctaaggtcagcctgttgcacaaggtgagagaga

SEQ ID NO: 278134 - DNA, 913 bp, Zea mays
  unsure (1)..(913): unsure at all n locations
ttggcttcgtactcctctctactctctgccccgccaccaagctcgaccgaccgatgatcctcagccgtctgcatgtccgcgtcacccgccgatcccccgcgtccgccgccctccgcgatgcggcaacgcgcgccttggcctccgcgggcctcttccgtggcctccacggcggcgcctcctccgagcacggccgcgaacccgcaggtcctcttacgctctacaggaagctagtgagccaagggaagctcacgcatgatagttaccaggaaaatgtagcttccgaattagacaacctacttagtaggcttcaacggtacgagatggaaatggaggattatcatgacaagctgtacttctgggagaatagcagggagaaagagcggcgcangcttcttgtcgaagaagctgaagataagcagcgtggtggtgtatggattgatgagagaaggggatttcttgacaagttggttgcgcggagaagaagaggatccatagaacctggagttggtaagtgggtctcgtacctgaaccgagagaagaaactagatacattggtaggccatagaccagtcgctcctgttgctcctaaaggattgtatctctatggaaatgttggaagtgggaagacaatgttgatggacatgttctatggggccactgaaggtgtcatcaaacacaggaggaggtttcactttcatgaggccatgcttgaaatacatgatcatatgcatgatgtatggaagagacgtgatgatgacaaatctattcactcaagtgctttcagttggatatcaagcctttcttgtgacacgaaaattaatgagtggttggttggcgaagagacgtacaacaacagacacaggaatagcacattcttttgggcagtgctgacaagtttttgttgatagacagg

SEQ ID NO: 278135 - DNA, 495 bp, Zea mays
ccaatcccccacgtactatactacggtctacgtacgttattaaccccacctccccactcgcgtcgctcctcgtcgctagcaaagcaacacccgaaggcctgcgggcgcgcggcgtgcggccaggccactcgcgccatgggcaacgctctggcgggcaggcggcgcgcggccaaggtgatgacggtggacggcgccacgttccgctacaagacccccgcggcggcgtgcgcggcgctgcgcggccacccgggccaccagctcctggagtcggaggaggtgcggcggctgggcgtgcgcgcgcgcccgctggaccgcgacgcgccgctcaagcccgggaagctctacttcctggtgcagatcccgccgggcggcgccggcgccggggacgactacgacccgcgcgcgccgcgcaagacgtggtcgggcgcgctgcgcgtgggcgcccgcgagcgcctggagggcctgatgctgtgcttgagcaccgtctaggacgtg

SEQ ID NO: 278136 - DNA, 543 bp, Zea mays
gcctattccagttgatcagtttggtttgcagaagttggtcgacgctataacattcatgatgaaccagaggtgaaagtaaggctgtggactggcgaagcatggaatctgaagacggggtgacaggtgctgttagggcattccttagacacctgccatcaaaagctgaggaacagagtctgccgcagtcatcgggcttcctggaattcttaggcccactaagtaaatgtttgggatgttcttagtgcacaaggcatcgttactattcacggattggcggtgtaccatttcctcgaagcagccacgagttatcgtaatattccatgcaaagaagcttcaggccagtagtgtttctcctcttcttttctgcgggtatttataatgtgtaaagagtgcttgtggtgtggatggtctgcacggatggcctgcatcctgtggtgcgtgtaattttgatgtgcatgtttgccgtgcagcacagacgacgatttcacgtctgcatggccaacccgttctgtatatgaaaagaaacaggtgccaggttttctt

SEQ ID NO: 278137 - DNA, 625 bp, Zea mays
  unsure (1)..(625): unsure at all n locations
cccacgcgtacgcccacgcgttcgcgcactcgtgcgcccacacttccncccaggcgtgcggaaaaagcgggcagattgccacggcctttgtttatgccgcatccaccttcctgctttcttttctgctaggaactctagtgtattctgtgccagtttgggaaaagcattataaatgacctattgcaacttccagattcaacattttaccagatggcttaaatgtgcaatgggaaagagagcatcaacttcctgaacaaagtacaagatacagagccaagacctcaaaggttcacagatgcaaaagagagcatcaacacaaacgtttgcagaatggacccacagaaccatctatatacctggctgggaaaaacagagtaaactttgcttagtagaatatgtagtggcgtggaataatttttgtcttggagaatggagtacatgtatgtatctgtgaactagatgtatcattaatgcatgagatatgcatagatgaatttaattagtgtgggattagctccactttattctcatgctgtctcatgtaaatgcaggacatctagaaatgttttttcttgttactaagacatattaaattaattagtttttgaataaaacatttcctttt

SEQ ID NO: 278138 - DNA, 759 bp, Zea mays
gccatggattgcttcttgtgccccatgtcctgctgcgacgacctcctcgtcctccacggcgccggcggacaggccggcaccggcagctgctgcggctccacggccagcgacgagtacgggtccagcgaggaggacggcgccacgtggggcagcctgtggaacctcgacggcgccggggaggtgtgcacgctgtggtagagatcgattcgctaacctgccgctgccggccgtactgcagcggcaagccgcgcgcatgccgttctgcttgaggggagggaacagccgaacaggtgatcgtcgtcgtcgtcgtcgtgtggtgctggtggataaggacggaacggaacaactgctaccgcgtacgttcactttgcagccgcatcactgcatcagcagctataccgcgcgccgcctgagccgaggacacgtgtgtcgttaagctccggtgaaccgaaaccttttttttgtgcatggaaaacaaacaagtttttccgctagctagctatccatccgtacctgaaaaactaacagacacgagggacaaatttagggatgtttgatttatagtgactaactctatattttattttattttagtctctaaattgctaaatacggaaactaaaactatattttagtttctatatttaataatttatagattaaaatagaataaaaaaagaactaaaaattagtctttgaaatcaaacgctacaatacaaatggattctcgctggattactccactgtcgttggtgtgag

SEQ ID NO: 278139 - DNA, 503 bp, Zea mays
agttctagatcgcgagcgtccgctcgcttgatatcctcaaggagcaatggagccctgcactgaccatatcaaaggtcctcctctccatcagctcgctcctcaccgaccccaacccggacgacccccttgtccctgagatcgcccacatgtacaaaaaccagaggcagcgctacgaggaaactgcacgggcctggacccagaagtacgcaatgggctgattctgtcccactggacagtacttcccctgcaaagatcgtcacggtgttgtaagaatcaagttgcaccgttttcctgtcgtgtgatggtattaagagcccagatggctgtgtcaattgtactcgcttctcagaacaatgtctctctgtgtgtacagtgcttttgaagctggatgatctgagttctgtggtaaaaccttggtttgcacttcactttgttccctgaaatgggtttgcgaccactgaatttgcatgtgtaacctttccaagaaaccagtagcagtttgt

SEQ ID NO: 278140 - DNA, 670 bp, Zea mays
tcggtcagcgtgagcgacgccaccacccaagcggacggcaataatggacgctaaccactggccgacggcgcagccggagaggaatcatggcagcttaaactacgacatcgagagcacggacggcacgtggcgcggcgcgggggcgtggcaggagcaggacccatcgtcggaggccctgatgcggtacgacgactacgggccccgggagccgctgctgcgaaggcgcaccatgaacaccacctcccagattgccatcgtcggcgccaacatctgccccatcgagagcctcgactacgaaattgtggaaaatgaccttttcaagcaggattggcgatcaagaaagaagcagcagatattccagtatattgttctgaaatggtcattagttcttcttattggcctgtgtactggacttgttggcttcttcaataaccttgcagttgaaaacattgctgggttcaagttgctgcttacaagtgatctgatgctcaagcataggtacttcacagcatttctggcatatggaggctgcaatctagtcttggcagctgctgctgcagcgatctgcgcttacatagcacctgctgctgctgggtctggtatcccttgagttaaagcataccttaatggagttgatgcttatgctatattagctccaagcacactgttt

SEQ ID NO: 278141 - DNA, 1011 bp, Zea mays
cccacgcgtccgcacaccgcagcatccgttcacgtgtcttcaccccgagtgctgtctctctccttcctctcagctacggctgggtgacgcggggggctacacccgccggctaacgccaggctccgatgccttcgtcggtctacttgccggcgatgaacatccaccagggatagttgcaacaatttgggcatagcgttggtatcagtggttcgaagatggttctccatatgacccacaatgtattcagttttcgatgctttgctgccaatgggcgtggcttcagtgcggattctaccaataagagaaaaattaaaagcaagaagaggcgaaaggatgttgcactggaaccaagtgaggtaatatctggaaatccaaggaacagggaccaatgggtgccagaattaagaaccgaaagtgaaaacaaatctggtgaaaaagtcatggataagaaatttttggaaaaagtggaagcggttcgaaggtctgctcttgtgaaaaagaaagctgaagagaacaaagattatcaagctattgattatgatgctccaattgagtcagataaaagtactattggctttggtactagggttggaattggtgttgcagttgttatatttggactagtcttcgcttttggggatttcctgccttatggaagtgttagccctagcaaagaaagtgcagtagttaaacaaaagctttctcaagaggaagaagaaaaatttaagaatgcactgcaaggctttcaagcaacgctgagtgagtcgcctaatgatcctactgctcttgagggtgcagcagtatcgttgtccgaactaggtgagtatgagaaggcatcaacattccttgagaagctaattaaggtaatccctgataaagcagaagcataccgtttgcttggtgaagtaaagtttgaactcaaggattatgaagggagttcatcatcatacagaaatgctttatcttcatcagataatattgattttgaagttctacgtggactgacaaatt

SEQ ID NO: 278142 - DNA, 443 bp, Zea mays
  unsure (1)..(443): unsure at all n locations
gcccacgcgtcgcccacgcgtccgcccacgcgtccgcagtgccactcgatcagtagtggtggcagctggcggctggcctgggacgacgatgagcgccaagaccagagctggggccgcccatgtacgccgccagctcgtcgcggccgtggcggtgacggtggcatgcttcttctactcctcggaggcgacgcagctgcaggtggggtactacaaccgcagctgcccggccgccgagagcctcatcgagaccatcgtccacgccgccgtccgcaaggacgccggcaacgggccgggcctgatccggctcttcttccacgactgcttcgtcaggggatgcgacgcgtcggtgctgctggacgacccgacgggcagcccggggaacaggacggtggagaagacgtncccgcccaacttccctagcctgcgcgggttcagcgtgatca

SEQ ID NO: 278143 - DNA, 659 bp, Zea mays
gcgtccaaaggaggaggtggagaccaaggtcacggcctggcagacggccgaggtcgccaagatcaacaaccgcttcaagagggaggatgtggtcatcaacggctgggagaccgagcaggtggagaaggcctccgcgtggctcaagaagatcgagaggaagctggacgagcaacgcgccaaggcgctggagaagacgcagaacgacatcgccaaggcgcggcgcaaggcggaggagaagcgggcgtcggcggaggccaagcggggcctcaagctggccaaggtgctggagctcgccaacttcatgaaggccgtcggcagggtgcccaccaagcgctccttcttctagccagccgactaccgctaccacctccgtctctccctgcctgcgtgtgatcgatgtacgctcgctgctgcatccgagaacctaactgtaaagaaaaaaattgtaagctgtatacgtactactgcctgctatggtcccctgtgatgtctgtcatccatcacagggtgccagttgttctcttctctttctcttctcttctcttctcttggcttgtatatcggatccatacgctggtggtgcttgaacgccccgtcgttgtttgcttaaccgtgcaaacatatacagtggtatatagtatatacactacattcacccc

SEQ ID NO: 278144 - DNA, 469 bp, Zea mays
caaggtcacggcctggcagacggccgaggtcgccaagatcaacaaccgcttcaagagggaggatgtggtcatcaacggctgggagaccgagcaggtggagaaggcctccgcgtggctcaagaagatcgaggtaccgaccacaccgacgccctcttctttgctccctcttcgtcaatttatatatatcttgctcaaaccacgagttgagttcttgttccgcagaggaagctggacgagcaacgcgccaaggcgctggagaagacgcagaacgacatcgccaaggcgcggcgcaaggcggaggagaagcgggcgtcggcggaggccaagcggggcctcaagctggccaaggtgctggagctcgccaacttcatgaaggccgtcggcagggtgcccaccaagcgctccttcttctagccagccgactaccgctaccacctccgtctctccctgcctgcgtgtgatcgatgta

SEQ ID NO: 278145 - DNA, 763 bp, Zea mays
tctttcacgcgtccgcccacgcgtccggtcaattagacatgcctgaagcaattccagaagatagcaatattgctgggtttggtgctgctactattgatggcccacttcacataccagatgggattcaatcagatgccatgctgccacgcgccaatgttgcatatggcgctacagctgcttttggtttgcaagttcctcctgactaccaggttaaccgtgcatctaatgattttgttgtcggcactctgtttcaaggggtggctggaccttttattggtaatgagaaagaagtggcacttgctgacagagagcgtgctcaagtaaatacactgtatagtgaccattttcaagatgtcccatctgatttgcatagtactgatgcaaacatttctagtcaagatgtgactctagataactctggccaagcttgcgctcacgcaacggacggcatgacaagggagcttactcattttgttcatagtaatgctaatattttcgagagtaatgaggtccctgcttctgagattactggggtggaatataatcaaggtgcctctggttttcctcaaccaacggaggatgaaaatgcggtggggtataatcaagatgtctctggttttcctcgaccaacggaggatgaaaatgcggtagattataatcaagatgcctctggtttttctcgaccaacgggagatgttcaaggtgcctctgggtttcctcgaccaacggaagatgaaaatgtgggagattataatcaagatgc

SEQ ID NO: 278146 - DNA, 444 bp, Zea mays
gggaatttaatcattttgttcatagagacgctaatctttttgggagtactgaggtccctgcttctgagattactggggtggaatataatcaagatgcctctggttttcctcgacaaacagaggatgacaacacggtggagtataatcaagatgcctctggttttcctcgacagacagaggataaaaacacggttgagtataatcaagatgcctctggttttcctcgaccaacggagggtgaaaatgcggtggagtataatcaagatgcctctggttttcctcgaccaacagaggatgaaaacacggtggagtataatcaagatgtctctggttttcctcgaccaacagaggatgaaaatacggttgagtataatcaagatgcatctggttttcctcgaccaacagaggatgaaaacacggtggagtataatcaagatgcttctg

SEQ ID NO: 278147 - DNA, 411 bp, Zea mays
gcggagcagcagaggaccagggcagctagtagctggtaatcgcaattagtgcgcgctaatcaggtgctcatctgtcctcccgaccgttgctaccccatatccctccccacaccgccggctccactccactccgatcgactcgcctgagattctcgcagggactagtttgtggcggaatctcaaacccaggaacctgtgaatcctcgacacttgcgaaacatgagaaggttctttttcttcgggtcccctgctgcaaacgctggtgagggtgccgggcaaccggtcaatgatagcaggactggacatagaaagacagatgagggaaaggacatctccaccgcgagattgtcgagatccagaagccgtcgtcagaagcggaataaggaggaaccggctaaccccaaacaactc

SEQ ID NO: 278148 - DNA, 588 bp, Zea mays
atgtactacttcctccaatccaacgtctgcatcaaacagctcgcatatgcaatgctagagcaggtcctcgtgacagtcttcccagagcttcgccagctaatagaagacatacatgagaaaggccgcaaagagcaagcctcattcacataccaactctgacccaagagaaaacatgctaattcagagaggagtcgcaacaattttgaacgcacttgcattgctccacggtgagttactgaaacacaaagcctttgcaattatattttgatggtgcataagttggattgaggaagtgcttggtgcttaagaatgatctgtacagatgtatatcagaggttatgtaaattatccccctgatgtagtcaaccagaactacttacagtgagatgcttgtaggtgttgaatgtaatgtatcattctttaattcccccccaagaattaagttattctccccctgtcttatgctgaggcttgtaaagttttgaaagttccaagtgtatagctgtactgtttgtgttgctgagtaaatcaaaatggtacacaatcaaatatcatctaaataatactcagaaaattaacctgctatga

SEQ ID NO: 278149 - DNA, 591 bp, Zea mays
cccactcttccgcccacgcgtccgcccacgcgtccgctttccgccgcggcaaaagtgaggagcgcgcgggcgagttgggggagacgaacccgtcataactccctcgcttaatcgcgtctcgtgctcctgcctcctgcgtatataaacgcggcaatcgggacgcccggggaggcgttcgttctccttctccatcccacgcgcgcgcaggccaaggccggatcggcggcctctcagatctcgccggccgccgtgagacagagaccgaagggggggttgaccggtgctcgggaggaagatgtttagcgggacgcagcagaagtgcaaggtgtgcaccaagacggtgtacccgatggaccagctctccaccgacggcgtcgtcttccaccgctcctgcttcaagtgccagcactgcaagtctaccctctcactgagcaactattcctcgttcgaaggagtgccgtactgcaagacccatttcgagcagctgttcaaggagaccgggagttacaacaagagcttccaatcacagtcacctgcaaagattactccggaaaagttggcccctgagctgaccagatcaccaagcaaagc

SEQ ID NO: 278150 - DNA, 461 bp, Zea mays
ctagttcctagatcgcgagccgccgcccttttttttttttcacctgagtttccgtggcatcaattctcactaagtacaaaaacaaagaacgaggaaaaatagcaaattacagcaaaatttaagcaacatcaacatattcagaccatcacgagaaacattggctatcacgaaaatgccgctaagttaaccgactaccaattctgatcacaaaggagtatttggtcagaagcccgcaggaggcattaagttcaacctacagttcccccaactaccaactaatattggttagcagacttctccctgtgatcgcaaaaatattccctgatcctcttatgggggcctagctagctgcttcccacccatgacccttcattgacagtagtttacaaccagcatcaactctgagctaatgggtgacccagccccttccatcttataaatagtgcacgatcaggtacagc

SEQ ID NO: 278151 - DNA, 810 bp, Zea mays
gtcatcgtactcgaggactacagcaagaaatgggggtcaacatgtctgcagttctgcttggtgtggattcggtctcagtccttctcttcctggacgttgtgtacgcaagggagctcactgaagccaatggctctggagtgaagaataatgtgaagcctgcaggagagcctgtgctcaaggatgagaagtggtttggtggtggatacaagcatggtggagggtatggaaacaaccagccaggatacggtggcggaggaaacagccaacctggatacggcggcggaggaaacagtcagcccggatacggtggaggatacaagcgccatcaccctggtggcggctacgggtctggacaaggagggcctggatgtggatgtggaggagggtatggaggtggcaatggtagtcctgggtacggcgatgacaatggtggtggcagtggcactggtggcggaaatggcaatgctggtgggtacggaggaggaggcgccggttatggaggcggctacggcagtggtagtggtacagcaccaggaggcggatatcatggcggtggtggtgcacaacgctacgctgggcagaactagcaagaacaaccccttatgctagtttatgttaaataaacgatccattgttcatgtgactgagcaatttaagcagtgaaggatcttgactcgtgttatttgtgttaccatatgtattggttgttttatgtttaagatgaatgtaccccgctatttgtatgtcgaactcgttgcatggagatgaaaaaaaaaggcccaaaaacatcagcaaaccatgctttccttc

SEQ ID NO: 278152 - DNA, 499 bp, Zea mays
aagaaagaaaagaatcaaggctagtggatattcaggaaaaagaggcccatatcagtgcagaaggtgttttcagtttggacatatagagaaggtgttgtactgctactcaagctgaattagaacaagagcttccaccacctcatccaaagaaaccaaaacaacaaagaaaatccaaatctgaagctgttgaagtctctatggttgatgtcgagccatctcaaaccgacggtgttccaaaagtgatgtctagcccaggtgtaacaacaagaagcatgtcttctgcttctccaactagtccaggtcctacaacaaggaggaaggcatccatctcaccaggaggaattaatcggaggctcattattagctagatatagtagttgtcattctctattttgtgtgtgggcatggctgtgcaactattttgtgtaactatttttccgctatgcaacactatgtctgatggtggtgcttctatattctgaattgcaagaactcattt

SEQ ID NO: 278153 - DNA, 742 bp, Zea mays
gcagcagcagcacgaaaccctgtagtagcctgccatgactacgcgctgctgcctggtcgtcgccactctcctcgcggcgctgctctcggtcagtgccagcctcgagttcggtttctacaacaagacgtgccccagcgccgagaccatcgtgcagcagaccgtggccgccgcgttcaccaacaactccggcgtcgctccggcgctcctccgcatgcacttccatgactgcttcgtcagaggctgcgacggctcggtgctgatcgactccacggccaacaacaaggcggagaaggactcgatccccaacagcccgagcctgaggttcttcgacgtggtggaccgcgccaaggcgtccctggaggcgcggtgccccggcgtggtgtcctgcgccgacatcctcgccttcgcggccagggacagcgtcgtgctcaccggcggcctcggctacaaggtgccgtccggacgccgtgacggccggatatccaatgccacgcaggccctcaacaacctgcctccgccgttcttcaacgccaccgagctggcagacaggttcgcctccaagaacctcactatcgaggacctggtcgtgctctccggcgcgcacaccatcggcgtctcgcactgcagcggcttcgccggcccgacagacctgaacggtcccgttgaccggctctacaacttcagctcgcctgacgggattgacccgacgctgagcaaagcctacgcatttcttttaagagca

SEQ ID NO: 278154 - DNA, 445 bp, Zea mays
gcgtccggaaggactccggtcttagccttaagcagcctatcactatccatcaaagcgacaaccctggtgggttacttccattttcttgaacacggctaaatgccattctatctcaactatggcgcatttgaccgaggttttcgtctcaagtccactcctgaagccctgccgattgaagcagaaaggctcttcttattctttttagggtatggtatcggactcgaaaccttcaaagtcgctgctacgtgctctgtggtgcgtctcagagccctattccatgtgggggttggaagacatttatttgatcccagagggaggaataattagaccctcctctgggttgaggatacgtagcagtggaaggatgccggtacattatacgtctaactcacttcctaagcaaaaatcacggccaaaactttctttcttttcgaaaactggattc

SEQ ID NO: 278155 - DNA, 783 bp, Zea mays
gaaaattaagaaatcttttaatataattgctatgcttagtcccaattgaactagatttcgtttacatcatacaggaagaatgaagggaaaatcctgccgaggcaatcatatttgttttggtagatatgctcttcaagtacttgaacccgcttggatcaccgcgagacagatagaagcaggacgaagagcaatgacacgatatgcacgtcgtggtggaaaaatatgggtgcgtatatttcccgacaaaccggttacaataagacccacagaaacacgtatgggctcgggaaagggatcccccgaatattgggtagccgttgttaaaccaggtcgaatactttatgaaatgagcggagtatccgaaactgtagctagagcagctatctctatagctgccagtaaaatgcccatacgaagtcaatttcttcgattagagatatagaaccccaaaaaggaatattgaagataaaaaacccctggtttttctttctggaaagacaatatttctttcatccttttgcattgaaataacaaatggaaatccaaataatatgattcaacctcagacccttttaaatgtagcagataacagtggagctcgaaaattgatgtgtattcgagtcataggagccgctggtaatcagcgatatgctcgtattggtgatgttattattgctgtaatcaaagacgcagtgccccaaatgcctctagaaagatccgaagtaattcgagctgtacattgtacgtacacgtaaagaattcaaaggcgacgacggtataata

SEQ ID NO: 278156 - DNA, 915 bp, Zea mays
cggacgcgtgggcggacgcgtgggcggacgcgtggggttcagctgagcctgagcatggcgtggccggcggccgtgctcgtcagcaatggcggtatctccccacacgctccaccttccgccgccgccttcctcgtctccactccgggcgcctacaccaccgtccccggaaccctcctctggtggacacgtcacctccgccgactcgccgaatccgccacgctactcgcccgttcccgcccgaacctgctcggcctccccctgccccgatcgcgcgccctcgacctagatttactatccatccattctctcgtgaaccccttcgagcgggtcgccatccgcgagatgcgcacaaggcttgccatgaccaaggacgaggatttggcgctcacggccctggtcaggggagccgatcccatttctggcggtggcggggctggtctcgacgtcttcgtccacgtggggacgtattccccgccgatctttggagaatcgggggccaggcttgccgcggccggcaggggaagggacgccgctgccgccaagtacgcgtcctgggccaggatccggaagagtttggaaaagatgaggcctcctggggtcactgagctcttgctgactaatgacggggatcacattcttgaaggcgctgttacaaacttctatgttgtctgccaacaggaggaatgcgagagcaacggaaaattctctaatcaaacaatggctactaagtttgaagtgcaaacagcaccactgagtgacggagttctccctgggattatgcgtcagatagtgatcgaggtgtgccatgatattggaatcccagtacgagaggtctctccatcgtggtccatgaatgaattctggaaggaagcctttgttacaagtaataataatactctctgcctctctctctct

SEQ ID NO: 278157 - DNA, 420 bp, Zea mays
  unsure (1)..(420): unsure at all n locations
gaaagaatttcactggctacatagcaccacggtttgacaaccgcagaccaaacaaangaggcggcctatctccacggccgccgggcctggcgccgcagctacctcctctacggctcgccgggcacaggcaagtccacgttcgcggcggccatggccagggccctaggctacgacgttgacctgtctcgcaccgatgccgccgccgacgacctccgcgcgctgctcctgcacaccaccccgcgctcgctcgtccttgtcgaggacctggaccggtaccttcagggcggcggcggggacgcggaagcgcgcgtggccagggtgctaagcttcatggacggcgtcgcgtcgtgctgcagcgaggagcgctgtcatggtgttcaccatgcacgggggcaaggactccatggacgccgcggtggt

SEQ ID NO: 278158 - DNA, 899 bp, Zea mays
cggacgcgtgggtccaagcactacaagacgctgctgccggcgctgtgggagcgacaagatcaggaacgtcatggacatgaacaccgtgtacggaggattcgcaggcagcctcgtcaaggaccccgtctgggtcatgaacgtcgtctcctcctacggcccaaactccctcggcgtcgtctacgacagagggctcatcggcgtcaaccacgactggtgtgaggcgttctcgacatatccacgcacctatgacctgttgcatcttgatggcctgttcacagcagagtctcacaggtgcgagatgaagtacgtgctccttgagatggaccgtatccttcgtcccacgggctacgccataatccgggagagcacctacttcctcgattctgtggcacccattgccaaagggatgcgatggagctgcgagaagcacagcagcgagaacaaggccgacaaggacaagatcctcgtctgccagaaaaagctttgggcaggaaagcagtgacgagagaggatcatccttcttccttccgagtataaaaaagtaggcatccagatcggccaacaaggcaagaggcgcttcaatacacatggaagatgagcgagtacttctgatacaaagagtgttcggcagttattatcaaaataaataagccgagtaaaactccatataggatccaacagttaccatttttcattaatcacagtttaattctttttctgtaccgacagtttgtaggcaaggagtgggtcaattcatataccatatggtgagcaaatgtaagtttactccacactagatgtgtatagcttggttggtgctactgctatcgatgtaatagcgggccacgtatttacttcacatgttttgtggatcaatatactatgactgtgatgtcctg

SEQ ID NO: 278159 - DNA, 386 bp, Zea mays
aaacacgcgtccgcggacggatggccctcacccacccggccgcgctcctctgctagtctgctctgcaactgcaagacgattcgtttccatcgccatcggtgctgctcgagctcgactgctgcagctgctaccagtagtgagctgtgtgtgtgtgtagtatatacaatattcgtataaactgctggtctcaatcgagtcgtcgcccaatcggttgaatcggggagcagaggcatcgcccccacgcccaatcatccgcccccaaatccccagaagcacccacccctccgcgcgcgagatcccacgcgcgttccttccacagtcccaccaccccccggggacgcggactccctcctccgtcctcccccccgcggtcccagcccagcggt

SEQ ID NO: 278160 - DNA, 580 bp, Zea mays
gcttgggctgtcctactcctgcccttcttcccacggttcacggctgattgagtcggccacggcccacgccacccaaaaactcatggccagcgctgtctgcggcgtcaccgcgcgcgcccacctgccttccgccgtccctgcagccgcaagaaagctcttcttccgctgcagggccgcgtccaccatgaacgaggcatcggcgagctcgccggacgccgaggagaagaagacgacgactgtcttcgtggccggctcgacggggcgcaccggcaagctcgttgtggagaagctgctggccaagggattcggcgtcgtcgccggtacgacggacgtgagcagggcccgcggcagcctgccccaggaccccaaccttcagctcgtcagggctgacgttacggagggcgtcgacaagctggtggaggccgtgcgcggcgtcgatgctgtcgtctgcgcgacgggattccggcggtcctttgacccttttgctccgtggaaggtagacaactttggcacagtgaacctggttgaagcatgcagaaaggctggcgtagcaagattcgtactcgtcagctccatttta

SEQ ID NO: 278161 - DNA, 624 bp, Zea mays
atcagaatgcaagtcctccccttgaatttacaggatacccctttttcctctccatgggattacatcccgagttattgtgaaaaaaataaataaataaagaggttatggaagtaaatattctcgcatttattgctacagcattgttcattctagttcctactgcctttttacttattatttatgtaaaaacagccagtcaaaatgattaattggaattccaattaatcattgaagaaatgaaaaagggattaaagaaaataaaaaatccaagtcttaaatgaaagggtctggttggaatcataaagtgtggtagaaagaactacatatagttttttctaccacactttagattctttctattatattatcttgaatctacatagaatcgattagtagattgaaatagtagtctaattcaacttcttttttcactgcatccacttaatttcaatcaagtcaaaatcaaaaaaatcgaagataattcttcattgaaagaatccaaagagggggagaaaaataatacgagaatagactagaatagattatagtaaaagaaaaatagtaaaaggaaaaaacctacgaatctttcatgcttaaaaaaggtgcgagatgcttcaatcgagt

SEQ ID NO: 278162 - DNA, 478 bp, Zea mays
gcctgctttctaggggacttggatggcttgacaagggctagggaaggcagaattccactgaaagcagcgggaggctaaactcatctagagtccaggatgaagtcatagctcccaacaagatctggattgttcattgacgcttggattgcctgatcaccgtaagagtgttgaaatcagcatcgatatatgttttctcgggaagattcagctggtatattccatgaagttttgcaggaagtgtatcttgtatcatattgagttcagttgtcggataaagttttgttggtaggtcagaaaggctgctgcaagtcatcggtgtaaattttcttttattagtttcattaaggtcgtcaatagtcagtgtttccaagtaggagaaagaaaagaacccgacttcacatacacacggaaagaggaaaatttctgttagattagttacagtatcatggggttgttttgttgaagagcgtatatctct

SEQ ID NO: 278163 - DNA, 609 bp, Zea mays
cccacgcgtccgcccacgcgtccgcgtatttgagcctgcaccacagggagaaggactgcaacttctgcctgttcatgcctttgtacgacgccctcggagggaccctcagctccagatcgtgggggctgcagagagaggtcgaccaaggcatgaacgaccgggtgccggacttcgtgttcctggcgcacgtggtggacgtggtgtcgtcgatgcacgtgccgttcgccttccgctcctgcagctcgctgccgtgggccatgcgcccggtgctgctcccgctctggcccgtcgccttcgccttcatgctcctccagtggttcttctccaagaccttcaccgtcagcttctacttcctccgcggccggctccaccagacgtggagcgtcccgagatatggcctccagtacttcatcccgtcgccgaagaagggcactcaaccgcaagatcgagctcgccatcctcagggcagacaagatgggcgtaaaggtcatcagccttgctgcgctgaacatgaacgatgctctcaacggcggcggcacactttccgtgaacaagaacccgaacctgagggtgacgctggtgcacggcaacaccctgacggagtccgtg

SEQ ID NO: 278164 - DNA, 587 bp, Zea mays
ggcaaggcgtacgtggcacgctcgcgtccatctccacaacgacgaccttcatggcggtgccggcctccgcctccgcgtgcgcgtgcacgcgcgccggcccgccgcagccccgccaccgcgcgcgtagtgccgccgcgaccgcggcggcgttcttgctccgccgccaccagcgaccgccacggcagataataaacatcgtcgacgaccgccgtgccagctccgatctccgctgccggcgacggctcctcacggcgcgaggcgagcgcccgtcccacgacgacgacgaggacgaggacgaggacgaggagcagacgtcgtctgctggtggtggttacgggtccttcggcgcggcggtggcgctgttcaaccgcggcgagtaccacgcgtgccacgacgtggtggaggagctgtggtacagcgccgaggaccccgcccggacgctcctccacggcctcctccagtgcgccgtcggcttccaccacctcttcaaccagaaccaccgcggcgcgatgatggagctcggcgagggcctctgcaagctccgtaagctgcagctagacggcgacggcgacaacgacgggggcggc

SEQ ID NO: 278165 - DNA, 672 bp, Zea mays
gcggcaaatcccaatctcccagcgtgcgcctaaaccctagcttgcctatcgatggcgccggtgaagcgcaaggccggtcccgccgagtcccccgccgccgtggaggcagccaccaccaaccaccgccacgagccggcgtcctcggagcccaagccacgcggctccatctacttccccatcactgacgacccgcccgaacccaacgccgccgaagaggacgaggacgagggcgccggcgacgacgaggacgacgcggaggacattgtcaagctacttgagccgctgtcgcgggagcagctcgttgcgctgctccgcacggcggcggaggcgagccccgccacgatggcggccgtccgccgcgccgttgaggccgaccctgccagcaggaagctcttcgtccacggtctcggatggggtgccggcgccgaggacctccgctccgccttctcacgcttcggcgagctcgaggactgccgcgtcatctctgacaagcaatctggtagatccaagggctacgggttcgtcctcttccgctcccgccgctctgcgctccgcgccctcaaccgccctcagctccaaatcggtggtcgtcttgctttctgtcacctcgccgcctcaggccccgcacccccagcttctcagtctcagaaccctgtctccaaggcaaacccc

SEQ ID NO: 278166 - DNA, 434 bp, Zea mays
  unsure (1)..(434): unsure at all n locations
cgcgtccggcgatatgcaccttctcctcgcccctctctctctctctctaaaagaactgaaaagataagggggaaatcctcaagtgctcgttacataaaccctaacctcgttggattcgcagcaaaagcccaccaattggaagccctccgatgttccagctgcatgctggagctgagccgtgctcggtttgacgaaattttgcatcccttctgtgcttggaccacccgattgaggctgtttctccgagggggcgtgccagcggtttcgcggcccaggtcctcacctgtgctatccggcgccggatccgggtttgttccggtgagaggtcgggcttttggtggggtctgtacagcttggagctcaatttgccggcctgagttggagtcgcgactgcngtggcggtgattgaggtagtcgcgtcgaattggcacgcg

SEQ ID NO: 278167 - DNA, 562 bp, Zea mays
  unsure (1)..(562): unsure at all n locations
ccctttcttccgctcggatcgatggtgttgccggccaaagattcggcattaccagagcaagaacagtgcgtgctaatggtgagctcatcgaaaaggatgcagtgttgctcctaaggaggaaccagacggtaagagttgttggatcagaggcactgccgaagtctggaaggatttctcgctatgatgtgaagatcaaacacaaagcaggggaagagcaagaggagccagggaaagcccaagacaaagcagagaaaatccaagttaatgcaagcgggattcaagaaagttccaaggaaatattaggcaagacagataaattgttggatgcactggagccaaaccttgacaaagaagagaaggttcaagaaaaggaagagcaacacctcgatgaagtggataatgttcaagagaatgaaggcaaagtccaatgcccggcagagaaaatccaggtaggtggagaagtccaatgcccccggcagagaaaatccaggaaagtcgaggattctgagacaaagtagaaaagtccatttgaagagtgaggggagtnttaaatccatacaat

SEQ ID NO: 278168 - DNA, 738 bp, Zea mays
cgcgacattccccttctccttcccacgttttccttcaagcacgccccccatcctaccccgctgccgtgtccgtgatcgcccgtcgacttttgcgctgccgtagcgggttgaagcggagatccatcgcctgacctgccgcggagtcagtcccaccccacctgagatggcttcggaactatctcacggcactaggagagacgtatgcatcgagtccatggcgcggcctatcgccgtggaccaccgcataagcatccactactatttccgcatcgctgacaacctcctccgccaggctaatgtgtatcgagaagagaagaatgttctggacctctacatcctcctcctgagatactcgagcttgttgcgggagaccatacccaaacatcgcgattataatgcatttaaggctagagaaaaggaattcctgaagaaaggcccacacaactctgagaaaattcttggtattgtcaatgagctagagtcccttaagccagttgtgcagcaacaaattgccaccggtaatagcaggggtgcagatgaacctaatggtgtatatggaacctatgctgcaagtagtgagttggagcaccataccccaagcccatatgtgtcgaagtccttgtctggaagccctactagactactgcagaaaccattacctggttcaaagcatcaagcagctatgtcgcacaatgttcaaccttatagacatgctattgaaccatctaccaacatgct

SEQ ID NO: 278169 - DNA, 517 bp, Zea mays
  unsure (1)..(517): unsure at all n locations
ccaattctgagatcgcatctatgcaaaaaaaaatagaagaggctcgggctcgggatttagagtctgttgccgttgtcagcacagagttggatgatgctaaggaaatgttgcaaaaagtagcagaggagaaaagttctcttcgaagtttggtggaatcactgaaagtggaattggaagctgtaaaacaggagcacaaccagctcaaagagaaggacacagaaaccgaatccattgtcggagatttacatgtcaagcttcagaaatgtaaatctgtgctggaggctgctgtggctgctgaatcaaaagctacgtcagcttctgatgacctgatgctggcccttcagcaactgtccgcggagtcaaacaatgcattgcaagaagctgagataatgcagaagagtgcggcggagctaagaggcccaaaggggaagccaaaaaggctcgggctgaactagcagaagccgaacaaaagttgcagttgacgttaaaggaagcangagaggctaaagcagctgaa

SEQ ID NO: 278170 - DNA, 441 bp, Zea mays
ctcatgaaaggctcagaccaatacaagctgttgtaacagccatggcttcagcgaagcagagcgagagaatgcgcatacttctgatcccattcttcgccaccagccacatcgggccctacaccgacttcgccgtccgtctcgcagcggccaggccaggagccgtcgagcccaccgtcgccgtgaccccggccaacgtcgcggtggcccggtcggcgctcgagcgccacggccccgcggcgagcggcacggtcaggatcgtcacgtacccgttcccgcgcgtggacggcctcgctccgggcgtggagaacctcttcaccgtcggagacgacgcgtggcgcatcgacgccgtcgtcatcgacgaggccctctcgcggccggcgcaggaggcgctcctcagggagcggtcccccgacgccgtcgtgtcggactaccacttcttct

SEQ ID NO: 278171 - DNA, 1361 bp, Zea mays
ctttctcgtccgcggacgcgtgggtggaggaggaggccgtcgatgccacaaagggctggtcgagttttgtgcttagggatctcaagagggagatggacaacgtcgggcccgcggagggaaccgccgcaggtcgcctggttgcggccttgcatgcagctctgcttgatgccggttttctcaccgctaaactgacgggctctcacctctcgctgcctcagggctggccgtcaggtgctttgaagccattgaccatcaagtatactataccagagctttcatcaatggtatctgtgactgaggaagggaaggtggctggtgctgaactactccttgatggccaatttcgtgatggtttatgggtatgttcctggggcacagtctgaggtttgccggctgtgcttggagttgccggggctggagcctttactttatctggatggcgatcagctgaatggagtgcatgagaagggagttcatgatctgtggagagtgctgaaggatgagatttgcctgccactgatgatatcattgtgccaactgaacggtctgcgcttgccgccttgcttgatggctttgcctgctgatctcaagactaaggtattggggtttttacctggggttgatcttgcaaaggttgagtgcacatgcaaggaaatgatgaatcttgcatcagatgatagtatctggaagaagcttgtatccaagtttgaaaattatggcgagggctctaggctggcaggcaagaatgcaaaggccatatttgtagaagcttggcaggccaataagagacggcagaagaggcccaatccaaccttttggaactatggctggggaaacagtccttatagccgcccacttaggctgccattgattggtggggactcggacagacttccttttattgggaatcatggttctgttgggcgccactttggaaatcaacgaaggaatatctcaccgaactgcattcttgatggtcaccgtcataacttcctttgaagccatgtcaatgagttttacttgtatgttaagagtgttttataaggacttcaatggtgcatatacggttagaccgccttgttcatatcgtcaagtcgcacacttatgcttgtgcacagcactcttatgatcttatcctaatatatccccttagtatcttagatcgtatctttactatctttttttggtaccaaatgtaatccagtgtcctagtaataaagtacccttgttctattctcaaacgaattatctagacacggtcattgtaatttggttcaatgtgtaggtagatgtaggcgtgtgtctctgctttaaacttcagggtgctgcttaaatttatttgcattaaatattcaatctat

SEQ ID NO: 278172 - DNA, 561 bp, Zea mays
cgcagggccaattggcagtccttgcggatgaggacaaataatttgatacgaggagataatgccagactggagtgtggcttaaagaaggagatgcgggaaatgttgccagttgttatcttcaaagagagtttcttgatcagggagacacagtgctcggtctgcctagcagaatacgaaccggacgagaggcttcagaagatacctccctgtgggcataccttccacatcaactgtatcgaccactggctctccacaaacaccacctgccccctctgccgagtatcgctccttcccgcccccaaggcaaccagcaccggactggatctggaagcacagactgcggtcgaagaggaggccccgaacgcacatcatcgccaggaggagggacatagttgatgccaacacaccacaggaaggtgacgcggccggaggtgacggagcaacgtgcgtccagggtgaagaacccccccggggcaccacgatgcggccgagccactggtagtgacggtggtcgctgtcgctgcacctcacgctgacgctgaaggttcaccgagtacagca

SEQ ID NO: 278173 - DNA, 502 bp, Zea mays
cttctacgcgtccgcaaggatgtacaagcaggagagtgtgtatcgagccacacacgagagcaccaaggtctaaaaggaggcttcctatcatacataccttgcacagcaactgtatggaccactggctctgcacaaacaccacctgccccctctgtcgagtatcgctccttcccgcccccaaggcaaccagcaccggactggatctggaagcacagactgcggtagaagaggagtctccgaacgcacatcatcgccaggaggagggactcgttgatgccaacacaccacaggaaggtgaggcggccggaggtgacggatcaagtagcgtccagactgaagaaccgcacggtgatgcggctgagccattggcggtgacggtggtcgctgtcgctgcgcctcaggctgacgctgaaggttcaccgagtacagcatgccaaactgttaaagggaagaaataaggatagcctagcccatcgatgtatttctattaccattgtgtgtt

SEQ ID NO: 278174 - DNA, 288 bp, Zea mays
cagcagcgtcggggcaaaaatttcacctcgctcgatcaagcgattgatgcccccgtcggggcgtccgtgccgctgtcctcgccgtcgcaggccggcctccttggccccccgttcccgctcctgccaccgcccttcggtgcatgcctccgctaccgcttgccgaggctgcctacaggcctctcgtcgagcgtgaggaagggagggctcctgccgctgccgctcctggtgcctcccagggccgcggggggcaaggacggccgggccgtgaccaaggaggagttggaagag

SEQ ID NO: 278175 - DNA, 477 bp, Zea mays
cccacgcgtccgcccacgcgtccgctctccttatcctgctgctcgccctctccttgccaagtgggcaggagtcccgagccccctcctatgatcattgcgcgtggacgacgaggaggtcgaccaagggtacgggtacggcgccatgtcgtcggagctggagctctgcgtggcgcgcatcagggacctgagggcggagctggagttcgagcggcgcatgcggcgcatggcggaggcgctgagcgaggcgctggccgcggagctggccgacgagcggcggcggggcgaggccgcggaggccgagtgccgggcgctgcgggaggaggccggcgccgcgcgcgcggaggcggagcgcgccctggagggcgtcgaggaggagcggcggatgctgcgcgtcgcccagctgtggcgcgaggagcgggtgcagatgaagctcgccgacgccagtgccgcgctggacgagaagctgcgggagatcga

SEQ ID NO: 278176 - DNA, 591 bp, Zea mays
  unsure (1)..(591): unsure at all n locations
cccacgcgtncagccacgcgtccgcccacgcgttttcccacgcgtccgcccacgcgtccgcggacgcgtgggttctacatcacaacccttcgttgagtcctatcaacctttcattgctcaggtagctggcttttttattgttgaggaccgtgtctttcgaactgcagatggacttctatctgagagccaggttgatactatgttggaaacagccatttctaaacttactctgatcttagaggaacagttctctcgcattcatgctgccaaccacctnctnctcattaaaggttatgtcagcctttttggtgcaaccctggagaagtatgggtaccgatccatgtcgctggctgaaatccttgataaaactagggacaagtatcttgaacttcttctttctgactgccggaagcagctcaacgaggccttctctagggactcatatgagaggatggttataaagaaacaaaatgaatacgacgcaaacatagcggcattccaacttgaccccattgatggagtaccaaatttgccatacgtcgctccattttcctcctctgttcccaatgcttgtcgtattgtgcgttcttt

SEQ ID NO: 278177 - DNA, 623 bp, Zea mays
cccacgcgtccgctcagcttcctcattggccatccttcgtcttccatggagaggctccttgccggcctactactcggcttcctattattgatcgcgtcagtaggaagccatgcaactcgtgctccagatcagtactggaagtctgctcttcccgacactcccatgccgagctccctctcccaactcctcaacaccccagctggcaagggcggcgtcggtggaggcagcagcggcaagaagcccggcggcaccacggtgggagttgggaaagggggagtgggcgttaacgttaaccctaccaaacccggcggcgccggtacaaccgttggcgttggcaaaggtggcgtcggcgtcggcgtcaatcccgggtacggcaagccgggtggcaccacggtgggcgttggcaagggcagggttggcgtccacgtgaacccgggcaagaagcccgtccacgtccccgtcggccctttccagtacgagtacgccgcatcggagacgcagttgcacgacgaccccagcgtggcgctcttcttccgagaggaggacctgcagcccggtaagaagacgaccgtccagttcgccaacaccgcgatggccggcgccaagttcctcccgcgaagcga

SEQ ID NO: 278178 - DNA, 419 bp, Zea mays
accgggccggaaaacccgggccggccgacgcgaacgctgcatcgctcctttcactctttctctgggaacatctatcagctcgctcattggccatctttggcttccatggagaggctcattgccggcctacttggcttcctattggttgcatcggtaggaagccatgcagctcgtgctccggatcagtactggaagtctgctcttcccgacactcccatgccgacctccctctcccaactcctcgacgccgctccagccggcggcggcacgaccgtcaacgtcggctggggcggtgtccacgtcgatgctgggcacggtaagcccgggggtacgacagttgacgtaggcaagggcggcgtcggcgtcaacgttaaccctggcaggagcggcaagcccggcggcacgacggttggcgtcgg

SEQ ID NO: 278179 - DNA, 627 bp, Zea mays
tccacgcgtccgcggacgcgtgggtcagcttcctcattggccagccggcgtcttccatggagaggctccttgccggcctactactcggcttcctattattgatcgcgtcagtaggaagccatgcaactcgtgctccagatcagtactggaagtctgctcttcccgacactcccatgccgagctccctctcccaactcctcaacaccccagctggtctttatcactactagatacgtgttgtatagggaggctcgtccatcgtacaaacatatatacgtaataacaccggtcgatctcttcaattccctgcgtgttcgtaggcaagggcggcgtccggtggaggcagcagcggcaagaagcccggcggcaccacggtgggagtcgggaaagggggagtgggcggtaacgttaaccctaccaaacccggcggcgccggtacaaccgttggcgttggcaaaggtggcgtctgcgtcggcgtcaatcccgggtacggcaagccgggtggcaccacggtgggcgttggcaagggcggggttggcgtccacgtgaacccgggcaagaagcccgtccacgtccccgttggccctttccaatacgagtacgccgcatcggatacgcagttgcacg

SEQ ID NO: 278180 - DNA, 841 bp, Zea mays
cccactcgtccgtgcagaaacttggattgcaaccaacaagttatacatatgacggttttattaaaaccgtgatagctgggaaaggaattgcatatgccagcatagtgattaacgccatggagagaaggggcattgaaccttacagtgatacacttgctgctctctcagagggtcatagcaatagtttacagttggatttggctgaggagtttttggaaagaatttcagagataaaaccaaagcatatgggctccttttatgctctgctttctggatgtgcgattatgaatgaaccagaaagagctgtccgcatactagctaaaatgaaacatgtgaacatgaagccaactctcaggacatatgaacttttgttttctctgtttggaaatgtaaatgttccttatgaacaaggagatgtgctctctcatgtcgatgtttccaaaaggataagtatcattgagatggacatgtttaacaatggaatccaacacagctttgtgtccatgaagaacttggataatcaagacccctttttttttgagtctgtgggctgtccaacatttattgtttatagcaagccatacaaagaccttacacttaggggctgcccagctcttccaaattcttttccaaggctcaaaggattccgctccatgtagtaagctctatacgagcttttggagctgaggggatgatagaggaaatgctgaggtacctgaatatagcagaaaatactctgtggaacataaatcctcatcagaagagtgatctctacagcactgcgttgcatgctctggttgatgtgaaggaaactcacagagcagtaaagatgttcaaaatc

SEQ ID NO: 278181 - DNA, 310 bp, Zea mays
attttcactgtggtcttatgtatccttcgactgagctagccctgctgaaactggcgggttcgggattaaccctagaaatgaaatgaaaggctgaaccgagagcggttggatggctgatatggcatatgctgctgttgtgttgtgttgtgttgtatctgaggaatcaatcagtctgtatcgagtctcttggcaagttttctcttgtttggggcatcctggtatagtagggaagaacaatcgtgtgactcacatgatgcgcgatggtagactgacaatgtttggaaatgtaattggtgatgtttttttttgg

SEQ ID NO: 278182 - DNA, 1031 bp, Zea mays
acctacccccgccccattctgcaagccttgctccatttgcgactcgcgagctcaccttccacaccctacctactcctccactctgagctcacaccaaacagcccgtgcaccaaggccaccattcaccgccaccaagaacaaacgggaactcttcacagcttctcacctcgcgtcacaacaccaagacgcacgtaggagggaacctcaagcttcagtcgtccatggctcagcagcaaacaaatcctgaagaggtggtcctcgggcaggaggtcggggccgcgagggtggccactctcaaccgcccgcgccagctcaacggcatctccgacagagtggtgtacctcctcgcacagttcctggagaaatgggagaaggatgagaacgccaaattcgtcatctttaagggtgctgggcgtgcattttctgctggtggggacctaaagatgttttatgaagggaaatcaaatgattcctgcctcgaggttgtgtatagaatgtattggctttgctaccacattcacacgtacaagaaaaccatggttgctcttgttaatgggcttgtcatgggtggtggcgctgcaatggttgcgccactaaagtttgcagttgtcacagagaaaacaatctttgctactcctgaggctagtgttggattgcacacagattgtagcttttcctacatccattcccggctccctggatatttaggcgagtatctggctttaactggtgctagactgaatgcgaaggaaatgatttctgctggtcttgctactcattttgtcagttctgaaaaattggaagaacttgaaaaacgtctactggatttggacacaggtgctgagtctgcagtccgagctgttattgaagaattttcaacagatgttcaaactgatgaagatagtatattgaataagctttcaactatcaacaaatgcttctctgcagagactgttgaggatatcataacagcatttgaatcagaagcaagcatagacggaaaccaatggatagctccagtcctaaagggt

SEQ ID NO: 278183 - DNA, 408 bp, Zea mays
ggaatatgtggtctttacgaaaggaaaatcagaaacatcaacccgatggtcaggaacttgacttatgatatcggtgacctgtacaacttcatcgatggcctgaccgacataagtgcactggtgtacgacgattcacttcacgctttcctgccgtatgaccgccagtggataaaacagaagctgtttcagcacctgaagcggctggcgcacagtagggtatcatcaccgctggcttttgacgtgcatgcgtcgtggggagaaccccctcaccttagcacttaaggctgtgtttgggtgctctagtattaacctcagttcatatgtattgaggtgaattaaggtgtacattagtttaatttacaactcagggcttgttcggttagctctcaatccatgtggattgagtgg

SEQ ID NO: 278184 - DNA, 569 bp, Zea mays
  unsure (1)..(569): unsure at all n locations
cccacgcgtccgcccacgcgtccgtccacgcgtccgagaaggacggccggccagtttagcctagccacgctcgctgtacgtcctcaatcctgattagcttcaaaccgccatggccatggggctccccggcctccgctgccaccgcctcctcgctcgcgggtcactccctccactcggtcccgccctctatcgcaggcccctggagcgaacctcggctctccgctactcctccctccaagctcaagctggggacagtattggggaggaggccctgcgcatgttccttgaggacaggcaacttgcacggcgatttcgtcaccaaggtctctgacatggtctggaggaggaatggcgccaatgttggtgcggctgaggcgaccacgggccaanggagtgcaatagatgttgctcagcctgaagacgtgcgggaagatgctgtggacgnaggaatgttgagactagcggcgattactagtgattgcgtgtccgtgacagcagcctcctttaagcagagctttctgcccgaganagcagacgagagcacagatgaagactgatctttgaatatg

SEQ ID NO: 278185 - DNA, 575 bp, Zea mays
caagtatgggattgcatggagggcaaagcaacgagcatggaagatgatatacgggcattgggaggagggctacgagaagttgccagcattgctcaatgcaatgcaagctaacaacccaggcatgcattacgagtacatccctaaacccaacgaatggaggactggcagagagatcttctttcgtgctttctggtgtttctcgcaatgcgtagaggcctccaggcattgtcgtcccgtgctgtctattgatggtacttttctgcttgggaagtataagggcacattgttggttgccatatcatgtgacgcggacaacacattgcttccttgggcattggctttggtggagagggagaacagagagagttgggcttggttcttgcgacttgttcggatccatgtcgtgggccctggtcgcgaggttggtgtcatatctgacagacatcagggtattcttaatgcagtgcaagagcagattcctggctacgcacccatgcaccacagatggtgcactcgacatctagcagaaaatcttcttcgaaaggatcgtagcaaggctaatttccccctttttg

SEQ ID NO: 278186 - DNA, 509 bp, Zea mays
tccttttttttttttttttttttttttttaactttttattacctgggagaaagctccaatttaaggagaaagaacctttttacagagtacaaaacaatgggcaaaggtcgtcatgcatgctacaattacaatactccaaacattggtcgacataagggcgacatggtgttttatgtacatatatacctacgattagctttgggtgctcatcagtcatcaccggccatatcaccagccatatacagggtgctggacttgaggaggcaagagacccatatccacacagtgctgcttatcgtagtcccgggtaccaggaatggctccggttgccagcctgagaacctcattgccagttaagcatcgatgggccaacgctagaccgccatccattatgtcggacaaattaggctgtgaggttcttttattctttcttttcctaccttgtccaggctgagcagcctcattgttcagaaccttgtcaaggtctgagtactccatgaatctctcag

SEQ ID NO: 278187 - DNA, 482 bp, Zea mays
gggaggcatgaacttttgatggccatgtactacacatttttgcgataaaactccaatttaaggagaaagaaccttattacagagtacaaaacaatggccaaaggtcgtcatgcgtgctacaattacaatactccaaacattagtcgacataagagcgacatggtgtattatgtacatatatacctacgattagtcatcaccagccatatcaccagccatatacagggtgctacttaaggaggcaagagactaatttccacacagtgctgcttatagtagtcccgggtaccaggaatgagcttcggttgccagcctgagaacctcattgccagttaagcatcgatgggccaacgctagaccgccatccatgatgtcggacaaattatgctgtgaggtttttttattctttcttttcctaccttgtttaggctgagcagcctcattgttcagaaccttgtcaaggtctgagtactccatgaatc

SEQ ID NO: 278188 - DNA, 436 bp, Zea mays
  unsure (1)..(436): unsure at all n locations
tcgcggacgcgtgggcggacgcgcggggacggcggcaaggagcaggccatcgacatggtgctcacggactactgcatgccagagatgaccggctacgacctgctcaaggccatcaaggcgctgaacccgctgaagccgatccctgtcatcgtcatgtcgtcagaagacgagccccagaggatcagccgatgcctgaacgccggcgccgaggacttcatcgtgaagcccctgcagagcaaggacgtgcagcgcctccggaactgctccacggtccggaggcccagcaacaagggcggcgccacgttgccgtgcgaggagaacgccgtggccaagtggagtaacaacaagctgccgccctccgccggcgccggcgccggcgccagcgccacgtncgccgtcggggcggcgggcgaacctcgccggagtcgccatgcgc

SEQ ID NO: 278189 - DNA, 412 bp, Zea mays
tttcctgttcacgcctgggcggacacgtggcgccggagatcctgtggccggacatgatcgcgccgggggtgaacatcctggcgtcgtggacgggcaaggccgggccgacgggcctcgccgccgacacccgccgcgtgggcttcaacatcatctccggcacgtccatgtcgtgcccgcacgtgagcgggctggcggcgctgctccggagcgcgcacccggagtggagcccccccgccgtgcgctcggcgcgcatgaccaccgcctacgccagctactccggcgggtcgtcgctgctggacgcggcgacgggcggcatggccacgccgctcgactaccgcgcggggcacgtgcaccccgcgcgggcgctggacccggtgctcgtctacgatctgggcacccgcgactacgtgga

SEQ ID NO: 278190 - DNA, 335 bp, Zea mays
ccaaaaaacttaccagcaggtaagcactgaagcaaaattcatccttgatgccaattatgttatcgtcactggctgtacctttggcgcttacctggaatattgttgctccctggtgtttccaaatcccagctgctggcttggcctaaaacgaaaacctccaggctccagctgctagctgtcataccctacaagtgatggcaccgcactctacactagaattgttacctagtgctgcgaacagcagcaggtcaaggcgtctgtagactctgtacatgtaattctcgaaagaaccaagacttctgcatttaatgtaggatcagctgtgctgtgctctt

SEQ ID NO: 278191 - DNA, 385 bp, Zea mays
tcgtcttgctgctgctgctgctgctgtcgctggatggccaggagcacaccagctgcttgctgtgtcgccgtcgtagaagcagccgcgcgctgtcgtcgtcgtctcgtccgcgacgcgaccactccggcggctgctgctgcctctcatgctggccacgccaccgacgcttttgtgataccatacgaagcgccgcggcgggcacgttggagatgtcgtcgctgggtgggcaacagcagcacggccgctgcgaccaggccagggcgcggactcacgtggacgcgccagctagcacggtcgcttcgtgctcgccgtggcccagctcggcggcgcggacaaggcgacgcccaagtccgcgatgaggtcgatggccgcgtcggggctcacg

SEQ ID NO: 278192 - DNA, 492 bp, Zea mays
tcgcccacgcgttcgagcgcttgcctcatttgaagattgtaacctcagagattgatagtggattgaacgatgaatatcgtgtcataccaggacttggagagtatggtgatcgatacttcggcacagactaaccgatgactgatgctgtcgtagttagcagtgtgaaaaggtactcaaattagagctgacattaccgtggcagatatactggtgtttggttgctttatggtatactggaagacaaacgtggataggtttctggtaggtgctgaaaccgtgaccgtgtggtcttgtccattatcatatgttttgataccacaaaccgttggttgtgaggcaaatttgtattttctgtttgcattttgaggctcctagctgaagtgcctgctcctcgtcacacaatactgttatacagccttgtgaaatgtatgactgaaccctgttcccggcatctaacagttgccgtggggtcacagctgtggttggaatgaa

SEQ ID NO: 278193 - DNA, 397 bp, Zea mays
atcgcctcgcctcgccgccagcgcaactccagccctggccggcatctctttcacccccccctctcgctccgccgcttcgctcccccgtctcggggcctgcctcggatgctcccggcctcgcatccgctgctctacgcctgcgtcttccgcgacacccacctcgtcgccgagctcgaccacgcccactcccactcccagagcaccgccacctccgccgaccccgtcgcttccgacgccccctcccccgcccctgacgacgacctcccggcgctcgccgctgcgctcgtcgccgccgctccgccgcaccaccgtcacctcacacacacagccggcgggcgtgcgcacgcgctgctcctgtccccgccggtcgcactcgccgccgtctcgcgggcgcccc

SEQ ID NO: 278194 - DNA, 525 bp, Zea mays
tcgggagcagaatcccccaatcgatctctgtggtcttcacatcagcgaggccatgcacgtgctgaactacgagctcaacaaccgaagaaagatcgtgagatccactggtcgccgactccaggctatgatcatatcaagcgcccgcaccccagcacggctgactgctgccgtcgagcagtacctcatggaacacggccttcagtacacgcaggcacaaccaggcctcttccgcgtcctgctctagtgatggagccggcctagctgttgtcacaactggatcagacgagaaagaagaaaaaaaaagttgtacttttgtatatggcagagatggctagcaggatagaagcgttaagatagctcatgcattcacatatcaggctttagcaaatgtatacatcttaaaatttgcggagttaggtctttggtgctggtggatgcataaggtgatagcatcttcaaaatcatgttctcgttcacaatctttggtgctggtggatgcatagttcttttgttgctggtgcgttc

SEQ ID NO: 278195 - DNA, 614 bp, Zea mays
cttggaacatctggtcagaacatagatgacctgtgcaagtactctgatgctaaagacaagctggaattcatggaaagaacactgagatggcgccatcttgctcctactgctccaaatagcctaggctgttatccatacacagacaaggatcctttccttgttgaaagttgcccgcacgtctactttgttgggaatcaagataaatatgaaactcgactgttggaagggcaagaaaaacagaaagtgaggctaatctccatcccaaggttctcggagagtggagttgctgtaatgctcaatctgaggaacttggaatgcagcacattgagtttctcaacaagctttgatgcctgaatatgctctgatgtttggaagtgcagaagacttcaatgtacaatgttgagcggcatgaccacgagggtgtatttgtactagagcagttctttattagatgtatgatgatgaccttaggttttgccaagtagatcttttagaatgcagatgctgtaacttgtaaccacaaccgaaactgaggctggaccgagtgtagcgtttaacaatcgagttggtgctcatgcctcgttttgcaatcacaatcagcaggcacgtttgtc

SEQ ID NO: 278196 - DNA, 648 bp, Zea mays
ggacggcagcggggactacacgacggtggcggcggccgtggcagccgccccaccaactcgaagaagcggcacgtgatctacattaaggccggcgcgtacatggagaacgtggaggtcgggaagaagcacgtcaacctcatgttcgtcggcgacggcatcggccagaccgtcatcaaggccagccgcaacgtcgtcgacggctacaccaccttccgctcggccacagtcgctgtggtgggcaacaacttcttggcccgcgacctgacgatcgagaactcggccgggccgtcgaagcaccaggcggtggcgctccgcgtgggggcggacctgtcggcgttctaccggtgcagcttcgtggggtaccaggacactctgtacgtgcactcgctgcggcagttcttccgcgactgcgacgtctacggcaccatcgacttcgtgttcggcaacgcggccgtggtgctgcagggctgcaacctgtacgcgcgcaggccgctgccgaaccagagcaacatcttcacggcgcatgggcgggaggaccccaaccagaacacgggcatctccatccagaggtgcaaggtggcggcggcggccgacctcgccgtcgcccagtccttcaccaagacctacctgggccgtccatggaagcag

SEQ ID NO: 278197 - DNA, 432 bp, Zea mays
aatacagtttgaggttctgacccagattgtcgcggcggtgaaggtgaagcaacggtgctctagctcctatgtacagcttagcaattcagtgtggaagggctttgtgcttactgatatagcttagatccatattgaactcttccagtagcttttatagctatctagtctaggagtccagatttgtgattttggcgatttaggtgttcagttcttttgtacattggttgagctagttgtgtgtagctgattctattgcagcacccccggtgagctctagtgacctatttgttgacctctgctggaagttgcatcttttgtgctagcaactgtgtcgtgactcgtgagtgctattgctctgctgaaggtataaaagttgctgcaaaggatgttcaaaaaaaaccaaaaaaaaaaaaaaaaaaaaaaaaaattatt

SEQ ID NO: 278198 - DNA, 852 bp, Zea mays
cggacgcgtgggcttgggtctgggatcatttcttcagccagatcgagcctattgctgccagtactccataccatgtctgtataggaaatcatgagtatgattggccatcacaaccctggaaaccatggtgggctacatatggaacggacggtggaggcgaatgtggaataccttatagtgtcaggttcagaatgccgggcaattctattctacctacaggtaatggtggcccagacaccaggaatctttattactccttcgactcaggcgtggtgcatttcgtctacatgtcgaccggaacagattttgttcagggaagtgaccagcacaacttcttgaaagcggaccttgagaaggtgaaccgaagtagaacaccgtttgttgtttttcagggccaccgccccatgtacacctcaagcgatgaaaccagggacgcggctttgaaacagcagatgctccagaatctggaaccgctgctggtgacatacaatgtgaccctcgcgctatggggacatgtccacaggtacgagaggttctgcccgatgaagaattcccaatgtgtcaacacttcatcaagcttccagtactctggcgctcctgtgcatcttgtgatcgggatgggcggccaagactggcaacctgtatggcaaccgaggcctgatcacccagacgtccctatctttcctcagcctgagcgttccatgtaccgcggtggcgagtttggatacgccagacttgtggcaacaagggagaagctaacactgacttatgtggggaaccatgatgggcaggtccatgatatggtggagatattttctggcctggtatcccccagtaacagtagtgttgctg

SEQ ID NO: 278199 - DNA, 400 bp, Zea mays
  unsure (1)..(400): unsure at all n locations
gttttcttaggatgtcaggatacaccaataaatcccaacagctcaaatactgactacaaggtctggaaagacctatgagaattgctgcaccattcctgtatctgagggtgggcaattgacaggccaagaagatattggaaatgcatcacgtcaagacctacgagaattgctgcactgttcctttatctaagggtgagcaattgacaggccaagaagatagtagaaatgcatgacgccttcaaaaatatgttcttaacatagatagttgtttctatcattctgcggtcagatatatgtgcatagttntgggaacactagcagctggtaactgatttttatttgtcatgcctattttcttgtaccttgtattcttctggtgcaatataagctctatctctct

SEQ ID NO: 278200 - DNA, 670 bp, Zea mays
ttgttcgcgtgggcgagaagctcaccgactccgccagcgagctgatctcgcggatcacggccaccgcgtcttcccctgcggacctcgcaggcgccgatgtcgagctagcaccgtacctcctcgactccttcggcaacgccacccgcatcgactacgggacggggcacgaaaccaacttcgccgccttcctctactgcctcgcgaggctcggcctcatcaccgagcccgactacccggccgtcgttctgcgcgtcttcacagcttacctcgatctcatgcgcacgctgcaggacacgtaccagctggagcctgcaggctcccatggcgtgtggggacttgatgattaccatttcctgccgttcatatttgggtctgcacagctgattgaccacaagtacatgaagcccaagtcgattcacaacccagatatcttggaaaatttctcaaggagtacatgtatctggcgtgcgttgcatatgtgaagaaggtaaagaaggggccctctatggagcattcaccaatgttggatgatatcagtggagtggccaattggaagaaagctaacagcgggctgctaaagatgtacaaggctgaggtgcttgagaaagtaccgatcatgcagcatttcctctttggctcactaatcaaatgtgaggataattacatcttt

SEQ ID NO: 278201 - DNA, 523 bp, Zea mays
gatgacttgcaggctccttgatgccgtacgagaatattactgaaatgccttctgcttctgcattcgattcacatatattgggtgcacccataaggcgagggcatctatcacaaaagtctgtcatgaagcgaaagagatctttcaagagacaaaaagccaagttggtcatggaaagcttgaaattttattgcatgacaatgatgaagaggaggtagcattgcagagagttgcccaagctgaatgtgcggcaaaataggttgtacaaagagctattcgactgcgcaacaaggtccaattctcatgacgaacacagagctcgcaacatacaaatctatcatggctctcaggattgccgaggctgctagggtatcagactcgtcccaagatattatttgtattatcctcgactaaagaataatatgggttcattatttttgtgaagagcatgggaaacactcttcgtagccatgatattgtctttttgatgtgttgctcattgttttttaagaatatactgccttgt

SEQ ID NO: 278202 - DNA, 1115 bp, Zea mays
atacagatactcagggatcgacgccatgcttttttacagtattaggcatggatgatactgatgggccgtacaacaatggtcgggcatttagtagacagctttcgagcattcagtctttcaattcaaggtttggatctttcaattctaggcttggatcattcaattgcagacgtggtggtggtccaaggtctgagaatatgtcaatccctcctgaagaacttaagtgccctatttccttacaactcatgtatgatccagtcatcatttcatccgggcagacttatgagcgtatttgcattgagaaatggttcaacgatggtcacagcacatgtcctaaaactcagcagcaacttgcccacctgtcattgactccaaactactgtgttaaggccctcattgccagctggtgcgagcagaacgattttccacttcctgatggtccaccagggacttttgatgtaaactggagacttgcttcctctgacactgaggccgcaggctgtgtgtctgttgaaagttttgactgtgccagtgcaaagagcgtcaaggttgtcccaatggagaacgttagaaaggaggagccagcaaacagtgaatcgggaactctggatgacggctcctgtaacgatttcgatttgaacgaaggctatgggaacttgctgctcctgctccatgaaagaagtaacatgaacaagcagtgcaggttggtggagcagataaggtatcttttgaaagacgacgaggaagcaaggatccagctgggctcaaatggctttgccgaggcactggttgagttcttgaggaatgctgtgaatgatggaaatgagaaggcacaagaagttggtgcaatggctcttttcaatcttgcagtcaacaacaacagaaacaaggggctcctgttatctgctggagtcaccgatctacttgagcagatgatatcgaatccacggctatctggtcctgccacagcactctacctgaacatttcctgccttcctgacgcgaagcctgtcatcggttcgagccaggccgtgccgttcctagttgaccgtctgtacagccaagacggcaacgacacgaaagcaagctcctgcaagcacgacgccctgtacacg

SEQ ID NO: 278203 - DNA, 423 bp, Zea mays
gcctcccgcgctctattctctctatctaccactactactacccagcagcagcaggccggcacacactacacacactctaatctctccacacagccaacactgccacggacaggacaggaggatgaagctgggagcaaaaggcctcggcctcctgctcctccttgtcctgcttgcgctttgctccaccattgaagtcggcgaggcaagaagagaccggcattggaggtcgtcgaggacctcctcctctcagctgctgaagaaaggcaaaggaaagaagaccagctcccgccgccaatacggcagcaaccggccaagtccgaagccaccggccagctcgacaccgagctctggtgccggcggcaaaggaaaccagactccgtaccaaccaagcccgaatgcccctcacattccgaggccaagccc

SEQ ID NO: 278204 - DNA, 413 bp, Zea mays
cgtatttatttttgctcaccagggtccctggctatcgagagaactcgacgagttcatctccatcgtttgtgagagtttcggttgggccagattgtcatactcagcgtcctgcctcggggtcaggcccaagtgtactgaaagccagctcttgcccgcatctacacggccccattttcagcttgcccctccagaaccggtgcatgaacagttgcatctgatcctaagtcgttgcttcctttcccttctttcttagatctagctagccaccgtgtcgactggcggatgatacagtatctccacatgctggttggtgagtgatgaccgtaccttgccagatctgcagcaaactatcctatgctagctcctcacatccgcacaaaacaacaccttttagcaaaaaaagtttttttttg

SEQ ID NO: 278205 - DNA, 447 bp, Zea mays
gcaaagggcatggtggcggtaagaggtgcctctttgagggaggtgggatgtgcccaaagagcgtccatggtggaaccagcttctgtgttgcgcatggagggggcaaacgctgctctgttcccgggtgcaccaagagtgcccgcggtcgctctgattgctgtgtgaagcacggtggtggcaagcgttgcaggttcgatgggtgtgacaagagcgcacaggggagcactgacttctgcaaggctcatggagggggcaagcgatgcgcttggagcaccggctgcgacaagttcgctaggggaaggagtggcctatgcgcagcgcatacgaccctgatggcttccaaggtagtgcaccatcctggacatgcacgaagcatggtcgggccttgccactttagcggcggcgtctctggttcgtcagcagctgatagcaacatggatcatgcca

SEQ ID NO: 278206 - DNA, 429 bp, Zea mays
gaggaaaagggccgtggtcgttgatgatgatgatgatgatgaaacggaggatcaggacagggtcgtgaatggtggtgggtcgctcagcttgataatagggggtagtgctgctggtgctggagcgatggagaacggcgatgtaaatgaggatgagagaaatggaaagaagatcagggtgcaaggaggcggctcaagtgggccggcatgccaggttgagggctgcggagcagatctgactgcagcaaaggattatcaccgtcgggcacaaggtctgcgagatgcatgctaaggccaccaccgccggggtcggaaacactgtccagaggttctgcccgcaatgcagtagatttcaccttcttcaagaatttgatgaagggaagcgaagttgccggcgacgcttagcaggccacaataaacggaggaggaaaa

SEQ ID NO: 278207 - DNA, 638 bp, Zea mays
ggaggtcattctggatttctggtttcctacagaaggattaaacagctaggttagtggaaagggacgtccgaagatatccatgcctatgtccagacatgcaatatctgccaacaggccggaccggacaggaccagctatcccgggctgctcgcgcctctacctgttcccccgcatgcatggcattctatatcaatggacttcattgaagggttaccgaagtccggaacaatggattgcattctggtggtggtagatcgattctcaaaatatggtcatttcttggcgctggcccaccctttttctgcagcaaaggtagcaaaacttttcttggataatatctataagcttcatggtatgccggacaatatagtatctgatcgggatagagtgttcacaagtctgttctggcagcaattattcactctcagtggcacccaattatgcatgagttcggcttatcacccacaatccgatggccagacggagcgcgtaaactagtgcattgaaacttatttgcgatgctctgtgcacgcctgtcccagcaaatggtaccaatggttagctgttgcagagttctggtataataccaactttcattcagctctgaattggtctccatttgaggtgttatatggaca

SEQ ID NO: 278208 - DNA, 662 bp, Zea mays
cccacgcgtccgcccacgcgtccgggcagaatcagaatgagaacaggacattatggaagctaggaacgctgccccctggcttgatcactttctactcgaccacaaaacctctggagaaatcttggcatgttcttggacttggatacaatcctagcatcagcatggaggagattagaaatgctgctgttgtgcatttcaacggcaacatgaagccctggctggacatcggtatgaaccagttcaggcacctttggacaaagtatgtggactatgatgactcatatattcgtcaatgcaattttgcaccgccatagaaggttttaattatcgacaacgaagaagaatcggtaaacgtggcacatacatacgccgcaagcacgttttctgtagagataaggagtttctagagtacaactgaagggaccaccacaatcttttctagctcataatgtttgccattagttatgatcaaagtaatgtttgccacatgactgcatgagcattattgtcgttgtgtgtgttagttaatgtcagcaatactctgtatatgccgaagtcagatatatttctgtccacgtggatccaagaagtaaagtgcctgatgtatttacaaaaagcactaaatactaattgtagattgaacctctacaatgtcattgtat

SEQ ID NO: 278209 - DNA, 904 bp, Zea mays
ggcacttgacacttatcacgcggccgtcgtcgccgtcgcgcgcgcgtcgtctcgtctcgtctccccaaccgcacccggctcgtgccactgacatccgccatttaacgcgctctgcctctgatcctgcttctagacttctagtagatatgagcgctgagcgagcgcgcggccatggtggctaggctgctagctggtgctggtgctgctggttttctccgagctcccattgaataacacgctggagcattgatggtccctttcagatggtagatggcgcgcatttacgccgccacggtacgagccgagctcccctcgctcctctgctatatagcgctagctccaccatccaggccactaccctcccccaccgccattgctcagcagcagtagtaaagccacgcctgacagacagctggttcatttctggttgctgccttgctggtggtagccctcggcgcaggcagccaagaacagagagagcgagatggatgtgaacgacgtgctgctagtggtgctggcggcggcgctggctgccatgtggtggcgtcggtgctccaagaccggcggtgtcgacggcctgccgccggggcctccgggttggccggtggtggggaacctgttccaggtgatcctgcagcgacggcccttcatgtacgtggtgcgcgacctccgggagaagtacgggcccatcttcaccatgcggatggggcagcgcaccctcatcgtggtcacctcggcggagctcatccacgaggcgctggtgaagcagggccccatgttcgcgagccggcccgaggacagccccacccgcctgctcttcagcgtcggcaagtgcaccgtcaactcggcgccctacggtcccctgtggcgtgctctgcgccgcaacttcgtcgccgagatcgtg

SEQ ID NO: 278210 - DNA, 336 bp, Zea mays
aatgcatgcgtcctgcactcctgctccacctacactcgtacacagcacactcccaaaaccagagccacgcccgtcggcacaccggcccctgctttgactagcctcgccgccgcagcgacagccatcgccaccgctgcccgctccctccacctccctggtccgacgcctcctaaatcctctacccccttctcccaccgcctccctgtcccttgccacctccgcccgcaacgccggcgcctggccgactcgtcctccgacctcacctgcttccccgaaccgactaccgtcccgaacggcgtctacgtgccgtgggccgctgccttcttcgtagccgaa

SEQ ID NO: 278211 - DNA, 509 bp, Zea mays
tccacgcgtccgagcaactcgagtagtagttgccagccacacctcctgtcttcctttttccttctcgcattgtggaggagaaggatcaagtgctcataagcaagctagcttgacgaagtataggaaattaggaatacaaataaactcatcctcctcatatataaacgctcgatctccagatatggccggcctgtccctgctgcatcccatggccttcgccttcggcctcctcggcaacatcatctccttcatgacctacctggccccactgccgacgttctaccggatctacaagaacaagtcgacggaggggttccagtcggtgccgtacgtggtggccctcttcagcgccatgctgtggatctactacgcgctgctcaagtccaacgagctcctgctcatcaccatcaactccgccggctgcgtcatcgagaccctctacatcgccatgtacctcctctacgcgcccaagaaggcaaagctgttcacggccaagatcctcctcctcc

SEQ ID NO: 278212 - DNA, 693 bp, Zea mays
tgcccatcgcgtctgagaaagggttgctcccataggaggccattcagaatattcctccactggtggtgagctgctatctacaagtggccgtacccttctagagacgtgtagtaagtattgcgctcgcagaatcaacgggcctagaccagaagcagatcaacaactggttcatcaaccagaggaaacggcactggaagccatcggaggacatgcctttcgtgatgatggacggcttccacccgcagaacgccgctgctctgtacatggacgggccgttcatggccgacggcatgtatcgcctcggctcatgaactacacacttccatggacgactgtggtggcctatccaatcgtcggaccgtgggagtatatttcagtgttgcggcgcaaggacattggataggcccccgcagaacgccgttgctctgtacatggacgggccgttcatggccgacggcatgtatcgcctcggttcatggactacacacttccatggacgactgtgggggcctataccaatcgtcggaccgtgggagtatattgcagtgttgcggtgcaaggacattgttgtggaatttttgttgctgattgccaaggggtgggtcggtcgatgtagcgtctatgcatggcttgtagttctcctgtaatgttgctgctaatttccgcttggcggcttgtaatctaggtgtatct

SEQ ID NO: 278213 - DNA, 378 bp, Zea mays
  unsure (1)..(378): unsure at all n locations
acgccgctgctctgtacatggacgggccgttcatggccgacggcatgtatcgcctcggttcatgaactacacttccatggacgactgtgtggggctctatttatccaatcgtcggaccgtgggaggatattgcagtgttccaggaccaggatgcgttgcagtgcaaggacattgttgtggaatttttgttgctgattgccaaggggtgggtcggtcgatgtagcgtctatgcatggcttgtagttctcctgtaatgttgttgttaatttccgcttggcggcttgtaatcttacgtgtatctggaacttgaatcctgggtgattaatccggcaagcagctgcctgtttgtaaaaaaaaaaaaaaaaaaaaanaaannaa

SEQ ID NO: 278214 - DNA, 708 bp, Zea mays
attaccggtccgacgcatgcgctcgtggggacatatatccagattatgattgcatcgctgttcgggcacacttgttcttccgggaggaggagttggaaagtttcaagcagatggtagacacctacttatctgatgcctctaggcaatgggcagccacaaatgaaggcagttctcttctggacagtatgactaaagcaattgatgaggttatcaaaatcaaagagtgtgacatctacagctataatccagactctgacgcagatccagttcttgagaaaggggccatatggtcgttcaactactacttctacaataggaagctaaagcgagttgtgagctttcgatgttactgcactagcaaattatcaggagatgacttcttaaccggtgttgcgtctgatggtgaagaggaagatgccttgattgacatggacatatgactgaccgtgttctgctagctacctgatgtgcgtataatatagaacatgtatgctcattcctggtagggaactttcaatatgacgcacttttaccgtttcctgtaaaaaccatggcacggtttagctttgtctgtatatgcggatttgagatttggtggcgggaaacttccaatcccctaggcttgaactgccacggtaattcggtactctgttgtttgctagacctgcaatgaataatgttgcgccaactgaattgttcaatttgatc

SEQ ID NO: 278215 - DNA, 571 bp, Zea mays
ccctcgcgtccggagagaggccgtggaaaggaatctttcagctcacacctccctatccctccttcccttctcctcctactgctactgctcgccaggtcccctcgctcgctcgctcgtcgtcttcaacctcacacaattatttgtgctcccgctccttccgtccgtccttcctcccccctcccctctccctcttccaaccgccgctcctgctgccttgcctctcagcccagggacgccaaggtctctgccaggatggtgtaggccgtgcctctcgcgcattatgaggtgtggtggtgagggatgggcgatggcctttgcagatgaaggagcgacagcgctggcggcctgaggaagacgccgtcctgcgcgcctacgtccggcagtacggcccccgcgagtggcacctggtgtcgcagcgcatgaacgtggccctcgaccgcgacgccaagtcgtgcctggagcgctggaagaactacctccgccccgggatcaagaagggctcgctcaccgaggaggagcagcgcctggtgatccgtctgcaggccaagcacggcaacaagtggaagaacat

SEQ ID NO: 278216 - DNA, 512 bp, Zea mays
gacccacctcgccacgacgttactcccatcgccgctttttgggcgcaccccagcaaacatcggtcgatccgcaaccggcgaccccatcgtgactgggccccctcatcgaggtctccctctttcgccgcccgtgaccatggccccaagccgtcggaggtgtacggcttcgttggatccatcaccaccgtcattgccaccgccgtgtacctcgcctgggcatacacgcccgagcccgtcctccagtcactcggcatcacctactaccctagcaagtactgggcactggcggtgccatcgttcgtggttgtgaccgtggtgctgtccatgggcatctacatgggcctcaacttcgctgccactcctcctccgacttccttcagtactatcttcgatgaaaagagtagggagcacacagccttttttcctgcaactgaagatgaaaggcccatcgaacccatctcagacatcggtattgatcggatcaacactcttatgtttggtgatagatgatt

SEQ ID NO: 278217 - DNA, 683 bp, Zea mays
acccactcgtccgcggactcgtgggcggactcgtgggctacttcttttgatcgcctgaaggaaaatgaacttgggctagctattgttacaagaggaggctaagcaacttgatgcttatacccaaatcatgataaacggttctcctcgtcgcctcatgaatcatggagctggtggcaagagttcacctacggctcacagcaggcatcctttctccaaccaaggtagccctagaatcccgagcggtggcagcctgaggagggcttgttgatgatcctgttccgcctgatccattggcttgtggcttaaccagatgctccctgaatccccgatatatgatggatggacgaagtgccccggcaatagcactgtacctgtacatacccattgccgtccagcgctgtgctgttgtggaatcccaacggtctccctttgttttgtagtattggcctattggggttccctatcctgttgtcggagttgtgccattatcccttccatggttgacctgagctttagcctgtaccctgtagactctactagaggttaacctgaggctgaattcccgctgctaagatgtgatgttcccggccataagcaaagatgcaggttgtctttgctttgtaaaaatgaaggttgtctttgttttggaatccaaaaaaaacccctccggcttcgatagcccc

SEQ ID NO: 278218 - DNA, 624 bp, Zea mays
ccctcgcgtccgctgtcaccccctctccctctgttcgccactttataccgcccgcccaccactcccctccccgtttctctctgcttcatccttcgctttcccctgcgccaggcccgccccgccccgcccctccagaacgacatcctccttccccgccccctccgatggggaacccgccggagctgtaccacaagatcctcaacatccccaaggacacctcgccgcacgaaatccgcgccgcgtacaagaacctcgtcaagaagtggcaccccgacaagcacccgccgtcgtccaggccggaggccgaggcgcgcttcaaggccatcagcgaggcctacgaggcgctcctggaccagcaggagaacaggggcgtgttcgagctgtgcaacgacggccgggcgggtgagaggacgcgcggcgccttcggcggcgccggcggcggcggtggcggaggaggaggaggcctcggcgccggcgtcggggcgcgcatggagaggacgcgcagcgacgggttctgcacgaggagcgcgcccggcacgccggcgagggagttcaagaaggtgtacagctccggcgaccccggcgggcgccgcgccttcggcgagttcttcagcttcatcgtgc

SEQ ID NO: 278219 - DNA, 602 bp, Zea mays
agcaagatctgtgcttggaaactagtcagtttatctctcgatggcaaaagatcggaatgggcgtgcaaagtctgtagagaataggcatgaaaggtcagagggtgctatgaagcctgacgttcagcaaaagaagagcactgtggcttcaaatggatctgatattctaatacaatcttccttcgtacaagggaaatcttcagtggttgcacgtgcaatggatgagcctccaaaacctgtgtctgatgagggggttaaagtttctacaaaatctacttcagaatttgagacaagggcaacacaaaagcgtgctggccgtgctgggaaggtaatgaagcatgatgttgcaaaggaagatgcaaaagctgggaaacctacaagctggaatgtaaatcaacaagtctccactgttgatagagaagtgtctcatgcagctgatgctgcccaagaaaccagtaccactattagcaatggtaacttgcatccagcgccgcataaggtttcatcatcttctcaaagaaatgcagttacacataatggagcagccaatccctctgttgagtctactgatatgattgactctcctgtgagacagcaaaaaagac

SEQ ID NO: 278220 - DNA, 656 bp, Zea mays
ccttcccgacccacgcgtccgtttgatctgttcgaggtatcttgctgatttaaatgaagccccctccttctgatcgaattgggtatggatttacgtcaatgcctgatctagaatgggatttggaatcttctgttggggataggaaaatcaccaacagtcatatcgctgcacttattggtaacagattcaaggcttcgcttcgagatagcttagtgcttccgaattgtgaaagcatctccatgccgtggatgttggctgaaaaggatgattgggtacctcgcaaggatgctccttttatttggctaaatcatgagcccactgagatgagaatccatgccacagctacagcatcaactcagtccgaggaaggtggcttgaaggatggtgggagtgaggaatcatcgagagtagtggcatccattgacgaggcaaaacaagagcccaaggcagaggcatcattgcacggccagtcttcatctgctccaggcagtgaatctgcccacagcgatgcaaatgatgagctgaggaaaccgctgttgatcacagagaaactccaggatgaagcttcagaaggtatagccatgtctcccatgtccacatctcggagggcggtgataccagcacgggagcagccgcaggtgtcagcatcacccatt

SEQ ID NO: 278221 - DNA, 362 bp, Zea mays
cacattctcaaccatacgcaattccaacccggggtttgctccgccccctcgtccggttccaccggtgcatcaacctggaagtagaaactttggggcagctcgttcaaatactggtgggcctattggtggccaccttgctcatcaacagaactcccagcaagctatggggagcattgggtcaaattttaactacactggcatggagaatccaagtagtcagccttctggtggagcacaaatgtcccaaactggattaatgacccaggtgcctgtccaaggactaagtcaaacattccgtgatggtttttctattggtgggatgtcacaggacttctttgtagacgattttaagagccaaggat

SEQ ID NO: 278222 - DNA, 477 bp, Zea mays
ggccgtccttgaagagcgagcagcaatggcgcaggagatcgagcacacccacctccccatccgcggcctcaacctccacgtcgcacaagtaggcacaggtgaactgggcacggtggtgttcctgcacggcttcccggagatatggtactcgtggcgccaccagatgcgggccgtggccgcggcggggtaccgcgccatcgcgccggactgccgcgggtacggcctgtcggagcagccgccggagcacgaggaggtctctcctgacgacctcatcgccgacgtgctgggcatcctcgacgccctcagcgtcccgaaggcgttcttggtgggcaaggacttcggcgccatgccggcgtacgagttcgcgctgcagcacccgggccgcaccctcggagtggtgtgcctgggcatactcttcaacccggcccccatgttcttcgacgccatcatgcccgaaggattctacatcctgcgccg

SEQ ID NO: 278223 - DNA, 453 bp, Zea mays
cccatgcttccggctttggttaatgctggaatgcgtgtgtatttacaagaaactgaacgaaattggataatatctgatgtttcaattgtctttggtggggtagcagcagttccacttagtgcttcaagaactgaaaacttccttactggaaagaaatgggactctgggttgctggatgatactttcattttattgaaagaagacatctctctggcagagaatgcacctggtggaatgattgaatttcgcagatcgcttactttgagtttctttttcaaatttttcctgtctgttacccatgaaatgaaaatacaaagggttgttagcagatggattgcatgcagatcatctgtcagctgtacagccttacagtaggcctgttactgttggaactcaaagttatgaaattagtaagcaaggagcttctgtaggtcagccaatggttcaaatgtc

SEQ ID NO: 278224 - DNA, 533 bp, Zea mays
  unsure (1)..(533): unsure at all n locations
gcatgaggaaatcaacgactgattctccattactgtcggtcacttcggatggcggcaccgccngatgggaatgtccgcttaggcgaggggtgggacgaggacgacgtgctggagccgcagccgctggaggtcatagcgccggatgtcaagtccaagaagcgcaatccggcgcccggagttcgggttgttggtcgccggatctacgatccagagaatggcaagacctgccaccaatgccggcggttgactacagacttcgcagcggcctgcaagcaagtcaagaagaagggtccgtgcccagtcaagtattgcctcaagtgcctccttaacaggtatggcgagagtgccgaggaggcggccggcaaggaggactggatctgtcctaagtgcaggggcatctgcaactgcagcttctgtagaaaggagaaaggcctgatgccaactgggataatggcccacatcgccaaggcttccgggtgcacctttgtccatgatctccttaaaaaggggtcagatgtggtatccgcttcaca

SEQ ID NO: 278225 - DNA, 418 bp, Zea mays
aaatcaccttcatgctgcttccgtcttgatgacagtgataatgatacttgctttcctgacttcatttgcttttgctcggcgcattatgaaagcaacatcggtcctaaaggttgctgcaaaggtcgttggcgaagtccaggcacttattatttttccagtcgtgccatacttgatcctcgctatcttttacactttctggttttcagcagcacttcatcttttcagcgccggtcaagttatacaaaatgattgcaatacagattgctgttcctacgatctgaaacttggcaaagtaaattgtgacagatgttgtggctacactatccattacaccccacatattggcatcgccattcttttccatctttttggctgttactgggcaacacaagttttcatcgggtgttcttcgactata

SEQ ID NO: 278226 - DNA, 456 bp, Zea mays
agtgaaagaaaataagggtattaaaataaattatgtagtagtgtggagtatttattgcatagagcaatatatatatggggtgaggtacacagggattaagtcaagaacgaaccgttcgctaggctttgattgcttgagcaaacacgttttgctatcgctcaagcttgttatatgctcatgtggtggttcgggtattgacttaagtctctggcaaaagaaagtgaaacaccacctattagggcttctcctatatataaaatatatatgtagcagtttgttttcaaccatcttgtgaagagttctgttcttttgtttctccgatatagcgaaatatagagatgagaatgtctctgtgtttgtaacgtttgtgtagtgttatttccgttgagttgatatatatgacatgtacgctttggtcatttgggaaaaatatggtctagtgtagctcactttaaa

SEQ ID NO: 278227 - DNA, 520 bp, Zea mays
gaccactcgtccgctgaggttccagcgttcgcgctctcttctcctctccgtcggcgacgactacgccgggtcttcttcggacccaggtcgttgccgcctacgccaggtgcccaaatcttcttagggcccttcgccggcgacgagcacacaagcttggttgacccccaacaaattgcaaaatgtcagccaatgtcggtgaatcaaccagcggtggcagcagcaacgatgcagctggggggagctttgaatgtaacatatgctttgagctgcctcaagagccaatagtgactctttgtggccacctcttctgctggccatgcctttaccggtggctgcacatccatgcacattcgccagagtgcccagtgtgcaggcctcgtggggaggacaagctcgccccttatgggcgggcaggacgcgtcgaccgaggtcgagacatgccgaggcgagatctcacgctcacggcagtgctgctaagccacggccatctacacacttgcatgcatgcatgcatcatgtc

SEQ ID NO: 278228 - DNA, 410 bp, Zea mays
agcaaaacgatgaattgttctcagatttatcaacaccacttccaaaattgcagttccagtgcgatgatcgtcaggtttggcttgatgccgaaatgggacatgaagtttatgctgcggatcctactgccagcagtggtgctgttgtaactgcagaatgcactgtcacagaacttccacttggagatcttgaagggcttctgctgcaaatagccaatgaccagcacatggtcgaatcccaatcagatctttctgcaccaactccacatcataacttgaatcaagcttacattggggatttacatgaatctcatggtgctcgggttggtaatccttcttgtatagttcaggaaagcacattttgtgaaccacggacttgaccaaatgatcaatttccacaggctaatgtaacc

SEQ ID NO: 278229 - DNA, 471 bp, Zea mays
cactgcaggagcttggggcacaacggcttgtcggggccgatcccagcgggcatctcggagctgaagaagctggagatcctgcggctggtgtacttcaacctgagcggcgagattccccagcagctgggcgggctggagaacctcctggccgtgaacatctcgcacaaccgcctcgtcgggcggctgccggcgtcgggcgtgttccagagcctggacgcgagcgcgctggagggcaacctgggcatctgcagccccctggtggcggagcggtgcattgatgaccgtgcccaagcccctggggccggaccccatccaggtcacccaccgcggcggcggcgacaacaacaacatggagacgaacggcggtggcgtgggcgcgccgaggaagcggcggttcctgagcgtgtccggcatggtggccatctgcgcggcggtcgcgatccgtcttggcgtcaatcgtgatcacgctgc

SEQ ID NO: 278230 - DNA, 415 bp, Zea mays
cgacccactcgtccgcccacgcgttcgcccacgcgtccgagccgttcatttcgacgagccattactccccgtttgcgcaagttccaccacgcaggcagtcaggcacccgcattgtttcaaaattctcgaatcggcccctggttctggcagcgcagccgccgccggcggacggagggccctctttccgggtgaggcaaggcgaggcctgctttgcctcgctgtaagctcgccggaggaggggaccggggaggggaaaggacgcgcggcagtggtggagtggaggtgccaaggctgagggaggcgcgccgccgcccatggacgccgcgcggtgggtcgcgtgcctgctcgtgacggtcatctgcttggcctgcgccgccgccgctaccgccgccgtgaggtcgccggcggcgaggct

SEQ ID NO: 278231 - DNA, 324 bp, Zea mays
agcggctagtggacgcacgcgccgctcccaaccgagacgacgagccgcccaaggcgacgagccattactcccgtttccccaaatcccaccacgcaggcagtcaggcacccgcagtgtttcaaaaatctcgaatcggcccctggttctggcagcgcaccgccgccggcgtacggagggccctctttccgggtgaggcaagtcgaggcctgctttgcctcgctgtaagctcgccggaagagggaaccgcggaggggaaaagacgcgcggcagtggtggagtggaggtgccaaggctgagggaggcgcgccagcgcccatggacgcc

SEQ ID NO: 278232 - DNA, 380 bp, Zea mays
cccaggcgtccgcggacgcgtgggtccggtgcggcaggcatctcctctcccgccccgccccgagcaacgcccgctaggctcaggctgctgctacccgcagtccccatccaccctacccgcagtccccaccgcaaccgccgcctcggcccgggctgtgttgacccccgttgacctccgccagcccggccgtcatggacctgcgcttcccgccgccggcgccgtcgtcctgcttcggcgggggcggtgtgctcccggcacgggggcaccaccggcgggcgcaatcggagacgttcatccggctgcccgacgcggacctcctgctggacccggatgccgacttcggcttctccgacatcgacttcccctcgctgtccgacgac

SEQ ID NO: 278233 - DNA, 449 bp, Zea mays
actcattaaacctacatctggtactgcttatgtccacggaatggatataaatatggacatgggtgacatatatacaaatatgggagtctgcccacaacagaacttgctttgggaaacactgactggaaaagaacatcttttcttttatggtaggttgaagaatcttaaaggttctgcattaatgaaggctgttgaccactctctgaagagtgtaagtcgctctcatggtaatgttggtgataagcaagtgaagaaatacagcggaggcatgaaaagaaggctcagcgtggcaatctcattgattcgggaccctaaaggtgtcttcatggatgagccaagcacaggaatggacccagcatcaagagataacctatggaatgttgtgaaggaggccaagaaaaaccgtgcaattattcttactactcactcaatggaagaggcagaggtat

SEQ ID NO: 278234 - DNA, 482 bp, Zea mays
caaaaactctcacgatacatctcaatccactccattctctcttattcctagagtacccaaacaaagccttaggtgacaagattaccctcaagcagaagggtggcagttaactgtgacaagtgctgcagttgtatcatcatttttctcttttaggaaatccacgtgccagagataccagtgccgtggcattgaattgagtataaatgtttttttgtacaaaaggatcaaagaaacagataagaggacagttatgaggaagtcacggtgttagatccctgagcatgaagttctcggtcgaagatccatgttgctgtagtaacgatgctgttccaacttcctttcctgataaaatgacaatgtagaaatagttctgaagttcatgttgatttgtcgacaggtgggtcaattgtgatcctgtacgattgttatgaatccctcttgttttgttgtgaccttatatctgctcttaatttaaagcttat

SEQ ID NO: 278235 - DNA, 463 bp, Zea mays
cgaacaatttcaattacgataacaaggtcggcgagggtgggtttggcagtgtctattggggccagctctgggatgggtcacaggttgctgtgaagaggctcaagagttggagcaacaaagctgaaacagaatttgctgtcgaggtggggattctggcacgggtgaggcacaagtagccttttaagcttgcgcggatattgtgctgaaggccaggaacgcttgatagtctatgattatatgccaaacctgagcatacacgcccaacttcatggacagcacgcagcagagtgcaatctcagttgggaaagaaggatgaagatcgccgtcgattccgcagaagggatcgcttatctgcatcaccatgcgacgccacacatcattcatagagatgtcaaggctagcaacgttctcctggattcgaatttccaagctcgggttgctgactttgggttcgccaagctag

SEQ ID NO: 278236 - DNA, 796 bp, Zea mays
ctggttttattggaagtcagcgttatgctgcaacatggactggtgataatctttcaaattgggagcatctgcacatgagtctaccaatggttcttcagttgggtctcagtggtcaaccattgtcaggtcctgatattggtggttttgctggaaatgctactccaaaactttttggaagatggatgggtgtgggtgcattgtttccattttcacgtggccatacagaaactggaagcattgaccacgaaccatggtcctttggtaaagagtgtgaggaagtctgtcgccttgcgctactaagacggtaccggctactgccacatatctacactctttttttaccactcacatacaaagggtattccagttgctactccagttttctttgctgatacacaagaccctgaactgaggaaagttgagacttcctttctccttggaccactcttagtttgtgcaagcactttacctaataaaggagctcatgaatatgcacataagttaccgaagggcatatggttgtcttttgattttgcggattcacaccctgatctgccggtgctgtatctacaaggtggagcaattcttcctgtaggtcttcctattaagcatgttggtgaagcaagtttggaggatgacctgtcactaattatcgcattgaatgacaatggtaaagctgaaggtgttctctttgaagatgcgggagatggatatgcattcacacagggagactatcttttgacatattatattgctgaactccactcatcagtgggtactgtcaaaatcgtaaaat

SEQ ID NO: 278237 - DNA, 447 bp, Zea mays
cccacgcgtccgggctcatggactaggaggaccacacgcggatcgtgccccgcaagtgctactgcttcctctccttcctgctcggcgtcgtcgcgctcttctccttcttcgcgctcgtgctctggggcgcctgctggtcccagaagccgcgcatcgtcatgggcaccatccgcttcgacaacttcatcatccaggccggcaccgacgcgtcgctcgtgcccaccgacatggccaccaccaactccaccgtcagattcacctaccgcaacaggggcacctttttggggatccacgtcaccgccgacccgttccagctctcctacagccagctgacgctcgcgtcaggagacctccacaacttctaccagcctcgcagcagcagccgcaccgtcagcgtcgccgtggtcggcaacaaggtgccgctgtacagcggctgacccacgctga

SEQ ID NO: 278238 - DNA, 440 bp, Zea mays
ccaggcgtccgcccacgcgttcgaagcaatcaagctgcggccggagcatcttggagacaggaagaaggggtggtagtaggtgaaaccggaggcggcaggagagggagagggagcgagagtagaggccacgcctgcttgacagcaaggcccgtgcgctcggcggcggcggcggcggatatgggcgactctggcggctctgttgtgtcggtggacgtcgagcgcatctccttcggcggcaaggaacatcatattcaaaccaaccatggatctgtatctgttgccatatatggtgaacatgataagcctgctcttattacctacccagatattgctttgaaccatatgtcttgctttcaagggctactcttctgtcctgaagcagcttcattgctgcttcataatttttgcatttaccatatcagtcccccatgacatgagtt

SEQ ID NO: 278239 - DNA, 614 bp, Zea mays
gacccagcgcgtcctcccacgcgtccggctgtacaacagcttgcttggattattaactcaacaagttctactgaagctgagttgaaatatccaaactatgaccaaaatttcctcatatctgtttcaacagtaacatcccttttggtaactcatacatgggacagcgtagcagcattggctctccatgactcttctatgctattaaggaatcatgcaatggcattgcttactgaatatgtgccttttgttgataggaagcacctgcagtccttcctttcatccagtaacgctatcctgaccggcttgggacaactttctggtgtaattgaagagggctattttacacgaatgtctttgctgtcgttttctaaggcatgtctttattctaatcctgaagatatcgctttgatacctgaatgtgtttggcacaagttggaaaacatgcaaacatcaactggaggttttggatatatggagaaagatctctgcctagctctgtgccaactaaaaagtgaatcagatgctacaactgttgcaaaagtgcttcctggatgtaatagtcaaccagtcagccctgatttcaagagcatccgtgaatcaatcctccaggtgat

SEQ ID NO: 278240 - DNA, 534 bp, Zea mays
gcgtccgtcggcttctagcaatgctgaaagactttatgttctttctcaaagaaaaagaagaagagaaatacaggcaacttgagaataaaaagatacagactctacttgtaaagaggcatgagaattcaataatgttaaggcccaacacaagcttcagccgtccatcaagcagaggcttcaatacgagtcctggctccacatccatctggagcagcccagtttctgcaaaagttcagctgcctgactcagagaactccccagctgaaaaagatatgcgtgcaaaaataattaggaacagaggtacgcagggcattttgggaaataacagaagctgttcaatctctcatgaagataaagcagaagtctccacagtgaagcaaggcatttcaccaatttaattttttctcactttaaatttctacagaaattgtctgcctgacgtgaagttgcaacagcccccttaagctattagataagtgaagaaaagtatgtttgtatgcagcttacaccatattcatatatatatatttattt

SEQ ID NO: 278241 - DNA, 754 bp, Zea mays
tcgcgttacgcgtgggattgaaaatgctattaatatctataatttatggttcttgctagttgtcgtactcttacactagtttgtgttgcacacacctggtgctagaaagagagcatgttcctgctgtccttttggtcgcttggtgctcactcctctgtatttgttggtaaaattgggtttcaaactattcttcagtaattaattaatctgtggtataacttcatattttgtgattgtttcttgaacataggatgtgctatagccttttacctggtatgattattggacataatactagcaatgataccttttcacttttccttgcacttaggatacccaactgcttctctgggatctggcattggacgagattgctgtccctctacgccatccttccggtgggtcaccgacattcagtagtggaagcccttctgcacactgggataatgcatgccctccaaccggtgttctccaaccctctccacggatgcgagatgtgccgaagctctcacctctcgttgcacaccgggtacatgtagatcccctatccggcctggaattcactagtgaatcaatcctcactatatgccgcgaggggctgataaaaatttgggcccgacccatccatagcgaaagcaaccagcagccggattcttctgaacaggttgtaggcaatgccactgctaaggataagatgttaacatcgtcaaataaagcaggtgcttccagccccagcttcaagcaaccaccacct

SEQ ID NO: 278242 - DNA, 1345 bp, Zea mays
cttttcttcgggagcaatggtaccagcagggctgtctcaggaagcagccgcatgggtggaggtattggtgtgtcaactagtgcaagtgcatcgcaaggcatggcgaactacgatggaaagggctcatacatcatattcaatactgcggatacgctcttcatcagtgatctcaactcacatgacaaagatccaataaagtccatccacttcagcagctcaaacccgctttgccatgcatttgacccagaggccaaggatggacatgatctgctcattggggtgttctcaggagatgtctattcaatgtcactgaggcatcagttgcaagatcctggaaagaagcctgtttcataccagcattttgttaataaagacaaagacaaagataaagatccaagtcaaggtggcgctgccagcagtcagtgcacctgtgttgcatgggttccggagcgtgaaggaatttttgttgttagtcatgctgatgggaatctgtatgtgtatgacaaattcaaggatggaaatactgattggacatttccaactgttaaggatcaaagccaggtgctaatttcacatgcaaagtcgagtaagagcaatccaattgcaaggtggcacatctgtcaaggtgcaatcaatgacatttccttttcaccggatggtgcttacttggcaactgttgggcgtgatggccatttaagagtatttgacttcgcgaaagaacaactaatatttggtgggaaaagttactatggtgcactgttgtgttgctcttggagtgcggatggcaaatatttgttatcgggtggtgaagatgatcttgtgcaagtatggagcatggatgacagaaagatagttgcatggggtgaagggcataattcatgggtgatattatccttacaattgtttttggctatcatcacataggcatttttaattgaaacttgcattttgagtcaaattaatttgcgattatacaggttagcacagtttcttttgatccgtattggtcccaattaatttgcaattatacaggttagtgcagtttcttttgatccgtgttggtcccaaccaaattcagatgaaactgaagaaaatgtcatgtatcgctttgggtcagttggacaggatacccaactgcttctctgggatctggcattggacgagattgctgtccctctacgccatccttccggtgggtcaccgacattcagtagtggaagcccttctgcacactgggataatgcatgccctccaaccggtgttctccaaccctctccacggatgcgagatgtgccgaagctctcacctctcgttgcacaccgggtacatgtaaatccccaaccgg

SEQ ID NO: 278243 - DNA, 527 bp, Zea mays
gttactacggtgctttgttgttttgctcttggagtgcggatggcgaatattggttatcaggtggtgaagatgatcttgtgcaagtatggagcatggatgatagaaagatagttgcatggggtgaagggcataattcatgggttagtgcagtttcttttgatccgtattggtccccaccaaattctgatgaaacggaagaaaatgtcatgtatcgctttgggtcaattggacaggatacccaactgcttctctgggatctggcattggaagagattgctgtccctctacgccatccgtctggtggctcaccgacattcagtagtggaagcccatctgcacagtgggataatgcgtgccctccagccggtgttctacagccctctccacggatgcgagatgtgccgaagctctcacctctcgttgcacaccgggtacatgtagatcccctatctggcttggaattcaccagtgaatcaattgtcactatatgccgtgaggggctaatcaaaatttgggcacgacccatc

SEQ ID NO: 278244 - DNA, 557 bp, Zea mays
ttcaagcttctctccccgctaccgctccacgctcccggttccacccggccagcctccatcgctggtaccagtcctagtcccaagtcccagccttccatcgacggcgagggagggagaggcgacctccatccgggctggttagattcatcgcttttcttgtcgctgtccctcggcctttccccctactgtgctccgagtctgggagaagcgactcgcgcacgcgctcggccaaaccaattaagcacagagcggggctctcgggcgagaacgcgctgaggcagtgctgggtttgcagttcgtgccgtagcgttttttttgtgtgtgtgccgaagcggagaggcgatggctgcgccgaggaaggggacggcgacgccgctgggcaccgtgttctcgccggaggagacgaagagggccgtggcgagggtggccgagtccgtcgctgggcgccgcgccgagctcgcccgcctccagggtttcgccgccgacaacgccggccttcgtcttcctcgtcaacaggctccccgacgaactctctcacgatatcatggttccctttg

SEQ ID NO: 278245 - DNA, 420 bp, Zea mays
cggacgcgtgggcggacgctttggcttcaatcggctggacggcactatccctcctgggcttggcaagctgggaagcctccttgagctacggctgagcaacaactgccttacaggcattgttcctgcaagtaatgattccgacgtggaatccgccagcacctctgatcaaactggattgtgtcagctatctcagctaaccaatattgatctctcgtataacttcttggttggagatgtccccgcatgcttacagcaaatccaaagttcttgctcggttcggaattgcttccagaacaacacatcaaaccgcccactacaacaatgtgaaactaatcaggacagaggcaaagacaatgatgctgatgagaatgtgcagaaaggcctgccagagccactttggcttctcattctggaagtcat

SEQ ID NO: 278246 - DNA, 963 bp, Zea mays
tttcgtattccaaattgcaaaaagagttggcagtgagtctgttgtattgtggcgttgaagtgaagttccctcaagaattttctcaggaaaggaatctggtaacccctgggaacaacttagaggaagcaattttgttattactcatgctaacaagaaagctatttctccgagaaatacaatgggatcctgaccttgtgaatcatttggtgtatgcactctcattatctgggcactatgaagttttggccagccatcttgaaatgctgttgcctggaacctataccagatcagagagatggtatatccttgcactttgctacagtgcagctggcatggatgacagtgcgttaaacatcataaggaatggtttttctgtactggagagaaagggaaagcctcatgttccatctcttcttttaggtgcaaaactatgttgtaagaacccaaagcatgcttccgaagggataaagtttgcaaataaagccatgaagtctttcagaagtcgtgatctgcatttcatcagcactacaaaacactttcttggtgtttgttatggacctttttctaggtcctccacctcatacttggacaaatcgagactgcaagataatgcactgaggctgttgcaggatgctgccacaacagcgaagtataatcctgaaataatgtatagcctagcttgggaaaatgcgatgcagcgcaaactcaatgcagctgttgaaagtgcaacagaatgtcttgagatggtgatgggtggttctgttagtgcctggaagttactaactctatgtattatctgcacagcagaatttgcaagaagctcatccagcagcagaattttgctatgcacgacgctgagaaaaatgatccgttggatattttgagactgaaagcacaaattcaagcttcccgtggacagttcaagtctgcagttgaaacttttcgggttttgcttgctgctat

SEQ ID NO: 278247 - DNA, 596 bp, Zea mays
aaaatcttgaaaaaattgaaaaaaaaatgagttaccaatagcacattgaaataaaaatttttgaacaagtgaaataaaaatatactaacacaagtaagttatcaatggcacattgaaacaagtggcaaatgagcgaccaccggagactatagagtttggacctttgggaccttttgcactgcctttatcctcattgaagtcaaatggaactactaacacacaagctacaagtaaggtgtttacagatgcctctccatttgtgttacagaggtccagggccgccgcaactgaaaacagaccaccaggactttgcaaagtgggagacgaggacgaatttccacctcttagagctgggatccgagtttttttgggcgcctcatagaaatgaggattattgcagtggcatagtacagccaaccgtgtaaaatgtcgtcggccccttatcaatctctctctttttcccgtagttgtcactagagttacaccgaacaaggtttatacagctaatgttcactagtataacttagcaaggagaaagatcagatacaaaaaaaaacggagtacttacgtttacctaatcaaaaaaaaaaaaggaa

SEQ ID NO: 278248 - DNA, 422 bp, Zea mays
cggacgcgtgggcggacgcttgggagttttctaattaggagatcagtttagagggcagttctgtattattttttgcataatcaaagtggaacttaagatgcaggccccccaaaggaagagagaatcagggggtggtggtgggcccatgcgcgaggagctggcgtccgaggacgacgaatcccccccaaggaagcaaccgactgttcagcatcgtagaaaggctgtcgtgtttgatgacagcgccgaggactagtgtgtgtatgacctgccctttccagtttattttttccatttcttgtcgagaatgatttatctggaaaaaaaatgttggtaactgttattttccggcgggccggtttattatgagatggtgaagcaaaaaaaaaaaaaaaaaaaaaaaaaaaaaaaaaaaaaaaaaaaaa

SEQ ID NO: 278249 - DNA, 273 bp, Zea mays
gaagaatacgaggaagaagttgaggaagaagcgcctctctcagatgaagaaatggaggctcccaaaaggaagagagaatcagggggtggtggtgggcacatgcgcgaggagctggcgtccgaggacgacgaatccccaccaaggaagcaaccgactgttcagcatcgtagaaaggctgtcgtgtttgatgacagcgacgaggactagtgtgtgtatgacctgacctttacagtttatttgttccatttcttgtcgcgaatgatttatctgaaa

SEQ ID NO: 278250 - DNA, 388 bp, Zea mays
ggtttctcctcgtggtcgcggtcgtgtccccgttttcccgtgcgccaacgccaagtgaaggcaggctaccagtggtgccctcgtcctccaatcgtcaatgagcaccggcgccgcgcccctcctccactctacccgcacagcgcccctcgcccccacaccccaacccaaccatccgctccttgtcgccttccgacgctgagtttgctggtgtcgatttgcgccggcggatgctcgatctggtagctgcatgtgccgacctactcgtcgaatccggttggcgtcgtcacgcatccgcaaggcacaaagcacaggatcttgatggtgtccgacttgttctgttcacacttcttggggtcgaaagccatatctactacctgtcacaatgtct

SEQ ID NO: 278251 - DNA, 650 bp, Zea mays
agtaaagcacttaaaggtgggataaagctttatatttcagacaacaaagtgatcttgacaaaaggttttgatggcgtcgtcccggtgaaatactttgaaagagtcgaaacatggccaggacgagctccaataccgttccagagataacaggccatgttaccatttttcggtaattcacatacatgatttttttttttggggggggggagggggggcttaatatgcattgtgggtgtggaatatatcagcatttggtaaaatttgattgtgctgggacctctcagtgattcgattgatgattttccggactccgtgaaaagctgtggttctttgtgtgtcttttcggtttttgtgtggcggaaccaaaagacgagtttgtttctctgtgcctgaggatgtcaagagggtttgccaaccatctatcctaattaatggagtacgagaagtttgcggagtatgagcagaagtactcagaggatgcagcaaccaaacattgaaaagtatcatggggagttgcctgcctgctgggctgatgcccttcctcagcttagtttggcaacttccagaagcatacgcctgaggtgcgcaacgtctgcttcggagcgagggagcatggcatgggcggcatttgcaccggtgtgcacagtcca

SEQ ID NO: 278252 - DNA, 373 bp, Zea mays
gacccactcgtccgtgctttcagagatgggcgctgaagcgtccaggtggatcaaccaagcctgctagcacggaacacgcctctgttggcttagaggaaagatcagcagccctcaaggcactttcattggctgtcggtcctatgcgtggatcatctgcactgagatcaggagcttatccacaaagcattcagcataagtctacagtgtttgctcctaagatgccagaactaagatctgcagtaaccccttcaccggcaccagcagtgccagtcccagttgctatgcctctgcgtgtggcagctcaagtacaggcttcggctcatcaagggcattaagcttctgcccatgcttcaccacccaaatttgtaaatgc

SEQ ID NO: 278253 - DNA, 403 bp, Zea mays
atgatcagtcaagtgcagcttatcggcgcattatatttggtcaggaatcaatgcatgacatcaatatgatcagaactgctgtatccagtttcatttgaggaatgcaattgctgagtgattcgggatgcaagtgtctcataggaggtaaacagcctgggcatagctgtacatgtaataaaatgaataaggttctgccaactctcggtctcggttatgccaattaatagccataattcgttgtttcaggccacggggctttttgatcagccggctgctgctgtgagccggtaacaatgtagctcattgtgcgcctccatattgttctcttgataagtgtactactcatcactgccaagcaacgatgagatagagtaattggtctgtttcccgcaaaaatacttac

SEQ ID NO: 278254 - DNA, 545 bp, Zea mays
atcggctcgtttggattcattgccatctctatttgtaaagcgttcagtgaatgttcaaggagaacatcactgatagacgtattaatgcattctactcatctaaatgttacaggaatatatgccttatcttgtactacttccgatcttatgcatgaacttgaacagaaaatcgtgaaattgccttctttaaaagttaggactgcatgtgacgatgtttctgaaaaatgggatctttgagccacgctgtctacaatctgcttacagcttatacacatttagaatagaaagcatagcccatgggaaacctgcttcagtggatgaactgcaatttcatggtgtccataatccagattttccaagaaaggttataaccagagaagcctccaggagcatcagagaagtccaaagttggcaaaatagattgtactccgaggaaggtccttctcatgttcaaagtagtggattacactcacctagtgcaaaagtcagagcttccccaatctgtgctgcctttgattccaaaggtaaaatttctgacaatatag

SEQ ID NO: 278255 - DNA, 853 bp, Zea mays
agcaagttgaatcaccagcttcctttggtcagtgcatactctgcatttgcaagaatggtaggtgttggctatgatttagagcatcagcggaggacagaccctgcaacaaatgaaccactcttcacaaattgcacaagagattttactggaactattgattacatattttacacagcggactcattgacagtggattcattattggaacttttggatgaagaaagcttaagaaaagacacagctctcccatcccctgaatggtcatcagatcacatagcactcttagctgagttccggtgcaagccaagaatcagacgttgacacattagctctccaggtcttgtagaaaaggtcattgtcatcatccttggtggtggaacaccgttccatgtgggaacttgaggcagggcggggacgcgggctctcggggaagcaaacaaccaagcagcctcaggaaggggaagaggcttgtaacatttgatttttaccctcctacatttgagctcatgatacttaagatgcccctgtgtaccattactttctatagaagaaaaatacttgagagaaatatttgaagggttataaggcccgtttttcttttttgttcactgcggtcgcgtgcgattccttttggctgtgtccatgctcgctgcctacaatacgcagccacgcaggagtcctcgacttctgtaaattctgtaccaatgtaataccagttccagtttttgttttccacaatgttgctggcgctggctcaggcactcattttgaaatatgaccactccaaataaaacaagcaccaatgccattttacctataaggcggaccaaggcaagcaaacttgcattttttt

SEQ ID NO: 278256 - DNA, 601 bp, Zea mays
cccaggcgttcgcaaactaatgcttgctgttttgcttccatcgcatgcaatgcttgagaggggcggtgacacaatgaaagaaaatgcctccattcatgcttatgcgcatgaattactggaagctcatgaatgctggttgaaatatcacgctacacgagaggatgctgagctaactaaggcctgcgatttgcattaccatgttttcagaagaatcgcctcacagcttccaagtcttaccaccctcgatctgcactctgtctcgcctgagctactcaaatgtcgaaagttggaacttgctgtgccaggaacttatgctgcagattcaccactcgtgacgattgagtattttggtccccaattgattgttataacgtccaaacaaagaccaagaaagctgaccattcatggaagtgatggcaatgattatgcattcttgcttaaaggccacgaagatttgcggcaagatgaacgagtaatgcagctttttggtttggtgaatactctcctagagaactcaaggaaaacatcagagaaggatttatcaatccaaagatatgctgttatacctttgtcacctaacagtggtttaattggatgggtt

SEQ ID NO: 278257 - DNA, 301 bp, Zea mays
cggacgcgtggtcggactcgtggtttgacttttgggttatttattttttttttgggaccgtgcgagtcgaggcctcgaggtttataatcagtttgaagtgttgaactccggttactgtcaccctacaatggtagcgctaatcaagaaccctaatcatatatcagatcacatcacatcacagtcgacacgggcacacggcacacacacacacaccagcgctgcccgtggatcagacctgcaaagtcggcgccgcggcgcatcccgtgcgcctaccgtgcctatgcaacgccgcccgcgcgtc

SEQ ID NO: 278258 - DNA, 458 bp, Zea mays
ttctcacgcgtccgcatctctctccgttcattccctctctcatgcgtgcttgggttgggttgggtatagacagttcttgcagtccacaccacctcaagtgagggggtgaccccccaccctcctccctagcgctcctcaccgccatgctgccaagaaggcagagcatcttccacctcggggaggagggtggcgccgccgccgtgcaccaccgcgtcacgtcgtcggcgcggcgtcgtcgtccatggccatgggcggcggcggcggcggccggcgtgctcgcgagcgtgagcgcctcgtcgtggggctccagatcctggtgcaccaccaccaccacggccggcacgggcacgggcacgcgcacgcggcgaacgtagtcctgaagcagatggtgaggccgcgcgccgccgctggctcgcgccacggccacggcagccacgccttctcgtgcagtttcctca

SEQ ID NO: 278259 - DNA, 906 bp, Zea mays
ccataatctaccatcgaggaggcgtcgttggagcaccacaaggagctcgagctgtcgtacaccaaaagccaacgctcggagcgcaggagtaagatcaaaagggaaatatctatcatgaagatcgtaagacatcccaacatagttaggcttaatgaggtgttggccggcaggacaaagatatacatagtcttggaacttgtcactggaggtgaactgtttgatagaatagtccgccatgggaagctacgtgagaatgaagctaggaagtatttccagcagcttattgatgccattgattattgccacagcaaaggagtttatcatagagatttgaagcctcaaaacttgcttcttgactctcgtggaaacttgaaactttctgattttggacttagcacattgtctcaaaatggagtaggccttgtacacacgacatgtggaacaccaaattatgttgcacctgaggtgctaggtagcaatggatatgacggatctgcagcagacatttggtcatgtggtgtcattctctatgttttaatggctggttaccttccctttgaggagaatgaccttccaagtttgtatgaaaagataactgcagctcagtactcatgcccatattggttctctccaggagccaagtcattgatccagagaatacttgatccaaatccaagaactcgtatcactattgaagaaataagagaagacccatggtttaagaagaactacgtaactattagatgtggtgaagatgaaaatgtcagcctagacgatgttcaagctgtttttgacaatattgaggacaagtacgtatctgaggaattaactcacaaggatggtggtcctcttatgatgaatgcctctgagatgattacgctatcttaaggtttggatctctcaacg

SEQ ID NO: 278260 - DNA, 334 bp, Zea mays
ttttgtataagaaaacccaccccaccgccgcgggggaccaggcggacgagcaggaatggcgtacgcggcgaggcggaagaagcgggtgggccgctacgaggtgggccggaccatcggccagggcaccttcgccaaggtcaagttcgccgtcgacgccgacaccggcgcgcccgtcgccatgaaggtgctcgacaaggagaccatcttcgcccaccgcatgctccaccagatcaaaagggaaatatcaatcatgaagatcgtaagacatcccaacatagtcaggcttaatgaggtgttggcagggaagacgaagatatacataatcttggaactt

SEQ ID NO: 278261 - DNA, 461 bp, Zea mays
  unsure (1)..(461): unsure at all n locations
aggcttatccatctcggccggggcgnctaaaaggtagctatctcttttttcccgccctcagggcctgtgcctcgcccgagctgcagttgcactccggtgcaccatggccgtgctgacgaaggtgcttatccgtctcttcttcaccactggcggcctcatcggcgtccggttgtgtcccgcgtcctgccttgctcgtcctcctcattccagcagcaactccaactactactgcgactggtgccctcgccgttccaccgcctcccccgacctcgacgcgtcgttgctgcgttcttgtggaactagtagagacggcgacgacggtggcttcggctgcgggtacgggtacggggctgcggagcagctggacggaggtggagctccccacgtcgccgtcgcgggcgccgactccttcttccgcgccggcgccggctgctgcgcctgctaccagttgaggtgcaaag

SEQ ID NO: 278262 - DNA, 994 bp, Zea mays
cgagtgtgtacactggaggagctccaagaagcaaccgacaatttcagttcctccaacctaatcaagactagtcctcttgcacaggattataatggtcagcttcaagatggttcacgagtactggttagatgtttgaggctgaagccgaagtactcctcccagagccttgtccaatacatggagatgatttctaaacttcggcaccgtcatttggtcagcatcattggtcattgcattgtcagtgatgaggagaatcctaatatcgccagctcggtctacctcgtttctgaatgcgtgacaaatggatctttaagacgtcaccttactgagtggaggaagcgtgaaatgctcaaatggccccaacgggtttgcgctgccattggcgttgcgagaggggttcagtttctgcataatctgactgctcctgggatcgtacagaacaatctcaacatagaacatatcctgctggacaagaccctcacgtctaagatcagcaacttcagtcttccaatgatatcaactagcaagaacggcaagattctctcagagaccccatttgctgtccatgaagacaatgatattggcagtgctcagaacgcggcacaaggtgacaaggaagacatctaccagattggcctaattctcctggaggtgatcacaggcaaaccaacagagtcccaaagccaactggagtccctgaaagctcagctaagtgaggcgctgactgaagacccagacaggctgaaagacatggcagacccggcgatccatggcacttttgcagtggactcactgagcacagtcgccgagatagccctcaagtgcacggctggcgacccaagcgaccgaccttccatcgacgacgtgctctggaacctgcagtactccatgcaggtgcaggatgggtgggcgagcagcgagagcttaggcctgagcgtcaaatctcacgtttagataaaggcacagtgattcggttcctatgcaaatgatgatt

SEQ ID NO: 278263 - DNA, 1585 bp, Zea mays
tgcctacgcgtccgaacatcccagagttcaaaaccacaatctggctcaccattcccggtcatgactcctggagttggagcatcctcgtctggacctgggacgctatcttttggacttggagcttcctcaactggttcaggcactgcatcttttggtgtcggagcttcatcttccgcacctggaactttatcaacttttggggcagcagctcactcttctggacctggagttttctcttttggggcaggaacttcctcatcaggacctagcactgcctcttttggtgcagcaacttccacatcagggactggatttggcaattcaccatttggaactggagctacttttgcgaatccatttagctctagttcaagcactgggttcacattttcttcacctagctcttctgctggtgcatcaacagcggccagtacgagtgtatttgccagcacctctacagcttcttcagcctcagcttttagcaacccttttggctcaagttcatccccacccagcacatttacatttgggcaatcaggttcttcaggcaaccacttttgcatttggagcgcagccagctccaacgttcccatctcaaccatcacttttctcatttagttcagccaacactagcatgaattcgtctccacagcctgcatttggaatgataaataccaacacagccttcagcatggcttcccccggaaatgatcagatgaacgaagacagcatggcagatgacactagtcaggcagcacctgcgccagcgccagtatttggttcatcatttggacagcagaacaactcatctgctgccccggtatttggtgctcccgcggtccagccaggtggtgtttttcagttcgggggccaacaaggttcagcacagcagaacccgtccttcccagctgttggcagtctagagtttcagggtgggaacttttcgttgggcagcgggggtggtggcggtgacaagtcgaaccgaagagtgatcaaggtcaaaaggacaccaaagaagagataagggtgcgccctctgttggaatcttcctttgatggtgtcatttgtgattggatcgcactgcttgggaacgaagtcaagtacgacgaggttttatggccacgcagatttccctgcagcagggcgatagcgctatatatctcatggctggcttgtaaacgcatccaccaaggtcagtgtagtctcctgtgcactcaattcatttcctcatcggggccggcggcctgcatgttgtgtaatatgcctgtgctcatggggtgtaaaatagaacaaaaaagtgttgtaatttttgttttcttgcctccaaatgccgacttgatttcttatctgtggtttggctacggtatatttgtatcggagtgtaacgcactgttgtatttttgtttttgggtttattacattcaacaaggtcagaactgtatcgtagaaaaaaaaaaaaataaactataaataaattttttttttttactaaaaaacaatatatctaaaaacttacattagccacatttctatattttttttaaaaaattacaatcttaatttcaatattaaataaatacttaat

SEQ ID NO: 278264 - DNA, 769 bp, Zea mays
gcgcccgctcgtccgcccactcgtccttatttttcggtttgcttgtagggctctcgcctctcgtcccagatacgctcatgattggcatggagctcagggacaaggtaacggagtatgtgaaggagaggattttagctctaagagcggcaaacccaggacagtatgataacatatccgttgtccgcacgaactcgatgaaatacattccaaattacttcagaaaggctcagctcaccaagatgttcttcctgttccccgatccccacttcaaggagaagaaccacaggaggagggttatcagcatgcagctgttagacgagtatgcttacgtgatggaagtgggaggaatcatatataccatcactgatgtcgaggagctcggagagtggatgcggtcgtgtctagagaaacacccgttattcgaaaccgttcctgaggaagagattaaggctgaccctgttttcaaattactgtctactgccactgaagaaagccagaaggtggcaagaaatggaggacagactttctatgccatcttcaggcggatctccttacaagaagaataagtcgcttagagattataagctagatcgtgttaagtgtgtttgtaagttttatacatttttttaaaaaaaatagcagtaggtgtacttggtactaaatattgcaatgttgctttgcaaggttctgcagacccagttattttgttcagctttaaaagagtttgccaagacgattgtgttgagtttaccaaagcaatattccattg

SEQ ID NO: 278265 - DNA, 410 bp, Zea mays
tccacgcgttcgcccacgcgtccgtccactcttccgtaaagaggggcacaagcaagagagggattaggagttaggacacaaacgctagagagagagagagagagagaggtggtggccggtgggacgtccgtggtggtggtggagttggatcggctgtgcttgttcctcgcttcttgctggatcagaggaggtcatgatcaactaatgcctattcatttattatggacttgcaccagttgttaaagtacagattaactggtgctaacgtctactacgaatttcctacagagaacaacttagcaaacactccttggccagctagtccactgaagtctgagttcagcagctcatcatacactcctcttttatcccagcttgagtgtgataattttgtctgcgctcagcaatac

SEQ ID NO: 278266 - DNA, 573 bp, Zea mays
ggaggaaaggcaaccgctacgactggaggttaccattccgagaggaagattacggcgaggacgccgctggctttgcggcaggtggtcgaggcaatggataccgcagccgcaggagcagcagcaactattatgaggggagaaggaggacgagcaactaccagtcaagtgtttctaacaattttgctggtgctgcctcaactggtgttggagctgacggtaacaccaagagcagcagcagtggatatggaggatgggatgagcttctggacaacgacaacgacactgctgctcaggagacaaagaggaggagctcattctcagctggcaccactgatcgaagcacaaaatcgcagccttcagcgactggggaggaagatgcagattatactgccactccttcaacaagaacgagaatgagacgacggcggacgccaggaacgatggggttgggcagtaccatgtacaagcaggcaccactcgtgatgcgcttgttggtggcagtcttcccgttcctgggatcatggttcaggctgctctgaattgattgttatatattcgtccacggtggttcgt

SEQ ID NO: 278267 - DNA, 276 bp, Zea mays
atttgacatacaatatgtttagaatgttttttataattgagctttcacaatgtttagaatcttttattcttataatgtatgtttttatgccacgtactcatagtttttacaatcagttgcttatgatccttcagttcattaacgaacttttaggtggttgtgcttgatcggtggtgctctcaggccttctgttttgtggctgtaggatatcaagaggagggaagaggcgctgaagaatggtgcagatacacatttgtttttgcataattgctgcca

SEQ ID NO: 278268 - DNA, 475 bp, Zea mays
gtagtaagcgctaaggtgttcgtagataaagcaacgggcgtgagcaaatgcttcggttttgtgagctacgactctcctgcctccgcgcaggcagccatcaacgggatggtcggctaccagttaggcggtaaaaagctcaaggtacaactgaagagagaaaacaacaccaagcacagtagtaaaccgttttgacagacaaggcagcagccgtccggtacccggtacatattaattgaccatcaacacattgcagcagcagcctcagggcctggggagggaagagacccgtgtacccctctttgttcacttcaacattcttggagattcgtcagtcagctcagctcgtgtaattcattgcagcagacataggccgtagcagcagtttgtaccatgatcagatcacttgtacacatgattcattcaattgttactgacagccggctttcatcctagaataattcgctgtgacaacctt

SEQ ID NO: 278269 - DNA, 513 bp, Zea mays
gatgttattgggtcctaggttctcacttgatgcaaaaaactccatggattccattgctgctatgcttcgctggtggtctctgcttgagaaatttagctgcagtgcatcaaagctgcacctgaagcctcggaggttcaaaacatttgtagaagcattgggaaaacaactgctgaaggacagaaataagtccaggaaaaagcattcacgagtggatatgtgcatatcttctccatctccagttatcagcaaggctcctggggatgagacccctcctgtaaagttcttgtcaatagattcccaaaatggtagcagagtagcgtctcctaaagggacaattttcaggcgggttgcagaaccaatttctaacaagtcaggaacaactagaggggacctctctgccacaagaaccgtgaaaccgaaaaggaaggcaggtggtgcttgtgcatctgctgcatataaaaaatgggagagagcggccatggctggggtttcttttagtgctgatgcggctga

SEQ ID NO: 278270 - DNA, 554 bp, Zea mays
gggaggcagcgccgtacccagtggtctgcctttagtgtttcgcactttgctattcagcttcattcttcaccggttcaccctagccgccaccccaacccccagcgacagggaccttcgccgccaggccgcccccaatccctagcgactgcgagcaccgtcgccaggcgccgtgcagcgagcgtcgccgcctggcgaagtcgcgcgactcgtgccctgcagcgagcgccgctgtcccgcacccaccgtcgaacggctgccgatgcccaacgccctgcagcgagttgcgccgtcgtccgcttcctctcgctggtaacctcgtgtttcgatttggacagattgctcgtgacttggtgttgcgccgccgaccgagcctccttcccctaagtccctaaccgtaagtcctaaatcttggtgagttctgttcatgtgcatttgagcttacgcatctatgatacgcgccttaaggattgtgatctgtgattagggtttgtgaaattgagatgccattttagggattgtggagatgtgaactgtgccttactgaaatcgagatg

SEQ ID NO: 278271 - DNA, 1199 bp, Zea mays
gtgggctgcatcatcatgcctcacaatttgtccttgcattcagcactagtgcagtccagaaagagtgacacagacaagaaatctcgtgttctagaagcagtttactactataacatcgagtcgattcttgcactcatcgtgtccttcttcattaacatctgtgtcacaactgtttttgccaaaggattttatgggtctaaacaggctgacagtataggtcttgagaatgctgggcagtacttacaagaaaaatatggaactgcattctttcccatcctctatatctgggctgttggtttgttagcatctgggcagagtagcacaattactggcacatatgcaggacagtttgttatgggaggtttccttaatcttcgattgaagaagtggctacgggcaatgattactcgaagttttgccattattccaactatgattgtggctttatttttcgatactgaagatcctactatggacattctgaatgaagcactcaatgttcttcagtccatacaggattccgtttgctctaattcctctcatcaccctcgtttcaaaggagctaatcatggggtccgttcgtaatttggtcccatcaccaaagtgattagctggattgttacggtatttctgatgcttatcaacgggtatcttatactatctttctacattactgatgtccggggtgcattgctccgctcaagcttgtgtgttgtgttggttgtttaccttgcattcatcgtctatcttattgtgcgaaatacttcgctgtattcgcgcctttgctcatcacggtcaaagagctcgtgagcatttcaatgtcgtcatctgctgctttgatgggttggaacagtgctgtagatccatgcaaagcttgtgctgctgcttatttattggcttcagagaagactatgtatgctgtatgcatatcccgtgtatgcttgcatttatgggatatttggtagtagggctccttcccttttaggatgctatattttcacccccagtcacacgttgcagatagatttcttatttctgaggtttatggtgatgtgaaaagactactggcaaaaaaactggcattgctgttcctcctgaaactgagcagatgaaatttactgaatgatctgtaaagctcgatgttgcagttttgaattccaggagctcaatgcatattctgctgaagcttgaatggaacg

SEQ ID NO: 278272 - DNA, 818 bp, Zea mays
aagaagtcggtgggccccgcgctcgagcgcccgtccagggagaggaagacggtcgagaggtactcggagctcgcgccgcgcgccacgcccgccaagaagacccccgatattctccagggctgcggaacgaagctcaaggacatacccaatgtttcattcaaactatcaaagagaaaggctgatgagagtctacagagccttcatactgtattgtatgggagaaaatcaagtaaccattttttgaagagaaacatatctcaattttccgggtttgtttggacagacaatcaagaaaagcacaggaccaaaataaaggaaaagcttgagaaatttaacaaggagaagttgctagatttttgtgaaattctggacgttattgtaaaagtaactacaaagaaggaagaagtttctgccaagctcttggaatttttagagtctccttgtgttaccagggatgttattctcactgataaaaagaaggggaagaaacgcggaaggaaatctaaagtaagtcgtgaggtaacttctgaaggtgcttctgcagagaagaaaaggaaaagagttcagaaacaagcagctgaagatggtaaagagaatgatgatggggatgatgctgatcttgctggttctgaggatgcatcaacaggagacgaagctgatgtgggctctgactctgaggcaaatgattcatgctgtgagtgatgctgaacctgatgagcctcagcaaagaaaaagtttacagatgtaaaacaggttaaagaaactggttctgatgcaaaggaaaaggatgcaccacgaaaaaagggttttttgaaacc

SEQ ID NO: 278273 - DNA, 482 bp, Zea mays
acccactcgtccgccagttcttgcccgccctcgcgtccggtggtcttctctctcggatcgcggttggggggttgcggaatgggagcaaaggcggaggagtgtgaggtgccgccgctggctgcgaacgcggaggaggcagcttccaccaatcagtgcaccctcatcttcaaaggctgttccaacagcatggaaaaagtctacgccatcagcagtcctagtaagaaaagaaaatcacagtatgagctgagtgatccaaagttgctaccacttaaatgcaagtttcgcaaacggttatattgccaggatgatgagtctgcaaccacagaaagtttaggatatgatggtattttcatgaacaagacctctgggacggacatggtcagcatacctgaagaattggactcttgtgagaacactataagcctgtttggtgggtgcatcgaactagttgactcaaaaaatggaattcacgaacaatcttt

SEQ ID NO: 278274 - DNA, 643 bp, Zea mays
gcccctgcctggggttttaaccctacccaaccgccgcccatggcgtccatctcggagcccgctgctagggagaagcccatcgtcgtccgggtcaagcgcaaaccttcgcaaaaccgcccggacgctttctggctagagattaatgagaggccggcaaagaaggcggcgattgatttctcccgcctttccatctccgaaccctcctcgtcctctgccagtgtcaaagcttcagaggaaccacgggttaagaaaattcttgtccagcacatcgagacagtacaccactctgaagctgtcgaagatgttttacaatctcttttgcttgttgactcaaattccaaggagacaaagagcaagacaaaggagtggaatgacagaatcaagcaagacaaaaaaccagagcaactacgatcagctgccagacagaggcatgaggatatgggaagaaatgctccgcttgcacaaatatggaagagtcgacaaggagaaaaggctgcatgctggtgactcattgagagaaatatgccatctttatgatgctgtccaagtagatcccgatgatgagaagcatccagcagaaccacggattacatcgtttgaagagggtgctgtctatgcaactttcttccacttataagggaat

SEQ ID NO: 278275 - DNA, 433 bp, Zea mays
ggtctggacctttgggctgatttatgtgcttgtggatgtgcgggtggatgtgcgggtggatctgcggcggcgggccggtcctcttctttttcgtggcctggccctgggcctgcgaggcctcttggggcctggccctgcgggcgagtggactgagacggtggtgctggacgccgagcattgtcgtcctgctggtggttctgttcgggttatggatgattatctttcttataatgttcctagtattcatggtgaggcttctgagcttaagactacttctgactgggagatgtagaggctttgtggtcctggccctgctattcctcttatggaggaggtgacgtggaatgttactgagggtacgaatggtaaggagtcggatggttgtaatactattgctaatgaggtttagctttgtggtggttgcggaggtggt

SEQ ID NO: 278276 - DNA, 383 bp, Zea mays
cccacgcgtacgcaaacctccctgccaagccctcttttttccctcgccgcggcgcaggcagagcagaggcactagcttgtcgccgttcgccgcccgcgtggcctccttggccgcgctgctgctcgccctcctgctcgcggcgccggcctcggccgccaacttcacctgcgccacggtgggcaaaacgtgccagtcggcgatcgggtacgcggtgcccaacgcgaccacgtacggggagctggtggcgcggttcagcgccaccacgacgctggcggagctgctgggcgccaacggcctccccgtcacgacgccggcctcgacgccgctggcggacaaggccacggtgcgcgtgccgttccggtgccggtgcgggagcaacggcg

SEQ ID NO: 278277 - DNA, 763 bp, Zea mays
gttgaacctgggctggtgtgatggcatcactgacaagggggtgaccagcctggcttcggtctttcctcgattcagttctgactaattatgccgcagagttcctgccgcagatgagagcgcggttgcgctggcgaacggctgccttcacctgcgctccctgggtctctactactgccagaacatcacggaccgcgccatgtactccctggccgccaacagccgcgtgaggagtcggggccggggctgggacgcgacacgaagagcggcggcggtggcaaggaccgggagcgggacggactggcgagcctgaacatcagccagtgcacggcgctgaccccgcccgcggtgcaggcggtgtgcgactcgttcccggcgctgcacacgtgcccggagcggcactcgctcaacatcagcgggtgcctcagcctaacctccgtgcactgcgcctgtgcgctgcaccctcaccgggccgggcgagtcatcctctccaaccacgcctactgaacgcaatgcgtgaataggcggcgatgctcagatgtgtggataggccgttcaaccgtgagcgacggtgtccgctgtttatgtgaggtgcttgttttgtgtttaggcgtcaaggcgtgtacttggggtctctactctctagggaaccgtgtagaagcaaccgagttgagttcatcgtctgtaaaaacatggactgtatctgactatctgttgtcatgtcttttgagatcaaaaaaaaaaaaaaaaaaaaaaaaaaggacga

SEQ ID NO: 278278 - DNA, 399 bp, Zea mays
ggtggcaaggaccgggagcgggacggactggcgagcctgaacatcagccagtgcacggcgctgaccccgcccgcggtgcaggcggtgtgcgactcgttcccggcgctgcacacgtgcccggagcggcactcgctcaacatcagcgggtgcctcagcctaacctccgtgcactgcgcctgtgcgctgcaccctcaccgggccgggcgagtcatcctctccaaccacgcctactgaacgcaatgcgtgaataggcggcgatgctcagatgtgtggataggccgttcaaccgtgagcgacggtgtccgctgtttatgtgaggtgcttgttttgtgtttatcgtctgtaaaaacatggactgtatctgactatctgttgtcatgtcttttgagatctttagcc

SEQ ID NO: 278279 - DNA, 516 bp, Zea mays
ggcaaatccggaaccatgagactgttgaggagcggagatgttgtctttgagggtccatgcgagtctctgaagcgggagaagaaggacgcagaaacagtcgaaaagggtaacgactgtgggctggtgattcaggattgcgatgatttccaggtaggggatatcatacagtgcgtggagcaggtgattaggaagcccaagttcatctcgacgcagagtggttcggttcggattgaatgctgaaatgtagtaatggttgtggctgacactactgttccatttccctattaatgcagctggttgtgctttactgaccaaaggtttcgagtgtaacaagattttgttcgctagcaacttgctgcaactgcaaccaaacccctttctgatatgagataattaggacaaaacaacagagctaagttgcttttttttggggtcatgttaaacaatgtatgcagtattgctcgtgcccctcttgaaaacagttactgacaaccatatgctgtgaaaaataaattc

SEQ ID NO: 278280 - DNA, 474 bp, Zea mays
cccacgcgtccgcccacgcgtccgcccactcgtcctcccacgcgtccacagaaaatggcgtcacttctccgccctctcgtcctcgtgctcctgatcgcctcctgcgcagcgcagcagtcaccgccggcgcagcccccgccaacgccgaacgcgccaccggccaactcgccgccccaggcgcctccagccggaaacccggcgccggcgccccaggcgccgccggcaggcaacccggcacctgcgcccaccggcactccacctccggccccgaccactccgcccccggccccgaccacacctcccccggctcccacaacgccgcccccggcgccgacaactccacctccggcccccaccacgccgtctccgtccccaccggcgtcgccaccgcccgctcccaccactccgccaccgtctcccccggcaagcccgtcgcccgctcccgtcaccccgccaccgtctccgcccatggcg

SEQ ID NO: 278281 - DNA, 359 bp, Zea mays
catcagaactcccattcctgtcatctattcctcatgaatgcaatcatcatgcttacgagccttcgtcgtcacggtgtataacaacattcggttcacaatgtggaggtaaggcaaacatctgctctggggagcacaggatctcatccagttgggcatcttctgttgctgttgcatgctgggtgtcagcagtcacaccattgtcgaggggtgtgatgttctttttcttgaatggtttgtacctggggttacagcagttcacctgtgtttgatacatctgccttgtgacatttttgtgttgagttgtcggaacacatctattatcatctctaccataaaattgttgtggcccttgcctcttt

SEQ ID NO: 278282 - DNA, 853 bp, Zea mays
agccttccgagggccgggtggtcctgcccaaccaggaaagggttccggccacccaaggagggaaggccgagagcgtcaccgtgcaaaaaaagcttattcgtaccgaaagagcttgccgcgcttggggtgccgtctcctttgaggttagggacaagccggcttcgctcaagtcagacgattgggggcgggtggtggccgtgtttgtgctcggcaaggagtggcagttcaaagactggcccttcaaggaccatgtagagatcttcaacagagttattggtttctatgtgcgctttgaagatgatagtgtggaagcagccaaggtggtgaaacagtggaatgtgaaaatcatatctataagcaaaaataaaaggcatcaagacagaacagctgctcttgaagtatgggagcgcttggaggaatttatgcgggcacggacataattgatgtgcagtcatggaaaggataaaagacaaccattttactagattcattcgcaatattggtcggtgactgtagatggcagaatggaatggctgggagcccatgaagactgcaatctttgtacgctaggatgtatttgtaatgttgtacttgcaaactgctaacttatttctagtttaagtatatgagacaattttgcaagttgcgcctgaaagtatattttctttctacgtctctatgttctgggggtcgctggctctcatcctgccattatctgaggtctatgttttaatttgttttttctatataataacctgcttcagtttaacgttatattgtaaaatgaataccctgatgtgtgaataccatgatctgattcgtggcaaaaaaaaaaaaaaaaaaaaaaaaagaa

SEQ ID NO: 278283 - DNA, 487 bp, Zea mays
gatttgaggtcgtttttgcaaaggatcttgttcatagattttccttgcccgtggtaccgggcgatggatcccacctacttttcatgggctcacttccaatgcacacgcccaggacggatcgtcacccgtgcaattgtcaatactctagtgttcctccgtattgccccagcaggcggcatgggagcctacaacgtcctgatgagtgcctctgatggccttctaaaaggtggccgggaaggtatcttcacagcgaccttcttcgtcctgggccgcaagcctatcaaggaagctgatatggtgaacggcggcgtcctttgagctgcaacattagtatggggttgtactcataagagctatgaatcatggccaacgtgttctgagctgatgtgtgattactgggttgtcttatgggtactgggttatgaatcatgttcccgcattagccctgatctgaatgtgtgctgtgtactatgcgctatctgaataa

SEQ ID NO: 278284 - DNA, 440 bp, Zea mays
cccccgcggccgaggcttcaattgagttgtctgttttgcaaacagcgatgatgctgcctaggggttgctcaaagaattctcagcgaactcactgcaagagaaatttcaaaagcttatgctcaatgacatgaaagagctctcaagaattcaagctgaagttggtctacagatgccactgatgtctccgcttgattctgatgaagaaaagtattctgtggcttctgattctgtttcttcagctgatcatgagaaggctcaacatggtggaaactcatctgactcacagaatattgattgtgatcataccactgaagattttgaatccagtgatactctctcaacgaacagttcatccctgcctccccagcctcaaccacctgtgcctcctcatatggtctcctgatatcgatttatccgaactggagagcttgttctccact

SEQ ID NO: 278285 - DNA, 504 bp, Zea mays
  unsure (1)..(504): unsure at all n locations
tcgtcctttgtttccctactcctgggaagaagccatcggtgaatcgttgcttgcccaagctgacagtggcagactaaaggaggagacatttgtcatgtgcaagacactcaagggggctgggaagttccttgtgctaactgagaagctgcttctgctagtctcaagcccatacttggtggatctaggatcgcctcggttcatcggtgttcctcctgacccgcagtggtcgatcgacacggagatgcacctcaagagcgttgttcatctggacaggtctcaggaggtagtgaacattgttgggagcaacggacagacctcacctagggacaaaagaggtggcacgagaaacagggtcatgagctcggccttcgtccccctgtttcacctcagcatagagctgccaaatgaggaggatgcagaagggacggtgcaggtcctacaggcactcatcgagaagggcaaggcacggaggtgggacaagaacatnctacaccggagcaacat

SEQ ID NO: 278286 - DNA, 1603 bp, Zea mays
ctcaatccacctcgctttcacttgtctagttttccccgcactgattttggcatacatgggtcaagctgcttactcatcaaaacatcatgacttttactctagctcacaagttggattttacatcgcagttccagatacgatcagatggccagtgcttatattggctattctggctccggtggtcggaagccaagcaatcatcagcggaacattctcaatcatcaaccagagcctgtccctgagctgcttccctcgagtgaaagttgtacacacatctgagaaaattcatggccaaatatacatccccgagatcaattggttgctgatgatcctctgcattgctgtgaccgttgggtttagagatacaaaacacatgggaaatgcatctggtttggctgtgatcacagtgatgctggtgaccacgttcctgacatccttggtcatcgttctctgctggcacaggccaccgctgctggcgttggctttcctcctgttctttggatccatcgaggcgctttacttctccgcgtccctgatcaagttcctggaaggcgcgtggctccccatcctcctggcgctcatcctgatggccgtcatgctcatctggcactacacgaccatcaagaagtacgagttcgacctgcacaacaaggtgaccctggagtggctcctcgccctcggggacaggctgggcatggtccgcgtccccggcatcggcctcgtgtacacagacctgacgtcgggcgtcccggccaacttctcccggttcgtgaccaacctcccggcgttccaccaggtgctggtgttcgtgtgcgtcaagtcggtgccagtgccgtacgtattcccggcggagcggtacctcatcgggcgtgtcggcccgccgggccaccgctcgtaccggtgcatcgtgcgctacggctaccgcgacgtgcaccaggacgtggactcgttcgagacggagctcgtggagaccctggccacgttcataacgctggacgcctcgtaccgctgcagcgaggccagcgagcgggagctggagctggatcccggggagcaggagcggcggctgaccgtgatcgcgagcaacccgctgcggcgccgcgccagctacgacctccaggacagcgtgcagcattcggcagcgtccaccgtggaggtgcgcgccacggccgccgacagccttagccccagggacgcggagatcagctcggcggcggggccgaagcaggtgcggttcttcatcgacagccacgtggtgagcccggaggccgcggagaacaagcaggttgcggatgagctggaggcgctggcggcggcccgggaggccggcactgcgttcatcctggggcactcgcacgtgcagtgcaagcccgggtcgtcggtgctcaagcggttggcggtggacgtcgggtacaacttcctgcggcgcaactgccgcggcccggacgtcgcgctgcgcgtgccgccggcgtcactgctggaggtcggcatggtgtacgtgctttgattgaggctgagacgatgcgactttttcttatgaacatctgatatagtaatcccgactgttgtcagttttcccagcaacataatgaggccgttctgt

SEQ ID NO: 278287 - DNA, 984 bp, Zea mays
cgtgtcctcacattgatgagcccttcgactgctacctcaacggtcggcgagatctagcttaccagaagctccgctggcaacccagtggatgcagtatcccaagattgaacccaaccgatatgttggagaggctgagaggaaaaagactggtgttcgttggtgattcgctcaataggaacatgtgggaatcccttgtgtgtattttgagaaattctgtcaaagacaagaggaagggttttcgaggcatctggcaggcgcgagtttaagacggaaggctcatactctttccttttcacggactataactgcagcgtggagttcttccgctccccattcctagtccaggaatgggagatgcaagtgagcagtggaaagaaaaaggtaactctcaggcttgatctggtagagcaatcgtcattggagtacaaggatgcagactttatcattttcaatacggggcattggtggacacatgagaaaactgctcttccgaaggactactatcaagaaggtgaccatgtgtctaatgagctgaatgtcatggatgcctttcataaagctcttctcacctggtccaagtggatcgatgccaatgttaaccccagaaaaactctggtgttattcagaggctactcagcatctcatttcagtggcggacaatggaattcaggcggtggctgtgacaaggagagtaaaccaataaccaacgatcagtacctttcaacctacccaccaaagatgagcatcctggaggacgtgatccacaagatgaaaactccggtcgtttacttgaacataacgagaatggctgactacagaaaggatgcacacccttccatctaccgcaagcagaacctgactgacgaggagaggagatcgcccgaaagatttcaggactgcagccactggtgcctccctggagtaccagattcctggaatgaactggtttatgctcaacttctgatcaagcagcatcaaatgcgc

SEQ ID NO: 278288 - DNA, 603 bp, Zea mays
tgacggtggaaactgagtcacgtaatccctactgttgtttctccgattctccttacgacccgccggcgttgggcaaaagcggccggtgctggtcctctcctcctgcagaaggcaaccggcggcgatccccatctacagcaaaaaaacgaccggcggggagcctcttccccggaaaataatttgacgagtgtatagaaaatgtcaaggttggagctagtgttcaaaagaccacatatacaatgaagagagacatgctcaccgctcacggagagaaggtcattcttcgtgcccttgaaattgagaaatcccggctgccacactcaaagggtatttgagtacctgtggatcttctgtatccataaaggatcagatcccaaaacccattggtcaaactactgaatgcagtaaacagggcatatcttatatctgagattgtagatccaagatgcagatcagcggctttgtcacccctattggtcctttatctgaagaaaatcacacgatcgacaagaatttgttgccgctggagtgtgaagggacaatggaatgccacacacgagacaacgatgctgttgggttggatgcaagagcggaaggtgttgt

SEQ ID NO: 278289 - DNA, 417 bp, Zea mays
gacctttgggtctgtttatgtgcttgtcttctgtaccccttccgtaattgaccgctcactttttctttaattaaagattgacggtgtttaacgctgagaagaagtttgtggtgaacaagttggcggaggaggagtttgtggctgagaagatgattgttgggaagaagtttaaggtggagaagtgggcttttgtcggtaagcttgttggtaaggagggtggtgagggtaagtgcggtaagaagaagggtaagaagagtgcggagatgcataagactcatactcctaaggcgtcgaagtaggcgtatttggatactggtactcttcttaaggttacgcttactacgaatcttcctactaatgatactcctgagaagtcggttggtgaggttgttaagtctgtgtgtcataataagaagt

SEQ ID NO: 278290 - DNA, 385 bp, Zea mays
  unsure (1)..(385): unsure at all n locations
tttgggctgatttatgtgcttgtttatgtgcttgtttatgtgcttgttgcccttcatgagtagctgtatgtaagcgctaagagatgaaatggctgatacggtctgtatgtaactcgttgcagtggctgttgcggcggttgtggcgtcgtcgtcggtagtggtggtgatgattctggaggttgttactattcgtgggtaggcgagtcttgttactgtgtttcgttctcttcatgtttgtggtatggggcttggttttcttgtgcttcgtcgcagtggtgctaggaattctaagagtgttgttagtattgttgttgataggtgtgttgatcgtaatcgttctaagaatgttgntaggggtgctagtggttctaatgttggtaatgtt

SEQ ID NO: 278291 - DNA, 448 bp, Zea mays
gacctttgggctgctttatgtgcttggcgggacgttagctaatccacagtcctccgtccgacgttactactttatctagtcatggcgatgagtatccctagcggtcgcggggacttaagaaggtccctgcagcgtaatacccgtaatcgtatcagctcccgtacgcgcggccacgtacgacgtccccggagcctggccatacgttggaaagtaggtagaggcgtcgaactaaaccgctcacgagtcgttagaggaatatttaccactagagataaagttatcgtgcgaaacttccggatacatcgccttctaggctgcggttggccgtacttccggaacttctacggtcgctgccacgtccccgctctctgggaggctccagctaagcgccgcctatttcacactctgtcggcgacggtcataaagtacaaaaatacgacctctttac

SEQ ID NO: 278292 - DNA, 365 bp, Zea mays
tttgggctggtttatgtgcttgatctcgtaccgtcctcggtatcactaggcgacccatctcggacgcggtctcgcgtagggctcggtagtcctcgcaaccttaagcggcaccggtcttcgcctcgcgagttatccagtaccgatcacgacatatcgtagatcaccacggtgtacgagccctagtcacccgatacgcgttagtagtactcaacggaaagcgtagtagatccatcagacccattgagactccaccagtaagtcgtaggactcatactcgaacggaggcgtatgtccatcaggaatcacggccacgctaccgaccggtcaagtcagtacgacgttatccgactaccatctgacgacac

SEQ ID NO: 278293 - DNA, 426 bp, Zea mays
cccgttggacgtgtttatgtgcctgtggatgtgcgggtggatgtgcgggctacccacctagtcgtgttaagagccttaagccgtcgtcggagaatcgtcgggcgaagaagggaggcgtacctatcggcgaaaccagcgtcgaaacgtctgctaattccggtgcctttcgggctacctccggatatctcgaaaggagagtctcgtcgggagaactaaacgagcccgccggagataaggccgtccccgtctcgctctagggatcaaaggctaccgtacgcgccggcgagatttccgaggagagggaggtcggcctaattacggacgccgccgtcgtataaataaaagtaaccgtcgagaagactaaggatcggagtaatgccgcctccgttcacgaattagctcgggtcaccggaatcggtaaagctg

SEQ ID NO: 278294 - DNA, 468 bp, Zea mays
ggacctttgggctggtttatgtgcttgtggatgtgcgggtttggtctgagactgaacctttgttctcgttaagtagtactctcctcgataggggtcttctagacgagcctacggacgttaatacttagtccgtctctgccgccgtcaggaagtctaaagagtctaaggggatcaggctccgcacagcgcccttcgactaattcgaaaaatgcagggtactagagccgcctaagatagtcacagatatgaccgagggcgcaattactagtctttcggacgacccatttatcgatttcgctaatagtcctcctaaactaacaagaaatatttcggaccccgatcctctagacgataacgaaggcagacggaaactcgacgaattattactgccacacactcctactaatagtagtatgtgcgattccgtcctcacagagaagcacgcggaaaaagccgttatactcgcct

SEQ ID NO: 278295 - DNA, 460 bp, Zea mays
tttgggctgctttatgtgcttggagaccccggtacctttagcctagaagtacactctcaaacgaatcgaacaggaaggagtttggttcccccacggaaatattgggactccatacggaattaaaaattaacgccggtggcaggctactcctataaagtaacggctgtggactatataagcttaataagtgcgaaaagtctgatcctaactactcaagattgaagaaacgaaaaacggcgcctgagccagtctccgcatctcgcccgcagtcgcatttaaccggttactcgtcgcgccccgctgaccacactcagagagtcggcaattacgcttacgcgattacgcggtacgtacctccagcgagaccacgcggcgccaactaccccctccctcaccgacgcgcctcatctaatcatctcgtcgcaagacgcgaggtctcatcgcatagtagcgacgaacg

SEQ ID NO: 278296 - DNA, 471 bp, Zea mays
ggacctttgggctgatttatgtgcttgggtctaccaaactggcctcggcccgcccgacggcatgcgtcatctggccaattgcagcaacctcagagtcaacatgcgtaataaattttgatccttggcaggggtgtacccaccagacaaaaggtcgatgtgggtctcgtttgttgacttgacgacctacgacaatccgatggactgtatggttcctgcgttggtgatgtactacctaaaccctcgtttcactaatccctgacggcaggacaggggttcattacggcggcgatgggcgatggagaaccagggcctgaccttggagagggagttcgaaaaatggtcattatacttaaggaaagtagtaggtgtgtaaaccatttaacttcgatatggggaggcagcgataaccaacaataacattgggtgtgccagcgctcggcaaccggaacgagcataactcaaactttccaa

SEQ ID NO: 278297 - DNA, 444 bp, Zea mays
tttgggctgatttatgtgcttggtaggcgtctacccgccacgtcacttcgccgtacctaacacgatcatcggattatcgtaccgggagccctcgtaaagggtaagggtcatagataattaggcgcgtcgcgtcctcccgcgcgtcggcgccttaccccttccaatccctacccggtactaccccgttagccccacgtcccaaaacgccaactgatcgcccggcgttagtcgcccgccgtaatacgtggtttagtctgagacattagcgtaggccacgccgtccggggatatcttatctccgccggattcgcaagccgattcgagacccttacccatcccttcccagcctcgctagcgattaccgtccactcagtccctagatcgacatcacgtattattatataatcaacctcgcattcgccgcgggccccgttaataactcgc

SEQ ID NO: 278298 - DNA, 438 bp, Zea mays
tggctctggacctttgggctgatttatgtgcttgtttatgtgcttgatatatgaacaactctcctcctattctatcaatattagtcagtaatctccctctcttcgtaacaacggttgtctgtcttcttcttctttagttgtagtcggctgtggtggtggtggcttcggtagtggtgtcgtcgtcgtcggtggtgggggttgggatggtgctggtggtggcgagtcgtggtgaggcgatgctgctggcggtgttgcgttctgggcatgtgacgggtagtgtggtgctgtttcttgtggtgcgtcgtagtggggcgtgtctgtctaatagttgtgtgctgctggtggtggattggtaggttattcgtaatcgttctaagagtacgatgggttggtctggtggtggtgctagtacggttaatgttgataatacttttggta

SEQ ID NO: 278299 - DNA, 422 bp, Zea mays
ggacctttgggctgatttatgtgcttggcctaagaagacgcccgattctactgagctcagcataattcgaatgggtatacttgtcgggctcgggtttacacgaattgtgcttggaatggtgagtcgcattgtcatactcgtgatattaagggtgttcctgcgtagttcgtccctcatgaggtccctgggtcgatggcggcccgaggttacgattcgtggttcgtttatgcccgttatagttcatggtggcttggttgagactactgcgtatggtgcgctcggtcattatactgatttccattagggtgataaggtgctggtttcgtctgcggatcctcctgataagcgttaggtggatttgagttatcggagtaagactctttagggtgggtcttagtgcactgaggagaagcatattcgga

SEQ ID NO: 278300 - DNA, 451 bp, Zea mays
tttgggctgatttatgtgcttgtttatgtgcttggtggcggtcgcttatccgtaccacaggagtactcatgaggagggtgatgtcgctaagtcatggaagtgtcatggttgtttcccggccgactcctagacgaagacgcatcaccatgaggggacggagttccggagtttgaagaaaaagacgttcggtgacgcgttggagggagttgcgtcgacttgggaatatatagtgatgattaattcgcctagtcgttctcggcctaatgaggcgaattctcctattttatgtgattagactagtcctggtcatgcggtgtgtaggtctggtgatgtctctgagtctcctacgccttttaatcgtgagcataatctgtcgcctgcttcgtataggtatatgagggagtatctgctcaaggctgagcgggttaaaatggctgatgagactgcggag

SEQ ID NO: 278301 - DNA, 444 bp, Zea mays
ggacctttgggctgatttatgtgcttggctgttcagtcccggagattcgaattacccgactagcgtaataacgagcggagcgatcggtcggtcttgtcctttcggatagtcgaatctggattcgtgtaagtctgtagctaattcgaccttgcctttctgttcgtatcctcccacggctggtcccgtgttatctattctgtgcggtctgtagtagcattgcgtctctatcgctttcgagtcaatttagtagacgcgggacgttaagaatacgacgcgcgtcgtcgatttgtgctacggttgtcactctatagtactcgttacgccttgcggaaagacgagtattaaggaggcggatgagtaaacgactaacgcttagaataagaatctgcgtcatcctgcggagcggacttttaataacgcgaagcttagcgcccgcgacacttt

SEQ ID NO: 278302 - DNA, 468 bp, Zea mays
ggacctttgggctggtttatgtgcttgtctaggtctaacgcgttcgagtgagctacttggtggtgttttgagtttgttgtatgtaggggtggagcggtcgtgagtggtggtgaggcacgggtacatagtagtagtagttagcgggtccttttggttcgcttcggaaacgatgattttggatattgctcgattacggcaaaatcggcagaagtaataaagacgtgcgaggaatagacgaaggttgaagtctatctagggagaagtagtgtcgtagtagcagtccgcaggcggcgccaagaccgcagtctccgtcactagcgccaactgcctaccgctaggcggccgtccaccgctgctcgtaatcgacgttgcgcatcttttgacgtagtacgctggcactcgatcatcgaacccgagatggtcctccctggacgcccctctaaaaaaaaaaaacaaaagggttggttg

SEQ ID NO: 278303 - DNA, 419 bp, Zea mays
cagcggcagactgtgagtggttgtcctgtccctcggcacgcttccttgcgccttcgatcgcgcacgctctggacgccgattcgattgctagaactgagaagggggttcttcacgaggacactaagaaagtcaccaaggtcgtccttgagggcttatctaagggcactacgggccacgcggaagaggactcggccctcattgatccctccggcgatagtaggctgagtactcctgatgttaaggttgggactgtctcgaatgattatcctgctaagtctgctctgcggcatgataatgagcggggtcatagtaattgtgctgctgattcgacttgttatacgcctaagatttagcaggggcccccttttttcgtcctctacggacggccgtcgtccgcgcacgttgagaacaaacgcgga

SEQ ID NO: 278304 - DNA, 456 bp, Zea mays
  unsure (1)..(456): unsure at all n locations
tgcttgtttatgtgcttgtcccctcctctgaaagcacaaaaggcgcccgctcccgaaagtcagaaaaggcagtccctcaccacggtatactagcttaaattacaacccagctacccccacatcatatgcgtaacgggcacgaactttagccgcgagagtgcaagaggcgaatacagtaattagcacgaaatcatccaagccgacggaagagtagcctttccgtcacgatcgactccccactgaaacgtacagtacaagtcacgcgatcagaaaaaaatggaaatactccacagcccggaacggagatccaataccccgccggtcaggataccgggtcacactccgtcattcntctatccggtataaacaatcctacccgccctttagagatcgccaccaacgtcccgtaggaacatataccaccctccggcacttaccgaagcacataacatccaa

SEQ ID NO: 278305 - DNA, 445 bp, Zea mays
tttgggctgctttatgtgcttggcccgaggcagatacaaaggaatcgttcgcgtaaaccgatattctgattcatacgttactacaaacgggaaggataatcgagaagagaggaggacaggggagcgagtagttgctcggagacggccattcccgaatcacttgactcggaggacccgacccgttcttcccgcgcatcccaaaaagggtagttaggacgacgactcgcaccccaagataacgtcgctcgcccgggcccaggaccccgtcccgctgaaaatcagtatatccaccgcatcatcgactagtacacccgcccctactttcgggccaaacgacgtgctcaaatatcctcgtcggttcgaaaagagtattattgctccggctctttagtagtaggtagtaccgatctgtcaaaaagccataacctctagacgtggacgagtt

SEQ ID NO: 278306 - DNA, 432 bp, Zea mays
cggacgcgtgggcggacgcgtgggctgtaggtgggatttttgggagtttactgggaggatgtgcgttatccaatctcccaatacatgtaatatatattggtttctcagccctcccattcttccaattagtttcctgcatgtttgttgaggattcttcaaaagggttccacaacgccagtgatgaacataagtatgtagacaaccagagttctgttactgccttttctggaaaaggctctagtgagggcactagaaggcgaaagggaacttctaaaagtaacaacagcagtccacaggcaaagcgaactgagtctaatgaaaaacacaacgggtcaattaattcgttgccatgtttgtctctgaggtcagccttcttcagtctctgcacagcttttaagcagccaaatattctgcggcctatggcatggtttt

SEQ ID NO: 278307 - DNA, 332 bp, Zea mays
ggctgctcctccagaggctgcgtggcaccaccagggtccagaaagagctcgacgatctcgtgtccgcgaccaggacgaccaccacagggcgtcccttccgcaccatactgaggcgcaagtacaggccgcagctggtcatagctctcctcgtacccttcttcaaccaggtcaccggcatcaacgtcatcaacttctacgcgccggtcatgttccggaccatcgggctcaaggagagcgcgtccctcatgtcggccgtggtcacgcgcgtctgcgccacggccgccaacgtggtggccatggtggtcgtggacaggttcggccgccggaagctc

SEQ ID NO: 278308 - DNA, 438 bp, Zea mays
cttgagacttcacacatcgatccccactccttccaccccaaggaagcgaagcgtacgctacgcgcactgccctccggcgaccgccccgccgctggcgggtcggattgggtccgatccggatctggatcagcaccggcatcgccgcgacaaggatgtcgaccccgaggcagcggcatacctccacctccggcgggggcggaggagggaggcgcgccgcctccgggtcggccatgctgccccccgtggtggtcctcgtgttcctcttcgtggtcgcgccttcgctcttcttcgtcgtgcgcaatgacggtcgcgcccacgcccacgtccacgtagcctccgatcgcaagggtaagaatggcaatcaggaagcagcagcaatgaagaacctcaaatctattttgcccaaggaggtgtttgatgctataactgctagtcaac

SEQ ID NO: 278309 - DNA, 748 bp, Zea mays
  unsure (1)..(748): unsure at all n locations
aggcggccgtggcgtccggggacagtgtcgtgcaccagcgcgttgatgagctgcagggagccgctggcgaagaccaggtgcttgtcgtccactcgccacgggcgaacgccaccgacggcaccttcatcgagttcgtcacgtcgcctaacaacccagacgccctgctccgcgagcccgtcctccgcggctcggcggcggcgatcgtcgaccacgcgtactactggccgcacttcacgcacatcccggcgccggccgacgaggacatcatgatgttcaccgtctccaagccatccggacatgctggaagcagattcggatgggcgctgatcagggacgacgaggtggccaagcgggctttagagtacctgagggacagcaacatgggcgcgtcgcgggacacccagctgcggatgctggggatcttcaagttcatgctggccaacctgcgcggcaaggacgacatcttcgccttcggccacgacgtgatgaggagcaggtggctcaggctgagcgccgccgtgtcgcggacccgccgcatcacgctgcagaagatcgcgccccagtactgcacgtacttcggccgggtcagagagccatccccagcctacgcatgggtcaagtgcgagatggaggaagacgaagactgctacgaggcgctgctgaaggcgaacatcatcacgcgcagcggcgtncagtatgaggcgagcagcaggtacacgaggatcagtcttctcaagtcggacgacga

SEQ ID NO: 278310 - DNA, 690 bp, Zea mays
  unsure (1)..(690): unsure at all n locations
ctcttcaccaagcagttcatcgccaacggccgcgagatcatcaacgctgacggctttctggtgaacacgttcgacgccttggagccggtggcgctcgctgccctgagagatggcaaggtcgtcccggggttcccaccggtgtacgccattggcccactcatgtcgcagcaaaactcagttgacgaaggtgggaaggaagaaggatcgggctcccccgttgcctggcttgacgagcagccagcgcggtctgtggtgtacgtcgcgttcggcaaccgctgcgccgtgagccatgaccagatcagggagatcgccgccgggctggaggcgagcaactgtcggttcctttgggtgctcaagaccacaacggtggatagggacgacagcgccgtgctgacggaattgctcggcgaggggttcctggagcgagtgcagggtcgcggcctcgtgaccaaggcgtgggtggaccaggaggccctgctgaagcacccggccatggggctgtttctaagccacagcgggtggaactcggtgaccgaggcggctgccgccagcgtgccgctgctggcgtggccccgcggcggcgaccaccgcgtgaacgccatggtaacggtgagcggtggggttggggtgtggatggagcactggagctgggacggngaggactggctggtgaccggggtggagatcgcg

SEQ ID NO: 278311 - DNA, 1141 bp, Zea mays
cagttacagaaagctcatacaagagatttctagtagatacaccaatcctgtttgtccccccaaagactggtgataatacagttccaccgtgtgggtttgggtcttttcatcagcagtacaggattgatggaaaacttgtggctgttggtgtagttgatatccttcctaaatgtttgtcaagcaagtacttgttctgggatcctgaccttcctttcttatctcttggaaagtatactgctctgaaggagatagattgggtcaagacgacacaggagcactgtcccagccttcagtactactatctcggttattatatacattcttgcaatccgatgagatacaaagctgcatatcgaccatcagaacttctatgtccactccgttatgagtgggttcgctatgatttagccaagcctctactggatgccagtcaatactccgttctatctgattatgctacaatgcaaggtgaagtgccccagcctcagatttgtggtccctctgatgactcttcagcaaaagttgaccaccatgagtctcccagcgatgaggatgaggacgacgacgatgaagatttcgacaactatgaatcagatatgatggtcgatgaagagacaattcattcagaaaaacccgatacagctgaaggcagttccgagataaatgacataaacaacatcaccctggacctgaaaggctcgagggttaaatttaagggccttcagcaagtttttgggccaatcgagaggcgacacctcaatgcgctagaaaggcaactgagcagatacgtcaaggttgttgggaaggagctgtctgatcgaatggtgtattgtctttcctgatatgcagccggtcccgagatctcaattctactgtgaaaggtgcacatgagagttaaactagtttcattcagaaagaaaggtcatattgctgcgtgtttctgcatggttttcgttgtaaaggtaccagagctgaggctgacatagaacattccccgggcgattttgtatgtgtattttggccctaaagtcttcatggatggcttatactgaaaaaaagtggcgattcggtacgcctaattgtgcttatagggcaattgaaccggcccagtaataaagttgcagcgaatgggcttctgtcc

SEQ ID NO: 278312 - DNA, 1795 bp, Zea mays
ctcatcggcctccccatcatcatcgccaagtccatcccgcacaagaagccaggcccgccgccgccagatcagtacacagaggcgctgcacaaggcgctcctcttcttcaacgcccagaaatccggccaccttcccaagaacaatggcatcaagtggcgcgggaactctggcctgtcagacggctccgacgccaaggacgtcaagggtggcctcgtcggcggctactacgacgctggcgacaacatcaagttccacttcccgatggccttctccatgacgctgctgagctggtcggtgatcgagtacagcgccaagtacaaggccatgggggagtatgaccatgtcagggagctcatcaagtggggcaccgactatctgctactcaccttcaactcctctgcttccaccatcgacaagttatacgcccaggtgggtgctgctaagatcaacggcagccggccggacgaccattactgctggaaccggccggaggacatggcgtaccctcgcccttcactgtccgtgagctccgcccctgatctgggtggcgaggtcgccgctgcacttgcggctgcctgcatcgtgttgcgggacaacgccgcctactccaagaagctcagccagggcgcggccaccgtgtacaagttcgcgcggcagtcggggcggcgcaccccctactcgctccggcagccggacatcgagtactactacaactccaccagctactgggacgagtacatgtggagcgcggggtggatgtactacgccactggcaacagcagctacatcaccttcgccaccgacccgcggctgcccaagaacgccaaggccttcttcagcatcctcgacttctccgtgttcagctgggacaacaagctcccgggcgcccagctgctgctgtcgcgcctgcgcatgttcctcaaccccggctacccgtacgaggagtcgctagccggctaccacaacgccaccagcctcaacatgtgcatgtacttcccgcgcttcgccgccttcaacttcaccaagggcgggatggcgctcttcaaccacggcagggggcagccgctgcagtacgtcgtcgccaactccttcatcgccgcgctctacgccgactacatggaggccgtcaacgtccccggctggtactgcggcccaaacttcatgaccaccaacgacctccgggagttcgccaggtctcaggtcaactacattctcggtgacaaccccaagaagatgagctacgtggttgggttcggcagcaagtacccacggcacgtgcaccaccgtggcgcgtccacgccgcacaacggcgtcaagtactcgtgcaccggcggctacaagtggcgcgacagcaagaaggcggaccccaacctgctggcgggcgccatggtcggcgggcctgacaagaacgacggcttcaaggactcgcgcaacaccttcgggcagaacgagccgacgctggtgggcaacgccggcctcgtcgcggccctggtggctctcaccaacagcggtaggggagccggcgtcaccaccgtcgacaagaacaccatgttctccgccgtgccgccaatgttcccggccacgccgccgccgccgtcatcatggaagccgtgaccacatacgatttttggtacaatacaacgtcagcagtgaattcttgatgccacgttaacggtggcatccatcatgcgtcacctgtagatgtatgttttcatggatacaagtggattacagttaatgaacggatggatacataccttcgctatcattcaatgttcagttcgtggttcatctc

SEQ ID NO: 278313 - DNA, 379 bp, Zea mays
ggacgtcaagggtggcctcgtcggcggctactacgacgctcgcgacaacatcaagttccacttcccgatggccttctccatgacgctgctgagctggtcggtgatcgagtacagcgccaagtacaaggccatgggggagtatgaccatgtcagggggcagatagtcggtgccccacttgatgagctccctgacatggtcatactcccccatggccttgtcagggcgctcatcaagtggggcaccgactatctgctactcaccttcaactcctctgcttccaccatcgacaagttatacgcccagtgtgggtgctgctaagatcaacggcagcacggcggacgaccattactgctggaaccggccggaaggacatggcgt

SEQ ID NO: 278314 - DNA, 456 bp, Zea mays
tttgggctgatttatgtgcttgacatataagtataagtgtatctccgtgacggtcctcgaggccgcttgtttcagtgatcttgagtcatcaaaggtataagttgatacacggtggtctagttctcttcattctatgttttcgctatcgaggcgtgttgcggagtccggtacttttatggtgactcattgttacggtggggtcgttctagttgtcgagtcggctatggtgtcgctctcttttcctatcaagtcgttgccttcttgttgttcgtcgtggtcttctgttgtgctgggtgcgcctattgctgataagtagagtatggaggaggagtggcattgtactagttttgcgcttcattcttcggcggatggtactttctatgaggattatacgaattatattgtctcggcgtctattcgtattctgatgtgtcatactgaggtggggacagggtc

SEQ ID NO: 278315 - DNA, 441 bp, Zea mays
ctttgggctgatttatgtgcttgtttatgtgcttgtttatgtgcttgtcctcctcgttcgttctggtatttgggttcccgttccgcgaataaaagctgctgtgccttctccggtcgacgaaacttctcctctgctcagactcgagttcttgttcgctccctggactagacgtccggcttgactgaataatggcgagctccgtctcgccacccgaccgcctcaaatgtacggccccgcccccgcgacgacgcgtaggccttgactcgccctgcccgaccgacgagccgatgtactggtctgaaatgaggtcgtacggcccccgcgttcggaggccctcgaccagtgcgcccaaggaaatcgggcgttataacccgccgtcagaagcgtctgacttgctgaaccgacactcgttgagtcgtgatgccttgggggactcggact

SEQ ID NO: 278316 - DNA, 460 bp, Zea mays
gaaatttgtcaaaatgggtcgccctcctcgcgacgcagtgcgaccacgccgccaccttcgcctaggaaccgcgaccgctccatgaagaggggatcagatttgctcatcgcgacctaccttggggattcattttgtgttgttgggttggatggggagaagtgtcgagcacatggtgcttgcagtttggtttgtttgtgttgacgatttctctgtggggcgttgcagggaagatgggggtcgaggagaggcaggcgcagaagagctcctaggaggagcatcccaagaacctcatcgtcgatgccatgatgctggactcccgcgctgtcaatctcgacaaggggccacctgtcgctctggacaagggggctgccctaaggtcctgtttttgcttccttcagatgaaggaacatctatcctggagcttgttgctggaataggttgtttcactggagaactcgct

SEQ ID NO: 278317 - DNA, 906 bp, Zea mays
tctgtccaagacgacttcatggttgaagagattcatcgggcgtgcgaagaagcctgcaatgacatggccattcccctttgtagaggagaggctatttgttctgactatacaagctggagttgaaggtttccacatttacgttggtggtcgacatgtgacatcttttccttatcggccggggttcactcttgaagatgcaactgggttatttgtcaagggtgatgtagataggcattcagtttatgccactgcacttccttcgtcgcatcctagtttttctcttcaacaagtccttgagatgtcagaaaagtggaggtctcggccactaccaaaaggccccgtttcccttttcattggaatactgtctgcatcaaatcatttcgctgagcgcatggctgtgaggaaaacatggatgcaggctccagaaattaagtcttctgaagccgtggctcgattctttgttgcactgaattcaaggaaagaggtcaatgtaatgttgaagaaagaagcagaatactttggagacattgtcattttgccatttatagaccgctatgagctggttgttcttaagacaattgctatctgtgagtatggggtccagaacttgactgctgcaaacatcatgaaatgtgacgatgatacatttgtgagagtagatgtagttctgagacgcatcaagttgaacaatggtgacaaaccattatatatggggaaccttaacctcctgcacagaccattgaggactggaaaatgggcagttacagacgaggagtggcctgaggatatctacccgccatatgcaaacggaccaggctatgtgatttctggtgacatagcaaaattcatcgtgtcacagcatgccaatcagagtttaagactgtttaagatggaagatgtaagcat

SEQ ID NO: 278318 - DNA, 444 bp, Zea mays
cccacgcgtccgcccacgcgtccggcatttagaaaagctggagcagtgaaaatcagtacgtggacattggcgcggcttaatgcagaggaagtctcaaaggcagccgcggaggcaaggaagaaatccaaaatcctgaaaccagttggaaaacatggcgccccagagaacagcagcaaaccagaccatttgcctagctacaagagacggctagacaggagaggtttccctgctgaactctctcttgacccacttgcaactctatccgcaagcggcaccgaaagcaactacagcgacgcagcaacagaaatctgtggcagtctagccccgttacagctcgaagcgagaagtgctttccaaccgagtactgcagcgtccacaagaaatgttgcttcatcgcctgaaagtagctttgactcaccaaatctccaccccttccgcacttcc

SEQ ID NO: 278319 - DNA, 1186 bp, Zea mays
  unsure (1)..(1186): unsure at all n locations
gtctgttcattggcatccaaagatctgaacctagcgtcctctgcatgccaatggtgctcgtgtccagatcaaaactgacggtcgcagggaggacttatgagcagagtccaattcactgttatcaccaaaaacacttttcggggccacattatcctgggtctgcaagggcctttgcagggcatgttgttgagtctctaatgtgacctttggagcagcttcttttgttggagctgaagactcgggcagagaagctacagcattagagcgaggtctcttgggtctgtgcactggaagtgggttgatagggggagggctgactgcaggttctatttgccagggagaaaccctttcaggacgtggaatggaggaagcttcatcccacctcaccttgaggtaacgccatttagattcagcccatccagcttgatcaggatccacatttccaacaatggtcccagtgaacctttgttctggagcctcttcaccttcaaacctcattttaaatctcatccctatagggtaatttcgtttcagtgattccatatagcgatcacagggaacaacaaactcagctggacttgtcctaggcttgtagtagacagtaaacatggtcccagtgttaacagcatgccatgctgtagcaagaacaccaagatgcatgctgtggcttgatattactgaagacggaacatttgcttgctgcctcatggcacgcctgactcctacacgaagctccccactatcacctcttagaaagatgaaggcatcgccagcaacaagacgtttggcactaacaaaaacactccagccactctgcaaaagatgccttcgtggttgacctctgaatatgtggcgaaagcgccattccacaccatgcaggtccttggctacaagctcttgtgttggaggttgacgggtcatatcctgacccggaagccaaagcaaagattaccactaccagtaaagcaacaaatagcaaacctacaactgatgcactggcaatatcaagtcaagaatccagcaagctaccagtggcggaagacactcatctgcatggcgccgcagcaccgagaatccaccatgagtgctggtatcagaggctgtcaatgtcttgcagaaggagtgcacgcgtggccttgcaagtgcagcaggaggtgaagcangcatctnctcactagagccattc

SEQ ID NO: 278320 - DNA, 577 bp, Zea mays
  unsure (1)..(577): unsure at all n locations
aaagcgccatccacaccatgcagtccttggctacaagctcttgtgtcggtgtttgacgggtcatatccagtggcggaagacactcatctgcatggcgccgcagcaccgagaatccaccatgatngctggtatcagaggctgtcaatgtcttgcagaaggagtgcacgcgtggccttgcaagtgcagcaggaggtgaagcaggcatctcctcactagagccattctcctctggctgctgtgattcaggtagcagagtgagctgggcataaacctcatcattgtctggctcagccttcaattcaacgttcatgacctcacacaggatcttccacgggagatcgtaaaattgcatgtgctgctcagccacctggttggtcgacgcctccacctgctcgatatggccctgcgggaagtagtacaccttgtccccgaccctgggcaccgtgaccagcgggccggcgcagaggttccacagctccgtgtacatgccgtcctccgttccgcctccgcctcgctccgcagcgacggcatccccctccccgcatccacctcctaccgccacctagaacgcagcagc

SEQ ID NO: 278321 - DNA, 408 bp, Zea mays
tctcaccgcactgccttgccccctactctgcctcgcttagcttagccgccgctgctacgcactctcgccgtccttgttcccgcgtcgctctgctcgcgatggcgtcccgcgttgcagtgctgctcgtggccgtggcggccgtgctgttcgccgcggcgtcggcgcaggagatggacctgggcgtgccgcccgcgccggcgcccgtcacgggcgcggcagcggggaccgcggcgtcggtcctggccgtggcttgctctgccgtattctccatcctcgtcgccggtggcctcgtgcagtaagcgctgccgtcgacctggtggctcgctgctggttcggggtcaagcggagccctgttcgatcgttttcgcctctagtagtagtagaagtagcagtcatgggctgtgttga

SEQ ID NO: 278322 - DNA, 869 bp, Zea mays
aagattgagaacttcaaggttggcgattggattagagtcaaagtgacagttccctcacccaaatatggatgggaggatgtgactcgaaatagtattgggataattcatagtctacaagatgatggagatgtgggtgttgctttctgctttagaagcaagctttttctttgctcagttgcagatatcgagaaggcacaaccatttgaagtaggggaaaaagttcatgtgtcaccttccatatctgagccacgcctcggctggtttaatgaaactgcagctactattggagccatggcaaggattgacatggatgggactttaaatatcaaggtttctggccgaaaaagcttatggaaggttgctcctggtgacgctgagaggctttcagcttttgaggttggagattgggtccgcccaaaaccaagtattgggagcagacctacttatgactggaatagtgttgggagaataaacattgcagtagtccatagcattcaggactctggttacttggagttagctggctgtttcaggaatgggaagtggctaacccataacacagacattgagaaagtgcagacattaaaaattggtcagcatgttcggttccgtgctggaatttcagagcctagatggggatggagagatgcgaaccctgattctagaggcgtcatcgctggtgtacatgctgatggagaggtaagggttgccttctttggtgtgcctggattgtggagaggcgaccctgcagatcttgaaattgagaatatctttgaggttggagagtgggttaggctgacgaacgatgtggaacaatggagatctctcaaacctggtagcattggtgtggtgcatggggtgggatatca

SEQ ID NO: 278323 - DNA, 616 bp, Zea mays
taataaagcaccgaaaccggccgccgacgaccaagacctgcaaccgatggaaggcattcagcagctgccagcggacgtcctcgtgtcggggatctcccgcgccgccgcggggccgagggatacctgcatcgccgccacggtgtcgccggcgttccgcgccgcggccgactccgacaccgtgtggtcacgcttcctcccggctgacctcgccccgctcgtctacccgacgcctccgccaagatccaagaaggagctcttccttcgcctctctgaaacccatgccctcgttgaagatggcctcatgagcgcgtggctggacagggagaccggcgccaagtcctatatgattgcggccagggctatggctattatctgggtcgacacgccggactactggcgctggatcgtgcgcgaagactcaaggttctcgacatgcgctgaactgttagcggtttgttggctggacatctccggttgcatgccatgcaggatgctgtcaggtgacacgcgctatgcagcctacctggtattcaagatggccgatgactgctttggcctggattctcctcttcaagaggcatttgtcagcgtcggagaggggggcacatcaacggcc

SEQ ID NO: 278324 - DNA, 530 bp, Zea mays
aggagtgcatgccctcctcctcctctcctcttggttcttgcagacaactcgcacctgcaggttgttcctttgtgtccaaaccaaggaaaggcggcaggctcctcacattctcctgccatatctgctgcccgctgctcccccctctctcttcaagctagcttgtagctggctgcatgctcctcgcgcgagccgtggtgatggagcacaggaagaagtcgaattatcttgttgccctcgtcttggcttcgctcttgctctccgccatggcaggagggcatcggaagaagcttctgaacaaagacgacgcatcagaatcaatggagacattggaatccacgcagcagctgcaggaagacgacgaaatggctgtggtggtccacgagagaattctcaggcaggcgaagatgaacgactacgggagctacgactcttcgccgaccatggctaagcctcacttcaaggacatacctaactagccagcccactatatacattgagaggtcgatatatgttgcttgctagtcgagtcg

SEQ ID NO: 278325 - DNA, 453 bp, Zea mays
gttgccctcgtcttggcttcgctcttgctctccgccatggcaggagggcatcggaagaagcttctgaacaaagacgacgcatcagaatcaatggagacattggaatccacgcagcagctgcaggaagacgacgaaatggctgtggtggtccacgagagaattctcaggcaggcgaagatgaacgactacgggagctacgactcttcgctcgaccatggctaagcctcacttcaaggacatacctaactagccagccccactagctactatatacattgaggtgttgcttgctagtcgagtcgcctctcctcgtcctcatacacaagcatacttgcctaataaattccatgtatcatcaccatgcatatatgtgagactatatgtactgccgcttgatgtatatgtgcacagtgcacacattacctacatgtatatatatgtgcatggtcgtcg

SEQ ID NO: 278326 - DNA, 430 bp, Zea mays
atttatctacagatacggaatcataagatctaccgttttattgatgatccagtgcttcagctgtctacaataagtgatgatgatcatctggcagtttataagctcccaaagttggaaaagagggtgaattacattcagtttgtgcatcgtcatgaagatctggaccatggaaacaataacagcttgacatcttggaaaccgtacggtgttcctcttcttgcacaaatttcttgcaatgaaattgtcacgggttttgatatccatgagttggtccataaaatgcttgtgcccgtgctaaggaattcggactctctgcatttggctggtcaaagatcttgttccacaagaactcatagttatcataccgacagcagcaaatttcagcttctggtggttgatgatagcaacacagtcatttgaaaatccaatg

SEQ ID NO: 278327 - DNA, 689 bp, Zea mays
tgactataggctttacatgaagcacaagatagtgaagggctatcaggtcgggaaggttgtgttccgcccctacgaagacattctggggatcgggcactcgatgggcttctcttccatccttgtcccaggatctggtgagccgaacttcgacacctttgttgacaacccgatggaaactaccaagcagaaacgtgagaaggaggtgcatgctctcctggataaactccctccggagaccattatgctgaacccgaacacgatagccactgtacgagctccgaagaagaaagagaagaagaccaaggaggagattgaggaagagatggcagatgccgtggaggcggccaagaacactgagcgcaagaagaagaccaagggcaggagcaaaccgagcaagcgagccaagaagaaagaggaagacgttttcaaggccaagaggcccttcctggagcaatctgataaggtggatgggcgacctgacaagaagcagcggataggtgaactcccaaaggccttgcagaggtttgccaagaaaccacaatcataatcgtcgtcgttaacacagggttgggatttcacattggtatttccaatatgtagaatttccgcgtgagcacagaagaatgtgccgaaatttgtgctgaactatttggtattcagcgagcaggcgtgtcagtgattttttaaaa

SEQ ID NO: 278328 - DNA, 528 bp, Zea mays
acggcgtcatcgtctcgctcgttcctttcggctctgagcatggaaggaagtcttgcgagcttggatggaagccgggccagcaggccgttccagctagttagtggctctcagacagctagcacgccggagctgggcctggtgcaaaggagaaggtgcgctggcagggaggatgggactggtcggtgtgcaaccgggagcaggtgccattgttcaaagaaaaggaagctaaggataaggaggtccatcaaagtccctgcagtaagcaacaaggttgcagacatcccagctgatgaattctcatggaggaagtatgggcagaagccaattaaaggatccccacatcctaggggttattacaagtgtagcagtgtgagaggctgccccgcgaggaagcatgtcgagaggtgcgtggacgacccctcgatgctgattgttacctatgaaggtgaccacaaccacaaccgagttctagcccagccagcctgatctttcaggctatcaattcaagatcggttctacagtcaccct

SEQ ID NO: 278329 - DNA, 485 bp, Zea mays
attcacgagagcaggtggactgcatccaggatgacggcaaagtccgctttgctgaaggttccgtggtggatgcggacgttattctttactgcacagggtagggttgagctcaaactggttttctccgtcctgcacctaccatctctttcctcccttgcatttcgtatatatatatatgatgatgatatgattgtaaaaagcaatgcatgaaactgaattttcccggccaggtatcgctaccatttcccgtttctcgacctggatgggctcaccgtcgacgacaaccgtgtcgggccactgtacaagcacgtcttccccccaatgtacgcgccgaacctgtcattcgttggtctaccagtcaagaccatcgtcttccaggagctggagcaggaagccaagtgggtcgcggccgtgctgtcggggcgggccacgctgccaagcgaggaggacatgatggcgttcgtgaggagccattaccagctgat

SEQ ID NO: 278330 - DNA, 818 bp, Zea mays
gaaactgaattttcccggccaggtatcgctaccatttcccgtttctcgacctggatgggctcaccgtcgacgacaaccgtgtcgggccactgtacaagcacgtcttccccccaatgtacgcgccgaacctgtcattcgttggtctaccagtcaagacttcaggagctggagcaggaagccaaaactgctgcgaatccaaaactctgtgcgtgccttcccagaccatcgtcttccaggagctggagcaggaagccaagtgggtcgcggccgtgctgtcggggcgggcgacgctgccaagcgaggaggacatgatggcgtccgtgaggagccactaccagctaatggaggaggccgggaggccgaagcgccacacgcacgcactggcagctcagtgggtaagccaacgctgacaacgtgtgactgtgtgtgtgtgtgtgtgtgttaccggcccgacgctgcagcctgaaactgtgtgcgttcggaccaggcggagcacatgaactggctcgcggaccaggtcggcgagcctccagtggagccgtggaagtgcgagatgttcgataaggtacttgcgagcatcttggcgctggacgaggcctaccgagatcgctgggaacaagaggaggaccctggccccggtgggcatcaggaaggaattaaggttcagaccgagccccatctggtaacggaacgaccctgaacggttgcggcaacctgacgccgtcgtatcctgattttactctcgtgatacttcacttcgttttgcccccatagaacgggaataaacacctatttattatttttgtttaggagggaat

SEQ ID NO: 278331 - DNA, 366 bp, Zea mays
cagctctcctctactagacttgttttttccgttcatcgtttcgtttgttccacctgcgcaactgcgacggggataagtacgtcttccagatgacgacggcggcatggccgcggccacgcttcctcgtcctcccccagcctggattcctccgctcggtctgccacggcctctgctcccgctgtctcttctgcttcctgctgctcctcgccttcgcctgcagctccagctccgggcgggtggtggtcactagcttgcctggcttcgacggcgacctccccttccacctcgaaacagggtacgtggaggtggaggaggacgccggcgtggagctcttctactacttcgtccaggccgagtccggcgccg

SEQ ID NO: 278332 - DNA, 392 bp, Zea mays
cccacgcgtccgcccacgcgtccgtccactcgtccgattgattgcatgtgttctcctcctaggaagaagttcaaattgagccctcttcagaattgggatcctcgcttggaaccagaccttattgtatacaatgcagttttgaatgcttgtgtgcaacaaaagcaatgggaaggggcattttgggtactgcaacagttgaaagagaagaacatttgtccaacaaattcaacatatggtcttgttatggaggtaatgcttgtctgtggaaagtacaatttggtttatgagttcttcaataaggtggataaatcatcaatacctggtgctctgaactataaagttcttggtaatgcactttggagagaaggaaagattgatgaagcaatgatggc

SEQ ID NO: 278333 - DNA, 439 bp, Zea mays
catatactatccatcgtctctgcccgccatcccatttcccaatcgcctccaaccccccacaccccgcccgccgcaaacccctccatttccgccgcatttccctcgctgtcccagctcaccggtcggtcgggtgctggggctcgcggctcctctcttcctggggcctggaagggacggggaaggatgcaggccgcgaccaggagcgtctcttgcatcggcgcgcagccgtccgtcctcatccggtgcggcggtggtgcgctgtccgcttcgcccggcggcctcggaggagggggatgcagggtccgggtcgtcgccgtgctgcggtgctgcgcacaggagaagcgtccgcctcgggtgcggaaatccaaggaggagagaagggagatggttggagtccttcatcaacaggtatcgagctttaaacgaaggaaaattccca

SEQ ID NO: 278334 - DNA, 502 bp, Zea mays
gcactcgagagacgacacgacgcgagatccgtgccggggaagagaacgcgccgcaccgggcagcgaacgaaaccaagccaagccatggcagccaaccccaaccactgcctccgccgcctcgcctcagctctctcccacggtccccggcctccgactcctcccctatccctcctcttcccccgcctcgcgctctccagctccggcccctccacgggcccgccgccgccgccgccggatgccgtaaggaacggggagggagaggaagcggcggaagctagggccgccgaagccgacgccgaagcggggaaggaggaggagcatgaggccgacggcggtgcgcacgtgaacaaggccaccggcgaggtcggcggcccgcgggggcccgagcccacgaggtacggcgactgggagcgcgccggccgctgctccgatttctgaaccgccgctggccgcgaggtgaggctcgtcagcgtcagcacggaacctgtggatgtggttcccc

SEQ ID NO: 278335 - DNA, 547 bp, Zea mays
ctccacgcgtccgaccacacctctctgctacacccgccgcccccgcgggaccgaaaccctagctagggttctgcccgccgccgccgccgccgccttcgatcctgacgcggccaggcttcccgcaacaccgccatggacacggggcgcaagcggaccgcaccggagggcgccaacggcgcgggcggccccaagcgcgcgagagaatcggagacaactggtgtaggaagcaaatccaagccgtgcaccaaatttttcagcactgcgggttgcccctttggtgcaagttgccattttctccataacttcccgggtggctaccaggccgtttcaaagatgaccaacttgggtggaccgcctgttccggctccaccaggaagaatgcctatgggacctggtggtcctgatgggccaccttcacctgctgtgaagactcgcatgtgtaacaagtacaacactgccgaaggatgtaaatgggggagcaagtgccactctgctcatggagagagggagcttggaaagcccctgcagatggacaactcgatgggag

SEQ ID NO: 278336 - DNA, 505 bp, Zea mays
tgtttcgctcgtgccgttgcgctgcgccaagcctccccacctctctcgtctgttctccacccgccgccctcgtgggagtgaaaccctagctagggttctgcccgccgccgccttcgatcaagacgccagcagccttagcgcgagcccgccatggacacaggacgcaagcgcatcgcgccggggggcgccaacggcgcgggcggcccgaagcgcgcgagagaatcggagacaactcaaatgggtgtaggaagcaaaaccaagccgtgcaccaaatttttcaggttctaatctagcttaaaatgaactctcatctggtaacatctactatcattatatgctatttcttttaattaaaatttgctatgttattaaatgctgtgcttgatgctaacaaatgggtcagcctagattctgatacaggttggttttgtctaatcattgcttaagaacactcaacggagtaaaatttggaatctactgctgtttatcactgaaaactgatgca

SEQ ID NO: 278337 - DNA, 640 bp, Zea mays
tctttcaccatggaacaggttcacttgaagaaatctagaagattagattgaacatggggactgcaattcaattccttgtgatttgcaccagttatttgttcaattgcatttccttatcaatatgttgcagtagtagttctgaacaccttgaagcttgattatgaatggcatttctatataaagcatgatttctaaaagattagtttgtatcatttacttcagcttttattctttgcatatatatttttagcagtcatctagtgaggttgcattatccagctgcatgtaacttaatctcttccatcaacattgtttgcatttgtgtatcaactaaaatcatctgtaggttgtcagatatattagcatgttctgttgcttatattatgttttcaatgtgcagcactgcgggttgcccctttggtgcaagttgccattttctccataacttcccgggtggctacctggccgtttcaaagatgaccaacttgggtgggccacctgttccggctcccccaggaaggatgcctatgggacctggtggtcctgatgggccaccttcacctgctctgaagactcgcttgtgtaacaagtacaacactgcagaaggatgtaaatgggggagcaaatgccactttgctca

SEQ ID NO: 278338 - DNA, 943 bp, Zea mays
taaagtggacgatctgttgctcttgcagagatggaaaaactgagcaacgggcgggacccgaacggcagtacttctgatgctgtcacactctccgttgaggagcactccacgctcgtgctcaaagcgcaagaagcggatggtgccgccaggaagaaagtggacgcggcaatgcaagggctcgatcaagcaaaccggtgtaagctcgaactcttggaaagagtagaggaagcaatggcggctgtcgagacgagcaggaaggctctggaggaggcccagaggagggaggagtcagagaccaaggcaaagctagtagccgaagagacgctccgaaagctgcggtcggaccaaataatccagaactggcgcccgaccaacagcagccccgtaaaattcaagaacacggcgctgctggcgccccggagagcagcagcgggcgctgggatatacgacgtgaacggcctgagcctggtggccgccgggccgaacagcgtgaagacggtgtccatcgggcagatcctgagcatgaagctggaccgcgagctcgagatgacgaggacgaccacgacgagcgcgaggaagaagaaggtctctctcgggcagatcctgagccagaagtacgagatgttctccccgctgcggatcgaccacgactgtgcctcgcacaggcagttccagcagccgaggaggaagaggatgggcttcgtcgtgtacgcgctgctgctcgcgcggcagaggcataggaggcggaaggctgcctcctgcactcgtggtggcttgagctagctagctagtttggatggtcggtgggtgctcagccgcgtcgtagtcgtttatatgcttttattaagagataagcgatcggaataatcgttatatttgtaatatagctagttctatgaacaaacagttggtatttttagcagcccctcgccttgctctggcc

SEQ ID NO: 278339 - DNA, 632 bp, Zea mays
gggaggtggctgatgtcgttgtgtgatgttttctggaaccggcaagatacctaaaggcctgctgcaaatgttgttgacaaaatcctccctgcgtgatctccctgcgagcccttcatcttcaacattctgagccaatctagagggcggcaacagagcagcttaattccatgatggatcttggaagcgatgttcaagttcgtgctgctggaggtctcctagcaatattagacaatgagagacttcttgacaccattgagcagatggaaggtggagcatccattgcgatcgattctgtggtacagatctcattttatcctctgatggagataaattgaacacactgatgtgctgagatttaattatatcttctgtcatgggctgggcttatggccccagatggcagtatgccagatcagatccgaccttatatactgctgctgccctggccggccgcccgtacccaacagattgcccatgacaactttcagtggcagtctagtttgtaatcaacaaaattatatacataatttatttcctactttcaaggataaaaaaaaaaaaaaaaaaaaaaaaaaaaaaaaaaaaaaaaaaaaaaaaaaaaaaaaaaaaaaaaaaaataacggacgcgtgtt

SEQ ID NO: 278340 - DNA, 644 bp, Zea mays
gcgaccggcggctcgccgccccgccacagcgccgctgcgatttcttctgatccctgtggctcagcgcggagttttctttattggcttattacagggttaaatggcaaatagagcaagatggatgatgaagtacgaaaagggtcttgttgatatacttcatgagaacaatacttcacattatcgtacccaaaacggttggagaacagaggggtggaggaagatcgttagggatttcaatgtaaggtaccccgaagcaaagtttagtaaaatgcaaatccaggaacatgagactcaattgaagaaagactataagttgataaaatctatcctccaacgtgatggtgtctcatgggaccagagtgcatccatggttagaacaacagatgaaatctgggatgagataatcgaggatatgcccaaggcacggaagtaccaaagcaagagctttccattgctcgactcactagaactgttatttgatggtcctattcctgaagggggacagaaatcgccttccagcgtacctcagaatgttggtgaaaatgttgacgatggaggcaacaatatcagcacagtcccaggtttgtctgaaagacctagtggaacgtttaacacatgcgttactgaggcatggaataatatca

SEQ ID NO: 278341 - DNA, 331 bp, Zea mays
tttcgttcacgcgtccgcccacgcgtccgggcccggagcaacccttgggaaagtcgtcgacgccgttgagttcgaggcgaccggcggctcgcgccccgccacagtgccgctgcggcttctttctgatccctgtggctcagcgcggagggttaaatggcaaatagagcaagatggatgatgaagtacgaaaagggtcttgttgatatacttcatgagaacaatacttcacattatcgtacccaaaacggttggagaacagaggggtggaggaagatcgttagggatttcaatgtaaggtaccccgaagcaaaatttagtaaaatgcaaatcc

SEQ ID NO: 278342 - DNA, 358 bp, Zea mays
  unsure (1)..(358): unsure at all n locations
cccacgcgttcgcccacgcgtccgcccacttgttcgnccacgcgttcgnccacgcgtccgggaagagctactgggaggaatcggctcctttcctaaaggaaatttagaggaaataatgttcgcgccctcaatgttcaaattgcaggaaactccacattcctggacatcttcaattgaattgggaagaacattgcacgtctacgttttcaggccgtttaagattatctgattgacagtttcacgcctaacattgtacaggatagattaagaacattggttgctgctgctcctgaatttctgcaatcaggatctcgtcagcctatttttgataaacagtcgatctttttattttcaaaaa

SEQ ID NO: 278343 - DNA, 1377 bp, Zea mays
cagcttcccactcacgtaagccgttcctccgctccgcctcctacctcaaggaggccctcctcgcgctcgccgaaggccatcacggcggctgccacctcaaatcaccgctcgacgttgccctcaagctcgcggcgtacaagactttctctgaccactcgcccgtgctccagttcaccaacttcaccgcaacgcaggcacttcttgacgaaattggtggcagcacgtcgtcctgtatccatgtcatcgattttgatcttggcgttggaggccagtgggcttctttcttgcaggaacttgcacactgccgtggcgcaggtggcgcactctgccgttcgttaagctcactgcctttgtatcagctgcttcccaccatccactggagctgtgtcttgcgcgtgacaacattgcacagtttgctgctgaccttggaattccctttgagttcagtgctatcagtgctgatatgatcaaccctgcagaattcatttctgccactgatgatgaagatgtagttgttgtcctcccgactggttgctctgctcgtgcaccaccactgccagcgatccttgggttggtgaaacagctagctcctaagattgtgatagccatagaccatggcgctgatcgcgctgatcttcccttctcgcagcacttcttgaactgcttccagtcttgcatgttcctccttgattcgcttgatgctgctggcattgatgctgattctacctgcaagattgagaagttcctgattcagccaagaattgaggatgcggtgcttgggcggggcaaggtggacaagccaattgcatggagaagtgcatttgcagctgctgggttcgcgcctgttccacccagcaattgggcggaggcacaggccgactgcctcctgaagcgggtgcaggtccgcggtttccacgtggagaaatgcggggtcgggctcacactatactggcagtgtggcgagcttgtcactgtatcagcatggcggtgctgatcagcgatccacgcctgtgggcaccaatatttcaccaccatttgctagcagcttcaaccccagtaacgtgtatttcgtcttgcaatttagtgctgctaaggtaacaaatatattggtgttgaacccttcatgttgattatctttgcaacttattagctagaagaactagcggatttttagcaatgttggtgtcaatgtctctagtgtaatgatgttgctctaggtttttaccctgcttgctctcgggtcactagacattctcatgtgacttgaaacactgcttgtgaggagagggtataattaacctatcaaatgtctgtggtacagccccaatacgttataaatgttcacttaaaaaaaaaaaaaaaaaaaaaatttattta

SEQ ID NO: 278344 - DNA, 1082 bp, Zea mays
gttcaggagagccttattcatgcaatggatactggtaggtacaaggacttgcatgggggacgagtgactgatcttaatgactcgattgtggtgttgtctacaagaatgatccaaggatgccaggatgcttctcttggggtggaagagggcaatgctttttcagaagaaaaggctgtggcagctcgtgggcatcaactgaagatcatagttgagccgggcacaaccaacatcggtggaggcaacgttgtagtttcgtcaaggcattccttgggaagcagtgaagcctcaagtaagcggaagctccacatctctgatgggcaagaaaagacagaagaatcggcaagcacttcaaagcgactgcatagaacatcaagcatcccattcgacttgaacctcccaggcgacgatgaggaagcccatgatgatggtgatgatgacaagagcagtggcagccacgaaaactatctagagggatctgtcggaaacctcttgcgttgggtggatggttcaatcaatttcaagccatttgactttggcaagctttgtgaggacatcctgcaggagttcagcaatactaccagcaaaattctgggcaccagggggtgcaggctggagatcgacgctggggctatggagcaggtagtggcagcggcatgggcatccgattcgcatgagaatgagaagaggcctgtgcggacgtgggtggagcaggtgtttggcaggagccttgagcaggtcaagatgaggtgtgagaatctgagcagctgtaccctgagactggtttcctgtgaggtgaaagaagatggttttggagctttgcttccctcgagaataattctggattggtgatggtgatatgtgtcgtttgcattattgctgctagctatctagctgtaagtattggttagttagctgacaccaccccccgtactgtagcatatataggttcatatcattatttggtggcttcaaaataatgtaattaagctggagtatgtacgtacggtagtctagcaattaaactactcgttcaagtccatgacctggggatggatggctgtatttattgttgctcctgcgtg

SEQ ID NO: 278345 - DNA, 492 bp, Zea mays
cggacgcgtggggcttaaataaggcatcatctaaggcagatgagggctcctccattttatgctcactttccctatccatggtggcaacgaagcgtaatctttctggttcagatattgtagatgatgaaccactgtctctctctcttgggctccctagtgttgtcggtgggagagcagatcaggagatgaagcaattcctgccggagaagccaggcataaacacttaatgcccctttagatttgcgagtgtacagttttgtgcagctgtatggagtttagacagggtagaagtatggtatagctgttaaattatgaatatttttcatttttttctctctcactgttatatgcatctgctgccgttgttagtgataatggtgtgatgatgttactatctgccatatctatgagatatatggtgttagtttcttgagatattatgggtatgacataaaaggatagatcaaaatgtgaatgtttgtgaattcattt

SEQ ID NO: 278346 - DNA, 433 bp, Zea mays
gaacttaccaaatatgatgttgtgcttactacatattctatagtaagcatggaagtaccaaaacaatcaaatcctgatagtgatggagaagagaaagggaagcctgacccgtatggtgcacctgtgtcctcttcagggagcaaaaagagaaaggcatcctcttctaagaaaacaaaaaataaaagtgttgcagagagttgcttgcctgaaaaacctcttgcgaaagttgcttggtttagggttattcttgatgaagcacaaagcattaagaactaccgaactcaggttgccagggcttgctggggtttgcgagccaaaagaagatggtgtttgtctgggacacctatacagaatgctgttgaggatctctatagctacttcagatttctcagatacaatccttacgctgtatataagcagttttgcactctga

SEQ ID NO: 278347 - DNA, 586 bp, Zea mays
attcgatctcctcctttcacctccatcgcaacctctcgacggcagacgaggtttcatccccatctcagccggcggcagcctagggcttcatcccccacccccaaatccatgccgctcaggttggagatcaatgtgtgcctgctcgacctcactggatctcagtccccatgtcgtccttctacttctcgcgtcactttgattttgctctctagtttgattttgcttccattgtggtgattagtggaaattttctcaatggtcagagagggtcaagttggtggacttgcaccccacggaggcatggatgttgagcctgtactcgaggagtgcctgcatccgggattatcacacacagtcaatttgtaggagaggggacgccatacatcaaagatgactaaagaagaggaagatgaagaatacctccaagaggaagaagatgcccttgctggtgcaggggggaacacatttagtttcacaaccttcatgctcttaacccctctgatcctggggcgtggcagattagactccgatggggaagtcactagcgaggtggatcaagttcgtgctcttcaggaagaagtcgtca

SEQ ID NO: 278348 - DNA, 519 bp, Zea mays
cccacgcgtccggcatcatgtcagaaatgctgtcgagagtttggtttacttgatgttgcctctgagatgcctgtgcggaattttgaggtaattggttcatgggagacaagctcctcgtctcaagtttcttccatggtaaccttccaagtacaggatggtagggtgacatgtgataggtgcaagattgcgtctttgtcaataccattttgctccatgcttaatggaccgttcaatgagtcacagcttgagcttgttgatttgtcagagaatggtatttcgttggagggcatgagagctgtttctgagtttagttctacatgtagtttaggggatcttcctgtggaaatcttattggagatcctggtgtttgcaaacacattttgttgtgacaggctaaaagatgcttgtgataggaaactggcttcatttgtttcaacaaggcaggatgctgttgagctcatgccgttggcatttgaagaaaatgcgccagttcttgctgcttcttgcttgcaaattttt

SEQ ID NO: 278349 - DNA, 665 bp, Zea mays
  unsure (1)..(665): unsure at all n locations
cgcncaccgacgcgtaaagaagaccgcatgatgatcacaggtatgcatactgtttctgatatcttctgtgttggctgtggatccatagttgggtggaaatatgatgcggcacatgagaagggccagagatacaaggaaggcaagtttattctggagaggtacaaggtgtcgggccctgacggaagccaatactgggttccacaagatgctcacttgggcggaagcgacgccgatgacatataaaacacgatccaacaagctcaagcctgtcgttgatcccctgtaaataacctgggtggcgttgctctttaggcagccgacagccggggattgctccattgaaataattcgccggcgtaaattgttgctgttccaggtgacatgatcgtatccctccctccctcccgttgtccctggaagtcattagatgttaccgctgtatatgtgcgtaacctgtgttgcttataagtccatctgagttgtatgccaagccctagtgaccgaataagtaaagtaaatttctcaagtgtctggtcgacctgggtgtcaagcgagggcagtatgtacaaatctgcattgtattgtgtgttcggttccaacgtcactctccaatagccgaataactgcacccctctttttttaaaaaaaaaaaaaaaaatataaaa

SEQ ID NO: 278350 - DNA, 503 bp, Zea mays
agcatactttggtatctggtggtgttagaggaaccttaccgtggatggcaccagagcttctgagtgggaaaaacaatatggtgtcagagaagattgacgtctattcgtttggaattgtcatgtgggagctgcttactggggaagagccatactctggcatgcgtgctgctgaaattattggggccattgtaaacgattccctacgccctcaaatcccttcatggtgtgatcctgagtggaagggattgatggaaagctgttggtccagtgatccagccgagagaccgtccttcacggatatatctcaaaggttgaggaaaatggccgccgcaatgaatgtgaagtaaaggtccggaagccatatttgtcttgattttcttagtcccagctgtcatttgccttgtgtcgaaaataactatgctactggtgctggggttgcatttcaccataccattgtacaagaaggtggtgttagcgacttagtactacgatatgctcaattt

SEQ ID NO: 278351 - DNA, 489 bp, Zea mays
ccctcaaatcccttcatggtgtgatcctgagtggaagggattgatggaaagctgttggtccagtgatccagcggagagaccgtccttcactgatatatctcaaaggttgaggaaaatggccgctgcaatgaatgtgaagtgaaggttcggaagccatatttgtcttgattttccttagtcctggagtaacccggctgtcatttgccttgtgtcgaaaataagtatgctataaagcgttctgtcttgatgggaactgttgggctgtaattgtaaataagttttgacttgcttcatcttgctgtgcaaagtagtaattaataggcacgatcaaagctgggcacagttatcttttccccccatacaaaagtgtgtcctaggactaggaggacagatggatcgaacacgactagagctgtacatagtatactgttcgctctgtatataatcatcacttcctataaaaatgcaaaaaaaaaaaaaaaggacgaa

SEQ ID NO: 278352 - DNA, 446 bp, Zea mays
ggaaggggtggcaccattggtctttgccacgccttaccacgtgcagctgtgggccgtctctcgccagttgcagttgagcgtacaatgacgacaagagctgcagcttccaatgcattgcggcaacaaagatttgtccgtgaagtgactatacagtacaatctgtgcaatgagccatggttgaaatatagtataaacattgtggcagataagggattgaaaaagtctctttatacttctgctagactgaagaaaggagaagtcatatatttagaaacacacattaataggtatgagctttgcttcagtggagacaagccttgcattattggatcaagctccaatgcatctgaatcagaaacggagaaacaccagagcgggagtcaccattctcagaatggtgacagaggctgtgtggagcatgaactccgggatgtgttccggtggtc

SEQ ID NO: 278353 - DNA, 584 bp, Zea mays
gctcccgctcaagggcagccccggcacgctgctgcacgtgaccatccagcgggtggtgggtggcgccggtgggtacggagacgacgcgagtgagagcggcgacgctctcccagcggtggcgaagacgccacagaggaggacgacgctgcagagccagctgagccggtttgaggacgaggacggcgagaaggctagagcggccgcggatgcgatgagtcctgtgcaagatggattgttgataacaaaaccgccaggcatgaggtttccatcaagaagaaatgtgcctatgtctgctgccccagggggccatctccacaatggcagcagtttcgatgccgtctcagtgtcgggttcagatggaagttctgggcgatatacccccaaaattagcgcgaccacgcacaactcatttcttcaggatagtagcaatgctctctcgccatttgccaacaatcgcaccgtgaggaacccattgaccagttccggtgactggtcaggaagctcagctcctgatgctagtacagatgggtcaacgagcaattctggtgaggcagggttaagaggggaggatgacgacgtggaga

SEQ ID NO: 278354 - DNA, 692 bp, Zea mays
gcggagtgattctcttcgtgctcgtggctggttacctgccgttccacgacccgaatctcatcgagatgtacaggaagatctccagagctgaatacagatgccctcgctccttctccggtgagctgaaggacctgcttttcagaatgctcgatccagatcccagtaccaggatatccatttcaaggatcaagagaagcacttggtacagaaaacctatcgaggcaaacgcggcaaagatcaagcacggcacagcaagagacaccaccgtgcgcgacggtgaagtcgccacggcctctagctcgatagagtgcagtaaccgggcagaggaagaccaagggtcgtcgagcctccctaacctgaacgcattcgacatcatttctctctcgactgggtttgacctatctaacctgttcgaagaaagacacgggcggagggaggagaggttcaccaccaggcagccagtgggagcggtgtttggtaggctgaaggagctggctgagcggttgaagctgaaaatccagaagaaggagagcggggtcttgaaactggctgcgcagaaggaagggatgaaggggttcctggagcttgacgccgaggtcttcgagctcgccccttcgttccttctggtcgagctgaagaaaaccagccgtgacaccattgagtaccaaaggcttcgtgagggaagaaagtgc

SEQ ID NO: 278355 - DNA, 372 bp, Zea mays
ttttaccgtccccaagaaggacgttggctgacacgcactgtacttgatcacagtgggagagaatgttttgtcatccggatgaggcagagggatttggcggagaggtgctgaaactcccatggcggtggaatgggaggataggagcattgaggttcgagaaggatcatgggcatacattgctagtacaagctctggtggttatgctcctggtaacttcagtttgggcaataattggctttcttggagatcaccattattatgataatgggggctttttgttccccttatggtgcagaaaagatagttggcacaggaacagtgatgaaagatcaactggagaataaggtagtttggagcttatcaacaggagat

SEQ ID NO: 278356 - DNA, 539 bp, Zea mays
tcgcccattcgtccgcccacgcgtccgcgcgaatctatccatctatctaatctacttacgcacgaacatgcgtaacatcggcatgctgcgggcgctggtcctggcgctcgcggtggccgccgccgccgccgccgagaagaggaggacgtacatcgtccacatggccaagtcggcgatgccggccgagtacgcggaccacgccgagtggtacggcgcatcgctgcgctccgtgtccgcctcagcctccgccgccaagatgctctacgcgtacgacaccgtcctgcacggtttctccgcgcgcctcacgccgcaggaggccagcgacctggcgtccgccgagggggtgctcgccgtcaacccggaggcgcggtacgagctgcacaccacgcggacgcccgagttcctgggcatcgccggccagggactgtccccgcagtccggcacggcgggcgacgtcgtcgtcggcgtgctcgacacgggcgtctggcccgagagcaagagctacgacgacgccggcctcgtcgaggtgctcgcgtggt

SEQ ID NO: 278357 - DNA, 1211 bp, Zea mays
cccgccgagccgagcgcctgcgtgcgcagtcccctcctccctttcgcttcctccttcgagcggccccgcccagctgctgctgcgcgcgccgccgcggtagagacccgggaggagggcctggtggtgggcgggcccgatggagtgggcgtcggcggcgtacacggccgcggcgctggtgtgcgcggcggcggcgtgcgtggtagcgctcgcgcacatctaccgccacctcctccactacgccgagccaatctaccagcggttcatcgtccgcatcatattcatggtcccggtatatgctgtgatgtcattcctttcccttatcctccctaacaacgcgatatactttaattctattcgggagatttatgatgcttgggtcatctacaattttctctcactctgcttggcatgggtgggaggtcctggtgctgtggtggtaagtttgagtggccgaaccctgaaaccatcatggattctgatgacttgctgttatccagctattcctctagatgggcgttttatacgaagatgcaaacaaggttgcttgcagtttgtgattctcaagcctattttggttgtcatcaccttcatactttacgcaaaaggaaaatacaaagatggaaacttcagtgtcaaccaatcctatctctacataactatcatatatacaatctcatactcaatggctttatatgcccttgcgttgttctacgcggcttgcagagatctacttcggccatataatcctgtcccaaaattcatcatgatcaaatcagtggtgtttctcacatattggcagggcgtcctggttttccttgctgcaaaatctcgatttatcaagaatgctgataaggctgctgatcttcagaactttgtgttgtgtgttgagatgctaatagcagccattggccacttatttgccttcccctacaaggaatatgcaggtcccaatgcccgcccttcacgtggtttcagagaaagccttcttcatgctttgaaattcaatgatttctaccatgacactgttcaccagtttgctcctacatacaatgaatatgtgctctacaatcacaatgagggagacaatgcagaaacgaaatttccctcagggagcactgccacaagtgggcagggtgtggagttggctggcattaccgttgtggcttcaaacagtccagtgacaccaagtgtatcatgcaaccaggcagatc

SEQ ID NO: 278358 - DNA, 858 bp, Zea mays
ttacttgttacaaaacactctcaaagctagcagttcattaagtaaaggaacaaatcgcagccggaccacaacaggcagtctgttcagtagaatggtgcagagtgcccggacatcatcaggcttaggcatagctagtggatacagtggaatggtgggaaggcctgacactgcatcgatggtagaggcaaaatatccagcacttcggttcaagcaacacttgacagcatatgtcgagaagatatacgggataatcagagataacctgaagaaggaaataagtccgttcttgacaatgtgcatacaggctccaagagctaaccgtgtgaggccatcacggggatcactaaaaagcatacactctaatgcactagctaggcaagcatcaagtctgcattggcaaaacattgtcaagtgcctggatcatacactggaaacgatgaaagaaaactatgtagctccggtgataatcaggaaaacatttaaccaagtatttgcatacttgaatgtgcaactcttcaacagcttgctgcttcgtcgggaatgctgctcttttagcaatggggagttcttaaaggctggtttacaagacctggagcagtggtgctctaggacaactgaagagtatgtagggacgtcctgggatgaactgcaacacattaggcaggcagtccggttcctggttttgcatcagaaatcacacaaaatcctggaggaaattacgaatgagatttgccctgttttgagcataactcaaatataccgcatagcaacgatgttctgggacgacaagtacggtgcacaaggcgtatctcaagaggtcattggaaggatgagaacgatgacaacggacgactcagt

SEQ ID NO: 278359 - DNA, 886 bp, Zea mays
tagaattttgattacatgaggcgggagatacttcatagttatggctttgagcacatgcacttattatacaatctggagaaggctggccttcttaagaggcaggaatcaagaagcaattgggttggtattacaagagcactgcagcttatagttgacgtaaatgatacagcaaaccctactgatatatcctacatcttttctggatacgcacctcttagtattcgccttgttcagcatgcagtgagatctggatggcggtctattgaagaactgttgaaactattgccaggcccacatctggatttgaaaagaggtggtttgacaattaattcatcaccggaggtacatccaggtttaggggctcaacagagtattgacagggttggtcatcgctctctggttttggttgtattcattggtggtgtcacatttgctgagattgctgcccttcgcttccttagtgcacaggaaggaatgggctacgactttcttgttgcaacaacaaaggttgtcaatggaaacacaatactcagacccattatagcaaatagcaaagaggggatgatgtaattttattccttttctgtgcatgtgttttttgtaattgcaattgcagacaaacccaagcttgtgggttttcttgtttggctgtgagttcgtgtttggtcagcaactggacgataaggctaaccacgcttgttgatagatggaatccaacagtcccattttttgttctgttctgttctgtagtacatccgctaaactgtaaatcctgggtttcatgtgttcgtctgtctttttattcaataattgcttccttgaaggccgtttatgttgtgtgtggaccaatattgtgaaaaaagaaagaatgtatggaccctgttgc

SEQ ID NO: 278360 - DNA, 521 bp, Zea mays
cccacgcgtccggacctagccaaccttgtaaacattgcagcaataaaggctgcggttgaaggtgcggacaaattgaatgctgttcagttggagtttgccaaagatcgtattatcatgggaaccgagaggagatcaatgttcatatctgatgaatcgagaaagcttactgcctaccatgaaagtggacatgctattgttgcactcaacacccagggtgctcaccccatacacaaggcaactatccttcctcgtgggtctgcccttggaatggtcacacaactcccctcacaggatgagacctctattagcaagaaacaactccttgcacgtcttgatgtttgcatgggtgggagggttgctgaagagctgatctttggggaagacaatgttacaactggggcaagaaatgaccttcacactgcaacggagcttgcccagtacatggtatcgaactgtgggatgagtgatgctattcggtcctgtgcatgtgaaagaacgaccaagcatagagatgcaatcag

SEQ ID NO: 278361 - DNA, 840 bp, Zea mays
cggacgcgtgggaagcttcaacaagtcatgctttgattagtagccatgtaacagggctggctggtctcatgaaccgcagctcaaatgcaatcccttcaccaggaattagtaattttcaaagcgggaatattccttatgtggttactcagaatgctatgggagttagctcaagaccaccaggtgttctaaagactgagtgcactgaatcgctgactcatagttatggctatattggtggtagcaccagtgtggactctagcttgctctcttctcaggccaaaaatccacagtatggtttattgcagagtcaaaatgatgttagcagcagctggttgtcttcacaagattttgatagttttggaaattctcttgggcaaggccaccctggttccacttcgtctagcttccagagttccgcccttggcaagttgcctgaccaaggacgagggaggaatcatgggtttgtcgggaaaggcacttgcattccaagtcgctttgcggtggatgaggttggatctccaactaacaacttgagccacagcattggaaacagtggagacatagtgaaccccggcacatttggatttagtggacatatgtgaacctttcttgaatttgtaagtagcgttgatcagtgagccctggaaacaaatctagtggtttgatgaatggttgctagtaatttcgtttcctttttttttcttctgtaattggtttataaagggaataatctatgtggcagcatgtggaatcttcctttatagaagtttgttcagttcaacggccttcaaaaaaaaaaaaaaaaaacccaaaaaacaaaaaaaaaaaaaaaaaaaaaga

SEQ ID NO: 278362 - DNA, 2371 bp, Zea mays
tgttcgcgatcggatcgttactttcattggaatggttggactggctgtttttcttgcagttctgggtgtacttttggccaggtacttcactgggcatacttataatcctgacggatctgtgcaatatgtgaaagggaagatgggtgtaggccagacgatacgtggagtagttagaatattcacagtggctgtcactattgtggtcgtggctgttccagaaggactaccattagctgtcacactgacgcttgctttctcaatgcgcaaaatgatgaaggacaaggctctggtcaggaggctttctgcatgtgaaacgatgggttctgccacaacaatctgcagtgacaagactggcaccttaactttaaatcagatgactgttgttgaggcatattttggtggaaagaagatggactcaccagataatgcacaaatgttatctgctgatgtcacatcactgattgttgaagggattgcacagaacacttctggaagcatatttgagcccgagggtggtcaagaaccggaggcgactggatcacctacagaaaaggctatattgtcttgggggctaaagctgggtatgaaattcaatgaaacaagattgaagtcatctattcttcatgtatttcctttcaactcagagaaaaagcgaggtggggttgcagtgcacctggatggccctgaagtccatatacactggaaaggagcagctgaaatcattttggattcatgcacaagctggcttgacactgatggttcgaagcactcaatgactcctgaaaaaattgctcaattcaagaaattcattgaagatatggctgctgctagcctccgctgtgttgcctttgcctatataactcatgagatggatgatgttccaaacgaagatcagagggcagagtggaaactgcctgaagataacctcattatgcttggaattgtgggaataaaggatccctgccgtccaggagttcgagattctgttcgtttatgtcaggcagctggcattaaggtgcgcatggttactggtgataatcttcaaactgcgagagccattgccctggaatgcgggatacttgatgatcccaatgtgtcggagcctgtcatcattgaaggaaaagcattccgggcgctgtcagacttggaaagggaggatgctgctgaaaaaatctcagtgatggggaggtcttcaccaaatgataaacttttacttgttaaggcactgagggcaagaggtcacgttgttgctgttactggagatggcacaaatgatgccccagcactgcatgaggcagatattggtctatcaatgggcattcagggaactgaagttgccaaggagagttctgatattattatcttggatgacaatttcgcatcagtcgtgagggttgtcagatggggtcgttcggtgtatgcaaacatacagaagtttatacaattccaactaacggtcaacgtcgcagctctgataatcaatgtagttgctgccgtcagttctggaaacgtgccgttgaatgctgttcagttgctgtgggttaacctaattatggatactttgggtgcccttgcattggcgacagaaccacctacaaaccatcttatggagagacccccagtagggagaagggagccattggtaacaaatatcatgtggagaaacttgattatcatggctatgtttcaagtttcagtcctccttagtctcaacttcaagggaataagcctcctgcagttgaaaaatgatgatccagcacatgcagataaagtgaaaaataccttcatattcaacacatttgttctctgccaggtgttcaacgaattcaattcgcgtaaaccagatgagctgaatatattcaagggcatttcagggaaccatctgtttattggcatcatagctataacagttgtactccaggcgcttatagttgagttccttggcaagtttgcctcaacggtaaggctaagttggcagctgtggttggtatctataggtcttgctttcttcggctggccgctggcattcgtggggaagcttattcctgttcctaaacgtccattgggagaattctttgcatgctgctgtatctgcaaggggagcaaacaagcccctgatgacgcaacctctaatgataaggaagacaacaagcccgagccttgagatgtcagcaagattgatggaatggctggaaatgcaactcggcttctcttgagaccttgtcatttgctgtagttcgttcgcaactgtatattgtagcttggaagactctgtgccgtggtgcgtgtatttgagaaatttctatgcaaagtgagctggcgataacattggatggcgcaaaaaaaaaaaaaaaagggcggcaaaaacgat

SEQ ID NO: 278363 - DNA, 322 bp, Zea mays
attatcatggctttgtttcaagtttcagttctcctctcaacttcaagggaataagcctcctgcagtgaaaaatgatgatccagcacatgcagataaagtgaaaaataccttcatattcaacacatttgttttctgccaggttctgcgttttagcttttgcttagaaaagaagtttctgccttttgtctaatgcgactccagagctttatgcaacaaatgcagtagtggcctgacatgtgtaattttgtcttcttaggtgttcaacaattcaattcgtgtaaaccagatgagctgaatgtattcaagggcatttcagagaacc

SEQ ID NO: 278364 - DNA, 762 bp, Zea mays
agcagcccaccagctccggtttcttccgactgcgagcttccaagtggcgactgcccgagtgcgggagggggcagacaagcggttgtcggaatccactccggccaggaggagtgcggaggtcggaatggggggaggagcggatgaggcggtgaaggtcgtggattcggaggacggcgagggggaggaggaggaggcagaggccgccgcggcggagggatcgagcatggagatggggatgctgccaaggatgccggtgcgtgtgctgctcgccgaaggcgacgactccacgcgccacgtcatctccgcgctgctccgcaagtgcggctaccgagttgctgcagcctcagatggtgtgaaggcgtgggacctattaaaggaaaaatctttcaaggtagaccttgttttaactgaagttgaactgcctttgatgtctgggttcctcctgttatccacgatcatggaacatgatgcgtccaagaacatccccgttataatgatgtcttcgcatgactcagtaagcatggttttcaaatgcatgctaaagggtgcagcagatttccttgttaagccgagtagaaagaatgaattcaggaacctgcggcagcacgtttggtgaaaacaactggcaaacggtgggcctaatgttcagcacatacaacgagaagagaatcttgcagaaagaatccaacagaagactggtgtgacaaaagctgataatttggacagagatgtgccctgaaaaatagagaatgagtgaacaag

SEQ ID NO: 278365 - DNA, 727 bp, Zea mays
cccacgcgtccgctccctccctcccccgcgtcgcggcaagacgacctcgccgctccctgcctccgtctccccgccgcaggtgctggagatgcaggcgactgccgcctccttcctcgcccgcccactcccgcggcttcgccgcattggcagctggggagcggatgcggcggtggtgcgtgagggcgttatcgcgctccctctgcggctgcggccgccgcggcgctccattagcctctccatcggcgccggcgccggcgctggcgccgaagctgaccacgagttcagctacgagcatgttccggtgttccctagataccgaatacgagatccctacaagcttcttggtgttgatcgtgatgcatctgaagaagagatccgaggtgcgaggaatttccttattcaacagtatgctgggcatgaaccgagtgaagaagctattgaaggtgcttatgagaagataattatgaagagctaccagcagcggaagaagacaaaaattaacttgaaaaccaagttaaagaagagagtagaggaatccccttcatgggtcaaagcacttcttggttgctttgaggtgccatcgatggatattatctccagaagactgtttttctttgctctcatcgctggatggagcatagcaacttctgcagagaatggacctgcatttcagctcgcgatatcgctattctcatgcatatatttcctcaacgaaaagatgaagaac

SEQ ID NO: 278366 - DNA, 896 bp, Zea mays
agccggccataccggtgttcacgttcctcctggccgcaatcgtcggcgtcgaggtgatcaacatcttcacgaaacacggggtcgtcaaagtcctcggcacagccgtgtgcggcgctggcgccgtcctgatggtcttctaccgaggcccatctctgatcgggaccggaggcgcggccgatgcaactgccctgtcagtggttattgaccacagccatgcctataactatgctcctcagtggctggccgcggccatgctccggaacggcgtggaggcatggcatctcggcgtcgtctgcctcatcggaaactgcttcctgatgggcgcttacctcgtcatccaggtgacgccccggtgctgatcaaataccccgcgagcttatccctgaccgcctactcctactccttcgcaaccttgttcatggtggtcaccggcgcgttcgccaccagtgggctccacgagtgggcgctgacagcgaccgagatcttagccatcctgtacgctggaggtcgttgcgtcctgcctgaactacgcgatcatgacctgggcgaacaagatcctcgggccgtctctggtcgccctctacaacccactccaaccggcatgctctaccttgctctcgaccatgtttcttggaactccaatttacgttggaagtgtgattgggggactcttcatcatcgctggcctttacctggtcacttgggctcgctacaaagaggctcagagcgctctggtagccggttatctgcgacctcttcttctgccgaccaccaaggcagaaggaagctccttcagggggctccattgatccttttacaccccaggcagagaggcagatggatttttgcctcaagtgtttctctaggccagcggcgtcagcagatttagttttcat

SEQ ID NO: 278367 - DNA, 405 bp, Zea mays
cccacgcgtccgcggcctcaagcagaggaagctttccgcccgggaacgccatggggtcgcttcctctccttgctgcctgctgctccctcctgctcacggtcgcagctcctgcccgggacagcactaccagcgtctgcgcttcgcaaatcggcgatttcccgcaccggaacagttcgggcctccacctgacgctgcaccacccgcagagcccctgctcgccggcgccgctcccgtccgacctccccttctccacagtcctcacccacgacgatgcgcgcgtcgccacctcgcgtcgcgactcgccgccagtgatccgccgtcgcgccgtccgatatcactccgcaatcagaagaagggcgccggtggtgcttccggcggccaccacctcgacgaccactccctggc

SEQ ID NO: 278368 - DNA, 384 bp, Zea mays
cggacgcgtgggcggacgcgtgggtctagatcgctagcggccgccgcgatctagaaccgcgtttccgtcttctcctccgacgagttgccccaatccgcccagacctccaacatcgcaacggagcccaccctgcctgcctcgccgcgatccctccgcgctgctcgaggctcctgtcctgagccattcgggaacgccgacttccggggacgggatcatctaaagccgcctccttcccgttgaatccgccgagattcggcgtgaggcgaggttaccgacttcccttgcgcgtagggccggcaggagcgcccgctggccatggcgtgccggggcttctttgagtgcgtcctcaagctcctcaacctcgtcgtcatggcggttgggctg

SEQ ID NO: 278369 - DNA, 468 bp, Zea mays
aacaggcagcaagagctgcagatacccctaatttctcttctgaagtgccagaagggaaaggtaagaatgatgactttaagggaaaggacttggagataggtggccctagaaatttatatatggatcaccaatcttccccaaatgagagacccatcaaagcagcagatcatgaaaacaactccaaggagtcaatgatagaaaatttagaggagccaactgttcgagctgctgacctaattgggtcaatggccaaaaacatggatacccaacaggcagcaagagctgcagaagatacccctaatttctcttccaaagtgccagaagggaaaggtaagaatgaccagcatgataattatgttttgccatcacttgagctgagtttgaagaggtcgagatcatgtggagatggtgccaacgatacagtcaatgacgatgaacagcggaatagtgcattaaagcgatcgaatc

SEQ ID NO: 278370 - DNA, 362 bp, Zea mays
cggacgcgtgggaaatgatttgaagagccctaagaagcaagacctagagagaactgctggatctgttctttttgactgggagacagaaatatatgtagcaagggcacctggacgtttggacgtcatgggtggcattgctgattattcagggagtcttgttttgcagatgcctcttcgggaagcttgccatgttgctgttcagagaaaccatcccagcaagcagaagctttggaaacatacaaaagcaagacagcttgttaacggaggcttggtacctgtgatacaaattggatcatttggttctgatttgagtaaccgtgcaccaactttcgatatggacctgtcagattttatggatgatg

SEQ ID NO: 278371 - DNA, 404 bp, Zea mays
tgttgatgcaccaacaaaaggcaggctatttgctgaggccgttgtgggtcataagggttttactgaatcagcagcaggaaaggcaagcagcgagaatgaggaagggcaagctgtctcgttagaagatgatgtcgggataagtacagacgcagatgaagagcttccggtatctgaagatgatccagaagtgctactgaggaggcttcaagagcttgctgatgagaattattcgactgggaacaactgttttgttttccctgaagtagtgaaagctgattcgatgattgatctttacttaaaccgcagcatgtcggccttagctagtgagtccgacgtttttgtaaaaggagcattcaatggttggagatggaaccgtttcacttgaacaatgcatagaagcgaat

SEQ ID NO: 278372 - DNA, 642 bp, Zea mays
atccagattacattaagcacttgaagaagtttgtgtcaagcgttagcaaaaaagcatcagcgaaacctgacccaaaagaaacaacgtcaaaggacgacactaccagtaaagaaacagaggaagcgtacccggagaaacctcaagaggccaagaagtgccctcagatctcgcgaaagagcctggacagccgattcgggaaatccaaaacagtggatgttcctgataaaccacggatgagctcggacgacatcgacaagttccggaggagcagatgcttggtctggtgatgcctgtgttctgcacaaattgtcgaacagtacctgagcgaggatactatagcatggaagtcaagcaactgtattacatcatgctgcgaggaacggcatcagcggttcctgcagcggagaggaaaggactgttaaataagaaaaaaaagaatcaggaagctcccgtcagcatccatcaaagacccagctacttgactgaaaactggtagttccccagttaatttagcccttaccccgacaacatgttttgcagcatcggttagggtttccatattgtaaaagtggaccgttattgtctgtaatcccgaggggccgatacaaacatttgcagagtttgaaagccttaacgggatcc

SEQ ID NO: 278373 - DNA, 646 bp, Zea mays
cttccacgaggccaaggctactaacgcccccgaggtcgtcgtctggggatcaggctcgccgctgcgcgagttcctgcacgtcgatgacctcgccgacgccgtcatcttcctgatgggtcactactccggcatggagcatgtcaatgtggggagtgggagcgaggtgaccatcaaggagctcgccgaactagtcaaggaggtggtcggcttccaggggaacctggtgtgggactccagcaagccggacggcacacccaggaagctcatggatagctccaagatacaggggatggggtggaagcccaagatcgccctcaaggaaggcctcgtggaaacctacaaatggtacgtcgagaatgtcatctcgaacaagaagtagagccgtgacatgccagtggtgctgtcttgctctccgttgctgcttccacaaggtggttggatatctgatcatacggttatcagttttaagttaacccacatagaagaggcttgttatgttatgtgttgcctcacctgaataatctgtgggtcaagttagtctgttagtatactgctacaagcataattgatctggaacactttttgttgaatagaggaagtttaatgaccaagatgatgatggattgataaaaagaaataatattaa

SEQ ID NO: 278374 - DNA, 596 bp, Zea mays
cccgttttaccggtctctggtgatggaactgaagttgcaaatgctgagatgggatcaaatggcgccgctgatgtttatattgggaacgaggagaagaaacttgagcctgcagccactgaaaataaagctcaaggtatggaatctgagaagagcaatggagaagagaaactgccaactaagagtaccttttcttacactgatgaagtgaaggagaggttcaacaggattctcaagtactatattgggacacacaatttccataacttcactacaagaaccaaggcagaggatcctgcagcaaaaagatttatcatttcctttgctgctgaccgtgttgtcagcctggatgggattgattttgtcaggtgtgaagttgttggacagagtttcatgctccatcagatccggaagatgattggtcttgctgtagctgtgatgaggaactgtgcacctgaatcaatttatgatgtcgcctttcgcaaggatgtcaatcttaatgtgcctactgcacctgaggtcggactgtacctagatgaatgtatgttcacatcatacaacaagaaatgggaggattcacatgaggcagttttcatgga

SEQ ID NO: 278375 - DNA, 706 bp, Zea mays
gaacaaggaaaaaccgaacaacgctgatgtctccaccaacacaaagtctacaaataatgatgaaatggtagaaacctccaacacaaatgatgagaagcatagagaaacactagatctaaatagtgagcagagagcagaatcacccaaagcagatgtcaagatgagagcagagacacctgagaaagacaacgacctgccaggggtccaactagtcactgacgatttgaatgggcaccacgaacagatgcaagaaataaaattggattgataagcattaagcacaatgctcccagcccaaatatcttcgccaccacgtaagtaatatcagagtatttatgatctgatcacacggtgccagtttgtgacagcactgagggtggctaagttttgaaatgctactggtcccccctcctctcccctttccctttgtggttccccgaattctttttgccaccacatctaggttacatgtcgtttctctccattttttataattttgaggagaaaatgagcaagttatatggttgcccatccgttgctgcctcccaatgtaaatgcattggaagaactgtgagaaaaaagatgagaattgtgggcaattatgacacccttattcttgtaaattatcatatcatttagagtttatgcgtgctttcaattgaagaagaaaaaaaaaaagaaagaggaagaaggagaagggagaagg

SEQ ID NO: 278376 - DNA, 434 bp, Zea mays
ctccacttcgaacgccaagtggagagccgtcgccagtccggcacacctccgcgagaagtggatgcacggctgcgcgtcgctcgacgggaaggtcgttgtggtggcggaccgtggcggcttgtcctacgatccttcggcgccacctgcggaggcgtgggcaccggtgtcgccggtgcttgacatgggatggaagggccgagctgcagtggttgagggaatcctctactcttacgattacctgggacaggtcaaggggtatgatccggacactgattcttggagcacagtggaggggttggagagggagctacccaagttcttgtgcggcgccacgcttgccgatgttggaggattgctctacttggtttgggaaggaaagtggaaagggaaattgaaaggtaagatggacgttaggagcatggtaatgattgaat

SEQ ID NO: 278377 - DNA, 475 bp, Zea mays
  unsure (1)..(475): unsure at all n locations
cccacgcgtccgcacaaatccttggtgcggtcgataagtacatatgccagttctctgaggaatcaaacaatttttggggaagtaggcatgaactaatgctgggaaacactttcatttccaataaagagtcaaccccaccgcaaggggaggtgccccctcaggatttctctaggcgtgttttggaagggttccaagtcaccccaatatggcatcaaggtttcatacgtgatgatggaaggtcatactacgtgccatatgtccagacagctcgctgggagtacagcactcgtccagtttatgggtggggtgatgtcaaatctaagcagttgtccacagctggttggcttgcagcttttcctttctttgaacctcattggcaaatttgcatggctagtggcttgtccacaggatggatagaatgggatgtagaacggtttgaatttgaaaatgctccatcttactcagancagactgg

SEQ ID NO: 278378 - DNA, 428 bp, Zea mays
cccacgcgtccgccaaaagcagctcctttctcgggggtccggccacttccaggagttcttgcctgcgaagcttgctccgttctttcgcctgcttgccctcactcctctatcgccttggcctgcttattgcccagacagtttctgcttgaccccacgattcttcactgatgattcacagaaagcttggcgagcacgtacataacttgccgatcggacagttgatggacggcacgagcccaaaccgtacaagtccacaataatttctccctccggctccggctccgcctagactcactcgtccatgtcgcgcgccggccgctccctgcccctgcccgtggcggcgctcctgctcgcggtggtggcgctgtgcgcggcgcggcgcgcgcgcgcgatcggcgtgaactggggcacgcagctgagccacccgc

SEQ ID NO: 278379 - DNA, 359 bp, Zea mays
cggacgcgtgggctcatgttattgaatatagaaatttcaggtctattggttttacacagatttggttgtgatgcttcaaaccgcttatgatttttgttaaaaaagttgtgccatgagcatatcacataatatatgagaatcttaggaataaaccaaggtgcttatgagtgaaattttggctttgcttttttaaaaatatgggttcaagttggtcctgacagatgccactgcacaaatggacgttgacacgttgtagtgatcacactgtcacgagagctgagcaaactacagcctgcaagagctacacgtggcatgcttgacacatcatggtggagaatgcaagtgttaaagttgcattg

SEQ ID NO: 278380 - DNA, 674 bp, Zea mays
tacaccaccggccggcgcttcgcttaagccacaccccttttttcccgagctcgccgacgcggccacccgcgatcgggcatttggacccgtccccgctcgccgcccgcacggcggctcgttgcgggaaaagtttctcgaggccgtctgtgaccccgctccctcggccgcgagatcccgcccagccgcggtcgcagaatggcgcagagcaactgggaagcggataagatgctcgacgtgtatatctatgactacctgctgaagaggaacctgcagacgacggccaaggctttcatgaccgagggaaaggttgctgctgatccagttgcaattgatgctcctggagggtttctctttgagtggtggtctgtcttttgggatatattcatcgcaaggacaaatgaaaagcattctgaagttgcagcggcatatctagaggcacagcaaataaaagcaagagagcaccagcagcagatgcagatgcagcaattgcaacttatgcatcaaagacatgctcaacttcagcgaactaacgcgaatcatccttcacttaatggtccaataaatgctttaaattctgagggcattttggggccatcaacagctagtgtcttagctgccaagatgtatgaagagcgattgaagcacccacattcaatggagtctgagggatcaca

SEQ ID NO: 278381 - DNA, 925 bp, Zea mays
tgatcatccaatatcaagaaatccttgttgctcctatagaatctgatgaagagcttgctaagaagacaaaaagtttctttgctaatgcagcagaaacattcaatgctgcatttatgtatatatcatcattgacgttagcataaaatgcagcattgaatgctaacgtcaatgatgatatatacataaatgtcgatactttgagtgcaatgctcgaaactcactgggacaggcctcgtgtctatataggttgcatgaaatcgggcgaggttttctctgacttaacccacaagtggtacgaatcagactggtggaaatttggtgatgggaaatcgtactttcgacacgcttctggtgaaatgtttgtcctatccagggccatagctcagttcatttctataaacaagtccgctctccggacatatgcccatgatgatgttagtgttggatcgtggatgattggccctgccgtgaatcatgtaaatgaagcaaaactgtgctgttcatcgtggccctcaggtgcgttatgttcagcgctataacgagcaacaatgcttaatgaggaagagttttgcaaacactgtgcctgttggatcgaatcggtattgggaaaattttgttttcttctgccatcttgtgtagtcctttggaggaggcttgtacgagccagttcatactgattactggatcggatatcttgtttttcttttccaaaggaaaggtcttgcatattttctttgcaaggccactacactagaatcatgagttctgacgaaaagccctctgcagattgtatcctgttccgcgtgccatttgtagatgccccaccctttaccattcttttttctgacagacactgccattgttggagtgacagaaatcaatagcaattcgggagattactttgctccagaatacatttatgcgt

SEQ ID NO: 278382 - DNA, 555 bp, Zea mays
ggccgccctttttttttttttttttttttttttttttgccaaaaaacttctaattgcaaagacgctggacgggacagaaatttgccgggaaatcaaagcaaacactggccataaccgcagcatcgtcagccgccggacgggagcagcttaggaagaggaggccgacgccgtactgctagcacaagccaagaaatgggcgcgctctgcctgctctacccatccacgccgccgcgctgcccatgcggcgcccgcgcggacgcgaccgcggccttcgcgccttcccctttcctctcatcatgtgctgccaccggtgcacaaacaaggctgcagctctgcggcaggagccagaggcgcggcggcgtggcgcgggtaggtggcggcggcggtgggggcaagggggagagtggcaagaacggcgcggcggcgttctttgatgaagacggggtggtggacgacatggacgggtacctcaactacctgtccctcgagtacgactctgtctgggacaccaagcctgcctggtgtcagccttggacaatattgcttacgggaact

SEQ ID NO: 278383 - DNA, 530 bp, Zea mays
ccggaattccggtcgcccacgcctccgggaatcttcctctgggggaccggtcttggttttaaaaacctaccatcgccttggggtggatggggaacccccccctgataatttccgtgctggtggcgtgcaacatccttcccatgttcatccgtggcttctattggagggaccccaacaacagccttctgaaagtcattggtatcggggcgtgaagccatgaccttctacatgttcaggcccaaacttggacatgcacagcgctctcgcatgtttaagagcaataatctaggtgctcaggccaagttttgctatgcggttagaggaccatagcgcgctcaggtcatgcgccatggggctgcctatattctcagcactgccgagatgcctgttgccacttgcagatgcatggaatccattctcccagccaactttgtatatggtggagttgagcacatgtacatgatatcacacgagtaatatgttgtgattcagatgaaatatatactagtacatatcagtccatattctat

SEQ ID NO: 278384 - DNA, 517 bp, Zea mays
gcgcaatcgcacacaagcggaggacaaacaaacagcaagagagcggaacgccgaaaggcaaaggcaaaggcaacggcaacgcaagccagaggcagagcgcgccccgccacgatgaagaaggaggaggtggcctcgccggcggcggcgacggtggtcctgctgctcctgtcgtcgtcgttggcggccgtctccggccagccacagccgcagccgcagcccgggggcagcaagcagactgcggcgaacaacccgcggctgcagaaggcgtacgtggcgctgcaggctttgaagcgcgcggtgacggaggaccccaagaacctgacgcggagctggtgcgggccggacgtgtgcggctacttcggcgtgtactgcgcggcggcgccggacgagccgcgggcgcagacggtggccggggtggacctgaaccacggcgacctggcggggacgctccccgaggagctgggcctggtggcggacctagcgctggtgcaggtcgagtcgaagcggttcgcgggga

SEQ ID NO: 278385 - DNA, 533 bp, Zea mays
  unsure (1)..(533): unsure at all n locations
gcgcaagtatgcaatgctctaattttagcttaattcttggcaatgtgactgcacgacccaccactggtggctgcagtgtctcatcttgcaactatggtggctatgtcaatggaaccattgcaacatcgctatcctcaggtcttcaacccatgtgtccaggaccgcatcaatttcccccactcacggcggtgccaactgcggcaaaccatgggtcttattctccatcacctgcaccaggacctggagatgctggtggtgccaccccaggaggttccagcctttctccatcaaatgagcctgctgggaacagctcacaagcggctgcgataaatcaaccatgccgtttcctcctcattttcattctttctgtgacattgtccttgcgggtgtggattcctggggagaggattgctttttttaaaaaaataactatgtagagtatttgttggctgtatttgtattgagcgtggaaggccttattggggccaggtggaacctgaatgaagaatgcagtagcctgtcttcgttnagag

SEQ ID NO: 278386 - DNA, 432 bp, Zea mays
acgcgtcgcgtgggggcttccaacgtgttcgttcaacacgcacgagcacggctgcgtctcggaccacggcctggcgtcgctgatgaacccggtcacggcgaggcccacggtctcttgggtactgcgcgccggaggtcgctgacacgaggaaggcgtcccagtcctcggacgtctacagcttcggcgtcttcgtgctggagctcctcacggggaagtcgcccgtccagataaccggcggcggtggcggcgacgtggtccacctggtgagatgggtgcagtcggttgtgcgggaggagtggaccgccgaggtgttcgacggcgagcttctgcggtaccccaacatcgaggaggagatggtagagatgctgcagatcgccatggcgtgcgtgtccaggacccccgagcggcgtcccaagatggcggacgtggtga

SEQ ID NO: 278387 - DNA, 371 bp, Zea mays
cccacgcgtccgggccctcaggttcgttgggaaggacctttgcctgctcaccgggtgggcgtggcggcccgtccagacgccctccttgccgttgagagctgaaatcgttgttggttacccagccagtggtagatcttcttcgtactatactcctgcttgagtttcttgtgccacttcttttgcatctgtagctagctagctggctgctcgatttggtcgtcagttccgagatgggaaaacgaaaacatctcttctcgtcactaatcgctagatccattcacagtgatagttactgatgtaagcctactaattagtttaatggcagatcaaccttgtttagcctaattagttacttggtactactgttcttt

SEQ ID NO: 278388 - DNA, 428 bp, Zea mays
gggggacgggcagagcagagctgagctgatctgcctccaactccgacccacacccgcggcacggcagtcggcagcagccagcggcgagcgcagtgccctcttgcctgctgcctcctacctccccgcccagtctcactcacacgctcccacttccgagtctcgctcgcagcctgttctcctggggtccgatcggaggggggtgacgagatggagccagattcggcgacgacgaggctcgcattgctggcgctgcttctcctggcggcgcccgcccgcccggcctccgcggctccggcggaggatggcctgctcagcaatgctgactctgagaccgcaccagccgccggtttcgtaagatctgcgtctgttgctgagggtgcatacgatatccctggttggacaatcaatggcacagtcgagctcatttc

SEQ ID NO: 278389 - DNA, 517 bp, Zea mays
cccgaccccttgctccggcgtcaagggcctcaagaccccgccgcagttcccgcggacgccgcggccgtcgttcttgcagtcgccgtccacgctgttcgcgttccggaaggacgggcagcagaccagccgcgtggagcgcgagcgcgggtccttcctcccgtacctgcgcttctaccgccgaccctacgacgagatttcctaccgcgccatgatgcgcccgccgctcggcggcctgatacccatcgtcgagaagttcaagcacaagccggtgcagcagacgctgcgtcggcacgctgggctccaccagcatcagcagcaccaccattaccaacagcagcagaggatctgagtctcgtctctcggtcggtactgcatggcgacccgagaattttctccatatacagcataaaggcgatgctatattatgctaagttaatcttttgccaagtatgatattcttaaaggcatgtataataacatcccaaaaaaatgtgagtaaaatggactcctttctgcc

SEQ ID NO: 278390 - DNA, 618 bp, Zea mays
ctaaaatctccctcgtcgggcgtcgctggccgtactccgaaatcctccgttctccccccactccctccggcgccgctgcagtgccacccctccatcggtccatccccaatccgctatgcaactgctgctcctactgatactcgcttccttccccctccggccgcctgcggggcggccagcgcggcagactcgtcatcaggctgctggcccaagacatgcggggacctcaacgtcacctaccctttctgggtggaggagcccggccggcccccgtgcggaccaccgaccttccagctcaagtgcgacagtagcggcgcgttcctgatcagatccgtctaccaggccttccaggtgctcggcatcttccccgagaacaactccttccacgtggtggaccacaacctcccgctcgccaccggctgcccagcgccaacggtgaacctctcgctcttatttcccggggacattcgtatttagcagagccaacaaagagctgctcttccttgggaagtgcacggggtttcccgccggcggagtcggccgggtttcgcagcctgccttgcgacaacagctcctttgtccggctcggcgacggccggaatttctccagccaaagca

SEQ ID NO: 278391 - DNA, 392 bp, Zea mays
tctcctttcgtccgcccacgcgtccgcggacgcgtgggctgcgcccccctgcagaaatccatagattcttcgccacttcgattgtccgctgcatgaatccggctccgcgcgcccaattccctgcaaagccccagtctctggcgatgttcttcttggaagatttcttcattctttactggcgcccaattctgctgggaggggggttcttgggagggagatccaccatttcgcgtcggcctgagcagccggggagctgagctgcgcggcgcccatgtcggcctccgagctgtcccagggcacgcttgtgttcggcctccacctctgggagctcgtctgcatccgtgtcagcgccgcattcgtgctgctcctcgacctcctgtacctgctctgcc

SEQ ID NO: 278392 - DNA, 463 bp, Zea mays
cccacgcgttcgtccacgcgtccgcttgatattgtcaatgtatgaggatggcggtacatggatgggtttagtgctccgtttgcagctattatggctattggtatgtggactgtaccatcttcaccaagatggctacttctcagggcagttcaaggaaaggcttctttggaggataatagatagaatgcaattcaagcccttacaacattgaggggccgcacagcaagtgaaaaggctttggcagatgatgttgacgatacaattgtctctattaacgctgcctacgcaggacacgaagctgaaggaaacgtttgggaggtattcgaaggagctagcttgaaggccttcactattggcggaggtctggttctgcttcagcagataacaggtcaaccaagtgttctatattatgcagcttcaatacttcagactgctggattctcagctgcatcagatgctgcca

SEQ ID NO: 278393 - DNA, 537 bp, Zea mays
cccattttccccaaaacaaaacgactcgttctttcccgggggaggggaggactgtgagatgcctggccagccatggacccgcccaaccctaaccccaacgatgccccgtcgctcccagccgaatccgcggccagactcgccgccctctccctttgtggcaccagggaccttcccccggacttccacaccgccgagatcctcgacgacgacgagggctacctcacctccgcgtccagaggcgggagcagcacctccgcgtggaaggaggcgcccgagggactccacgacgatgacaaggatggggacgatgtctcccagcccagccccagaagcagcggatacgctggcgagcgcggaagcagccttgatgacgacgccgaccccgaccccgaccccgaccaggattgggcgcgcggcaagaagcatccccacgaggacgatgcttcctcttcgtggaggaagaggaaaaaacatttcttcattctgagcaattctggcaagccaatatattccaggtatggggatgagcacaagcta

SEQ ID NO: 278394 - DNA, 435 bp, Zea mays
cagcggttcacccagcgcgccgctctcgtgtgacaattgggcgtcccgcgtccgccgtcgccctgcccagcccttcgccggtcctttcccaggccttcgacgcgtccttcgccgtcgaagagtccccagcagtgtagcaccatgcccttttctcggcccgccgttggtttcttagttagactggttggggtccggccaagctgctgtcctccttcccgtgcatttgcagctgtcagagctcaaaagattcagcttcccaagaaaaaaaggcgattagatgaagtgtgcttagaaaggtttcaacaatacagtagaacatacatccagtcatggactcttcaaggcaaagtcatcgtggatggaagagttgtgaataaagctggaacacaagtatctgacaagtctgtcatcgaaatcaaggctgaaatcccaaaa

SEQ ID NO: 278395 - DNA, 358 bp, Zea mays
gacgcgacggccgcccttttttttttttttttttttttttttttaaaaagaaaggaattggcttagttttaaggaaaaccgagtctgaaatctacacaggatgcacaagcaacccagacaatggtagccccacacacaaagcccatacaaggtcattgttgtcgagctcaacacaaaagacgagcaactctgagccaaaatgagcaacacaaggtcaaatgaggaaaccaacaatgtctatacccaaaaaacggcacagaagtatgaagaccacggcgcggcgtcgttgccaagccccaagacaccccacgcgaggcagctccgattcttcaccaataagacttccaaacttgatact

SEQ ID NO: 278396 - DNA, 469 bp, Zea mays
cccacgcgttcgcccacgcgtccgcccacgcgtccgcagactggaaggcagaagcgcccgcacaggcacagcactactcgaagcaagaactatagcagctgctgctcctgtacaccaagcgtacgtgcaaatacaaatacaatggccaccaaaagcatcgcctcgctgctcgccgtggccctgctgctgctgctctcctccccggccgccgtcgtcgtcgtccgcgcgcagcagcagcagcggggcaacccgtgcccgacgaacgcggtggcggacctcaaggtgtgcgccgacgtgctggtcctgctcaagctcaagatcaacgtgccgcagagccagcggtgctgcccgctgctgggcagcctcgtcaacctcgacctggccgcctgcctgtgcgccaccatcaggctcaacgtgctcggcatccccgtcaacctgccgctcgacgtgcccctcgtgctcaactact

SEQ ID NO: 278397 - DNA, 525 bp, Zea mays
gtgttaagtaacacaagtcaagaactatcaagtagtagcaatgatggtgcagccattgagttttcggagtcaactggatctgtaaaaactgaacagactgagaagtctgatacggatttttttgaagctctaccccgcagtatagaaaatttttcagtttcagcatctactacagacacagggagtcttggaggtgatggaagtgagaagtccaagcctaacttagtgctaagtaatattgatttgagagagatgcctaataagaagctatctgcttctgcaccaccgtttaatccatctccaccatctgtacttagcccactttctcgcaatgttggtctcccgccaccaggtgccattccaggagtagcaccttggcctgtgaatgtatccctgcatcctgggcattcaactatggtgccaaggggtcctcctttgtgcacttcccctcatcatttatacccttctgcttcccgatctcctaatctcatgcatcctgtgccatttatttatccaccatatagt

SEQ ID NO: 278398 - DNA, 539 bp, Zea mays
cgtgctttacttccgcttccaatataccttttttctgcgacaaaaatcatttttgttaattgcgaaaaggaaagagcccgtgtgaaccggaggggtgaggtgatgagggggaaagggagagataaatcggagggcattagcaagaaaccatgagttctaggttcgcaatccctagtcgtcttgtcctgatcttacttgagtgctcgtgagctctttccagtggctaaagactgcagatttgagttctggcccaagaaccgcgtgctagcccgccatggaggtgaggtccgagcaagggctgatggcggggagggatctattcggtatgccaaagagcccgccggcgccggtttccgggccgccggcgtccgccgccatgcagagcgtgcgcatggcgtacacctcggacggcaccgccgtgttcgctccggtgagctcttcgcctgcgacgccgtcttaccagccgcagggcgcagcccacggcgctagcatgtccgcggcgacggtcgttggaggcaatggcgctccagctgcgccga

SEQ ID NO: 278399 - DNA, 477 bp, Zea mays
agagagcataggtgatcgttttgaagaaaagaaagctgcccgaggactaggcgcatcgctgcagaggctcgggaagtaccgagaagcaatgagacagtacagcaaggttctggagctgtccaaggagacaggtgaagattccggctgcaccgaggcctacggtgccatagcggactgctacaccgagctgggcgacctggagcgagcggcgaaggtgtatgacaagtacatatcgaggctgcagcccggcgagtaaggtagatttctttacagacgagacagcgagtgccttactttccgttcgttgagtcttgcgttttgtccgtcttgctaaactcgctgcacgtcttggatcgtttcgagaacgattccaatattcgtatatacacaactactgatttaatgccaccagctgcaggctccgacgagacatcatttgtgatctacggtgatatggggaaagctccgctggaccca

SEQ ID NO: 278400 - DNA, 562 bp, Zea mays
ctagccttgcattgtcctcctccgtctcgctctcgctctccgtctccattcccacccaccaccaaacaccaggcccaaaggaccaccccgccttcccaactaagagcaccagcgcacgcaggcagggggaatcagggcagcaagatccgagcagcaggagtggcaagcagcatttgtagccacagctcgctcgctcgctcactcaattgcagctagccgcggttgcggttggactggatcggcggcagggcagggcagggcgcgcggcggtggtgtggtggtagttgcagaagtgacggtcaagttttcctcgctccttgcttcggccgagcctccgcctgacgctactaccaacatctccacctgaatccatctctatctacctcgcacgaacgaacagagacaggggaggggaggaattgaagtgtaacccaaggaaaggaaccatgatggtgtggcaggcggaggaggaggattgatccatccgtctacccatcagacccatccatccatcggtggtggtggtggtggtggctgctgttactcgctatcaccatctgct

SEQ ID NO: 278401 - DNA, 649 bp, Zea mays
cttgctgagttgttgtggacaaaaagagctcgaaagcgggtagagaaaacggggggcaagccaaccacgctcgcagccagcctgcccgctacgcccgcccgccattacttgccgattcgagtcgacgtcacgcctccggcccccccttcggttgtcacctcgggggtcgcggattggtggaggggaggatttgagcggcgcggccatggatacaacatctagggccgccaagatcccgtcgctccaccagacggagcatcaactgggataacctcgacaagaccaagctctacgtggtgggcgcaggcatgttcagcggggtcaccgtggcgctgtaccctgtctcggtggtcaagacccggatgcaggttgcctctggggacgccatggggaggaacgcgctggctaccttcaagaacatccttaaggtggacggcgtgccagggctgtaccgggggtttcctactgttataattggggctgtaccaactaggattatcttcctcacggcgcttgagacaaccaaagcagcctctctcaagcttgttgagcccttcaagctgtcagagccggtgcaggccgcctttgccaatggccttgccggtctgtcggcatccacatgttcgcaggctatttttgtcccaattga

SEQ ID NO: 278402 - DNA, 652 bp, Zea mays
tgtgtacgtggcggtgcagcggcgcgagttcgacgcgcacatggaggcggtcggcagggtggagcaccggaacgtgctccccgtccgcgcctactacttctccaaggacgagaagctgctcgtctacgactacctccccaacggcagcctctccgccatgctccacgggagccggggctcgggccggacgccgctggactgggaggcgcgcatgcgggcggcgctgtccgccgcgcgcgggctggcgcacctgcacacggcgcacaacctggtgcacggcaacgtgaaggcgtcgaacgtgctgctccgcccggacgcggacgcggcggcgctctccgacttcgggctgcaccagctgttcgcggcggcgaccgcggcgcgggccggcgggtaccgcgccccggaggcggtggacgcgcggcggctgacgtacagggcggacgtgtactccctgggcgtgctgctgctggagctcctgacgggcaagtccccctcgcacgcgtcgctggagggcgacggcacgctggacctgccccgctgggtgcagtccgtggtgcgggaggggtggaccgccgaggtgttcgacgtcgaactggtgggcgggggcgcggaggcggaggaggagatggtggcgctgctgcatgtggccatg

SEQ ID NO: 278403 - DNA, 412 bp, Zea mays
ctttgggctgatttatgtgcttgcttattgtcgtactggctctgattttcgacctctgctgttatccgtcctcccgacccgaccgtgccgggcctgcctggcgttttctttgcttcggactcgccgtgtgagagtgtggtagtgtgtgagacctgtttttcctctcctcttcaggaagtaggaagtaagttgattgtctgtcgagtgttgttgttgacggttgctgtggcgttgacgaagtctcggagggcggagatttgtggtaaggttgttgttgtggcgtttgatgatttttcgtgtgcttcggcgatggcgattgcgtctgggagtgttggtttgccgtgtcctactgcttctgagggtgatatggctgttgtgtctacttgtggtgtgtcgtgtcgtcatgtttgtg

SEQ ID NO: 278404 - DNA, 1308 bp, Zea mays
tcttcttttttcatttttgtcttatgaagaaatttatgctctcacctctcaatttctgtagatataagcgccttctttgctcagttgacctttcgaaggatttcttcttcagctactcttacaacatcatgcgcagccttcagaagaacataacccagaagaatactgggcaggctgtttatgaaccaatgtgtgtatggaatgaatttctgacacgagcaattcggaatcatctcaagaatacatgttggactgttgccttagtccatggattttttaaacagtcgaagctctccgtatctgggaaggatttttggttgacccttatagctaggcgctcacgacactttgcgggaaccagattcttgaaacgtggcgttaatgaaaagggcagggtagcgaatgatgttgagactgagcagattgtttttgaagacacatctgatggaatcccaactcagatggcttctgctgtacagcatagaggatcgatacctcttgtctggtttcaggaaacttcaagacttaatattagaccagatattatattgaaacctgatgtggactacaaggcgactcgccttcattttgagaaccttgcacttagatatgggaatccagtaatcatcttgaacttaataaagacccgtgagaagaagccccgtgaatctctgcttcgtgcagaatttgcaaaggctatccattacattaacaagagcctgcctgatgacaagcgtctaaaatttttacacatggatctgagtaagctttctcgaaggaaaggcaccaatgtgcttgcactgttgaccaaggtggcatcagatgtgttggatctaactgaattcctccactgtgaaataagtacatcaacaaaacctgatgacacctcaagtggagaaagaactgctgccaaaccacatgatgacagaagtagcagtgatcaaactgaatgtgcagctaagttggcacctcttttattacagaagggtgtcctcaggacaaattgcatacactgcttagatcgcacaaatgttgcacaatttgcatatgggttagctgctttagggcgtcaacttcatgcatcggggcttactgaagcacagaaaattgaatcgcaccatcctctggctgatgatctgatggacttctatgaatggatgggtgatacattacctattcagtatggtggttctgctgctcacaacaagatcttctgcgagcaaaggggtcaatggaaggcagcaacccaatctcaggagttccttcggaccattcaacgctactataataacgcctacactgatcacg

SEQ ID NO: 278405 - DNA, 445 bp, Zea mays
gaaattttatcttattggaagagacaagagcaggattcactggagggtgctaaaaattgatcgggtggagtccactgagctgggtgtcgatgaggatccaactatttacacggaaagtgaatgtcaagaactgctttggcggatccatgaggggaacaggttgactggtggactgaaatttgtcacaaaatcttacggaatagttggttttgcaacgtttcttggcccttgttacatggttataataaccagtagaaggaaaatcggcacaatatgcggccatgaaatttattccgtcggcaagagtgaaatgattgcaatttcaagtgttacagtctggcccaacgtggcttattctatggacgagaacagatataagcgccttctttgctcagttgacctttcgaaggatttcttcttcagctactcttacaacatcatgcgc

SEQ ID NO: 278406 - DNA, 376 bp, Zea mays
aaaccttttctaaggaattagaatcagatctaacagaggccctgttcgtccaaacaagcagaaaggcaaaacacaagttcatgactgagtcgatttcaaacaccactgcaacaaatgaacatcttagacacttggctatggaccgtagtctacaagagatgaatgcatgaatgtcatatcaaatcaactaaaagatattgaatcccttgaagctgaaagtgatgcaaatggagataagagcctagagacggctcttatgtggtatgataagtttcttggttttcaagttgttggaggagaaggggtgaaatttgtgttcaacaaaattgatgtgcaaaatcctgacaagaagtattctttttgcataacacttgcc

SEQ ID NO: 278407 - DNA, 740 bp, Zea mays
caaatttggcggctatactgggcaagtcatcagcgtttctttaggcatatgtgtatgtctgcaaaggtacctgctgtcgtgagattggcaaaagaagccttagcagaagaaaaatgtgtggtgattggtcttcagagcactggagaagctcgaacagaggaagctgttgctaaatatggcattgaattggaagatttcgtttctggtcctagagagcttcttcttaagctggtagaagataattatcctttgcctccaaagcctgattgttttgagcaaggtgaagaaaaagtccaggagtttcagcacaagcggctttatggatctgacatgtccttaaaaggacgagttagtgaacttggaaaaaaggaagacgtgagtgaagatgggggtgatgagtatcctccaccagattcagatcatgaatcaacagaatctgatgaggacttctatatgtgtcagatttgcaacactgaagaggagaaaaactcaattgttttgtgcctgtatttgtgcttcacgggttcaccctggttgcctcactccaccttcgactgacatcgtgaatgatgattggtcatgttatggttgcaaggagaaagttaaaagctacttaaaagaaagagatgcttacttgactgaactctcaaagaggtatgatgctgcattggacagaaagtcaaaaattcttgacataatcccgtccttggatttacctagtaatcctttagatgatatca

SEQ ID NO: 278408 - DNA, 619 bp, Zea mays
  unsure (1)..(619): unsure at all n locations
cccacgcgtccgcggacgcgtggggaaaattacccaggccaacctgctgcagccgcagagttggctggagaagacacaggatttaacatttaccatcaggatacaagtgaactaaacagcagtcagatgcatacaggtgcaggcattaccgaagatatcaatgaagattcccagcgttttgagttacgggaggacaatcaggtggattcaacaccgaaagactatttgttcaatggtggtggtttttgtatggagggcgagggcgagggcgatgaacaagaaccagcgtgtgatcaatctggtgcagaagtagaacctggaccaagtggtccatgtggcgccatggatgaagtttcagagagtgcaagcatatcgacggctatggagtgtaccgagaatgcaagaatggaggcacgtggtgcatcttcgtcgcagcagagacgcaaggcaagccgaggtttgagtgccatgccgacgcttatcaagcgtaggagaaaatcgtgacttatttgcagtttcactgcatgtatagcacgccattacggcctctgtttggttcaagcgcttatgattcgcatcagtctttggccaccagtgacgagcgctgtttcacggncgc

SEQ ID NO: 278409 - DNA, 466 bp, Zea mays
cccacttttccgccgccgcccgcccgggtcgcatgggatcgcctggtcggccgggggctcggggcaggcgagcgacactagctataaaagacctcccgccgcctgcgactgggccgtgtgcaagcaaattaaagcgcaaggccgatccgagggtggactgtggagggccggccatggtgatgatgatgcggtcgtgcctcggcggtggcctgctgccggtggcggtcatgctctgcctcaacgtggtggcggcggtcatggtatcgctcgtcaaggtggccatggacggcggcatgaaaccgctcgtgatcgtcaccctgcagcagctcaccgccgccgtcttcctcgcgccaatcgcattcttcaaggagaggaagtcgaggccaaagctgacgctggagatcttcgcctacatcttcgtcagtgcggcgctcggggcagctcttcgtcagtacatgatcttcgt

SEQ ID NO: 278410 - DNA, 487 bp, Zea mays
cccacgcgtccggttctagatcgcgacggtcgcccttttttttttttttttttttggtggtttttttttttttttttccggcatcttttaagactttagataacagcttcacacatttttctaatcctcttaagaactggaagtcaaaaaaagaaaagaatggtactgctgatggacagaatttgtgcagacctatttcctgcagcatttacatattacaaagattacaaaaatcaccatacatcaagttacgctcaaaaaacaatgcatgacacagctaagaaaaaacaaatagagactactaacatctactggatgtcaagctgccaatgaggtactgtgccggcaggaagaacaattgaacagatggtgcgctgaatccaacctaatgctggacagaatatcctttacagccaagccgccaaccaagacgctgagtctaatgccatgtcctggtggatccaactatccaaaccggacgcgtggg

SEQ ID NO: 278411 - DNA, 611 bp, Zea mays
gcaatatggggacgtacagacattcgacatatcctgcaagagccatggaattgttacagggtcttactatgacattagagctgcacaggacgcagtgagagcagtccataacaaacctctggggctgatgaaacttgatgttcaattttcccttcctaaggaaaatgttccaaacaaagatcccaacaatggaacactggtggtatctcttattgactcttccatctccagccatgatcttctccaaaaatttagtgtttatggcgatgtcaaggagatttacaagtctcctacaagctgcaataagaaatttgtagaattctatgatatcagagcagcacaagaagcactgaatgacctcaacaagggtgaaatatcatgctcacaaatcaaagttgagcatagcttttctggaggagcaggatcttgcttcgcagagcaatattcaggagaacagaagcaaaatgccgtagctcaccaacttaagaactctccacctgggaccattggtcaaacagggaagttagatactaagagttgggacagcagcactgttcataatttatattctccagttagaccgcaacacgataaatcacaacatggcttct

SEQ ID NO: 278412 - DNA, 657 bp, Zea mays
attcttttacgacgagacggacatgtatatgggtcgggttttaatcacaaatgcggtgccttacacaccggttgacacgatcttactggccaaagcaccaatcctttccccggaactccgtttgaggcaccttttggttcccccaaagacaccagacaggcctcccatagtcgggattctcacaaggcatgatttcatgcctgagcacattcacagtctgctcccaaacctcaatcctcacaagtaccattcagcatcaatggcaggttgacaaggagactctttctgcttctcatctatttggcattattcgggtgctggctgtatgtaaattgcgaaggtgtatgtgtatctggttttcaattggatccatctcatcttctctacatagttttgtttgtgtggattttgtagcatatgctctttttgcagtaaaaaaaatgtggcagttgtttggctggtgactgcctattatgagcctgcggcaataaatgttcagcaaattgcggagtaaacattgagagctccagaacatggagagaaagtgtgtattgtatatttgcgttgttcctgtaaagcatgtttagtcaaactcgaatattgtctataacaccgagtaaatctcaggcggaaacatgggcgagctttctaagtacc

SEQ ID NO: 278413 - DNA, 863 bp, Zea mays
tttcctttttgctgccccacatcgaccttctactgctcacaggcgccctatatccaaagagtcggcaccaaagcatttcaatgttgctagcccacatagaccttctactgttgaaaggcacactagtggcagagatatgacatcgaagtatgttggtattgctacctcatatctgccatctgctgtcaaacagcgccctatcactggagagggtgcacataagcatgctgatgttgtcaccctgagctgttctactgctgataggcgccccattagagacgttgcaccaaagcatgccactttagctctgccaaggaggccgtctactgccgagaggcaccccattgctagagatattgccccaaagaatggtttatcactcagaccttctactgcagagaggcgaaccattgctagaaatgttgaaccaaagcatgcaccggcacagaggccttctactgctgagagacgtcctgttaccagagagactgtactgaagcaagctaatgttgccaactcatgtttacctttgacgccagatagacgcctcaccaaaaaaggtgacatttccacccttgagtgcccttctacaggaggaaggtgccctatcaccagtggtactgcactctggtcaagaacaatgccgtactattcaaagggtgctttggtcacagaagttactccccagaagacaataactcccaaggttgttagaaacagcaagctagaaaacctaagctatgcaaaagaaagggtggaacttcaagtggatagaaagcaaaagtcaagtctttttaacctgtcctcgaagaaaacattgacttccaacgttagagatgaccaaggtcttgaaatgttcaaaa

SEQ ID NO: 278414 - DNA, 887 bp, Zea mays
atgtctcaaaaggatctcttagaattgccaacaacagttcaagacagtcaaaaatgactatgagttgtcactaaacgagaatgctattgttgaagaagcagagggggagactttccttccaccagtgcaatacaaccttgtcaagattgatcagctaggaccatacgtcggtggcagggagcttgtagatattgttggtgtggttcagagcgtatctcccacactcagtgttaggagaaagattgacaacgagacaataccgaagcgtgacattgttgtagcagatgactctggcaaaactgttactatttctctctggaatgatcttgctactacgactggccaagagcttttggacatggttgacagtttgcccattgttgcgataaagagcctaaaagtatctgacttccaaggaacgatagctctctgcccagccaccagttttgagtgtgggttgagagcaaaaattcacatgctttccgaatgcaaatattgttctcataatttctcccagcagcaactaagccatttatcgcatggagggtcccatagataaaacatattccccaagtgccataccttgcaggtaatttctgatttagttacaattagacagagggaaaaaaccgataacctgtacaaattagaatatgttttcatacaaaccaggatccatccttgttttgattactctcaataaatatggcagctttgtcaacattttcttttatttctttactgcggtactttgaattgaagtcaccaaataataccaaagcctgcaacactgaggatgtacattcaaccgttctgccaatatatgaattgagtgacttaattagtttgcaaggcaaattgacatggcaacatgaaattcagattta

SEQ ID NO: 278415 - DNA, 883 bp, Zea mays
attgttgtagcagatgactctggcaaaactgttactatttctctctggaatgatcttgcgactacgactggccaagagcttttggacatggttgacagttcgcctgttgttgcgataaagagcctaaaagtatctgacttccaaggcgtgtctctttcaactattggcagaagtactctcgagattaatcctgacctgcctgaggctaagaatctgaagtcctggtatgactctgaaggcaaagatacttcactggcaccaatcagtgcagaagcgggtgccacacgcgctggtggtttcaagtccatgtattctgatagagtttttctgtctcacatcaccagtgatcctgctatgggccaggaaaagcctgttttcttcagtctgtatgccatcataagccacatcaagcctgatcagaatatgtggtaccgtgcttgcacgacctgtaacaagaaggtgactgaagcttttgggtctggatactggtgcgaggggtgccaaaagaattactctgagtgctcgctgagatacatcatggtgatcaagctctccgatcccactggcgaggcttgggtgtctgtgttcaacgagcatgcagagaagatcattggctgcagcgccgacgagcttgatcggatcaggaaagaggagggggacgacagctacgttctcaagctcaaggaagccacctgggttcctcacctgttccgtgtcagcgtcacgcagcatgaatacatgaacgagaagaggcagagaatcaccgtgaggggtgaagcaccggtcgacttcgcagctgagtccaagtacttgcttgaagagatcgcgaagctcaccgcttgctagaagacgcagtctttctggtggttcttgaaggactggc

SEQ ID NO: 278416 - DNA, 778 bp, Zea mays
cccacgcgtccggaaagaattgtcactaactattcatttatggagaccctaagaggcttagatcagaggggactgctagcaagatttgcgattgatgaagcacattgtgtaagtctatggggacacgatgtccgtccagattaccgtggtctaggttgcctcaagcagaacttccctacggtgcccgatcatggctttaaccgcgacagcaaccgaatctggccgtaaggacgtcctcggtgccttgaggatccccaacgctgtggtactgaagaggagcttcgacagactgaacctcaactacgaggtaatcggcaagacgaaaactttccagaagcagctgggcgatctcctgaaagagcgcttcatgaacgaatctggtatcgtgtactgtctctcgaagaacgagtgtgcagacactgccaagtttttgagggagaaatacaagatcaaatgcgcgcactaccacgctagcctggcagctcgtcagcgaaccagtgtccaggagaaatggcacagcggggaggttaaggtcatctgcgctaccatagccttcggcatggggatcgacaaacctgacgtgcgttttgttatccacaacacattgtccaagtcaatagaaagctactaccaggagtccgggagggcagggcgagatgagcttccggcacactgctatcgtcttgtaccagaagaaagacttcagccgtatcgtgtgcatgttgaggaacggtgagaacttcaggagcgagagcttcaggggttgcgatggagcaag

SEQ ID NO: 278417 - DNA, 1008 bp, Zea mays
ccgtcttcgtgaagccccgcgagatccacaacctcttctcccaccgccccgccttcgatcactgcctcctcgagtacaccggccgtggcaaccaggcggttgcttttgtgacgttcttcacccatgaggcggccctgtcggcaatgagttccctaaatggaacaatttttgatccggagagtggcgaccgtttgcacattgagctagctaaatcaacttcacgcagacctcgtggaggtgtcgaaggctaccgagttattgacaaacgggctaacaaaacagaaggaaatgctgaccatgagaacgttggtgatgaagatgatgacgaagtatggggggaagatgaggatggaggcaatgacaataatggtgatggaggatcagatgagccatcgggcacagaaaatgaaaatcccagtgataagaatgaattgcctacggataagagtgatcaaccagggcacaagcagcagaatgggcaatctctctcaaatgaaggacgagacaaatcttcaagtgatataccaccttgctctactatcttcattgcaaatttgggacatacatgcacagaggacgaactcaaggaagttttatccaaggaacctggatttcatgtccttaaaatgcgtcgccgtggtggaatgcctgtagcttttgctgattttacggatattgaatcgtctaccgctgctatgaatagactccaaggcactgtactggcatcttctgataacgatggattgcacattgagtacgcaaggtcgaagatgaggaaaagctaagttgttggactgcaaggattggcagtggcatctcctgtctgtcttcctggaggctaccagtaggcatccctgcacacgtagctgcgtgtagctgcttgcttagtcgttttatccatgtaagcgtgagaatccagaacggtgctaattgtcctgtatgccattatacaatactccctcttttaaatcatgagatactctcttcgttgcaaattcaccaaacaaa

SEQ ID NO: 278418 - DNA, 237 bp, Zea mays
gatgcgttgcacattgagtacgcaaggtcgaagatgaggaaaagctaagttgttggactgcaaggattggcagtgtcatctcctgtctgtcttcctggaggctaccagtaggcatccctgcacacgtagctgcgtgtagctgcttgctaagcgtgagaatccagaacggtgctaattgtcctgtatgccattatacaatactccctcttttaaatcatgagatactctcttcgtttc

SEQ ID NO: 278419 - DNA, 500 bp, Zea mays
tccacttcccttccacaacggaataacaatttggatacactactatgttcatgcaagtcgagaggccatacatggtatttacaggacttgaagactataaagcacgaggcacacaagcaagtccttactacacagtcactcattacacagagtttgctgagaccaaggacactgtgcttattcgaggagatgttgtttttaccagcaaactaaccgattcagaggcaaagactcttctagagactgctcactcgttctacctgaatgatgtgagatacagactcgtggagcgcttcaacaaagagactcatgattttgagttcggggacgtccttaaagtgcttgacatgccaaccatgtgacccagtttaattcccaaccaatagcaaatattcctagagaacattgattttctgtcacctcaaatcctcaatttagcacgggagattgctttcttgcatcatcagaggcagtaagatggagccactggatatcgtcct

SEQ ID NO: 278420 - DNA, 698 bp, Zea mays
tgactgatggcgatccaacagggttttgtttacatactctatcaattcttgtgaatgatgtccgtggagttctcaatcttggaacaggtgtattctccagaaggggctacaatattcagagtcttgctgttggcccagctgaaaaagaaggaacttctcgcatcactactgttgttcctggaactgatgaatccattgccaagctagtacatcaactgtacaagctcattgatgtttatgaagttcaggattttacccacttaccatttgctgctagagagttaatgatcataaaggtcgcggcaaatgctacagctcgaagggatgtcttagatattgctcagatttttgaggcacagaaagttgacatatcagaccacacaattacactaccgctcaccggagacattgacagaatggttagattgcaaaagatgctcgcagcagtatggcatctgtgaggttgcacggacaggccggattgctctgctccgagagtctggagttgactccaagtacctccgcgggttttccctcccgctgtaattctccatttccagacattacactgcgcgatttcaggtcgccacggtcattttgacttctgagaatggagctggaggaatcctcaaaaatccaagggtgagaactgtagaaataatagctgttaagtttcttgcttctgcaagtatcacgca

SEQ ID NO: 278421 - DNA, 257 bp, Zea mays
cgatccacatagccattggcagttcagttctccgatcctctaccgcagcagcgtaggctaagtaggaggcaaggatcaatggcgccgccgcggatctccttcctggagctctgcctctccttcctctgcttcgtggtcttctactacttgcacatcagatccaagcggaagaaccctttcgtgccgctggactggccgctggtgggcatgctcccgggccttcttgggaacctttcaccaccttcacgactgggatc

SEQ ID NO: 278422 - DNA, 418 bp, Zea mays
gatttatgtatcttagtttgtaaagttgccatgtcgctaatattcgacagctgtttttgttacagcatataaaatggacttgatgcatcactctttttagaaaggtaaaacctgagctcaccaaacactttctagctctgccttgagggaagaatagcaccattgaaaggacaatgcaaaccccaaacaaaaagggcgaagcgcagcaaaggggccggaaaagaagtcctcaacgattttctgttaattgaatgatatggcatcctagagtttgttgagaaacataggtgccattatatttgtctgaagtcccaaagctctcaatctattatgccgacaaggctagctgcatatgcgtcattagccacttacacttcaattattcgtgactaagaattcaggaatctttttcttgatt

SEQ ID NO: 278423 - DNA, 734 bp, Zea mays
cagcgacctgcttgaaggggatgcggcggcggcggcggcggcgcgccggagcttggttcagtggagcggcgccttcacggagttgtcccagagatcgagaagcaagagcaagatcttggaggctgatggcaagggaagtcggcgcggccatgcccggtggctttcggcagatatgacgagcaacggcagcggaatggaggttggtaaattctcccaagacgatgtttcaagatgtcctgagaaaacagtgaacctacaggatctgcagaacagcttgattgcatctagaggagcttgtaaaagtgcttgcccacatatggggacctggagaactgaatccgtctagtgtatcactcatttctgctctacgttcagagcttgatgttgcccgttctcatgttagaaagctaatcaaagaaaagaagtctaatccctatgaaattgaggacttaaagaagcaacttgcagaagaaatggaatcgtggaaggtcaaacaaaaggagaaggttgcaaacgctctccaatttataggttcagagctagacactgagaagaagtcaaggaaaagagcagagaagacaaataagaagttgagtgttgccttagccaacactgaagcctcactgcaggcagtgacgacagaacttgaaagagagaggaaatctaaaggaagagttgacaagatctgcaacgagctcatcagaggcattgacgaggacaaagctgaggtggag

SEQ ID NO: 278424 - DNA, 479 bp, Zea mays
gcagcagcaggtagcagccaccagtccactttcaccccactccggcagtgcgccgcgcagggagctgctgcctgctgtctgactgtcccccctcccgcccccacgcccacgcctcatcaagcgaggcaatggcgtcgcggctcctgccgttggtcgcggcgctgctcctcctcctcctcctgacggcggcgtcgtccgaggcgacgctgcacccggtggactacctggcgctgcaggcggtgcggcgggcgctgtcggacctgccgggctcccgcttcttcgcgtcgtgggacttcacgggcgacccctgctcgctcgcgggcgtgtcgtgcacggccgaccgcgcccgcctggagacgctgtgcgctgggggacccgcgcgcgggcgcgccgggcctcgggggcgcgttcccgtccgcgggcgtcggcaggcttgccgcgcttacgtcgctgtccctcgtgccggggcgcgtcacggg

SEQ ID NO: 278425 - DNA, 603 bp, Zea mays
ttcggcttttgctcagagcaaacactcacgcacgaggagtggcgggtggcgtctcacagcgaccagccatgcacccggcacggcgcgtgctcagcatgcagtaggggcccataggacggtgcacctgatgataggaacatcgtgcactgaaagacgaggaatgtcttcgctaaggatgacagttgatgcttgctaccccaccaacataaaggaagagacagatccagagctcttttgcaggtatataccactcagtcgacttcacatagtgctcgatgatgagggctatacacctgggggctctttcccacctgtgtcataatgcagagaaatggaaggtacaccttctagctctgtatatcactgggaaatcggggccgttgatgctgctgcacacataccatatctggatactcgtagggtctcaaatgatgaagttaaactttttgaatacaagcttctgggggaagtaaggatgctgggtgcgctaaggaagcacagatccatagtggacatatatggacaccaactttcatctaaatggggtcaagtcgacggggataaagaatataggatattgcgagctataatcttaatggaata

SEQ ID NO: 278426 - DNA, 664 bp, Zea mays
gtttgacaaggccaagctcttgtgaaatggaggaagatgcaggccatgatttactgagggcatcagtgctcgctttgtttgtttctgactgctttggtggttgtgaccgaagcgcttctcttgggagaacacgtagagctattgttagcttgaggaaggagcagccttttgtttgtacttgttctgctgggaacttgggcgacaacaatgaagctaagcagaccaatattctttctgggcactttgattttgctggtttgtgtaatagatcaatacatctcatcaaggaaagaagaaattcgggtattgtacctataggttcactgcaattaggtgtttgtaggcaccgagctgtcctaatgaagtatttgtgtgaccgggcggatcctccaattccttgtgagcttgtgaggggccatcttgactatacacctcatgcttggaacattgttcctgttaaaaagaggaatggctgggtaaggatgattgttgatgcttgttaccccaccaacataaagggagagacagatccagagtacttttgcacggatataccactcagtcgacttcaaattgtgctcgatgatgagggctatactcctcggtgctctttcccatctgtgtcatcatgcatagaaattgaagttacaccttctagttctgt

SEQ ID NO: 278427 - DNA, 455 bp, Zea mays
ccacattgccttccacaaacaccaccgcccatggactacgagcttttcttggagacctgacatggcctgtggtgcgtgacttggtggacgatgttatcgttgtggatgacactgccattgtggacgccatgaaaatgtgctatgagatcctgaaggtggctgttgagcccagtggcgcaattggcctggccgcagcactgtccgacgagtttaagcaaagctctgcttggcacgagagcagcaagatagggataattgtttcgggaggcaatgttgaccttggcactctctgggagtctatgtacaaacactgattggagagagtaggaccgatgatattgcccttgaatttcaaacgtgatagttttagacaagtcgtttgtaaacttggaatagttcgttgtaaacatcacttattacctgtttttttatcaacgggtcattcagttgcagcc

SEQ ID NO: 278428 - DNA, 425 bp, Zea mays
gacttgcttcaaacattgcaaagtattccaggttttgatgacacacacaaggccttttactttgcatatctagtgaaaaatcctggattggcaaggcagttccctactctcccattgacatatcagataagtttgcttgctcgcttcgttagtgagaaccttccttagattatgaggaccaggaattaggactatgctggaggttaagtggaaattagaactatgttgttcttttgttatgtaataatggctttgctatgtcgaaataccgggtttgttatgaaatactgggtttgttatgaccaacacggatgctcggtttgtttgttttgaaatactgggtttgagattcattgtaatggtgtatgctcagtttgtttgttttgaagtaccgtttgaaatattgttttgaaatgttttttcat

SEQ ID NO: 278429 - DNA, 609 bp, Zea mays
gcggcactggcgggtgggacgacgatgcatattgactttgtcattcccgtggacggcaacttgactgcagggttggagtcctacaagcacaaagccgcaaaagctgccatggattatggctttcacatggccattacaaagtggaatgatgaggttgcaagggaaatggaagtgatggttaaagaacatgggataaattctttcaagtttttcatggcatataaaggctccttgatggtcactgatgacctcctcctgcaaggcctacggaaatgcaagtcgcttggtgcccttgctatggttcatgcagagaatggtgatgctgttgccgagggacaacagcggatgattgaccttgggataactggtccagaagggcatgctctctcaaggcctccaattttagaaggagaagcaactgcacgggcaatccgtttagctaagttcatcaatacgccactgtatgttgttcatgtgatgagcatcgacgcaatggatgagattgccaaggctaaaagagaagggcagagagtcatcggtgaacctgtggtttctggactagtgcttgatgattcttggctttgggatcctgacttcacgattgcttca

SEQ ID NO: 278430 - DNA, 469 bp, Zea mays
caagctggtccagccactgtctgtgcagttccagattgggagtgttgcgcataggtacccgttccaccagcagcagtcgaggcagaagctgcaggccgagatgttcaggaggagcaacagtgggatcagcctcaagttcgatagccctagccccggcggtggtgctgctggcaccatgtcgtctgcgagatcattcatgtcgtcgttgagtatagacaggagcatggcgagcttggatgggaagcggccgttccatttggtaggcaccccggtggcgagcgacccagcagatgcgcaccgtgcgcccaaacggcgatgcacgggtagaggggaggatggaagaggcaagtgtgccaccactggcagatgccattgctcaaagagaaggaaactgcggattaagaggtccattagagtgccagccattagcaacaaaatcgctgatatccctcctgatgagtactcgtgg

SEQ ID NO: 278431 - DNA, 440 bp, Zea mays
cggacgcgtggggccgcggtccatttcgtctgaagaccctcctcctacctaatgagttggctctgtcgtgacgtgaaatgccagcgcgcagcttcttgatccgttccggctgatcccgtggaccggacttggggttgggggaggccctctgtctccatggatgacgcagcagggctgctgttgcaagaagagggtggaggtggggaccaagaagctctcctccttccacttccacaggatgttggcctttacacaggtgatggatctgttgatgtcaaagggcgccctgcgttaaagggcactacaggcaattggaaagcatgctttttcatcctagggaatgaatgttgtgaaaggctggcctactacggaattgcaataaacctagttacttatttgaaagtgaagcttcatctaggcaacctcgaggctgcaagaca

SEQ ID NO: 278432 - DNA, 403 bp, Zea mays
cccacgcggccgcccacgcgtccgcaagcagtgaagaaaacaagaggctaaaaaccccagggacccctccatcaccggcggagccgtcactggaaaaaccctatcagattgggacatcatcttggataaagaaaaggatcaacacctatgcacttgagcaatttcttgcgttatcagtgaagttctgcaactcgattgggttccggatggcttgcacaatcacccttaagacagcaacgaacagcaccagatcatggcaggtgcgtgggactgcatacaaagtggcatcgctacatcatcggagtgggctggaagagcttttgccaggataacagactcaaggcaggcgacctgtgcaaccttaacatcatcgagaccacgctgtggcatgttactatcacgc

SEQ ID NO: 278433 - DNA, 699 bp, Zea mays
cagaagtgtgagattatgcttgctgctctcaccaaaatgaatcttcaggagttccaatgtgcgaatgtctgaatcaatttcaaagtcagatttggtgagagcagcatgcagaagtgtgagattatgcttaatgacttgattgactcgaagagaaccaattcgaacattaaaacatctttgctgaagtcatctcaaactgttcctgggcaagaggaggcagaagtgtctcatgatgttttggatgccactataatatcatctaatttttggccaccaattcagatagaagaccttgttgttcctgcttcagttgatcagttgctatcggattacgcaaaacgatttcaccagataaaaactccacgaaagctattatggaagaaaaatcttggaacagttaagttagaactgcaatttgacggaagaagcgtgcaatttactgtagctcctgtgcatgctgcaatcataatgcggtttcaagagaaatctagttggacttcaaaggcacttgctacagaaattggcatacctatggattctcttaacagaagaataagtttctggacaagcaaggcggtcctgactgaatcagcaggaccagatgccgatgatcgcaccttcactgttgtcgatagcatgtctgatgtcaacaaggacattattgtgaatgaacgcatggcagagtatcagatgagtgag

SEQ ID NO: 278434 - DNA, 570 bp, Zea mays
cccacgcgtccgctccactcctccacacctagacttcccaatcctccattgggcaacctgtcacacagtacgccgtcgcctgtggtttggtttgtggagtgagagagaaagagagagagagacatagactcggactcggagagaaggagatgatgtcgagggagcgcaagaaggcggctgctcttcaggagaagctgaagatcctccgctccatcactcactcccacgctctgagcaacacgtcgataatcatggacgcgtcggcgtacatcaaggagctgaagcagaaggtggtgaggctgaaccaggagattgcgtgcgcgcaggacgcgctgagacacaaggcatcatcctatcccacggtgaccgtggaagccctaggagtgcaggggtcgtcgttcctggtgaacgtgttctacgacaagagctgcccggggctgctcgtcagcgtgctggaggccttcgacgagctgtggctcaccgtgcttcacgccaccgtggcctgcgccgacttcttccgactcgaggacgagggcggagagaacgtggcggacaacgtggacgagcacg

SEQ ID NO: 278435 - DNA, 378 bp, Zea mays
atgaattttagtgagaatagagacaagtggtgttgtgtaatggcacttgtaaagagagacagtacacctagggttggtccattgatgatgaacctctgtgcaaactttgtcaaggactttgcaatggaaggcttgcagagtcaacataatattttgaagatctattatgtggtctagcttgtttctaggaatacagattaagaaccagtggtagagccctacggcagttgagtcttctttttgttactcacataagtcaacattttttgctggttccattgaatagttaggactattttcagttattcaaaatcaaagaaagttgcaagttaattcatatatatgtaataaaagttcttggtaattatctataagcac

SEQ ID NO: 278436 - DNA, 372 bp, Zea mays
tccacgcgttcgcatccaatagcagtagcagagacaaagcacacacacacacaatcgtgcctgtggccgacacggccgacgccccgctcctgacaagccacgggcaggccaagcacctggccaacgcgccgtccatcgacgacaccatcgagacgtacatcggcgcgaccggttccatgcagctgctcagggccttcctgctggcattcgcgtgggccttcgacgcgcagcacatgttcatctgcgtgttcacggacacggagccgcagtgtcactgcacgggcgcctcgtcgtccttcaagccggccgtacccccggcctcgccgtgcgcgctctcctacggcgcctggacgtcggacctgtcggtccaca

SEQ ID NO: 278437 - DNA, 796 bp, Zea mays
  unsure (1)..(796): unsure at all n locations
ttcagttctacatgtgcaggttcacatgatccctccatccacctttataaagtgtatttttatctgaacataatcccttcataaggtttgaccaacaactatgtcaaattatatgcttgtctagtgtacagaagttatatctatagattcatattttaaaatgcttttgtatgtttttgatcctatagcaattaacccataatataagagaaattaaaggctctatgcatgcagcactctctggatggattactgttgtattgcttcctgccacacggctacctgaatacttgggtcaatttcagtggcagggcagatttattctgattatatgtttactggaattttgacaggaccttctgaggcgagacatcagcaggcagcatggtggtttctcattagttttagtactggtggttgctattctgggaacactgctagggttcctcatgaagagatgagcgcatgtaatgacttatcttgtctggcttttctgaactaaccaaaattgtatgtgctctgtgtgcgcttgttgttgtacaaggcagtggtctgtttatcatagcctctgatgcctattgtaatcttctgattcatggtatagcctttagccactcaataagtcatagttcccaacaccagctgttatcatcttgcaagcgacttgaggtcttgaactgtaaccgtttggtttgtgattgtgagagattttgactaattgtttgcatcattttgcacatatgaacagaatgaaactgtggtttgtgataanaaaaaaaaaaaaanaaannnngaa

SEQ ID NO: 278438 - DNA, 334 bp, Zea mays
tatgcctctgtagccatttgctttgatttcgaaactgatggaggagaagaattctgctgttgagctgaacaacaagcttcgacaagaattggaccttctgaggcgagacatcagcaggcagcatggtggtttctcattagttttagtactggtggttgctattctgggaatactgctagggttcctcatgaagagatgagcgcatgtaatgacttatcttgtctggcttttctgaactaaacaaaattgtatgtgctctgtgtgcgcttgttgttgtacaagtcagtggtctgtttatcataggatctgatgcctattgtaattttctgattca

SEQ ID NO: 278439 - DNA, 361 bp, Zea mays
cccacgcgttcgcggacgcgtgggtacaaactctgattaagctgttatcgtatctgcagctccccagtcaagagcatcactagctgcattctttggtctttctcagtcacaggttctcagaacactgacttctgtgttcaagtcgattggtgtaaaggctgttcttgacacaagctcgagtcgagatctatctcttattgaagcatgcaatgaatttgtttcacggtatcagagaagccaaccatctagaggccaagaagctggagccaatcttccactgatgtcatctgcatgtccgggttggatatgctatgctgaaaagactcttggttcatacatattaccttacatctcatctgta

SEQ ID NO: 278440 - DNA, 365 bp, Zea mays
cggacgcgtgggaccgggctccgagagcatttctaaccaaggcagtgcagcggcaccaggatccatttcacagcggattctactgccactgctgctgatggtggtggtctcactggccgtcggttacgcgatgtaggtcgaggatggagcgtcgtcccacggcaacactagactgttttttttttatccgcaggacagggtagagctgatagcttgttagggtggtgatacacttttggatgtgtattgtactgctgcgtggttacgttttggcgattggtttgtgtagtgtagatgttacccggccgggtcattttatgtcgatatggaataaagcgcccctgtgaatactactgccgtccctt

SEQ ID NO: 278441 - DNA, 1459 bp, Zea mays
gtctttaaaggatggattgaggagaatggaactgctcctgttaagccaggcaccggattaactgttgctgtcaagacactcaaccatgatgggttgcaggggcataaagagtgggtggcagaagttgattttcttggaaaccttcagcatccacatctagtgaaattggttggctactgcattgaagatgaccagaggttgcttgtgtatgaatttatgccccgtggaagtttggagaatcatctttttagaaagtcattgcctctaccatgggccattagaatgaaaattgctcttggtgctgcgaaaggcctcgcttttcttcatgaagaagctgaaagaccagtaatctatcgggacttcaaaacctccaatattcttttagatgcggactataacgcaaaactctctgattttggacttgctaaagatggccctgagggtgataaaacacatgtgtcaactagggtcatgggaacatatggatatgctgcacctgaatatgtaatgacaggtcacctgacatcgaagagtgacgtatatagctttggagttgtactactagagatgatgactggtagaaggtcaatggacaagaacaggccaaacggagaacacaacctggttgaatgggcacgcccttatctgggagaaagacgcagattctataagcttgtagaccctcgtttggatgggaacttctccataaaaggcgcccagaagacggctcagctggcccatgcctgcctcagccgtgaccccaaggctaggcctctgatgagccaggtggtggaggtgctgaagcctctccagaacctcaaggacatggccagctcttcctactacttccagtccatgcaacatgagcggcgcacagcacttgccaacccatatggcagtcaaagcatgaaagcgcagagcacctttgcgcggaacgggcagcagcccatgaggagcctctcgtatggccctcatgcttccccgtatcgccagtcgccaagacttgacagcaagcggcaatgagtcatggtgcttgtctgtcgaccataacatattttcaagactgaagttgtaaccagaactggtgtatgaactcagccatccaacaagcatctgagctatctattattgtggatgaagcagcaacattgattcgaatttgcatatcatctgcgagtgaatttttctctcttgttatcgcttacattttagctgtactgtctttacggctctagataccttgacttgaaaggtggaactaaacagggttttgatcggtctttgaaacaatgctcaggcagcaaatgcttggaatttgttccttcctggaaaccagcagtaggcaagtctgatatatgttacatagttgtcctaaggctgttcataatctatggtttcttgtcgcaatatccaaatttgccacgtaaaatatccccttaaaaggtatatttgtcccaat

SEQ ID NO: 278442 - DNA, 514 bp, Zea mays
tcgatatcaaaaaggcctgttatatctaataactcctgttcctctccagcgcctgcaaagcgttgatcttttgcaacagggtctcattgagatacctactgctcttttgcaggtccgcggatgtgtgtcgccctacatgtcgacgaatgtgcttcacaagatatctgaaagggatttgtatgctgggtgatgttggcgcaggcagtgtccgagatagacctgtgtttgctggtttctgacccggagagcatgaaccggactgtagtttcaggctgcccagcggttgcctctagctcctaagattagatatgtgacctgtgatgtgcaactcctctgtcaaattagtagtcacggagatctgaatgccacttcctggattcattgaattgaaattctataattctgtggcaagttactccctttgcttttgcctttgaattgattagtataaagatattgattaattggtatcaaaaaaaaaaaaaaaaaagggtggccgctcgcgatcaagaac

SEQ ID NO: 278443 - DNA, 530 bp, Zea mays
cccacgcgtccgcccacgcgtccgcccactcgtccgcggacgcgtgggtttttttttgaaacggtaaaaagacacggttaaccgtttaatacataacttgaatacatatttgtttgttagtcacatcgtagctacgtggcgcaacctgcgactttatatgatacagcactcgcccattattgaattttgcagaagcgaactctgtagaccacgcaaagaacagtcgtggtcagtaacaatcgtcgtctgttggtacactggccaaaaaccgcgagcatgatgctgcagcatgtagtgtttagctagtcctgcttaagtgcttattctttaattaggcatatcactatgtccatgctcgccccatgcttgtgctatcgtcgtcaatggaagaactccgtcaaccaaataaccaatggccctcgagatttgcagcctgccagcctccacctcaagaagacaagaacaacatacgtacgatgcccgccggccgggcggccggtgatggtcatgcgtaagccggggatgtcacc

SEQ ID NO: 278444 - DNA, 645 bp, Zea mays
cccacgcgtccggcccgcggtgccggtggtggtgggggacacgcaggaggccgggatccggctcgtgcacgcgctgctggcgtgcgcggaggccgtgcagcaggagaacttctctgcggcggaggcgctggtcaagcagatccccatgctggcctcgtcgcagggcggtgccatgcgcaaggtcgccgcctacttcggcgaggcgcttgcccgccgcgtgtatcgcttccgcccgccaccggacagctccctcctcgacgccgccttcgacgacctcttgcacgcgcacttctacgagtcctgcccctacctgaagttcgcccacttcaccgcgaaccaggccatcctcgaggccttcgccggctgccgccgcgtccacgtcgtcgacttcggcatcaagcaggggatgcagtggccggctattctccaggccctcgcccttcgccctggcggccccccgtcgttccggctcaccggcgtcgggccgccgcagtccgaccagaccgacgccttgcagcaggtgggctggaaacttgcccagatcgcgcacaccattcgcgtggactttcagtaccgtggtctcgtcgcgggcacgctcggcgacctggagccgttcatgcttgcaccggacggcgatgacaccga

SEQ ID NO: 278445 - DNA, 413 bp, Zea mays
tcgtccacgcgtacgctcatcatcaccgcagtcgccttcagatctccatgccacccgtgcgatcagaggtcatcgccatcgccgcgacctgcaaggctgacgttgatgcgctctccgggaggctgctcgaggcgatccgtgcaagggcttgggaggtgacccctgcagctgctccgtcgagtggcacctcggcggcccagggggccgcgcctacggaggacatcgcgatacggatgccggctgctggggcctcggggatactgcggctggagcaggagtcatgggagaacgccgggcagaacttgcacgatgcgttccaggatctcgatgccctcacgagccgcgctccggagatgatgcacctcgcagaaatacatgatgctcaagctattaatgaactcatccactgaatc

SEQ ID NO: 278446 - DNA, 923 bp, Zea mays
  unsure (1)..(923): unsure at all n locations
tgaataggcatttttacaggagttggtgctgtaggtgcacaagctgtcagcagaaatgtgaatggtgcagcaccagaattcaatatccccaactggtggagtcaattgaaggtgcctgggcttagaccatccatgtcagtggatgatctggtcaaccacctaggcaactgcatctcagagcagatcacttcaggcgatcgggcattggccaacaacgaggtgccaaccaaagaaacgctcgaggggattgctcagtacctccttggtgacacacaaggcccgccggttactgctgcagtcgagagatcactgatggccagggtggactccctctgctgtttgattcagaaagacacagcaccagttgccaaaccaaagcccgagccaaatgacggggacagctttggcgtggaagcctcagatggttccgacgaagaattcacctccgcgccaacagggaaacctacagatgccaccaacccgccagccatgtcaagaaaggattcgtttggggagctgctgacaaacctcccccgcatcgcctcgctaccacagttcctcttcaagataccagagggtactgagaactgaacgtggaagttaagacctcacacccttcccctggaataggtagtttgctgtaagcctgtaaagattgtatccaagcaataagaaagccccttatcacctcctcggaggcgtgttccccgttctgtaaatttgacaccggtaggttgctccagttgtatgttttgcgaatcatggtagtggaaaattgaaatgttcattggttctttttaactcaatcgtgccccattccaaactggttaaatattttggcggcacctncactggtaccctgtattttccagatagacgtggatataaaggttccgatctggcataactgcttgttcttttac

SEQ ID NO: 278447 - DNA, 542 bp, Zea mays
actggagctatactagtaggagggcatttaagatgttcaacatagtttcgtcgtggaacaagaggcggagaagcaggtcactcgaccagctaaatccctgggtgtacaagccggctgagctatggcaggcgaaggagcaggagcaccaccacccgccgcccaagaagcgcagctgcaccatggtgttcacgctcaaggagatggaggaggcgaccaacctgttcagcgaccgcaacctcatcggcaagggaggcttcggccgggtttacagaggcgtgctcaaggatggccagatcgtcgccgtcaagaagatggagctgccgacttgcaagcaggccgacggcgagcgcgagttccgggtggagatcgacatcctgagcaggctagaccaccccaacctggtcacgctcatcggctactgcgccgacggcaagcaccggttcgtcgtgtacgagtacatgcccaggggcaacctccaggacatcctcaacggtgacacccatcccccccatatacaccacaatgttcagagcagctgacgc

SEQ ID NO: 278448 - DNA, 443 bp, Zea mays
tcgggggcagagacagagagcaaagcacccttttatccaagatccgatccatccaatctacgcagcggaggtctggcatctcagagcgggcaaattgccgaggaagacaagatcaggaggccagtttaacacctgacccgagtagtaggacaggtaggccagatcaagaaaagcggggaggagcagcttccagatgcacctgagcggcgggggccggatgttgccgccgaaacagctgctgaccatcgtcatcatcatcttctccacgctctccttcatcaagctccttctcctcaccagctcgtcgtcctcgtcagcgggcttcaccttccgcagcagcccggcgtgggacgcagacggcggcggtaacgggacggctaggagcgcgctcgccttcaaggagctcgctctgctccggtccgtcatcgccgcgcgggcgccgt

SEQ ID NO: 278449 - DNA, 1259 bp, Zea mays
gaacaatctatcccatggggtcttgttgtctctgtactaaaggatgtggaggcggttgttgaggttgctgcccagcactttgttggcgatgatcgcaagtggagctttcttgctgttacagaagcagtgaaagcaggtgtcaggttagctgcttttcgggagagtggatacaagatgctcttacaaggaggggaggtggtaaatgaagaagaggtgaccgttcttgaaaataattatggagtaaatggtaatggagtaccagccatctatccgatggatggacatgcagaaaatggtcacaaaactatggccaagggtctggatggtaaaaatggatttgtatctaagagtcttgagaaaagagcagtagctgctttgaacaaatttggtgagaacgcaaagatgatgtctgatcctatgtggattcggaggctccaacctactcctgagccaactgtgatggttgccgagaagccaactttggcaagtatttggtctgctaaaggcggtactgggcgcttgtttgttttaggggaggttgttcacatattcaggccacttgtatatgtacttctgatcagaaagtttggaataaaatcgtggaccccgtggctagtgtcgctagctgtggaactcacaagtctaggcgtccattcccatgcaaccgatatgaatcacagattaggaaaagtgcatcagctcagttctgctgagagggatgagttgaaaaggcgaaagatgatgtgggctctttatgtgatgagagatcctttctttgccagttacagcaagcgtcacctcctgaaggctgaacaggttctgaatccggtgccattgattggcttccttacagggaaacttgtagagctactggaggggattcagacgagatacacgtacacatcaggttcatagagatggccaatctgagcctgctgctcgcctctcgatttgccctggcggacatgtgctttgtgcgagttggttgatggttaatggttaatggctaggaactggtgcttaatcctgaaacccgtactgctgtttttcttgccaactgtggcatcgtcgtcttgtggctgcgaagctgcagccacctcgttcgtgtatggcggcagatgagacaattcataatctaagtatatagatataaatagtagtattaccggtttgtttgtatttacgatttatcgtgaactgatggaacataatgtgtatacagcgaaaatttatctgattccatacatttgttgtttaac

SEQ ID NO: 278450 - DNA, 400 bp, Zea mays
agcaagctcagctgcacgcactgcacctaccgggccagccgccagccgccggccagcatggaggcggtggtagagtgcgccaagtgcgagtgctgcggcctggtggaggactgcacccgggactacatcctgggcgtgcgcgcggccttcggcgggcggtggctctgcggcctctgctccgaggcggtgcgggacgaggcggtcaggggcacgacggcgagaggccccgccgacgacgccgcggggctggaggacgcgctccgggaccacatggccttctgcggcaagtgcaggcggagccccgcgttccgggtcgccgacggcatgcgccagatgctgcgcaggtgctccaagtgactgctggcgccggccgcgtcgtcgtcggcgttgcacggcgaaa

SEQ ID NO: 278451 - DNA, 992 bp, Zea mays
acggtcggaatccgggtcaccacggtcgggaccgtggaatggccatggccaaccggcttagattgccgcttccccagtgcctcttcttgctgcattgctacgtcgttgttgcgattgtagcacacccgtccagcccagagcaagcatcccccaaggcgaaccaacatcctctatcatacaacaacctacgaccagaagattttccaaacgatcggctctaccgcgcttaccacgccattcaaagcttcaagagcacgatcacttcggatcccaagaacatcaccggcacgtgggccggcaacgacatctgcggcgagaagagctacgtcggcttctactgtgcaacaccgaccagccgagctaaggagctcacagtgacggcagtagttctcaatggcttcggtctgcgtgcaccgaagctgcaaggcttcgtcgaccagctccccgacgtcgcactcttccatgccgcctccaacaacttcggcaacggcggcatcccccgactcacaggccttgaatactcgtacgatcttagcgtcgacgacaatactgacctccaagttcaggactattctgaagttactgggagagctagagccaacattcactgtgttgctggaatgatcgagttaagatttcgtttgggaactggccctgataagggaggaggcatcattcctggagtcgcggatggcaaggctctactgttgaactacaacgacctgtccgggcaacttcctgcagatcttggcttctccaaactgagcttcctcgccctggccaacaacaggctaacaggcccaatcccgccatcagtagcgcacctgaaagactcccttctcgaggttctcctcctgaacaaccagctctccggctgtctcgcccccgagctcggcatgctcgccaaggcggcggtcattgacgccggcatgaaccagctcaccggcccgatcccgtcgtccttctcctgcctcatcagcgtcgagcagctg

SEQ ID NO: 278452 - DNA, 1091 bp, Zea mays
gtacgcgacaacaaacgctagccacggtcggctcctcgaccggacgacgtggctgcgcatctgcaggaggaggaagaggtgaaatggtgaaggccgcgacgtggctactcgatcggctcctctacctactcaagcaggacaagggcaacgacgccaacgccgcgcgtgaccgacggcgaaggaggcgtgctccggccggtggcgccgccaacgccgttggaaacgatgatggcgaggagcagcacctcaacacctttctcgacactgcgaatgcgtcgttcgcctcctcaagggtgcagttcaggaatatggcgtcgcgcgcgcggtgggtggaggaagccggcgctgcggaggtggtggagaacaggggcaagctgtggctgaccaccggtgtcactcgggggggcaagctgtactacaacgttgaggagaccgggttcttggccgaaatgggtgccttgattcttctcaatgataaggatgagacgataggaattgaagatatctatgggaagcttgctggaggaaattatgggtgctcctgggatacctttcaggcttataagcacttgaaatcacttggatatattgttggaagatttggtgttccctggacaatgaagcatggtggtactcatcacaccattgctccccagatcaatatacttgagactgatcagagcttaaatagagttgacggggcctccaatgacataaccaaattgctcaaggaaatacagattgacgggatatgtccatcttttgaagtttatctgccaaatagcaagttcaaaaagtcatccccagggtgccctagtttcctcttatgtctattaaggggtagaccgccctcaagggttgaattggaagcagtggaatataatttcagaggcattcctctgaagtatgcccatgtggataatggacgggtcagctttctctcctttgatgaagttacactccccagcttgccctgatgggtagcagcagaacatgtgaagtgataaagggtctgtgcggctggacgaatgaagtgatccatcttcttctcactcctcacttttttatttggtttgtggaatagaatgggt

SEQ ID NO: 278453 - DNA, 822 bp, Zea mays
ccacgccacccgtctgtccacacatccgcggacgcgtgggtatctgccgactcgccgagtagatggcgaacggcccggaccgcttagcctgtccctgctctgtaccattctactacgcctgcttttctgagactctgacacggatgttggcaagaccaccagcaccgcctttggtgactgctcaaactcctgaagtcggcatcttcattacagctcgcaacgtctcgggtgcactggtcgccaagcttcctggtaacaaaaacaagtgtggaggaagatcgaatgtccggcagcggaacatccaacctgggaaaaggggctgtcgtcgggagtggcgggcgctctcagcagctgaccaagcgcaggcttctaccttggacgtagatgaggagtgcaaacgggtgctcactccattgggtttctccagcgaagacgccgagaagatgctgaagaaagcgtttggctggacccactcgccgtactggagcgaggagagggagaaggaggttccgaccgccgaggcggtagctggagtgctggactacatcaggagcctggggctgtcggacgaagaccttggcaggctgctgaagaagttccccgaggttcttgggtgccgacctcgacggcgaggtgaggccgaatgtgggcaagctggacagtgactggggaataaacgggaagaccctgcggagcttctgctgaggaaccccaaggttctgggctacaatgttgactgcagaggggattgcatggcccagtgcacccgctgttgggttaggttctgatgatgatggttttgttcttcgtcgccacatcgtt

SEQ ID NO: 278454 - DNA, 710 bp, Zea mays
cggctcgaggctcacttcttgttacatgactactacacttgaggcggggaacggcaagtgttccgtctgcttgagagcaggaagagggacgagctgagccaggagttgctagacaaggcacgagctcgtaaccgcggcggacgtacagtttcttctgtgaccctgacgctctgggagagaacctgtacacgattataaagttcggccttgttcaatacatgattctcaagacactatgcgctctcttggcgttggtcttggagccttttggagcctatggagatggcgaattcaagtggaattacggatatccttacattgccgctgtcataaacttcagccagacatgggcgttgtattgccttgtgaagttttacaacgcgacgcatgaaaggctacaggcgataaggccactagccaagttcataagctttaaggccatcgtgtttgccacttggtggcagggagtcggcattgcgatcatctgccaaactggactcctgcccaaagagggcaaagtgcagaacgcgctacaggacttcctcatctgcatccagatggctatcgcagcggtagcgcatgcctacgtcttcaccgtggagccgtaccagcacgtccctgctgtacctcctgatcacggggaagtcatgtgtcaggaaagcaaaatggaggtggaggtggatgtcgtcgacgacgatacagggggtaca

SEQ ID NO: 278455 - DNA, 356 bp, Zea mays
ggtatttgcgttcttttttttttctcctcaacattttcccgctcccaataaacatctggtgcgcatggaaatggagtgtgtgcagcgtcgagcaggtcttcagtgagtaaaggagagcacgtgcacgatcggggttgcgcgcttgcagctggcctctgtggggggtcttttctgtacagatctagcaaggcagcgtcgtggcacacccagatacgcaccagacagtcaggtagatgtctgccaagatatgcaaatatggttgtagatgttctggttttcctttggatcatttgtgtttgtggatgtagtgctacgtgcaatggaatcaccacatttcccattttatttgacgcttt

SEQ ID NO: 278456 - DNA, 455 bp, Zea mays
tcgcttaacgccaacaacgaaaaactccgcagcagtccacccagtccaccagacatccgacagggaattgggaggggttgataggactcatccgcctaattcttgtagtggaattcaaccaattgattgctatttgggacagcggatttgtgatcctgttaccacagtcttcttgcgggccagaaacgcgaatcacgatggttccaggaatcgccaccaagacggcggcgcgaccggtggcctgggcacctcagcctcggaacatgttcgtgttcggcgcaggtttcgtcggccgctacgtctcggagcgcctcctcgcgcagggctggcaggtctccgggacgtgcaccactgtcaccacgaagagggagctagagatgctgggcatgaatgcttcccgttttcgatggcacagaggacagcctggaaaatattcacagtttacgacaagcaac

SEQ ID NO: 278457 - DNA, 511 bp, Zea mays
tcgcacggcctcaaggacggctggtacgacggcgtcagcatcttcctcgccgtcttcctcgtcgccgccgtgtccgcggtcagcaaccacggccaggccaggcgcttcgacaggctcgccaccgagtccgacaacatcgccgtcgccgtcgtccggggcggcaggaggcaggagctctccatcttcgaagtcgtcgtgggcgacgtcgtggtgctcaacatcggcgacgccgtgcccgcggacggcgtcttcatgcagggccacgcgctgcaggtggacgagtccagcatgaccggcgagccgcaccctgtcgacatcgacgccgagaagaacccgttcctcgcctccggcgtcaaggtcatcgacggatgcggccacatgctcgtcaccgccgtcggcacggacaccgcctggggcgagatgatgggccgcatcaccagggagaagaccgaacccacgccgctccaggagcgcctcgaggccctcacctccagcatcggcaaggtcggga

SEQ ID NO: 278458 - DNA, 461 bp, Zea mays
ggtcgcgctccctcccgcacaacacggtttgcggggagatttggcaggagacgccgtgcgggaccggctggttctctcggcttgcgtgaaaaagcgcagggggagctaggcacgtggtttccctcgtcttctgccgcagacgcttcccgtgatcagaatccaagaaatggcgggtccaggtccagcgcgcaccgcgcggagcgttgctctcctgtgtttcctggtttcctgcgctgcgctcgtggacagccgtggcggagccagccggccgagccggcaggacctcgatgtcggcctcggcggcgggggcgtcggcatcggcatcggcatcggcggcggcagcccttcgtcgccttctccgacgccgccgtcgtcgcagccgcagccgtgcgacttcgagaacgagcggctgtacagggcgtacctcgtgatccagcagttccggagcacggtgacgtgcg

SEQ ID NO: 278459 - DNA, 323 bp, Zea mays
acgccgtgggagcggctgcagcacgaggcaggagcagcgcgagggcaggcgccatgggggtccggtcggcggccaccaagctgcacatcccaccatccgccgcccgccgacccacgttcctgccattcgtggccgtcctcctcctctgctctgcctcctatctcatcggcgtctggcagcacggcggcttcgccactccatccgacaaacccgccgtcgtctccaccgctacggccgtcgcctgcaccaacgtcgccgtcgtcccgaagaggaggacccggtccggcgccagctccccggccctcgacttctccgcgcgccac

SEQ ID NO: 278460 - DNA, 445 bp, Zea mays
gagctcgggaagcttccatcgctggagatttcgcttaacctcagctgtaaccgtctctccggggaaattccagcgcagttcggcgagctggataagcttggcagcctcgacatctcgtacaaccagctctctggcagccttgcgcccctcgcgaggctcgagaacctcgtcatgctcaacatctcgtacaacacgttctctggtgacctcccagacacgcccttcttccagaagcttccgctcagcgacatcgcgggcaaccacctgctcgtcgtgggcgccggcggcgacgaggcctcccggcacgcggccgtttcggcgctgaggctggccatgacgatccttgtcgtggtgagcgctctcctcctcctgacggccacctacgtgctcgcgcgctcgcggcgccgcaacggcgccatccacgggcacggcgccgacgagacgt

SEQ ID NO: 278461 - DNA, 469 bp, Zea mays
agcaagattgcggccgcgcgtgccctgttcgcctccccgaggctgctgcactcttcttccctgcccgccggcaccgtcgtcttcgccaagagccccgcgccggacgccgagccccagacggccttctccatgagcccgacgtccgtgctcgacgcggcggcggccttcgtgccgggcacggacggcgccggcaagcgccgcccgccgtggcgggcgcgggacaacaacggcctcgcggacgcgctggactgcagcgaccaccaccaccagcagcagcagcaggagcggatcgtcctcgcggcgacgccgtcgtcgtgctcgctggccagatcgtgctccctggaccgccgcgtcgagttcggcgtcaagaacaggagctcgtggctgcccctccgcggctgcgaagccacggcgccggcgccggccgacccgtgggagatagagccgtcgtcggaggactacacgtgcg

SEQ ID NO: 278462 - DNA, 976 bp, Zea mays
  unsure (1)..(976): unsure at all n locations
gctccagatcgaccctcgagcctgtcgaacgatcctttaattccaaccgatcgaaaagttgcagcggcagtgttgaggccaaggccaccgacccacctctctcatagcactagcagcaatggaggtggagatcctcgagtcctgcatggtgaaacccagcgacgacatagggacgccgccgccgcccatgcacgtggtctggctctccaacctcgatctactcgtggccaggagccacacgcccaccgtatacgtgtaccggcccagccctgacccggacttcttctcgccgggcgtcctcagtgctgccctgtccaaggcgctcgtccgcttctaccccctcgccggccggctcgcgcaggacggcgccggccgcccgcagatccactgcaccggagaaggcgcgctcctcgtcaccgcgcgcgccgacgctaccctccaggacatccccggcgggttcgccccgtcggatgagctgcggcagatgcttgtcccctcggctgccgacggcgaagaccgcgccggcatcttggccatgttccaggtgacgtccttcaagtgcggcggggtgtgcgtgggcgcggcgatccaccacacggcggcggacggcctagcggcgctcgacttcgtcaacacgtgggccgccatcgcgagcaagggcgtcgacgaggccgcgccggcgccgcgcccgtggctggaccgcacgctgctccgcgcgcgctcccctcccgacgtgcgcttcgaccacagcgagtactccccgcggggcggcggcggtccaaagacggcgagggtcccgttcgactccgccatcctacccatgtccaagacccaggtggacgcgctcagggccggcagaaggtgtccacgttaaggcncgtggtcgccagtttgggcggggcgcgtgcatagcgcgcggctcgcgggagacgaggacttccgtctgtcatgacgttcgacgcgccttccgggttcg

SEQ ID NO: 278463 - DNA, 990 bp, Zea mays
agagtttttcgcgtcaaaacttcacttttctcgcctccaatggtctgctaatcatttcggcattttttcagcttcccgtaaagacgatgatgcatcccgcatatatgcgtgagcgaaactctccccaattcttcccgagcgcgcgcaatccagtagcttccgacgtcttttttccagccgcgcacgcagttttgttcgaggaaaggagggcaagagcgggagacacaccatcgtcgttggaggagccagccaaggcgttggagtgtgagatgatacattcgggatatgaaccagtcgggcgcgacgatctaaacctatcgaggcaagcacgtcgggataacaacgtcggcttgcagcgtccttcggcgagggccattcatcctttgacctcccggcaaatggttctattttgtcaccgaaggttcagtctttcctaagttcctgatgcaccaggaacctgttctatgtccaaagccttgagaagactgtccaggatgattttcagaagctttcttccctgtaccttcaagtcagcacaatcagtcaggcccttaactctatgacgcggtctcgaaacctcgcaggctcgcagctggtcatttgtgtaccgtcctaggttcttgctgacctttgccttcttggtggcgcagctgctgagtgatctgagtctagtcccataccttactgtcgtatgtggtctttcctcgtctcctcacattttgtggtgtttgcattaaccttaatctgtgtttgtgatcttggggatttcgggttttagattggtgattggtcagtggtgtgctgtgtgcatggtgcatttgagctctctatgcgtcagattgagcttttatatacaagtcatgatttgtgttttaggcttaaccctatgggataaagctaacgaagaatctctgctaaaattgtttccattattgattgtagcatgattgtgtctaaaaaatatgttcaggcttgtgtgtcttcattatc

SEQ ID NO: 278464 - DNA, 393 bp, Zea mays
cggggctcgccgtccgcggcgagggccgcgtggtggggtgccgcagcgcctgcgccgcctacggcgcgccgcagtactgctgcacggggcagttcgggagcccccagcagtgcaagcccacggcctactcccgcctcttcaagtcggcgtgccccaaggcttactcctacgcctacgacgacccgacgtccatcctcacctgctccgccggcgcctcctacgtcgtcaccttctgcccgcaccgccgctgaacttttatttttttaaggtcttcggccgcgtgttgttagttatcctctgcctgcgtttgcgttttgatgttctggcgtgcgttcgtttcacttgcctccgtcacgcgtcttcggaatctccagatcttcctccctaagtata

SEQ ID NO: 278465 - DNA, 674 bp, Zea mays
ctgttgtattgcaggagagtgtgtatgcacttttgaggaaggtgggcaaagcgaggatggaatgcataatggacggggagcagccgacgaacgaggtggtggcaaggcgtgctggcatcacgattgaaaagctggcgaaactgagagcgaaaacaaggaaagtacggtccatgcaggatcgagtctggtcagacgacggtgtgacataccaggagatcaccgaggaccccaacattgaaggtcctgaggtgagcgtggacaggctgatgatgcggcagcaggtgcgcagcttcctgacggggatcctgagcccccgggagaaggagatcatcgagcaccggttcggcatccacgacggccagcccaagaccctgcatgtcatcggcgacatgtacggcctgtccaaggagaggatccgccaggtgcagaacaaggccctggacaagctcagaaacagcatctcagcacagggcttccacgtctactttgatttgctaacttaagactcttcaacacgcaaacattacatgtacaatgacattccattctgccaatgggtatattatgtatagatagacgaagaattcatgtttttttcctttcccttttgccatttgacattcattcatccttgtactcaacaatggatactcatacatggttgtttgaggagc

SEQ ID NO: 278466 - DNA, 537 bp, Zea mays
  unsure (1)..(537): unsure at all n locations
tctctctctctctctctctctctctcggatccgaattgccagcgcaccagtcgagctcgcgggaactcgccggcaccggcgatggcctccgccctactggccggacagggcggggcgcgccaccacggctggggggagacgcgcgccccactcgcgcccatacctcccaaccctaaccccagccagccccacccgcgcgccgacgggtccaagtccaagccgcgggcggcagcctcctcgccggcggccggatacgtgacgttccgcccggcgtccctgggcccgcgcgaggcccgcgcgctccgggaccgcctcgcgggggagctcacccaggtgcgcgccctcctctcccgcatcgacacctggcagcagcagggcccgccgcccgcggggctccgcggcgaggtgcggaagcggtgcgggcagatcctcaccaggctgcgcaaggacaaagcggagcgtgtggttcaacgcgcccgtcgaggtggagcgcctcggcctncacgactaccacgccgtcatcaagcgccccatgga

SEQ ID NO: 278467 - DNA, 781 bp, Zea mays
ccgttaccaagatcgccgacctcgacgacgacgccgcgccactcgcggcctacgccccctacaacggctaccggatccatgtcgttgatctcgacccttcctcactcacctcagggggttggttggaagacacttcccttgtcgacaagtacaaaatgtccgatgaaacatacgataagctcgacactaactttcgaaaattcaaagaaaagatggtcccgaaaaactctccgtcagaggataaagaagaatcagaaaagcatatggaggaactatgctccaaaatcaaggtgggtgatagatgtgaagttgagcctggtgccaagaggggcactgtaaaatttgttggtagagctgaagccctcggacgtggattctgggttggagtgcaatatgatgagccacttgggaagcatgacggcatggtgaaaggcattcgcttctttgagtgccctcaaggtcatggggcaattgtgaggccagagaaaagtaaaggttggcgacttcccggagagagacccatttgaagacgaggacgatgacgagatttgagtgcgtgtgcgtttggaaaagcaaggggaatgtccttgttgaattgcattcgaaacgtgtgtaaaatgaattcggagatttgagtgtgcgcgcttgcttgcatcttcttgggcaatcatagtgatcacatttcaaggcatgctgttacatctctcctatttaagcgtgagctaataaattttcccccccaaaaaaaaaaaaaaaaaaaaaaaaaaaaaaaaaaaaagaa

SEQ ID NO: 278468 - DNA, 643 bp, Zea mays
gccacgcgtccggacacgcgtccgggacctggggtcctaaaaatcaattttctcctcggggactccactcggttgccggccatggcggagaatttggcccccgagaagcgccacaccttcgtgcacaacgggcagaaggtgttcgagtgggaccagacgctagaggaggtgaacatgtacatcgagctccccaagggcgtgcccaccaagctcttccactgcaccatccaggccagccacgtcgaggtcggcatccgcggcaacccgccatatctcaaccatgacctgatgcaccccgtgaagaccgactcgtcgttctggacaatagaggacgctgagatgcatataacactgcaaaaaaagagagaaggggaaaacatggtcatctccaatacaagggcaagggattttggatccatatgctgcagatcaagagcaaaagcggcttatgctccaaaggtttcaggaagagaaccctgggttcgacttttcacaggctcagttcagtggaacctgccctgacccaagaaccttcatgggagggatacgctccgagtgaagcaccctacctgcctatgtacgtttctactatatcctcggcatcttgatagatgcagcaggcgtgcttattatggctgaaaat

SEQ ID NO: 278469 - DNA, 762 bp, Zea mays
cccacgcgtacgcccacgcgtccgcggatttttaaccagttcagagtacggatctgagctgcagaggtcgccctcaccgtctactgagccgttacagaggtcgtggacaagggagcagagccctagggccgctggcttcgacttcttcctgagcaataggagcaatgactcgccacctgtctacaggaaggaacccgatgacgcggcatcgcagtccgagtctgacgcgaagtctgcagacggtgaggatgatggcatcgcctacacgctgcaccagagagttcttgagctagaggacgagctcaatgcgacaaaccagaatctacaagatgcagacgagaagcttgaggttctggaggagaagagcttgaggtgccattgcgattataaagagaatggaaacggagctcagcgaactacagaagtttcaggcaaagagggggagctggaagccgaaatcgtcaatctccgggaggaagcggactcggcaagaaggcgattccaagaggcattgtctgaacgagatggagaaatcagcaagctaaagcaagagcttgctggtgcttctgagaagctgcagcgagagaagtactccaatggcgtgcaggtatctgagctgcagcgatcggttgaacacatcaggtccgaactagagagagtttctgaagagaaactactgtctgagaacaagattaacgagctaggggcagtaaaagctgaagccgataagtacggtccatagctcaacctagctggcgccaa

SEQ ID NO: 278470 - DNA, 433 bp, Zea mays
  unsure (1)..(433): unsure at all n locations
tttctccagaaaatgttaaatatgctgccatgcttggtctgtcagcagcagcaatgaagtctaagctctttgccgatcaagaagaacgcgaagtgcaaagactaactgctactgtaataaatcatcagttgaagagattggagttgaagctgaagcagtttgcggaagttgagaccttgctcttgaaggaatgtgagcaagtagaaagggttagacacaggttttcagctgaacgcgtcaggatgaggtcagccctattaggtcccaccggaagcggtctaccagggggcagttgtagcactatgccatcaaatccagcaggcatgagccccagaccagtcggtgtgccaggctacatgccacagaccagcatgccagccacatatgccaacaacctgcaggggcatgggaatnctcagatgccgttcttaca

SEQ ID NO: 278471 - DNA, 604 bp, Zea mays
cccacgcgtccgaaacaaatgaatgctacaagggtgccttatgaagacactacctggaaatattgctacagtgctagtcctcttgagatgcctgatgtgccaaccataaccctgacatttgctgcggacaagagcttgcaagctgttaatcctatcttgccatttaatgacaaacagggggcacttgccgggttctgcttagctgtgctgccatcaacagaacccattggaattattgcccagaatttcctggttggataccacgttgtcttcgacagagaaagcatgaagctgggctggtaccgctccgaatgccgcgacgttgaggacagcacgacggtgccgttgggcccatctcagcgcgacagtccagaggacccgttgccgtcgaacgagcagcagacttccccggccgtgacgcctgcgacggcaggcacggctccgctctcctgtgcgacgacgaatctgcagatgctccttgctagctcttacccattgctgttgctgacgatgtcgagtgtgttcttcgtctcgtgaacaaccgatatactactaatcgatagccttgtatattgtatgtgctttatttatggtgttttttttt

SEQ ID NO: 278472 - DNA, 646 bp, Zea mays
ggtgctttgggagctttgctggtctatgacattaccagacgccagagcttcgatcatataccccgctggctagatgaactacgagcccatgccgacaagaacattgtgataatgctggttggcaacaagagtgatctcgaggagcagcgagcggtgagcactgaagatgccaaggagtttgccgagaaggagaacctcttcttcctggagacctctgcgctccaggcaacaaacgtagagagtgcttttcaaactgtcttgacagagatattcaagatccacagcaagaagaacatggtgtcggagccgaagagcaatggagctgccccagcgatgccggggacaaaggtccttgtcccaggtccggcgcaggaaatcccaaagagcaagtgctgcagttccatgtgatgcttctacgtttggtgctgggtgggttgaaaatatattcacgcaacattgttttggttttaaatccctgctgaaatacttgggttttggcgggattgtgttggaaccccggtgtattttagatatctgtcacaattgtgacatgagggaagggtgcgctgatgtattagttctcttgttccctaactcatacgttttatccctgctgcaagtatctgtagcaccgattgtttttgag

SEQ ID NO: 278473 - DNA, 477 bp, Zea mays
  unsure (1)..(477): unsure at all n locations
ataaaaacgcattgcattactgaattggagaacataaagggggcggggctagctcaggaacgtgctacgctgatctatcagtaatttgttccctctgcggcggtgatcgtcagtttgtgtcgtcgtcggtgggcatccagtacctgttggtgaaccggacgcacgcctactactcgtggcaccgcaaccatgacgagcagccaaggtcgtcgctgacggcgtctggttcaccaacaggtactggatgcccaccgacgacgacacaaactgacgatcaccgccgcagagggaacaaattactgatagatcagcgtagcacgttcctgagctagccccgccccctttatgttctccaattcagtaatgcaatgcgtttttatgattactgatgaatgaataagaaaaatggtcccgactgcccgccggtccaaaaaacaccaaaaaaaaaaaaaaaaaaaaaaaaaataataaaanaaa

SEQ ID NO: 278474 - DNA, 806 bp, Zea mays
cccacgcgtccggccacactgaagccaactcatagtgatgcagtccttcaggagatcttagagaggaatatggctactgaggaaatactgcatactgccatggctgctgaggatgcacctccaaccaatttagatcaccgagaagtcatcaatgaaagatgcttcacaggagccagttcaaactaacgaaccatctgagcagccactgataactgaagagattgagaagccacagcatagtgaaaagattgctacggacacgagagggagtgaagtatctactgaggagatgctagagcttgaaagtaatgccactgaattaaacaaggatcaatcagaacttgaagggctttcatctggtaggaatcctccaaacttccaaagcaatccaaatgctgggcagcgatcagagtccaaaggcattgtggccgagaaggcagctgaccatataatggaagctgaagatgatgtggatgctgagcactcatcagaatctcaaagcgttgcacctgctgaggttcgaaaggagcaaccatcagaacatcaaaaggatgtggatatggagcagctattggaccctcaaaatcaggatcatccttggaatccactagatcctgttagtgatacagctgccaaggattcatcagagcctaaaagtgacatagctacagaaaaacctgcagaatctcaaaacaatgcagaacagtcagttgagcagcaatcagaaccgcacagcgataaaataactgagaggccagaagtgcatcaaagtaatacatttaatgatgagctttctaggctttaaa

SEQ ID NO: 278475 - DNA, 660 bp, Zea mays
ccctcgcgtccgcctgttcaagacgtcaggtgttggtatttgggttgcaattgagtgattgggaaacctgattggacagaagcattgttggtcaaccaatgggaagcaatgaccctagcacaccctccaaggcttcaaaggcatcaaaacaagtacttgaaacagtggatcaacctccagctaccacatccagtggaacagtttcagtttaccctgaatggcccagctttcaggcataccaagcaattccaccacatgggttcttcccccctaccgttgctgcaaatccacaggcccattcatacatgtggggagctcagcccatggtaccaccttatgggactccaccaccaccttatgtgatgtatccacctggagcagtatatgcccatccctctacacctcctactatgcatccgtttagtcattaccctatgccaacaaatggacatgctgaaactcctggaaccgcgccaagtgctccagaaatgaatgggaaaagtgagcctggcagaacatctgctccatctgccaatgggattacctcgcacagtgagagtggaagtgagagtgagagtgaaggaagtgatgccaattatgaaaatgattcacattcaaaggacaatgatggaaaggaagatggcaattctcagaatagca

SEQ ID NO: 278476 - DNA, 1045 bp, Zea mays
tcggctcgagccggaggcgtggccggcgccggcgccgcggcgagaacagggtccgtgtgggtgtcgagcatatcccaaggcatctacaagtccagcttctgaagcagaacacttcaggtcatcaccagagtttgaagaatgaggtttcaagccccatatctgttctggagcggaagagtggagagctccacaaggtacaacttcacgctacctctgccatgcttcctgtcgctaccatggagaaggcaacgaaatgggagcctggggacataaagggaatggagtcacatgatgcgtatctgatagccagccagctaaatcttcttgatgaacagcaagacacagtgtatgttgctggcctccagatggagctccagcaagcacgtgataggataagtgagctggaaaccgagcggcggtcggctaggaagaagcttgatcacttgttcaagaaacttgcggaggagaaagcggcttggaggaacagagagcatgaaaaggtgcgtgctatcctcgaagatatgaaggcagaccttgaccacaagaagaaaaaccggaggcggctggagatgattaacatgaaactcgtcaacgagctgaaggaggccaagatgtcagcaaaacagctgttacaagagtatgagacagagaggaaggcgcgtgagctcaccgaggaggtatgcaacgagctagcaagagaggtgggggaagacaaagctgagattgaggccttgaaacgtgactccctgaggttgcgagaggaggtagacgaggaacggaagatgctccagatggctgaggtgtggcgtgaagaacgggtgcagatgaagctcgtcgatgcaaaacttactcttgacgccaaatacacacagctgagcagactgcaacaggatgtgaggcgtttattgccgcacgcagtactgcaaacggagacaaaacagtagtagaggaagcagagaacataattcaggcaatcaagtcagtcagagcccaaggcgctgaattcagatatgagccaccggcgtcatcggaagacatattttcc

SEQ ID NO: 278477 - DNA, 478 bp, Zea mays
cggacgcgtgggcggacgcgtgggcggtctaagaagaccgacgactcactcacaaccaattagctcaagatcgagctatagagagaaaagctaagatcgaaacatataccaatgggcaacagccttaggtgctgcctggcctgcgtcctcccctgcggcgcgctggacctgatcaggatcgtccacctcaacggccgcatcgaggagtacggccggccggtggccgccggcgagatcctggccgccaacccgaaccacgtcctcagcaagccgtgctcccagggcgtcgccgtgcggaggatcctcatcgtgtcgccggactccgagctagagcgcggcgagatatacttcctcatcccggcctagtcggtgccgccggagaagaagccgcagccgcagcgacagcagagagcgtcgtcctggccggctcgcacggcaaccaggtggtggtcaaaagaaatatcgtcgtcgcaccgga

SEQ ID NO: 278478 - DNA, 1886 bp, Zea mays
caacttggacgcttcaatctcgcatgctcatgaatggcacttccatgtcatctccttctgcctgtggtggggtagctcttcttgttagtggcatgaaggctgaaggcattccattaagcccttattctgtaagaaaagcaatagagaatacagccgcatctataagtaatgcacctgaggagaaactgaccacaggaaatgggcttttgcaagttgatagggcttttgaatatgcacagcaggctaagaagttgccacttgtttcttatagaatctcaatcaatcaagtgggaaagtcagttccaaaactaagaggaatatacctccgcgggggcaatgcatgctgccaaacaagtgagtggactgtgcaacttgacccaaaatttcatgagggcgcgagtaacttggagcaactggttccttttgaggagtgcctgcaactgcattctactgatacctctgtggttcaaattcctgagtatatactggtgacaaacaatggacgcagtttcaacattgttgtcaatcctgctaatatcagcagtggccttcactattttgaagtttatggcatagattacaaagcaccatggcgtgggcctattttccgtgtgccaattactgtaataaagcctattgctctattgggagagccaccactattgtcaatttcaaaccttcgttttcaatctggtcatattgaaaggaggttcataaatgtaccttttggagcttcatgggcggaagttactatgcgaacatcagcttttgatactcctagaagattctttttggacactgttcagatctgtccactgaagcgacctgttaaatgggaggctgttgttactttctcttctccatcttcaaagaatttcagttttcctgtagaaggtggcttaactttggagttgtccatagcccagttctggtctagtggaattgctagccatgaacctacctgtgttgattttgagattgtgctgcatggaatatccattgatcagaaagtaagtacccttgatggtgagtcacccttgcttatagttgctagatcacttctagcgtcagagaagcttgttcctgttggcaccctgaacaagatcaggataccttatcgacccgtggagtgtaatctttcttcacttcccactgaccgtgataaattgccctctggcaagcaaattattgccctgaccttaacttacaagttcaaattagaagacaatgctgaaataaagccccatgtgccactgcttaacaacagaatatatgacaataaatttgagtctcagttttatagaatatcagattcaaacaagcgtatttactcgtccggagacgtttaccctagttatgtcagactttccaaaggagaatacacgttgcaactgtacataaggcatgagaatgtgcaattcttagagaaactcaaggaactggttctgtttattgagaggaaactagacaaaaaggatttcgttccattgatgttctactcccaacctgatggtcctatagttggaagtggcaccttcaaatccactgttctagttccaggcgaacctgaagcattctatgtgggtcctccgtctagtgaaaaactcccaaagaatgctccacctggggctgttttggttgggtccataacctatggtactgtaagcacatttaacatgaaagatgaacaaaaccaccgtgctccagtatcttatagtatctcatataccattttgccatcaaaggtcagcagtatagactgtgccgtctccctattgtctacctttgttggtatgatgatccttgtgttagtttttgatcaccagttcaggatcaccatacgggtacacagtcctgatcctgatactttttgtacagcatatatt

SEQ ID NO: 278479 - DNA, 490 bp, Zea mays
ggctgcggttccatctaaagatctgatttcttccataaagatcttatattctaaaacaaaggatgttgagttcctttttgcaatcttggttcatctaccaaaagatgaggtcctgcctgtgttccccagtattgttaatcttccaatagacaagtttcaaagtgccatttcccgaatcttgcagggatcacctcggaatggcccttcacttgatccatcagaaattttaattgcaattcatgtaatagctcctgataaggaaggaataccactcaaaaaggttatggatgcatgctcttcttgctttgagcaaagaacaatatttacccagcaagttctggcaaaagcactaaatcaactggttgaacagattcctcttcctttgctattcatgaggactgtcatgcaagcaataggtgtttttcctgcattggtggattttgtgatggagatcatgtcacgccttgtgagcaagcacgtccttgattct

SEQ ID NO: 278480 - DNA, 680 bp, Zea mays
gaggctgcagtggaggacatgggccgcctgcttcatccaagctgcctggcaccggtactgcaggaagaagatcgaggattctttgcgtgagaaggagaagaggctgcagttcgcgattgccaacgacagctccacttcgctcagcttcatggcagcgctgtatgcttcgcggttcgctgggaatatgatacggatcctgaggagaaacgccacgcgcaaggccaggctgcaggaaagagtgcccgcgagactgctgcagaaaccggctgaacccaacttttccgcagaagagcagtagtatttcgcttctctgacttctcgttttgcagatacagatatgggaaattgtttgcgtgacttgcaagcccgaggatggcatgcccagattaaaaagaagaagaagaaaaaggggaatgaaatctcgatagaatgaccactgagtgatagtaatgtagtgattgatatacagtacattactgttcgtttaagaacgtccaagtggcgtttgtatgtgcttgtgtaatagcatagttagataggagtgatagtaatgtagtgatatacattcatccaccgaagctatgtgtgtatagggatcgaccatttccgtgcttacactcacgcactgtaaacgcagctggtgactgctaagtggcatccataagtgcgcgcaagagatc

SEQ ID NO: 278481 - DNA, 619 bp, Zea mays
  unsure (1)..(619): unsure at all n locations
accacactcaaactcgcatcctgtggagtttttacatagaagtcgtcacttattgcgccgtggtggatgggcaggggctcgtgtcgaacactcgaacagaaccaccgccattctagaggcatccagtattccagcccaatcctatctttgtattcctctccctcgtctcggaagtctggttcgccgaacagtcccgaacccccgattcactgccgctgccccgtctcgtcctcttcgccagcgaaaaccctagtctaggggacgggagcgcaatccacgcacggcaacatggacgccatccgcaagcagctcgaccagctcatgggggccaaccgcaacggcgatgtacgggaggtcagccgcaagtactatgatcgcgacgtctgccgcctctacctcgccggcctctgcccccacgacctcttccagcttaccaagatggacatgggcccgtgcccgaagctgcactcgctgcaactgcgcaaagagtatccttccaagtgaacagntactntatcttgtgtatntgnttgtgggggttagtttttgagtcaggcttaatgtgtaaaagccaattcaacgattcataacattacatttgatttttttgtctgcttaa

SEQ ID NO: 278482 - DNA, 479 bp, Zea mays
agcgccgccgcccgactccctcctccagcgccggcgcccaaatccctcctccagtgccgtcgccgactctccgcccgcgtccatcctccggttccagcttacattggtccatcctctcctctgccccctcctccatccttcatcagattcagacggtgaagcacccagtcccagttcaggttcaaacacaggacgctccgcacgagctggagatggaggtggaggtggccaaatattcacgggggcagggtgctgacctgaaggcgctgggggacaagaagttgaaagggcagctcagtgtaaaagagaagctatatggccaatctgcaaaagctgctgcaaatgccgaaaagtggcttatgcctaatgatggaggtattttagagcctggtcatttggagaaaacatatagattttcacaagaggatatattgacagaggtggatcttttgagttcaagaaaaccatttgatatgatc

SEQ ID NO: 278483 - DNA, 509 bp, Zea mays
gctgcatttgaccccaacgatatgttgagtgaagtgagtgctaaactttccaaagccttacaagcacatgttcaagatgccattttggatagccgagaggatggactcatgagtgataggaaaaactatcctttgagtatgcttgccattcatgctggtcccagattgcggcttcttctgatcacattccagcttctggaaatggaggtaagaaatatctctggaagttctgaacttgatggaatcaggtggttgcaagtatcgactaccttgatagatagtttaattcaaccagtatttatgaaatggattgaagaagaacaggccttggaaaatggacaaatcaacgaaaaacttatgaagacgataagcagcaaactaaaggagggcaataagatcttgaggaggtttaacagatttgggaaatctgaactctatttggatatgctctttttcctaagatttggttctgcaaggtgtgacagttattttaatgtcaaatttcttgc

SEQ ID NO: 278484 - DNA, 694 bp, Zea mays
aagaattcctggtcctgaagggggaggctgctagtgcggccgtccacgggaaggaaggaggagatgacccggtcttgcaggccatcgcagcgagcttgctgcagaggaagtggaaagagttcaagcagtccgatgaatcctggaaagaagccccgaggaacttcgttaacctgggaggcatcgacgaggacatcagcgccatggtgggtatcctgaagcggggcttgggtgttggatgcatccactcatggctgtcgagcaatcagatgcagcgcgcgacagctacaggcggcttgccaggggctcacatggttgcaacaggccaattccgcacgccagcgatgaacgcaatggtccaggaggcccataggcatttggccagggaagcatctgcccatgatgcggggacgtcaattgtctgcaagcgcgccgtcgagcttctagatgggataaacaagcgattcgatctctggtgcaagctggaccaggaattgccgcgcacgaaccaaccgtcaccgcaccaggaagaaggccatgagtcccgtgacctcaccgccgtcctacggggggacatcaaccgagcgaggcagcatgacatatacctggctgccgatcacgcgatcaagcaatggcgcacttcctcacatccgtggagaagacgcatggccacgggcatatatgatgaggccactgg

SEQ ID NO: 278485 - DNA, 385 bp, Zea mays
  unsure (1)..(385): unsure at all n locations
ggggacgactacgacaaagatcagctgaacaggatggtcgcggtcgcgtcccgctgcatcatgcgaccggcgatgtggcggccttcgttcgcccaggttctgcatttcctgtctactactgatgagtgtctgaacgagcccgagaaatggaacattcccgacgacgaggtggacgacatggatgattgtacactgttctctgaatccttttccatgtgattgtagcctcatttttttcccatttccttttagtgtgtgctatgttggcatgccgttcttggcatgggatggaggcattgagctatgttttctggtttttttgtagtcttagatgactggtatttaatcatgcgatatatatatgacggngattttgggatgtaaa

SEQ ID NO: 278486 - DNA, 799 bp, Zea mays
tgctcttctagctgtgatatcaaggagcaatgttgtgacaagccatcccccttggttaaggactcgtcacaaatcaatgtctgtgatactgcactttgtcatccaaaagatatcttaagccgattaacacttcctcatcaacaagatctggactctcttttaacacctggaagtgagagcacagctgcagttaagccagttcgtggagctagtttaccaccatttccttggtcacactcacaggctgggggctgtcgacaaagtgttgactgtggtaaacatgggtcaagtagaagttactcccagtggcaatgggtgcgggttggatccaacctcacttctctagattatgaagatacgtctgtccatagaattgatcatctccttcaagagatggatgcagcaaaattatgtagaatggattcatgtgatgggcaatataatttgtgtggcacggaatcaacatctggatcacttgcacaaaacattcaatccagaaaaaatgggggtgagcatggttctcagcaactgcaaaccctggatcgtgttgactctttagatggcttccagaagcatgacagtgaacattctcttttaaaaacttctcaagtatcgccaaagatacagcatgccgctgaaatcttatgtgatatgagaagaagcattgaatcgttgagtggccagggatacagcaatggggtgattaagtggccaaaatcaccatccgaaaaggtgatgaaagcacggaagccctcatcccagtttggtataactgagagctcatcaggttctcgtaaca

SEQ ID NO: 278487 - DNA, 406 bp, Zea mays
tgctgtgatatcaaagaacaatgtggtgacaagccacccctcttggttaaggacccatcacaaattaatctctgtgatagtgcactttgtcatccaaaagatatcttaagccgtttaactcttcctcatcgacaagatctagactctcttttagcacccggaagggagagcacagctgcagttaagccttatatgccttccatgacagttcatggagctagtttgccaccatttccttggtcacattcacaggctgggggctgtcgacaaggtgttgactgtggtaaacatggatcaagtaggagtaactcccagtggcaatgggtgcgggttggctccaacctcacttctctagatcatgaagacacgtctgtccatagaattgatgatctccttcaagagatgg

SEQ ID NO: 278488 - DNA, 439 bp, Zea mays
tcggccaagggcaaccttgtcacctacaaggttcctaccatggtcgcctgcacgctcaacgcggtggccattctcctcaaggaggggctccagtgggactggttcatcaatctcagtgcgtcagattatccgctcatgacacaagatgacatacttcatgtcttctcttctttgccaagaaatcttaattttatagagcactttcggttatctggatggaaagttaatataagggcaaaaccaattgttctggacccagggctctatctgtccaagaaatttgatcttactatgactactgagcggagagaattgccaacatctttcaaattatatactggttctgcttggataatgcttacgaagtccttccttgagtactgtatatggggctgggataatctcccacggaaccttctgatgtactatgtcaacttca

SEQ ID NO: 278489 - DNA, 284 bp, Zea mays
ggctttggaggaggaatcggccacgtacattggtggaggctatggaaagggaggtgggcgtggcagacgcatcggccatggcatgggccgtggctaccgcaaacgtggagggatcgaccatggcatcagcggtggctatggaaaacgccgcggccttggtggtggatatggcaaaggtggcggactccgaggcgacattggccatggcatgggtggacgccatggcaaaggtggtcgaattgggcatgacacgggtggaagattcggcagaggccgcagtcgtc

SEQ ID NO: 278490 - DNA, 411 bp, Zea mays
cccacgcgtccgcggacgcgtgggctgcatatcaggtggttcctctataggatacaccatgtgtggagtctgcaacaaggttctagtctcaacttgcacatatggtggctcttgcgagttgtgacatgatcgtctgacatcaaagcgtgaaagacgttaataaatctgttcaggagaagcagtcatctagcgtggcaagcttggaattgacaatgagtgatgtggacactggtagatctagtagcagggtcaacggatgatttcttttaccaagtatgcttgcattcgtgaggcgatcctttgctcttcttacctgtttttagtagacatagtagtagacatcgtaatcttcccatgagaaagacgagcttcttgagatctagatccactcaatgagttgtggcctgtggg

SEQ ID NO: 278491 - DNA, 614 bp, Zea mays
gagggaaaatggcatccaaggtcatatagcgctgatgatgtcaccgtatgatctcttgaagaacattacagcagttgatgagaacttccatgtaacaagtgatgacaagaaacttgtgatgcagaagccgtgtttgtggaatggatcaaagagaccgtgctatcttttcgctaggaagtttaatcctgaagcacttgacaacctactgaagcaatttaccagttacacatctgtttgagtcctaccggattctttgccttgtgctgtcaaatccgacaagcttttttctcttcctgtttatatgtaaattgtgaagtccgtacttattaggatctgggcctgaagataccggtacaactgcaacagctgtgatggcttggagctgagtcatgggtaaaacggccacagcgatgtttatagaatggcactgccctcatagtaatttatcgtgttcaatgtatgtctccatagtcttccacccaactcccaactcattagttctttattcttggagaacagtttttgtcagagtgttatactgtcatgatatgatccattctttgtagacacagagattacaacagatgtatcacaaatgcagtcttaattttgtc

SEQ ID NO: 278492 - DNA, 574 bp, Zea mays
ccaaagcgcattcggctgttgcctgcaggcagcgccgcgcaggcgtgggagtggccgagtgggagtgggagtgaaaaagaggaacgggccaagagaagcaagcgagaagaaggcagtgctgcggcggcgttccgtaagatggggaagtacatgcgcaagcgcaggggggccgcgggcgagggggtggccgcagtcgaggtctcgcaggtcgtcggcgtccggacgaggtccaggtccgcggcggcgaccggcggcggtgtcgcgaaggtcgctccgccgaggaggaagaaggcgctgctgcccgccgcgaacgagacggcgtcgggggagcctggtgccgtgggcgctggtggtggggacggcggaagctgctgctacatccacctgcggagccgcatgctgttcatggcagcacctcagcagcaaccgtcggcggctccgacgcccgcggaggctgctggtgcggcacagcatggcggtgtggtggcgctcgcggctggcctctcgcgttgctccagcacggcgtcgtcggtggacgtcgggggccagcagcccgcgagcgggagccacgcct

SEQ ID NO: 278493 - DNA, 586 bp, Zea mays
  unsure (1)..(586): unsure at all n locations
tcgcggacgcgtggggtggcaaatgcagtttcagccagtttttccgttcatagcagcacagtgagaggattgagatggcttggcaactcacgtcttgtttcattcacatataatcaggttaatgantaaactggtggatacaataataaacttgttattacatgcttaagaagtgggctaaatcgctcattccgtgtgctccaaaagcctgaacgtgcaccgattagagcattgagggcttcttcatctggacggtaccttctaattctgtttcgcgatgctcctgttgaagtgtgggctatgacaaagaaccccatgatggtccttggcgctttcttttacagtattagaatggacactgccagctgcacctccgccaggtcaaaatgcatcatctaaacagtcttcaacctccaaggagcgatcagcagaggcttctggtgcagaagttctgatgaaacatgtgaaagtatcgcttgtgcattagtcaatggcgctctttgtgtgtttgaagtgcatgggcggcgaatacgagattttaggccaaagtggtcctcgtcatcatttgcatcttcagatggcttgg

SEQ ID NO: 278494 - DNA, 438 bp, Zea mays
ttctgttctcctccccagccgccagaatagtatccagccgccaggaagcatggccgacggcgcccttctcatcctttctctgtttctgttcttgcactgccaggccgtgccctttcccactggtgatggcgagtagctcaactggcccttaccgccaacgagtgcgtccccatgtgagggtgcgcggtcgtcggtcggtggccggtgagagctcggctagcccaaaataaaacaaaaatatgtcggccatcgccttttgaaccttgcccgacgaccaaaaccggccgcctctcctctctgttcatgctctttctaatctctgtttctaagttccagaccgctcacccaagaaccggtcgccacgagcttgggccgaccgagctatccttttctccctgctccttttggccgttcgccccttctccttctttgattctg

SEQ ID NO: 278495 - DNA, 750 bp, Zea mays
cagatcctttggtcgatggaactaggtataaactgcaagaaatacatggcatagggaactccatggaaggtgatgctaatgcaaatgatccatagaaagaatgtgttatttgcctctcggaaccaagggggatattattgtcctcccatgtaggtatatgtatgtgcagtgagtgcgccaaggtcctaaggtaccaaaccacttagtgcccctgcagccccatctacaggcagcctgttgagagtcgcctcgagatcaaagtgaacaacaaatctgaagattagtagctgacgccctaatcaccaccgctcccagagctgcggtgtagtcgtgatcaaattcaggtctgatgtattatatggctctaatttgcgagacttcaggccttccctcaaggtttgttctctcatttgagcaacggggaatgtaactgatactttttcctttagcatatgtaagcttctagcatcgcatggctttgccaacctctgttgtatatgcatatctggaggtcagagaccaagatgccaaggagagtgtgtatcatatacacatcattcatgcatgtgccatggctacctgaagaagcgtggtgaggaggattcctcatgccaggttgacttcctcttgggaaaaagggggagacaaggtggtctcttaaatttgtaaaaaataactatttcaccttgattccataccttcgctattacagcctgaaaattcaatgagtatttcacttgtgtgcgagtt

SEQ ID NO: 278496 - DNA, 577 bp, Zea mays
ttccctgtggaaccactcgtccgtttggagaacggctatttaactgacgatggtgttttctgttctggtttaagcaactcgtgaagcggcaagttctttggtggcaatcaactaagccacagcacgccaaagaaaccccaagagaagttcgatgctggtgttcctgagacgtcacgctcttattctgctgcagtccctgctggtacaagtagcaagcggcatgctactaggaagtggaagcgctcgctcagtgaccccttccgttcacggccgcacagtgctccggaattggtgtcaggatgcaagggatcaccgcccgtgcctgtggctccagaggagaggtagccgatgagctacagaagacgtatcgtgttatgttttttagcataaattgcaaatgaattatgaatattgttatctgaggcatcatggatgtgaaaaaagtactatgcaactacctttttaaggtgttgattttgtaagaggatgtttggtgaaaggaccaagatgtccataggaattgaattaggctaatgtaatttctccaataattaaataaaatcccccagttccctcg

SEQ ID NO: 278497 - DNA, 922 bp, Zea mays
gttagatattgatctggctatcactgatccctgtcccatcgctccggtcgacccggtgcaggaagagaacgagagcgatgatgatttcaacgctcgtgtgcgcaatcatgcaccaataaagatgaagtatgacctttacaaggtaaaatgggatcaatcgaaccgcaagtgtctgatggtgattaagagctctattatggatacaatcaggggagcattcccagcatgtaccaccgctacagagtatcttagtaaggtggagagtcactctactatctcttcaaaggcttatgcatgcacaataattgaaaggctacttaccgataaatacactggcggtggagtaagagagcatatattgaagatggccagcatggcttccaagcttaaacctatggaaatggcgctcccagatgagtttctggtctatttgatttttgcctctctgcctaaagaatttgaagcttttgagattaattataactcacaaccagacaattggggcattgagaaactgattgccatgtgtgtgcaagaagaggggagaattaaggcttcacgtggtgattctatcaactatgttgggatgtataaggcacatggcaaggctccacagaatgatcaccatctgaaaaacaaagaggtggacatgaatgcttgctactggtgcgaaaagtcagggcatcatcagaaggattgtccatccttcctgaagcacttgatcaataaagagattccatacgaggaggacccttcaaagaggagaaagatgcattaaagtcgtcaatggtgttgataatgaagttgaagtgatagaacttccattattattgaataatagcttcattcttcacttgaataatgttctctatgtatcatctttcctgtcatgcgaatttaagctctctaatttattagaaat

SEQ ID NO: 278498 - DNA, 813 bp, Zea mays
cccacgcgttttcggacgcgtgggtgttgctgaagctgggggcattttggttgtgcaagaattgcttctttcaccaaatgtggatatttcaggacaggctgcccttctaatgaagtacctattttcaaatcatacgctgcaagaatacgtgtcgaatgagcttattcgatctcttactgctgccttagagagagagctgctctctacgtcaactatcaatgaagttattctgaagaccatatatgtgatattcagcaacttcaaaaaggttcggttttctgaggccgcaaccttgtgcataccacacctggtttgtgctttgaaggatggaaatgaggctgcccaagagagcgtgcttgacaccctttgcttgcttaaagaatcttggccgcaaatgaatgaagacatcgctaaagcccagtccctgatttcagctgaagccatacctgtactacaaatgcttatgaagacatgtcctcccagttttcacgagagagccgatagtttgcttcattgcttgcctggttgcttgacagtgaccatcattcgtgggaataatctgaaacagacaatggggggtacaaatgcattttgttgcctgcaaataggaaatggtcctccaaggcaaactaaggtggtaaaccacagcatgtgcccagcttggaacgagggtttcacttggttatttgacgtggcccctaaagggcagaagctctacatcatatgcaaaagcaaaaatacgtttggaaagtcaacccttggaagagtgaccatccagatcgacaaggttgtcaccgagggtgtatacagcgg

SEQ ID NO: 278499 - DNA, 348 bp, Zea mays
cggacgcgtgggcggacgcgtgggcggacgcgtggccgggcgcgcgggcgcgcccgctcatcgccacctcggcgtggcgcgtcgccgctccgtgacgtgcccaccgtccggcacagcacagcacagcacagcacagtggaagctaagacgtcagtgaacgctgctgaactgcagatagcgactgtggggccacaacggtcctcgccggagcgacgagatggacacttggagtccgaccggatcggcctgtgttcgttcctgtttccggtccccctctctctttcccgttgttcctttaacccgtcaactatggtagccctgctacgtttaaatgtgtattactaatac

SEQ ID NO: 278500 - DNA, 469 bp, Zea mays
gaaaaactcagccgcgtccggccacgcgtccgggctgctcgacgtccgtgagggcgtgccccctggccccgtcccttgtcgcctgcccgccggtgcccgcacaggctgccagtgccatactgccatccctccgtccggccgtctgcccaggctgcctgcccggcgccctggcctcccggtcgctggctctctgcccaggcgccaggccgcaggtcccaccgccccagaccacccgcgaaccagtccgctgcaggctgcaggccaccgtccctccagttcgccggtcagattattaaccattcagataccccagctccgcctagacgcgaatcctccgccactatggtggcagcggtgtccctgccgagccaagcacaggccgtgcttcggagccggctctgcgacccggtcttcatccactcccgcctcagtagctccctggacactaattacagcaagctgaagtacc

SEQ ID NO: 278501 - DNA, 287 bp, Zea mays
  unsure (1)..(287): unsure at all n locations
tgcagatgcagatgccgccgncgcagcacgtggtgctcgcggcggcgagccccgactacctgttcggnctcgacaatggcttcgtccatccccccgcggtgaaggtcaaggacccagcgggcgatcctcccgcggtcagggagagcgtgcccgtggagttaccagccaaaaacgaggaccgccatcccattcccaaccccgcgggcggcaacgtggctgtctcccctgcggagtaccagcgccagatcccggggctcgagaagctgcaggtcgccgacaacgccgcc

SEQ ID NO: 278502 - DNA, 512 bp, Zea mays
gccacgcgtgcgtccacgcgttttggttgcagtgtgtaaatgatgctgataatgatgtaactagaacaggacctcacaagaaagaaaaagaaaacacctagaagcagtaataccaaccatggtcataggagaacataagcgccggcatgctgacaagtaaaacattgatcaaccatggtcattactttttttataacgatcttggaagcttgaccatttacctttcacttatgcgtccgctgtctggtatagacactatcatccgtcatcgccgaaccttgttgtgtatccacgaactagaatacacccaagaaatgtgtttctgccccccatcgtgttgggagagttgtgtttttcatcagagtagggaccgcgagcttaaatctgtgggtgtcatttcataggttatttgttgtagcattgtgcttgagcttgtgtaattcatgattattttgtctcgcgtttgtggatcacttcagccactacattattctacagcttccactcggtgt

SEQ ID NO: 278503 - DNA, 812 bp, Zea mays
cagaagtgcattctcattagtgcgaatttttttgggtagactgtagagtaacttgagagcccgtttacaattgtcggcagaaaattaaatttcaagcaataaatgtctgtctgcctgagttacaactaaggttttggttgcaatggaatggatggacatggttgggaagcctaagagaaactccaaaaatatttgctatcaggtttaaaacctgagatctggtgttatatatgcatctgcagggcataccttgcggccttcaacttcaaaattgttatccttctggccagtttgtaaatctggtggctggttctaatttcactcccatgttttgtttccaggatttgagaaggacatgttcaagctgaagaacgagaagcaagcaatggagcaagaagcctatctttggtctgtctctgatatgtgatcccaactgctgctccttacgagaggaatacagttgtgtaaaggaagaaccaatggaagacctttcaaacgatttttttttcactcttcttattacacaaagtgacatcactggtgatgctgcgccggagtagcctgaatattttccaggaaagcattttcaggaatgcagttcaatgaagctgcattacgtatttgttggaaatctgttactgctgtaccatttgtcatccttcacgttttgtaatatagatgaacgcactgcaaggttttggaacagttcaaaagatgagattttatattcactttctggtttccatgtgtataacttgtcttagcagctgtcgcggtttaatttaaattaaatgatggtggatttgagagcc

SEQ ID NO: 278504 - DNA, 463 bp, Zea mays
cccacgcgtccggctgcgggccagctgccctgcgcaggccggcgccggcgacggcgcgctcgagccgctcgacggctccacgccggacgctttcgacaacgcctacttcggcgacctgctctcccagcgcggcctgctccactccgaccaggcgctcttcggcggcggcggcggcggcggcggcggcgcgacggacggcctggtcagcgcctacgcgtccaacgccggccagtggggggccgacttcgcggcggccatggtcaagatgggcagcatcagcccgctccccggcacggacggcgagatcagggtcaactgccggagagtgaattaattatttattacagccccgttgattgcatttgctctgggggtagtggactagcgtgcatattttgcaaagaggcagagaagaattgaaatggagcctaagctcatatgtatacaaatgttgtttattatt

SEQ ID NO: 278505 - DNA, 354 bp, Zea mays
cccacgcgtccggaaccagcgccgttggtgccgacggcaagaagaaaaacaagatggggatgggaacggggctggcagtcggcgcggcggccggcgtgctcggaggactggcgctggccggtggggcgagctacctggaggacaagttcgaggagcgcgtgtcggagagggtggaggagaacctggagagggaagattcgtacgggggcggctacgacaactatggcggcgacgacgactactgatcggatctgatcctcagctcccaatcatttgctggcttgtgggcttggcttctaacctcaaccttcgttctttccgggtgtccaaattaataattacttggtggaaccg

SEQ ID NO: 278506 - DNA, 287 bp, Zea mays
tcggcgcgacaggatactgagcatgtctagggttgtgcctgcaggaggaggatgtggattcgttggaagaactgttcgtgaaggaaggcatcatcttcgatgccagttccgtcgtggacatcgactcggtgttccgcgacactgcatgcgaggagatctcgttgctgatgcaagccgtcgaggagctcaaagaaactgtggaagaggcgttgcagctcacggacgagaacgaaaagctttgacgcagcctccaagtcgcacaggagatgaccactcatgcccagctc

SEQ ID NO: 278507 - DNA, 442 bp, Zea mays
tactcgagcgatcggctcgacggctcgagagccaatagcaccagttgatttattgaccaaatctttttaggacaccatgcttgtggtcacaggcaattttgatgcaaattgcagtgatgaaaagagttggtagtggttcaacacttctacgaactaaagaggtacactggagcgaagcgtgtcatgctcatgccatatctgtggcctcgtttctaagctattggaaaccaagtcggtgaccactggacgtcttgcaatagcttaacatatacgcctttattagccattttttgttacacggctttttgtattcttgagacccttaggcaaaatctctggtagtggaatcaggcttagccttttacatttcttgcacaaatgctgccccattgatggaatatgtaagctcccccatggaaatgtgactccagttttatggttt

SEQ ID NO: 278508 - DNA, 926 bp, Zea mays
ctcacgacgagtcgctaccgctcaagcgtaccggctacctcgccgtcgcactcttcctcgacgagcgccacgacctcgtcatcctcgtggtcaacaccatccagaaggacctcaggtcggacaactacctcgtcgtctgcgcagcgctcaccgccgcgtgccgccttattggtgaggaggccatccccgccgtgctgccccaggtcgtagatctgctcgtgcaccccaaggaggctgtgaggaagaaggccgtcatggcattacaccggttctaccagcgatcctcctcctccgtttcccacctcgtctccaacttccgcaagaggctatgtgataatgatccaggggtaatgggtgcaactctttgccccctctatgacctgattttggaggaaccaaattcgtacaaggatttggttgttagttttgttaacatcctcaaacaagttgcagagaggagactaccgacttcctatgattaccaccaaatgcccgcaccgtttattcagataaaactattgaagatacttgctgtacttggtagtggcgataaacaagcaagtgggcatatgtacactgtattgggtgacatattcaggaaaggtgacactgcaagcaacattggcaatgctatactgtatgaatgcatatgctgtatttcattcattttcccaaaccctaagatgctagaggctgcagctgaaacaacatcaaagtttctgaagagtgatagtcataatcttaagtacatgggtattgatgctcttggccggctaataaaaataaacccagatattgcagaagagcaccagctagctgtcattgattgcctagaggatccagatgacactttgaagcgcaagacctttgagcttctttataagatgacaaaatcaacaaatgttgaagtgattgttgataggatg

SEQ ID NO: 278509 - DNA, 383 bp, Zea mays
cgcaagtacagatacgtcatgcatatcgcaaaactgtacgcgccttactccttgttcaaaggatgcttcgatgactccaacacggaaaggctgagggcggcgatggcgaacaggagcagcggatatgacttcggtttcgatcccttgtgcgtagactgggacgactatttctacagggttcacatccccggtgttgtcaagtacctgtgtggttactaggttaatacatatttaagatccggagagagccaaatgtatcttcgcatgttttaatacacaaatatgtcgctgtagtttgcagattattaatttccctagcattcttgttcagtggtacaggtttctaagaatggtacttgttttcctttaaaaaataacaaaaa

SEQ ID NO: 278510 - DNA, 880 bp, Zea mays
ccgccacttcgtcgtcgtcgtcgcacggattggcattggctgccccccggccctgttcctcgtcctcctcatcaattcccgtctctcagtcctcccaataatggtggcgtggtgagaaatccttccgtccggccgtcgtcttagaagatgaactgttcctcttgctgcgccgctgccactccatcttctccggcgcttctcgccaggccgcgggggggtttagctgctagctgctccacgacgacagcaaatcagaaggtgctgttcctgggctcaaaacagtttccacggatcacgtatagccgtgcaccgtcacggttgtcgcggagagaggtaatagcttttgccgggcaacaaccttgggacatcggcagatttgtcaagacgctgtatttcttcaacgggcctccaaaccttctcaagattgtagaatctatcatcagcagtttcactggacctgcttctagtgaagcgccaaagaaaatggaaacatcagatgtggtgctggttactggtgccaccggtggtgttgggcgacgggtggtggacgtcctgcagaagaagggagtacctgttcgagtattggctagaaatgtagacaaggcaaggagcatgttggggccggatgtacctctgatcataggagatgttacgaaggaagatacacttgatcctaagctattcaaagggataaaaaaagtagtcaatgcagtctctgtcatagtggggccaaaggaaggtgatacgccagacaggcagaagttcaaacaaggcatcaaatttttcgaacctgagatcaagggaccttcacctgaaatggttgagtacctcggaatgcaaaacttgattaatgccataaagagtagtgttggactgagtg

SEQ ID NO: 278511 - DNA, 392 bp, Zea mays
cctgtctccccctctcctccgccactaaccaaggaggcgaagacgataaccaccgacgtgccttcctccccacatgccctagcgatccgttctcatttgcagacccaatccaagcccagagcaatcaccaagcctggcagattagatttccaccctcacatggaggaaaaatccaaccttcgcatgtgacctctatttaaatccccgcaagaatcgatcaatcaatccaaaagggtgcaggaaaacagagcaatcccgttgcttagcgtgttcgccttgccgttggcgtctcttctccgttccttcgcacgcgtaggcccataaacctccgctaaagctcctttgtcgcgcccatttcgtcagccatttcccagattccccataagcgaagg

SEQ ID NO: 278512 - DNA, 419 bp, Zea mays
atataataataagctaatagcagcgccacgcaccgacaccaatacgccatgggttccatcatggagcaacgctgcaacaacgatccgcaggcgctgctcgacgctcagctcgagctctggcacagcacgttcgcgttcatcaagtccatggcgttcaagtcggcgctggagctcggcatcgccgacgccatccactgccacggcggcaccgccacgctcacccagatagccaccaaggccgcgctccacccgtccaagacaccgtgcctgcgcaggctcatgcgcgcgctcacagtcgccggcatcttcagcgtcgccaagaactcgtccgacgatgacagcgatcagcacgtctacggcctcactccggcctcccgacttcttgtcggctcgtcacagaacttggctccaacactgag

SEQ ID NO: 278513 - DNA, 557 bp, Zea mays
ggaaaaaagagaggaagaaacccagacggaaaagaaagagttccttgtgatcttttttctttccgcctgcttccatgcatgtttgcctgacaacatttctgtacggtgtcacgcgcacgctgacgcagggaccttctggacgagtacacggtggcggtgcggcggatggcgtgcgcggtgctggagctgatggcggaggggctgggcatcgccggcggcgccggggacgcggtgctggcgcggctggtggcgcgcgcggacagcgactgcatgctgcgggtgaaccactacccgccgcggccggcgctcaaccccagcctcacggggttcggcgagcacaccgacccgcagatcatctcggtgctccgcgccaacggcacctccggccgggagatcgcgctgcggtgacggcgcctgggcctccgtcccgcccgacggggacgccttcttcgtcaacgtcagcgacaccctgcaggtgttgacaaacgggaggttcatgagcgtgaggcacagggtggtggggaacagcgagaagttccaggtgttcatggtcttct

SEQ ID NO: 278514 - DNA, 432 bp, Zea mays
ccgttcccctcacgccggcaccggaactgtatgcattgcgaagctgctctcggcgtcgcccaagtcctccaggaagcgtctctacggcgaccttgtcgcagccgagaagcccaagtgggatccccgagatgccgcgcagattagggctgtcaaggaggcgctgcacgtggcaacagtgccatcgtctgaattggtttgccgggataacgagctcaggcgtgtccttgagttctgcaaggtgtgcgtccaacaggagaaggctgggtgtctctatgtctgcgggtgccctggcacagggaagacattatctattatacaaggtcatggatagcttggtgtgttgggcagatgagatgggaatggagacacctgatgccttagcaatcaattgtacaaacctagcaaacacctcagagatttttggcaagatac

SEQ ID NO: 278515 - DNA, 426 bp, Zea mays
tcgcctcccgcgaaaggctcgcagcaaaaccgcgccggcgatcgccgtcaccagtccagcgatcctccgatcgactacgtactcccacccactccggcagcagcgaggcctctctgtctgtgcgcggcgtggctgtcgtcgatctctgcctggcgggcggccggcatggggaggtccccgtgctgcgagcaggcgcacaccaacaagggcgcgtggaccaaggaggaggaccagcgcctcgtcgcctacatcaaggcccacggcgagggctgctggagatcgctaccaaaagccgcaggtctgctgcgctgcgggaagagctgccggctgcggtggatcaactacctgcgcccggacctcaagcgcggcaacttcaccgaggaggaggatgacctcatcatcaagttccacgagctcttcggcaac

SEQ ID NO: 278516 - DNA, 361 bp, Zea mays
acaggcgggagcgcggacggtggcggaccgtggtgggtttgtgaggcgatggctcccttccccactgcttcctccccccactgccggtcgctgtgcaagagctgccacgagacagcagattccccatcatccaaagcgaggtgagattcttgctgaaagatcggacggagggagtagaatcgcggggggcgtggctgtggttgccagtcgccatgccatgatgtgtgtagggtccagccaccggagaccggagttgctgatgacgacttggcgatgctgtggtttccaggctgtaggggaggagaggaagcaggaatagcctaacaggggtatagatctcaggaagctccatgcgggtgag

SEQ ID NO: 278517 - DNA, 683 bp, Zea mays
cacaaacaacgctcccagccacatgtatcagaaggatgctgctgtcacatccacagaggacctgctgaagcccagctcaacatccaagtcgccagaccccaggcacgacgcccaagctagcactcaacctgcaggtacgggggtctccatgaagccggaaccggttattggagtctcaacaatcaagaaagaggactcctccttgacagaaggtgaggttgatggcggcacggaagagtgcctggagaagctgggcgcgatcaaagccaggctcaaatacctcatgcagggcacgcggctggaacatgagcgcagcgccaccttccgtgggtagtcaggcagatgaagctgcatcaaaggtgcaacttcacgcaggggtttagggtttagggccatctaacgcctgttgtggttgctgaattttgtgtcctgtggttacaggtattattgtcctgaataatgacgctgtgaataagtggtttgtttttttgagtgcggcaatttgtaggagctaagaggaatgtgttgctgagttaagttatgaattagaccgtgtccagcagttcactcatatggtcatcctaaacaccgtgcagtagagtttgaatattagtatgaggatggataaactggtgcagatagccttatgttgtgaatgaatatgttgctgagtaatcttttcc

SEQ ID NO: 278518 - DNA, 523 bp, Zea mays
tgtaacttcagcaacagccccgccagtctttgcaacattggcagactaggttctgtacggacaccatcaccaccaacagaaggcccccaggcaaatggccctgcactcagatcaacaaaagcaaacctctctctgcctatccatatatctgtaagacattgtgcatggagacccttcaaatcactggacttaagagcactttgaacaatgtcatgcacctcatcctttgtaccatgtaatatctgaacagccttttcataaacaatgtcctctttactcttcccttccttcagcagctcaaacttgcttaatgcttccttgcatttctttgaccaatcccccatatccatactgtcagttcgggtccatgaaaatgatgatagaggatgactttcatataacggccttctattgactcccttctcgatatcaaggaagagtttgttgtcacttttagactggagtatccccgcttgcagggtcttgttccccctgagcaaattgatccgtacgcgtggacgat

SEQ ID NO: 278519 - DNA, 455 bp, Zea mays
catggaccgctcgttggaggttgcaggcagtgagaacgacaggctggcgttcttgcagaggaggtggtgactggtcaggtccgtccgagcagcaagctccattggaaatgccaacaagatgacgtacgaggcgctttcagggagtaattgagaataagaacgttttcatgtgttcctgcgagtgttctcgtcgtttttctttctctttttcttgtttttgcaatgtgatcaatcatgcgactagtgtttcttttctttttatcagtggccaacaagtgtatgacggaaatttgattcatactgcacttggcatgtaaatccttgctcttattaacgctgttcttggattgtgtcaaaaaaaaaacaaaaaaaaaaaaaaaaaaaaaactaaaaaaaaaacaaaattaaataaataacaatctcaaaacaaattttaaaaaaaaaaaaagggcggc

SEQ ID NO: 278520 - DNA, 429 bp, Zea mays
cggacgcgtgggaagcaaactataagtttgttgtattggatactgggaattaccagattgattcaatggatcctgataagatgcttcagtgggaagatattatctgtgtaagatactatagcccttctgaggtacaatgccctatttgcttggaaagaccattgtgcccacagatcacatcatgcggacacatatattgctttccatgcattttacgttatctaatgatgggcaaagatgattatagaggtgagtgttggaagaagtgtcctctgtgtttcatgatgatatcatcaaaggatttgtatacaatacaaattactcaagtccagaatgtccgtgctggtgacgttgtcacatatacactgtagaaggtgtcaagaaattcgctcactccttccatcaaaagctcctccagtgaaagtgcta

SEQ ID NO: 278521 - DNA, 349 bp, Zea mays
cccacgcgtccgtccacgcgtacgcccacgcgtccggtttccctccgcttgccgagtgccgcgcgggagcacgcgcccatggcgacgcctgcgacggcgtcgacggcgtacgcgcttcccaagtctggggcggtatacaagggctacaactttgcatccacttgggaacagagcgcgccgctcacggagcagcagaaggccgcgatcgccgcgctctcccacgccgtggctgcacggccattcccgcccaacctggaatcaagttcagggaaggatgaaggcttggctgttcccgagaaagaatctgctttggaagaggccggtgcaatagatgcagtcttggtgaata

SEQ ID NO: 278522 - DNA, 546 bp, Zea mays
cccacgcgtccgcccacgcgtccgcccactcgtccgcggacgcgtggtcttcactctcctggtttattcctccgtgccgatctcgtcttctccggcgggaccatggcgccgtcctcctcccgattcgacgatccggcggcggtgaggcgccccccgcagcatgaacggaagccgccgtatatgttgcttctcccgctcgtctacgcccccgtcctccccctcatcaggatcgggctgcggcacaatcccgtggtgagggaccgcctcttctacggcgtcctcgccggcgcattcgcccacggcgcctacctcatatcggaactgtatgatgtggagagcaaatgatggacatccctcgaaggatgaggggataagttttcacgtagcaaaatttgattccatcgggattccagattgttggatgagagctgacatggcaattcagactaactagtgtgctatgtacccatatgttttctttggtcttgctattatgtttggcaaaaggatggaatggttgagcaaataaagtaattccagattgag

SEQ ID NO: 278523 - DNA, 475 bp, Zea mays
ggttctcccagcagaattgttaacgttaattcaatcatgcacagtgtaggttttgttgatgctgaagatttgaacttgagaaaacataaatatagaagttggttggcgtattcaaatagcaagttggcacaggtaaaatttagtagcatgcttcataagagaattcctgcagaagctggcatcagcataatttgtgcttctcctggaattgtcgacacgaatgttacaagagaccttcctaagattgttgtagctgcataccgttttcttccctacttcatattcgatggtcaagaaggttctaggagtgcactgtttgcagcatgtgacccccaagttccagagtactgtgagatgctcaagtcggaagactggccagtctgtgcttgcattaactacgactgtaatccgatgaacgcgtctgaagaagcgcacagccttgaaacctcgcagctggtctgggagaagcgctcga

SEQ ID NO: 278524 - DNA, 431 bp, Zea mays
tgtcaggccacgcgactgcttttattgcaattgaggactgtggcataaaatctagagctcagagattgttgagtagcattaccaattcacttgagacggtactgaaatgcaacgtggaagtcaagattggtccactagcagaattgatggacggagaagtaacattagaggctggtcctaatgttaggaagatacgagtctgacgtcttgagttgctcatcaaacagtgaccgactaaagggagctttagattcaaggagaagctctggtcatcctgatgaagtaaagaaagaactggagacgtacaaagaagttcccatccagactacaaaagaaccaacaattgacgaccagcgactggaaagtgcatggcttcaggttactgagaagcacacaccttgtctggtggatcaggcactacacgatcaaca

SEQ ID NO: 278525 - DNA, 1135 bp, Zea mays
tccacgcgtccgcccacgcgtccgcccacgcgtccgacacaatacaatgatacagataataaaccataaacactgctctaatattgacaggggaaatccagagggcatgaaaagaattacacagcgtctcatcacataaaagtacagcagcttcagttattgatcagtggttgctactttggctggttaggttgacctaaacagggctggcgtacctttgctcgaaattgtctcagagccagacatgagaacagggatagaagctgctgagtatggtgctgaactgcaaaggattgttaggtacctgggagtgagtaatggtaatatgcaagaaggttcccttcgttgtgatgtgaacgtttctgttcgaccagttggacaatcagaatttggtacaaaggtggaaataaagaatatgaactcattttctgcgataaatagggcaatcgattatgagatctcccggcagattctgctccataaagaaggccaggctgatcaaattgtacaagaaacccgcctgtgggatgaatcttctcagaaaacttttacaatgcgaaaaaaggagggacttgccgactatagatattttccagaacctgatcttcctgaagtagttatcactagtgactatattaatgaaatcagcaagtcaatgccggagcttccagaagcaaagcgtaggcgttatgagaatatgggactcagcatgcaagatgttctgttccttgctaatgatgataatattggtcatttctttgattctactcttgagcatggtgctgatgcaaagctggctgccaactggatcatgggtgacatcgctgcttatctcaaagatgaaaaagtatccattgatgaaattaaattaacacctctagagctttctgaactgatagcatcaattaagaatggaactataagtgggaagatcggcaaggagatactggccgagctcattgccaaaggcggaacacttaacgctgtgatagaagagaaagatttggttcagatagcagatccagcagcaattgaggcaatggtagataaagtaattgctgataatccaaagcaacttgagcagtaccgtgctggaaatactaagctacatggattttttgctggccaggtgatg

SEQ ID NO: 278526 - DNA, 608 bp, Zea mays
tgtcaaggagaggaatcagctcactcaaacgctcatcatcttatgacgaggatagagtttatagtccggcacattccaaaagtgatacagaaagctcttgtgagtcaggtagtttcaggtgtcttccgcagactatcagaatcatatcgtgtaagcaatcgagaaatggaacaatactctcccctttctctgatgtgagaaacagctctagtcaacaagaatatagtactagatcctcaccactgggttcatcaaagagtgcaagcaataggatgactgatccatcactgggtaaagtagattcattccacaaggaaaaggacatgatcaagatcgaagaaaggcttccctctggagctcgggttataatccaatctgcccccttgtgtgaagatagtgatggcagcaatgaatccctgtaaggggctgtggtacatatggttttcttctttttatttcattttactgagaatgacatttgttggaatttggtgcttgtgtgtggcatagctcttggagtaggttcaaaggtattgattttgtaaactgtgaatgtgatagtcaacattttctcacaccctgaagaagagaatactgtatcttgcttt

SEQ ID NO: 278527 - DNA, 243 bp, Zea mays
gcgtattgtatgatttaatttcacagtaatccctggtggatgtttatttctgtggccacttggcatggcatgtactgtcctttacatttgagatcagctctgatcgcagctcatgtcagctctgatcaatctctgaagggcttgatctctgcggcattgtttcaccacattaactgcattgcttgaaagatgcctgtcatccattgctaactgcatatctgacactcattgatcgacttgcct

SEQ ID NO: 278528 - DNA, 458 bp, Zea mays
tgatttttttacttgggattatggcatcgattttgatgacatggaagggcccagtaaaccgttcagatgcatgtgtggaagtagatactgccgcgatccgaacaatccaaggaggatgggtagagcagctgctaagcgaaagtaggcagggagcgcggacttggttggagttgagcacaccaacttttgctgtgggggggtctggtttcgtgtttgatgtggagtaatgcagtaccatcccctcagctagtattaagtgtagataggtgtggatgattttggtgaatggtgttatggacggaaatgctgcaggctgagcgacctagtaacctatgccatgtagtggcatctaaattagcctgggattgtgtatgcgtaaaaagaacgcctaagacttaaccatgttattatgtcagcttggtacatggtgataaaaagaatctgaccatttcatgtcc

SEQ ID NO: 278529 - DNA, 444 bp, Zea mays
gtctgcacagaaaggatctgtggtccacggaaaggaaatgacgggcctcgagatccttctggtacttaaaaacacctgggatggctacaatgccggctgtctgatgttcctaacctcggtcgctgggtgcaccatcttctgtctaccaccgacggtcccggggttcctgagatctgaagatatgggagtggtagatttccccggagctgttgccttgcccacgtccattttggttgatcctgctgggcgttgcccactccgtcccccatgtccagtagatgcaagtcctctcagtttttttgggggaaggggggtggatatctgatttctggaccaagaacaatgtaaatttgccgcggttctcgccctccttcagtaaatcccccggtaaagccttctaaaaaaaaaaaaaaaaaaaaaaaaaaaaaaaaaaaaaaaaaaaaa

SEQ ID NO: 278530 - DNA, 511 bp, Zea mays
gtctctgtatgctttgatctggcagcatttgttgtggagcgtgacagaaccttcccaaagggtgaagccagttgctgcctcagatattatgtgggcagaagcaatggggaaacttgaatgcatggatagtgcagacagggagaggctgtggcctcagcttgtgcagggttttaaagacctttcccatcggcttaagcttcaagatgaagtccttgtttcggacactgatagattgagcatgactcactctaatgttaaaaagctgcaaaggcatttccaagctgacacgtatccttggatccagcgattgaagcaacaagagctggctattcagagacgtcttttaaggtttgttagaatagtggaggcattggagaatcggggctaccgctgtcctttaacaaaggaggaagctgacttgtatgaaagattggttgctatattaaagcggctaaaaggacataacgctgatcttgctaagagggtcaatacacttgtttcgacgtcgcgt

SEQ ID NO: 278531 - DNA, 469 bp, Zea mays
agctcccggtcgagaactacttcgtggtctcggggcgcggcgccgtggaggccatctgcctcgccgtcgtcaccgacttcggcggaggctccggggctgggaacgagggcagcggcccggccatcatcctcggcagcttccagcagcagaactacctggtggagtacgacctggagaaggagaggctggggttccgccggcagtcatgcacgtcgtcgccgtcgtgaggtctcacgacgtcggcatggcggggatcggagtggaggccagtaattactccagagtccagtccacgtaacgctccaaattccaattccaaaagctggctgcttgatcttttgttagtgctcgtgtactgctaataaaaactaaatttactgtcatctactactactattaagttattgaaagacgtggcttgctttgggtttcaaaaaaaaaaatgatgctgaataaaaacaatgactgg

SEQ ID NO: 278532 - DNA, 743 bp, Zea mays
gtggaccagaaaagggagagggcagagttgctgcacgaactgctcaagagcggagctggcttcgaccccctcccggttcttacccaagaaacactgatcatctggggcgacaaagaccaggtgttccccgtcgacctcggccacaggctgcacaggcttctgggcgagaggtccaggctagagatcgtcagggacgcagggcacgcgctgcagctggagggcgccgaccacgtcaaccgctccatcaagtcgttcctcctggacgagcgggtcggcccgggagccggcgcgggccgcaagtaggacgaggccttctcccgtccaggcccacaaccaaacggaggcctgctcgcaggtgcctgcgttcctgcgttgcagagctgcaacagtgcgaacgccagctgtagttaagcagcggagcggcaatgacctgcacgcacgcagacgccccccccgccccccaatcatgcagcgctggggctactggttacaaaagtacagagaagcgtcgctccggactagtttgttttgtccaataatgtctgaaagaacgagcttgtgcggccgaaattcggagagctgtctttatctggtgcgcacagtctgtctctttgtttcttcatgctcagcctcatgagataacgatatatttatgacagctccaacaataatttgtaagctaaattcaagcattttattttatatttcaataaagaaagggagaaaagctacctcctgctccc

SEQ ID NO: 278533 - DNA, 431 bp, Zea mays
  unsure (1)..(431): unsure at all n locations
cggacgcgtgggctcgggtgcaagcgcgcgcgcggtcggcttcgccacggtggtggcgttggcgggcgcgggcctcgccgtcctgctttaaaaactagactccgactcttcctcctgtcctcacgccgatgttgtcaccccctcccacgtgcctcgacgttgctgctcgctccatttcagtttcatcttttttttttcctttggtgttgttatttaattttaccggccctacgatcgattcttgatgtacacgacgacgatgatgatgcattggttgctttggatccgcgggcgggtggtggttagtgttctgcccgcgggtgtcgccatgtacttttaccgcactacattttggttctatagagagaggatttgtgtacattctcgtgcattatttctatggccgntgaataactctctgtgcagattca

SEQ ID NO: 278534 - DNA, 752 bp, Zea mays
atttgttggaatgctcttcaactttcttacgctcatttacattgcttttctctgcggtaaattgctggcttaaatgcatgctgcttgaaccctataatcagatagaccatcccgaatgcaagtcaaggcctgatagtggtctttctgcaattacagagctggaccctggttatataacaggtttcaggtcctctctcttcagtatggaaagaatgggtcaaatggtgtgtagagtttggcattgaagctaatgcaattatcgctgttccgtatgattggagactgcccccatcaatgcttgaggagagagatctgtactttcacaaattaaagtgtgtaacacttgcctcaacttgttatgaagcaaccaaatgctatacatctgttaggatcagtaagagttaatggcccagtgacggattcaaggtatcctgctcaccaacagatcccacaagcatacggttaccgccaaatgcctgcaaggttggacagtaccaacccatcgcaggccatgggaggttacacgctgcagtcacagaaggaaacattatttgaagagttgccattttgaagagttactcgaatccaatattttgctcttttgaattccttggtgtacacttgcaaatattagcatatttgaagagttgccattttgatcatcatcttcatttgtactttttaggtcagatctaataaagcatcagcattaaatttacaatgatcacctaaatccatggtttttattgcct

SEQ ID NO: 278535 - DNA, 600 bp, Zea mays
ccttaccaacagatcccacaagcatacggttaccgtcaaatgcctgcaaggttggacagtaccaacccatcgcaggccatgggaggttacacgctgcagtcgcagaaggcctatgcttgtgcaaacggcaaaggctcgcctgatgtggccgtgaacatgagagctccccccttccatctcccagctggaccaaagaagaacccattagataggatagcacctgacaccaccgacatatacacaagatccctgaacggcatcgtcgccgccgccgctgcatcagtgggcgctggcgctggtactcaccgaaacatcggcgttgtgccatctggcatgtcaaggatgtattagctgctgctgaaatgctggcaaatcctacctagccttgtggccacagcttctccgggactagccggcaaggctacaaggagtgggcatgtggtgcaaggagtgattcaaaagaggtggtcacgtggtcttggacgcctggacatgttcctacgccacgtattgaggcggaaaaatggcgccattttgcgcacagctaaaggattgatcgattaatttgattcaattgaagctaacgcatttgctaatagt

SEQ ID NO: 278536 - DNA, 492 bp, Zea mays
  unsure (1)..(492): unsure at all n locations
gagattgtgcatgcgcagaggcacgcgtggagcaagacggtgcccgagaagccatggtacttcatgttcacctgcagccaggatgcggtttcagggttcgcctacgacccgagcctccgcaagtggtatgggttcgatttcccttgcatcgagaggagcaactgggccacgtcctcgtcggctgggctggtgtgcctgatggacagcgacaacaggcgcagcgtcctggtgtgcaaccccatcactaaggactggaagaggcttcctgatgctcctgctgttgggggcaggacagctgattacagtggcctcgccttctccgtggacagaagcactcatcgctacaccgtggccgttgcaaggagcagccaggttccatccgagtattaccagtgggagttcagcatccacttgtacgactcggtgtctggcacctgggcgactcccttcacggnggtgttgcttgggtggagaggcggcgacgagtgcgtc

SEQ ID NO: 278537 - DNA, 844 bp, Zea mays
gtttggcatgtatatgagttggatctacctccgttacttcaaaagagacttgagaccagcctgaaaggggatccaagtgaggagttctctttctcaagcttcttccctgaatttgtaagaccatttctcgacccaatagcatctgtattccataggttactttgtggaagatctgatgccaggggagaaacattagacacctcaccattacctggttcagattcgtttgaggcaaacaggaggagagagaggggtcaacgggcactggagcaaagattagctgagaagctggctgcagtcaggagttcagagggcggcacatcactggatgccgctgacaaagtttgagtcttctatgcaacgaacaacgagctgtgcggtgcagtttgtgatttcctggcaatttgtttctatgtgatttcctgaaggattgaacggacgcgaatgtttcatgtaccttcaccagccccagcctcaccgccgagtgcttcattttttttatggtttctcatcctaatcatcatcgggaaccaactaatgaagcactgcgccccattttccccatggtttttctgtaatcaactagaagtgatcaagtaccaagcagtgtacaatgcgatgctccgtaggacaagaactcatctatgttcggtttcctgttttttttttttccttccaaatggtgaggttgatacttgatagtagttgacacttgacaggaacaaaattatttttgtaaccttttagagctctgtgttggatggcaaattgaccgtgctaacggtccggccccgagtctggacggtccgcgcgcgcagtcagttagagtttcgagtttcttgct

SEQ ID NO: 278538 - DNA, 440 bp, Zea mays
aggaggacctccgtgagctgtgcgagccgttgggagaaatatatgaggtgaggttgaccaaggataaggacacaaaggagaacaaggggttcgcctttgtcaccttcatggacaaggaggctgcgcacgcgccatcgaggatgtgcaagacagggagttcaaggggaggactttgcggtgctctctgtcgcaggcaaagcacaggctgtttgttgggaatgtgcccaaggggctgagcgaggaggagcttaccaacactatcaaggggaagggtccaggtgttatcaacattgagatgtttaaggatcagcatgacccaaaccgtaaccgtggcttcctctttgttgagtattacaaccatgcctgcgcagactatgccaggcagaaactttcatctccaaacttcaaggttgatgggagccagttgactgttagttggg

SEQ ID NO: 278539 - DNA, 859 bp, Zea mays
gctttgccctctaataataacagcagcagcagcagccgccatggaagccagcagcaagaagctccaggcgttcatcctcacgctgctgctggtgctctccaccgccgtgactcccatcctctcgctgtcagtgccagacgacgaggtagcctgcgactgcgataaacccaaggcgcccaagccgtcgcacccgcccaagaccaagccctcccacccgtcgccgtcgccgaagcccaagaatcccaagccacccaagggcagcaccgggtacccagcgccggggcaccaaccgcccaagagcccctcctaccccccggtcgtcggccctcccaagggccccgtcacgcgcccgccagtcatgcgtccgccggtcgtcggtcctcccaagggccccgtcacgcgcccgccggtcacgcgtccgccggttgtcggaccaccggtgacctacccgccgatcaccggcccttcgacgacgccgcctgttggcggaccaccggtgacctacccgccgatcaccggccctccaacaacgccgcctgtggccggcccaccggtgacctacccaccgatcactggcccgcctgcgacgacgcccccggtcaccggtccgcccgtgacctaccctcccggcggaggcgggggaagctcgacgccgtgcccgccgccaccgagcccgacgccgacgccgtcgtcgcctacgtgcccggctgactcgctgaagctgggcgcgtgcgtggacctgctgggcgggctggtgcatatcggcctcggcgaccccgtggtgaacaagtgctgcccggtgctggaggggctggtggagctggaggcggccgtgtgcctctgcaccaccatcaagctc

SEQ ID NO: 278540 - DNA, 724 bp, Zea mays
tgctcttcaggcagcatcggccttggcacttgaggttggtgacaaagcttctgaaaagcttttttgggacaaatatgagaaggccaagtttgtctatagcaagctgtggaacggttcttacttcagttatgatgatggcgacaacaaaatgagcacatctatccaagcagatcaattggctggacaatggtatgccaaagcctgtggtctcttcccaattgttgacaaagacaaggcacaaagtgcgctagagaaggtatattctttcaatgtgatgaagttcaagggtggtacaaggggagccatgaatgggatgtggccagatggcactgtggacatgtctgcaatgcaatctagggagatatggccaggggtgacatatgcactagctgcaagcatgattcaggaaggcatggttgagcagggatttaaaacagctgaaggggtctatcatgctgcctggtcaccaggaggacttgggtgagtatgcgcatataaattgaggtttgatgtttttttttgttgtcaacaggcgtgtatgtgtttggacgtggtataacatctgaaatatagaacttttcctgagcctagttatttaatatagctttttttttgaaagattgttattcaatatagtgtcatgaacttagttataagaataatgcattaactttgtggatggaaagttcgttcctaaatctctatcttctgaaccttttataat

SEQ ID NO: 278541 - DNA, 863 bp, Zea mays
tcccacgcgtccggaaaaacccaaagatcctgctcctggatgaggctaccagtgcattagatgcagactcgtaaagcattgtgcaagaagctttagaccgtttgatggttgggaggacgactgtagttgttgcccaccgtctgtcgacgataagaaacgtgaacatgatcgctgtgatccaacaaggccaagttgttgagactgggacgcatgatgaactcattgcaaaaggaacctctggagcatatgcctcccttgttcgttttcaggaaacggcacggaacagggatcttggaggtgcatctagccgcaggtcacggtcaattcacttgacaagctcactttccaccaaatctctcagcctcaggtctggaagtctaaagaacctcagctatcagtacagtactggagcagatggtcgcattgagatgatttctaatgctgataatgaccgcaaatacccagcgccacgtggctacttcttcaagcttctgaaactgaacgcacctgaatggccttatgcagtgttgggggccattggttctgtcctctcaggatttattggcccaacttttgccattgttatgggtgaaatgcttgatgtgttctactacagggaccccaatgagatggagaagaaaaccaagctatatgtgttcatctatattggcacaggcatatacgccgtcgttgcttatcttgtgcagcattacttcttcagcatcatgggagagaatcttacaaccagggtcaggcggatgatgttgtctgcaatacttaggaatgaagttggttggtttgacgaagaagaaaacaattcaagtctcgtggctgcgcatctagctgttgatgcagctgatgtg

SEQ ID NO: 278542 - DNA, 975 bp, Zea mays
ggtaaacatgcaaacatcgcgcctattcgtgcttactactactcgaaggatgagaagcttgttgtttatgagtatattggtaccggcagcttctcagctctgttgcatggtatcaagggcgtgtgtgagaagaccccattagattggaacacaaggatgaagattatactcggaacagcacgcggcctcgagcacatccattcagaaggcggctccaggctcgcacacggcaacatcaagtcaaccaacgttctgctcgacggagaccacaacccttacgtctcagactacgggctgagctcgttgacgagccttccgatcaccacttcccgagctgtcgctggctaccgagctcaggagaccttcgaatcgaggaagttcacccacaagtccgacgtgtacggcttcggcgtcctcctcatggagacgctgacgggcaaggccccgcttcagtcacagggtcaggacgacgccgtcgacctaccgaggtgggtgcattcggtggtccgcgaggagtggaccgctgaggtgtttgacgtccagctgatgaagtatcccaacatagaagacgagctggtccagatgctccgtatcgccatggcgtgcacggcgtggtctcccgaccggcgtccgacgatggcgcaggtggttaggatggtggaggagctccggcactctgcttccgggagtcgcgctctctccgttggcagtcccaaggaatccagtcctctgtcagcctgaattgtggttctgattcagaattcgtgtatccatgacatcgatgatcgatggtatcctgcatgtggttcacggtgcacacgttgtctgcctcgtcagatacttcgtactgctgtaactttggttcaatggaatgcttaagaaacaaggtcggaataggcgaatagctattttcgtctttcacctattgattttgtccttgcatccaaaaaaaaaataatagacgtttcagttcct

SEQ ID NO: 278543 - DNA, 415 bp, Zea mays
cgcccgctgctccccgccgacgccttcgaccgcgcgctcgcgcggttctggtgccacttcgccgacgacaagctcgggccggcggtgggcgcggtgttcgcgtcgacgggggagggccaggaggcggcggtgcggcaggtgcacgagaacctggcgctgatcgagtccgagctccgcgacggcgcgttccggggccgccgcttcttcggcggcgacgaggtgggcctgctggacgtcgtcctgggctgcggctcctactggctcgccgtgttcgaggaggtgaccggggtgcgcctcgtggacgccgacgccttcccgcgcttccacgcctggctgcgcgacttcgaggccctggacgaggtccgggagaccatccccgcggtggaccgcctgctcgagtacgcgcgcgggcttc

SEQ ID NO: 278544 - DNA, 518 bp, Zea mays
cgtcattgcaagtgagatcctactctatgtcaaacagtatgacaacttggtcaagacagggtcctttcttttgaatgagtacaagcagaaggatcacaaatctggctgcattaccgtcactgacaaatcagggacacaaatatctgcaaaaccaccggtgtttctaatgagctggcgcagaagaatcggcaagggtcatcaatcactcttcttcgacgggtgtgagaagacgggcctgcaagtgcagcacctgggtgatcttgtgtaccttattagcaataaacaagaggcggattttgtggaaacgaagtcagacggtggcagtagtgaggggatgattttttgagtaggttttgttaagtcatattttgttcaatttcccccaaacacttgattttttgtttctctgattctatttgggatattctgtttgattctgttgcaagattgtttatgcactgaggtggtttataatggcttaagcatgcagcccagcgaggtgatctatgcaggcttat

SEQ ID NO: 278545 - DNA, 486 bp, Zea mays
caacgcgtccgcggaccgtgggtttgggaactgcttggcatccatatctgatgagttacctcctcacatatttgaactgctacaacaatgcatcgacagcaatgcagatttgtctggggatggagagatagagattgacatccatgctgtcagtgatgacttgttatttgagctgaagaaacatgttgacaagtatttgcaagagaaagagcagagccagcaggtgaaatctgagccctccgagaatgaagctgtgaatgtatctggccttagccactcttctacaaatccttgcaaaggcggcgaacctatcgaagaggatgtggacatctgtggcaatgcctcacctatcatgctagacaaagatgcacaaatcaggaatagcaagtgtggtagtccaagtagttccagcagcgactctgaatcatcttctagcgattctgattcaggcagtgactcttaaagcgaatcaaaaaaagttggcag

SEQ ID NO: 278546 - DNA, 449 bp, Zea mays
cacttgtctgttggtttggttgttcatccttttgggtcttgaatgtctgttcatcaactgtttcatttatagtgttgttttgacttgtcaacacaccacattctttgcacttagtgacatcacttgtagttgacattccaaggtctgacatctgtatgggtatggaagaatggaagggacgaaagggttgagcaaagatagattatagagagcagagaaaacccatctatctaaggtttttcctagctaattgatgccattgtggacaaaagtcacacaatacaccaacaatcattacaaagaagcaaatctaacatagtcacaaagataactaacatgaactcaaacatatcagcacaacataactcgatgttattcattcaatcaaaaggcaatcttgcctatggaaaaacaatttcttataagttttttcgaaaggcgggacaagg

SEQ ID NO: 278547 - DNA, 564 bp, Zea mays
aaaatcccctgcaacccgacccatggccatgggcaagctcgaggagaggacgcgtgcgttctggacgaaccgatggcttgtgctcgttggggccatgtggatgcagtccatggccggcaccacttacatcttcggcgccatctcgccggtggtcaaggccaggctgggctacgaccagccgcaggtggccgcgctgggtgtcgccaagaacgttggcggctgcctcggcctcctcgccggcgcgctctcggcgacgtggccgccgtgggcgctgctggccatcggcgccgcgcagaacttcctcggctacggctggctctggctcgtcgtctccgggaacgcgccggcgctgcccctctggctgatgtgtgttggtatctttattggaacaaatggccagacgtatttcatcacggcttcacttgttacaagcatccagaatttcccaaagagcaggggcccaacagtgggcatcctcaaaggatttatgggcctaactagcgccattctgaccaagtttatacagtgatgcacacaccagaccatgctgcgcttatctttatg

SEQ ID NO: 278548 - DNA, 585 bp, Zea mays
ccttcttttccgcccacgcgtacaaaaatgctgtgcacatgatatgtatctgccttgtcttgcataatagttgttgcccccaccccccttaacatcgctctggtttgatttcagagaaatcattaatgttaccatgaactcctcaagttaaaacttatcctatatatgccatgagaccacagctgcagctcgttcgaataaaattgatatcctttcacgttattctagtgttgtttttactcatccctcatattcaaatgaattgcacaaaagtacagaactttattgtttattttctcaacctaacatgcaacattgcatcgggttcgtatccagatgtcgcggtgttatctttattggaacaaatggccagacgtatttcatcacggctgcacttgttacaagcatccacaatttcccaaagagcaggggcccaacagtgggcatcctcaaaggatttatgggcctaactagcgccattctgacacatgtttatacagtgatgcacactccagaccatgctgcgcttatcttcatggttgctgttggtccgtcgctggttgccattggcttgatgtttgttat

SEQ ID NO: 278549 - DNA, 633 bp, Zea mays
tgaattctgattcttcatgccgtcgttgtttatcttgcttgcttgctctgttggttgaggggagccgtccataaatagctagcaatggcgtttcgtttcgttttcacccggctggagctcagcctcagctagcctggggaccgctgcacgaacagtagtcctccctcctcctataaaagtagggtaaccacccgtccacgccagctagctgaagtcgtcggccatgggggagcagcaagagcaggtggctagcgacgacgcggcggagtggaagcaggtggcggagctgagggccgtcacccaggcccaggacccttcctgcaaggatgaggacgactacacgctccggcgcttcctccgcgcgcgggaccacaacatcggcaaggcgtcggcgatgctgctcaagtacctcaagtggaagcccgcggccaagccccacggcgccatcgcagcggcggaggtggcgcgggaggcggcgcaggggaagctctacctgcagggccacgaccgggaggggccgcccctcatctacggcttcggcgcgcgccaccacccggcgcgcagggacctcgacgagttcaagcgctacgtcgtccacgttctcgacgccaccgtcgcgcgcctgcccccttc

SEQ ID NO: 278550 - DNA, 661 bp, Zea mays
taccgtaatctcgcccccaggtccaccacttcccaccgccgcaggtcggcggcctgccaatcctggagaacctgatgccgatgggccatctagaccagttcctcgccgacccaggcttcgccgagcgcgcggcgcggctgtccggcttcgacggccgccccggtggaagtggctatggaggcgtcggcgtcccgggacagtttggcatcccggacgccggccccatcggcgcattgaaggagctggagctcgggaacggccgggacgagtcgtcggtgtccgatccggcgtccggcagcgcggagatggcgctcaacaaggggccttccgacggcaatgcgaagaaacggaaggctagcgggaagggcaaaggcaaggacggccccgggtccgccgccgcccgcgccgccaaggaggagtcgagtgggaagcggtgccgatcggcggacgagagcagtggcgcggaggacaacaaccccaccaccaagggcaaggccgcgcagagcagtagcgagaatggtggtggcaagaagcagcaggggaaggagagcgcgacgaagccccccgccgaggcgcccaaggactacatccatgtccgggcgcggcgcggcgaggcgacggacagccacaggctcgcggagagggtgagaagggagaagat

SEQ ID NO: 278551 - DNA, 638 bp, Zea mays
cccacgcgtccggacgagttgaaggacattaatgaccaacctcatggaacatgggaggaggtgtacagaaatgtgaaaagggtagagaggttaaaaaatgaattgcatgaaagagatgacaaggagcttgagcggacaggtcagccactttgtatatatgagccttttttcggggaggggacctggccatttctgcaccagagctctctttatcgtggagttggcctgtcttcaaaaggtcgaagaccaggagcagatgatattgatgcttcttctcgtcttccacttctcaacaatgtttactacagagatattcttggtgaatttggagctttctttgctcttgccaacagaattgaccgaatacacaaaaattcttggatagggtttcagtcctggagaggtacagcaagaaaggcaaacttatcaaacaatgccgaatttgcaatcttagaagctgttcaatctcaaaagcatggagattccttctatttttgggttcggatggatcaagatccaagaaaccacacatataaagattttggggccttctgtgatgcgatcaatgctgggaactgcaggttagctgttttggaggccttccaaaggatgtatggtgtacaccttgatcatgacct

SEQ ID NO: 278552 - DNA, 452 bp, Zea mays
ctcgagcgtttctctgcctcgccggggaagcgatgcagccgctgcaccaaccgccgatgaacgggcaacacggcccgcctcctccgcaggatccggggttcccacgccttcgcagcagcaggcgccacctccgtcgtactaccagcagcagcagcagcaggcgccaccgcctcagtactaccagcagggtcccccacagccgtgggcgcagcagcaacagtacgctccaccgccgccgcagtacccgcctcagatgcagcagtacgctccaccaccgcagcagtacgctcctccgccgccgcagcagtacgcccctccgtgcgagcagcagtccgctacttcgccgccgcagtacgctacttcgacgccgcagtacgcgcagccggcgcagtacgcgcagtcaccgcagtatgggacaacgccgggaaagcgtgaggtcagaaccctgtgga

SEQ ID NO: 278553 - DNA, 889 bp, Zea mays
cccacgcgtccgcccacgcgtccgccgagccaacgacgacgttcgccggccgtagccaagaaggtatctcgcccaaacaaaggccgtcaagccaccatggccgtgtccggcgagaagccgccaccgccaccgccaccggccacggcgtccggcggaacggcaaggaagctcatcctagcgctgcttacatgtctgtcgtcggcgctgctgtacaggcagattcagccgctaccgcccaagatccccggctcgccgggcggcccgccggtgacggcgaccaggacgaggctcagcgacggcaggtacctggcctatctggaaaccggcgtcccgagggagaaggccaagcacaggctcgtcttcgtccacggcttcgactgctgtagatacgacgtgctgaatgtctcccaggggctgttggaagagctgggaatctacctgctgtccttcgaccggcccgggtacgccgagagcgacgcccacccggcccggacagagaagagcatcgcccttgacatcgcggagctcgcggacaatctccagctcggccccaagttccatctcatcggcttctccatgggcggcgagatcatgtggagctgcctcaagtacatcccgcacaggctcgccggcgtggcgattcttgccccggtgggcaactactggtggcccggcttcccgccggacgtgttcaaggaggcgtggcgcgtgcagtttccgcatgaccagcgcgcggtctgggtcgctcaccacctgccgtggctgacgcactggtggaacacccacaagctgcttcgcggatccagcgtcaaggacggcgaccctgccatgctatccaaggaggacaggcttgtagctgacaagttcgagatgcgaacctatgagaagc

SEQ ID NO: 278554 - DNA, 459 bp, Zea mays
  unsure (1)..(459): unsure at all n locations
aanaaggcttcgacctgcgagatgaacgcaacggagagcattcaacaaaccaaaaccgcataaccaaaatgttcagactagcgcgtggaacggcgaaaggaagctcatcctagcgctgcttacatgtctgtcgtcggcgctgctgtacagcgcaggattcagccgctaccgcccaagatccccggcacgccggggcggcccggccggtgacggcgaccaggacgagtgctcagcgacggcaggtacctggcctatctggaaaccggcgtcccgagggagaaggccaagcacaggctcgtctttgtccatgggttcgactcctgcagacacgacgcgcttccgatctccacggagcttgcgcaagagctgggcgtttacatgttgtccttcgatcgccccgggtacgccgagagcgaccgcacccgggcaggacccaggagagcatcccgctcgacatcg

SEQ ID NO: 278555 - DNA, 1109 bp, Zea mays
tctagaaagtgattggggtttcacttcatttatgcgcgttgggtgaactctacaaccacagtagaggttatcttgtaaatgatacttgtatagtggaagctgaagttgctgtatgtaaagttgttgactattggagttatgactctaaaaaggaaactggctatgttggtcttaaaaatcaaggtgctacctgctatatgaattctcttcttcagacgctgtaccacatcccatatttcagaaaggctgtttatcacatgcccaccactgagaatgatatgccctcaggaagcatccctttagctctacagtcactcttctataagttgcagtataatgacagcagtgtctctacaaaggagctcacaaaatcattcgggtgggacatgcatgattcatttatgcaacatgatgttcaagaattgaacagagttctttctgagaagttggaagataagatgaagggaacgaactgttgtggagggaacgatacaacaattgtttgaagggcaccacatgaactacattgagtgtatcaatgtggatttcaaatcaacaagaaaggaatccttctatgatctccagcttgatgtcaaaggttgtcaggatgtctatgcttcatttgataagtacgtagaagtggagcgtctggaaggtgacaacaagtatcatgccgacaaacatggcctgcaggatgcaaaaaaaggagttctttttatcgacttccctcctgttttgcaacttcagctaaaacgttttgaatatgattttatgcgtgacacgatggtgaagataaacgatcgttatgaatttccactccaattggatcttgatagagataatggaaaatatttatctcctgatgctgacaggaatgtgcgtaatctttatacccttcacagtgttcttgtccatagtggtggtgttcatggtggacattactatgctttcatacgacctacactttctgatcaatggttcaagtttgatgatgagcgtgtgacaaaagaagatgcaaagagggcactggaagaacaatatggtggtgaggaggagctacctcagacaaatcctggcgtgaacaacacgcccttcaaggttactaaata

SEQ ID NO: 278556 - DNA, 510 bp, Zea mays
gtacctcctgtatttttactgtttcctgttgcattcccatgaagaagagactagttgggatcctactacaggaactccatcttattctgttctcttattaggaggttttttccccagcagatgaaaccatgcatgcagcgtcaaagaaggattatcagttggagtccatgactggctcagttcgttcaaaccagatgacagaagaaaataacccgtcagcttgttagtggtcattgtggcagtagcccatcatctcatcaagaatgctgtaggtcagaagacttgaatagatatgtgtgctctgatgagggcaaggaggttgggcacctaaagaagagtcagtcgcttgtaaacatgcttcaaaaggatcatggtcgtaattctagcgaaggctctgaggttgatgttacaaaccatgaacacaaatatgatccctctaatttgaagagatctgaagttgctggagaatctagtaagctgtacagactgaaaaatgaggatgattttgat

SEQ ID NO: 278557 - DNA, 467 bp, Zea mays
ggccttgaagcttgtgtgcagcgagggtgacgacggcattgcgtcaggaagattcagccaggagttgcccatgcaaactacagcggtttatgacgcgactggcatggaagctgagagagtgctaatatccgagatatttggctccacaccactctttactcgcggtgccgattcagattcttttcgcaagctgtcaagttcaggtccgctgatgacaggcaagaacaggaagttctggcagaggttgcgaagcctgtcaagagggagcatgagtgagcatggcatctcaccagactatgaaacccgctcgcaatatagtggtaggtgtggaaacctttgcttggccttgattagacaacggattgatactcagactgggaataaaagagttcaagctgagctagtgtaaactacgcatctggaggtgaaagctatagcttcaggatctcattcagagtagcagagtg

SEQ ID NO: 278558 - DNA, 460 bp, Zea mays
cccacgcgtccgcggacgcgtgggtgctacggcggcggcggcggcacagcaggggaagaacgtacacccgcagtcgaaagaggacggcgagacagctctcttcctatccacattctatataatctatggctaatcaggtagagattagagtgattgagagagcggggaaggaagttttgtacagagaagagaaagaggtagttgatgggaagggtttgatgtgattgccctttcttttctctttgcttcctggacacaacagccgccgccacttcctgccatcctttcgtcgttgattcggtgttcttggatcggatgccttcatctgcctagatcggagctagagcaaggtgcgtggtgtaaatcccgagaggaggaagaggggaaggggtccaggccggttggtcttgccgcgtacgggtcttccaagaacccgcggcgggggatggatctctacgat

SEQ ID NO: 278559 - DNA, 391 bp, Zea mays
ctcaaggtcgaagtcgacagactggctgcttagcaggaacctgaactccaaaaccgcaatgtgggtgatgatggataccggctgtggcagcaggtcgattgggaaggatttgggatagggagttccatgttgccatcagaaccttcagctgctgcgcaagtgccatcaagggaagccgagcctgaaccgcacctggaagtggagcaaagcgtgtctccagccccaagtgcagcaacctcatacgatgttgctgttccacactggttccagcgccatgcggacccttctgagctcatggggttcgcttcccgtggcctgatcaaggccccgtttgtttccgcttttgagcggcttctggcggccataatctgcccgggtcatccaaacgcgc

SEQ ID NO: 278560 - DNA, 665 bp, Zea mays
cccttttgtccgcttgattgtaaacaatgctgcactgctgcccataaaaaaccgcactgaggtctttctgatgctacacgatagaattgtcgattatcttgggtgtgcggacaaaacgaagaagaagaaaaagaagaggatactctctagtcttccctacaaggaagactggctagatactgccaaggcaaatacaaaaatcaaccagtgggttgccaatgttcagaacgagtacagagcgactccacatgatctgctgcggctcaacagaaatgtaagaagccacatgcatcgctacagcgacggtgacgacatcgaggaagttctgtattgtgaatggcccgagctgctcatggtcatgcagaagatgttgcacttggaaggcgagctcgaaggcactgacattcagaacaagtttggctaggcgtcctacttaagctactgttcttcgatccagttcagggccgaaagtttatgctggtggagtgatggtcgatgtaagtttgtcgctctcatcatgaaggtaaagctggatcagctttataaaatgtatgttaaaatgtaaagtaaactttaaaccattctctctgagaaggtctcttcttaatacaataccgggagtctgtctcataagataatgccagaagctggtcaagataaccacg

SEQ ID NO: 278561 - DNA, 798 bp, Zea mays
  unsure (1)..(798): unsure at all n locations
tactanctagaagaacaatacaaagaagcaaagtctactattaatgaaaaggaatatgtcatatttaatcttctgaaatcagaaaaatcattagtggactgtgcatataaccttcgtgcggagctagaaaatgcagcagcagatgtttctgggctatttctccaaaatagagcgcacagacaggatagatgatgggaacaggtcgatggtgcagagatttaggtctcaactgacccatcagctggatgcattgcataaaactgtatccagttctgtcatgcaacaggaggaccaccttaatgaaatggaacatgatatgcaatcctttgtttcttcaaaagatgaggctgcacaagggctaagagagggtgtgcaaaagctcaaagtcttgcatggttccggtatcactgctctggatgaattagcaggtgaaatcgacatgaactcgcggacaacatttgagagattaaattcacagatacagtcacacacatcagcccttgagaactgtttcggaggaatcgcttcggaagcagataacttgttagatgagcttcagcgcacctatcgaaacaagaagagaggctagcccatttcgcagtgaagcagagggagggacacctgagagctgtggaagcgtcacgttccatctcaaagatcactgctgggttcttccactcgctagatgtccatgcatctaggctcaccagtattctggaagacacacacagcgtgcaagaccaacaacttcttgaccttgaaaagaaattcgaggagtgcgcagctaatgaagaaaaa

SEQ ID NO: 278562 - DNA, 559 bp, Zea mays
  unsure (1)..(559): unsure at all n locations
gaaacgctaccggagcagcgatgaccggtctgcaccagaggagtccaagagagcgcccgactctgatccagcggagaagaatcctagatttcgcgagaaaggtgactctgatgaagaagaggatgactacgacaagagacgtcgtcgctaaagctgtgtggaacagtcgttgctacatgcagctgttctggtgtccagtcgctgcagaagagtccacagcgagcagcagtatccggatttcgccctgctgtgcctgtactgttcctccttttcgggctagtttggagccacaaaactagagcagattggagggcccaaaatacacttcttattcaaaatttgaataataagtggatttttgtttctccaatcccttccggttttatggctcccaaactagtccatctagtgcgtcggttttacatgtggttcaagtggggtactgtgtgctaacagatacaacaacgaggcttgtctgtatgtctgctgacactagagaccaatgcatataatgattctaatttaggccccgtttgatgattctaatttaggctcanaa

SEQ ID NO: 278563 - DNA, 799 bp, Zea mays
tgaagtcagcattctggggccaccttcttcggcatgtgatgcagcaggggcagaagaacatggtggaattctttgacctactcctttctccggcatcgaaaatcttgaacacctggtttgagagtgaggttttgaaggccactcttgcaactgacgccgtgataggagctatggctggtgtgcacactccaggttctggatatgttcttctacaccatgtcatgggggagactggtggtcagcgtggtgtttgggcgtatgtccaaggtggtatgggttcagtgtcatcagctataagcaaagcagctcttgaagcaggagtgcagattgtaacaaatgccgaggtttcccaagtaatggttaatgaaactagtggaatggtagaaggggtagctttggttgatggaacagaggtgcactcgccagttgttctctcaaatgccactccatacaaaacatttgtggacctagtaccttctagtgggcttccgcaggacttcctctgtgcaattaaggcagcagattacagctctgcaacaacaaagattaatgtggctgtcgacagactgccacagttccagtgttgcaacaccaatcttgaaggtggtccagagcacatgggcacaatacacattgggtccgaaagcatggaggaaattgacgttgcatacacggaagcagcagacggcatctcgtccaaaagacctgttatagaaatgacaattccttctgttttggataagaccatctctccgccagaaagcctttgctgagcgatgcttctctttgattgatgagt

SEQ ID NO: 278564 - DNA, 656 bp, Zea mays
aacacttccaaagggaaaaggaaagccagtgagaacagaagtttatatttaaacgaaaaggctctcaagaaagcacgtggcaatagtaatttgggtggaagttcaagatctaaatcatatgcctctgatctggaacctcatgctggattcatttcgcctgcgattcgagataatggcagtgatgcatataatcgacagagaactgcacggtatgatatccatcctatagatgtccatccttatgctagagcgccatcatcagcctactctggttacaaaagccatgctggctatgaggctgcaaatacatatgaatacgcagggaaccgggcgcctacacctccaagtggatcttacatccctcgaagaggacattactaacaaaaaatggagtgctggctctgtgcatccattcgatcgcatggtaacaaggaatcaaggatctccgtatttagatgtttcatacatgttatgtagcagttaaaaagtaacttgtttaaggaaaataaggaccctctgcagctttccctttgactgaagtgcagcccggcacaccggttgcttgttgaagaatgcttttttattattattgtagttaagagtccagacgtcgttattaccacttatcgtcgtattggaaaaaatgtctttttctt

SEQ ID NO: 278565 - DNA, 399 bp, Zea mays
gttatagatcgcgagcggccggcccttctttgttttatggaatgtagcagcacatcagagcgaagggagctaaatgatgtgattgcagtgttcgccagcatggattgccctgccacaatccattttgggctgcagtacctactgagctacaactggagcaatgttcttcgaggggattcatcccttgcaaagctagcgcagcttaaagagttctcccattacttccgacgcattacagcgtccgaggatggtgaagaagaagaccatagcctaaacacgggtgatgaagacgacgaccacacctgttgcatttgctacaactgtgactccgatgcaacattccagccatgccatcaccggtcctgctatggctgcataagcaggcatctcctgaacaac

SEQ ID NO: 278566 - DNA, 646 bp, Zea mays
  unsure (1)..(646): unsure at all n locations
aacacgcgcatttgctgctgagctacttactacacacaccgtagcggtgcacaccacgtccacagtccacacgcgcgcgcctaggcctagcgatggagtgacaagcatcgggttgcttccggcgatggccattgccaaccccgccccccgtctccttcgtcatgcgtacaagacatccccacatcaccccctcctccaccacctcctcgccgcaccgcaaaatccacctccccttcccggccctgcattgcatccgttcttcttgcttgcttccccggaacctcgcgcttggtctgccgccacgcaacgcgccttcgggccctgagataaaatctcccggcgctcgcttgctccgccaaaatccactccttggaatttcctgagctgtcggaaattttctcttttggttttggttcttctttgaccccttaggtcgctagcatttgtgcgttccgccgaagctcgctggtttgatccgtcctagttgcggaagcgcctcttgatttggttctaaaatacatcgttccttgttttcatccttccgaaggggggaaaatcatcttttttgggccctgatttgagtgtgtcacctttgcttccggcaatggggaacagcagcagcagcaacaggcgtncgccggggcca

SEQ ID NO: 278567 - DNA, 584 bp, Zea mays
cccacgcgtccgcccacgcgtccggctaataaatccaaattaaagcgtgctcacttgactgagcataatgatatttcaccttgtaagaatgaacttgatgatttccatgatcttccagatatatctcttccatctgataaacaaataaaaagaaatcggcatcgttcgctgctattatctgagtccgatgatgatccagctgatgtaggtactgaaaaacataacatatttactgttactgaagttggttgcttcccgcacccttcagaggtgcctcctatgcatgggcaagggatttctgatcagttccattttcccgttgaatcacgagagacatgtgaaattgctgattctttccaaaatccacctgaaagcaacatgtatgggtccatttcacaagtttgtgatacatttatgtcacaggacgtgtcatgtgtacccgagtcatccttaattttggacggcacatctgcatccataagtggtgatgaatttttgtcaagggcagtgtccaatggttttttctgccttttgtgagggtacatacactacctccagaatggtattagaagacagtgactgtg

SEQ ID NO: 278568 - DNA, 867 bp, Zea mays
ggcggcgtcttttcttatgagcttattgagctaagaggtaacattagggtgttctgcagatgcgctcccctgagctccgatgagctcgcccgtgggtgttcatctgttgttgagattgacccatcacaggagactgagctgcagtttgtccccagtgaaaatgcaaggaagccctttaagttcgaccatgtttttggcccagaggatgaccaagaggccgtcttttcagaaacagtgcccgttgttgggtcagtgatggatggtttcaacgtatgcatctttgcatatgggcaaacaggaaccgggaaaactttcacaatggaaggggttccagaaaataggggtgtaaattatagggctttggaagaattgttcagaatctcagagaaaagaagtgcatctgttgcatacacattttccgtaagcatcttggaagtttacaatgaaaagatcagggatcttcttgatgagagcaatgatcaatcaaaaaggttggatattaagcaaaatgctgatggaacacaagaagttcatggtttggttgaggctccagtttataacatagatggtgtgtgggagaaactgaagtttggcgctcaaaatagatccgttggctcaaccaattctaatgaactcagcagccgctcccacagtttggttagggtcactgttaggagcgagcatttggtgacttatcagaggagcagaagccacatgtggctggttgaccttgctggaagtgagagaatagctaaaactggggtagaaggagatcggctgaaagagtcacagttcatcaacaaatcactatctgccttgggtgatgttatatctgcccttgcctcaaaaaattcccatattccatac

SEQ ID NO: 278569 - DNA, 410 bp, Zea mays
cagccgagctcgagcgcgccattgctcacctttttccgtccagcgcaaagacaccgcgcgccagagagggtgagggattgccgtgaccgattcgaaagccgcttcgggcgcgggtgggatcggcccgtggccggcggagatgtccggattcgtcggtgtcgtcgtgtccgacccctcgctgcaggggcagttcacgcaggtcgagctccgatcgctcaaggccaagttcgtgtctctgaagagagattccggccatgtcaccactaagaatctcccggcgatgatgaagaagctgagggggctcaatgaggtggtctctgtggaggagatcgcggccttcctgtccgagtcgtaccccgacagcgatcaggagattgaattcgaatccttcctccgggagtatctgaatc

SEQ ID NO: 278570 - DNA, 720 bp, Zea mays
aagaagtgatcaacggagagcagtgtccgttatcaatgcgttctcaagctcagatgttcccagttttctcatcaagtgggctacttttcaatctggctctggtgcactcagcaaaccaattaccaataaccgcaatctattattaagtggcttgtcgaccttgaagtcaaggggctcaaagtgtttgggggctacagttcttgtattatggggaggtttgcttatgatggggtcaagaatggccatgggaacatgattcattcagatgcggaccttttcttttttgataagcagagtggtagggagtttatggacaccaaaggcagtgaggatgaagctgtggaggagatggagactgcaggtaatgcttttatggctgctgcccagtcaatgaagggggtgactgacggcatgaggaagaggaagagctgcggatatgaaggtgcagcagctgtgaagtttgtgaagtacaaggttgaagatagctcgctgaaggactacctgtcagcagctaatggcataagcagtggaagtgaggtagagaacccgcagtctgatgatgagatgggagattcaaactggtgcatagaaacgagatcaccccctattgcttactttggacagttgcttttgagagttccttggacagccgcctttttttggagccaggaccagtcttgtttcagctgccgcttgtttatgatgccgtgcagaatctgc

SEQ ID NO: 278571 - DNA, 1065 bp, Zea mays
ctgggccaggtttgaattcacatattagaactgttctcccagcattgattcttgctatggatgatgatctggtggatgtaaaaaactcagccaggaaagctgctgaaactgttctgttggttattgatgaggaaggagttgaaactttgatacctgagcttctaagaggaatcactgacagtcaggcatcaatgaggcggggctcagcctacctaattggtttcctctttaaaaacactaaactatatttggctgatgaggcttctgatatgatgtcaaccctaataattttgttgagtgatacagacaaggctactgtatccggctgctttagaagcattttcaagagttgttgcatctgttccaaaggaacagcttccgacgcatataaaactagtgcgcgatgctgtctctacagccagagataaagagcgtagaaggcgaaagggtgtgcctattcttgtgcctggcttatgtcttcctaaagcactgcagccttttcttcctatatatcagcagggtttaattagtgggtcggccgagacaaaggttcaggcagctgaaggtctaggagagttaattgacgtaacaagtgagaagactcttaaggaagttgtagtgccaattacaggacctcttattcgcatccttggtgatcggtttccatggcaagttaagtcagctatcctatcaaccctgacaatcatcatcatgaaaggtggaattgcacttaagcccttccttccacaacttcaaactacatttgtaaaatgtctacaggataataataggtctgtccgggcgagggctgcagctgctttgggaaagcttagtgctctcagcacacgggtggatcctttagttagcgatcttctgtccatgttgcagtcaggagatgaatctgtaaaagaaagtgtgctttctgcactcaaaggtgttatcaaacatgctggcaaaagtgtcagcgctccaataaggtcacggggatgtgctcttcttgaagatctgctgcaggctgaagctgatgatatccgcagttgtgctgcaaagttgatgggcacattg

SEQ ID NO: 278572 - DNA, 553 bp, Zea mays
gcccttttctgtgcagattattaccattctgggaatgatgtcgacctcagtgaagctacaggtcaagagtgagagctgtcgaacagagatagcacactccaccagtcgcttgtagtggaagtacctgagtcggtgagcatttctgatacaaacgacattagtggggaacctgaacacagtagaactgacattgatgaggacccaagtgaacttactccaagaacctacaatattaaaagaatcgaggattggatcaatcagattgatatcaatgatatcgctttggatgggcaaggagagaattcagtttctgctttagccaaatctcgtgaaccgatggctggcgttcctgctgtgcggcctgatgctaaaagcccgcttggtatggagatagcttacacttatatttcgaagttaactcctgcttcatcatcggcacagttggcaaaccttggtttggttgcgatcccaagactgagcgcattctcaggtttgcgcgtattaaacttatcagggaactcaattgtgcgagtaacagcaggagctcttccaa

SEQ ID NO: 278573 - DNA, 535 bp, Zea mays
  unsure (1)..(535): unsure at all n locations
gggtatcttgctcccctttaccaaaggatttgtgtaagcctgtcagtaaggcttctttcggtggtgataaagctgatggctttggtcacccaatgtaatgtaccctagcatttttttttacctannaattttagtgcctgtatgttgttaaccgggacgcgctatgaattgggtcccaatgccctggttccataatccaattgcagatgttgaaaaaatcaagcatgaagggatccctgcccagcggggctcccggagctgcaacagtctgttggatgcaagtatcgtgatgtccccagtttgggatttgttccattcccactgcatgggcggtgttgtgaatgggcatgaaatgccgtgtcctgtttgttgttgatacttgtgtgtagctgctgaagtgttgttgttgatgcagtactacttgtgtatacttgtggaaagagagtgcgcataggcttagaaagtacagtatcttcatactaggtaaagggatgtttctgaagctcatgtgtaccgcgattgcatgttggcaccg

SEQ ID NO: 278574 - DNA, 452 bp, Zea mays
ctgatggaacatgtgaagcagagttcttttgttttgatagcattgcctgtaaaatagtaggaaaaccttgtgacaaccttgttacagcagttacaacttctcaaggtcccccggtagacctagccactgttatgtgactgaaatttaccctttgcagttgccatcaatatgtcagcctactctgtcacaaacagtcttctctattctgtctattttaacaaatcatgtaagacatgccttcatgccatctaacatgcctaaccatcctcaagagttgtatacacaagatgaagaacctagccttccggtcacacaaaactcttcaacaacatctttggcgaaactatctacctgtagcaacgaaagaaacgaggtacaaaacttcttgttttcttgccatgtactacctattaaaaacatcttatttttttcacgcatacaacttgataaag

SEQ ID NO: 278575 - DNA, 784 bp, Zea mays
cgccacctctcttctctcctcggccctcgccactctcactccgccacgccggagcacgccgctgcggcgcgcctgcgcccgccacacacgaggggactatggacacggtggctccccgcctgagtcgctcctcgacgcgatacgggcccatcagcagcagtgctgcctccttcagtgggcccgtccggaagtggcgcaaggcctgggtgcccctcaccggcaccggcaccggcaccgccgggtccgggggagggagctcacgaggagacaacaaggtggttctgtttagatggacgccggtgaatggttgttcaggaggagggggaggcaccgacgggggcatggagctcgctgctgcgggggcctccacatgcaggcggcgctacgtcccggctgcaggggaggcgcaaagcaccaccaaaaagggcaccagcagcgagctcaacttgaacctcgagctggaagacccagacgacgacactgatgccgacatgagcaccgacgagccacgcgatgtagaagataacagcgcccgtctagaaagccgcttgaagcggaaagcattttagccgctggtcacctagagatgcggatcggcctgaatcgtctgccctagctaggcggattttgtgtaacataatgtagcagcatgtaacttgtatccgccacctcgtcgtccttcgtctgttccagtttagaacaatggcattgtccatgactgttcaagtccaagtgctcatgttatatttcatagctgttggttatgacttgccactttgtcctg

SEQ ID NO: 278576 - DNA, 643 bp, Zea mays
agagaggaaggtcagccagccaaacgccaccgccgccgtgctcgcgccgcacgcaactctcagctctctgacgcctcctcctccgtcgattccgacgagagagacgcaaaccaacgaggtaggaaggagcgcgaagatgggagcgggggacggtgaggtcgctgcgagcaaagacaaggccagcggcggcggcgccgagcggacgtcgctggacggcgtgcgggataagaacgtgatgcagcttaagaagcttaatacggcgctattccctgtccgctacaatgaaaaatactaccaggacgccatcgcctccaaggatttctccaaactagcatactttagcgatatttgtgttggtgcgatagcttgtcgcctggagaagaaggaaggaggagcagtccgagtttatatcatgaccttgggtgtactggcaccgtatcggggtcttggtattgggacaaagctgctgaatcatgtgttcgatctctcagcaaagcaaaacatctccgagatatacttgcatgttcagaccaacaacgatgatgcaattgctttctacaagaagtttgggttcgagataacacagacaatacataactactacatgaacataacgccaccggattgctacgttcttatgaaa

SEQ ID NO: 278577 - DNA, 534 bp, Zea mays
cccacgcgtccgcccacgcgtccgtccacttgtccgcccacgcgtccgcggacgcgtggggttgatcttgcacatggtaatggacaaccaagagcaaatactgtcacagcccacaggggctctttcataactgagcatattctgcatcatggagtttcttcggatgctataggaaattcttccaggaatgcagagtgttttgttggtgcagcaggccaagacagtcatcatgcagcctttaagagaaagtatcttgatggatgtcatgcagagtcttctgctaacggaagctcacgcaatcgtcaccagaataatagtactctgctacctcctccgaccacctgtgaaagttttactatacccaccgcaacaaattttagtgttccgtaccatcctgtggagcagctaaaccagagtactaatattgctgcaagctctactttgtctgatcactattcttcatacagtgatccacgtggaaacgaattcgtgcgaaatacacggatgcgaataaaccctagtgattatgatcaa

SEQ ID NO: 278578 - DNA, 434 bp, Zea mays
agcacctgcaagcgcaagaagaccttgccgtgctactcggggcctcgtccaaaggcggtgcacttcgaggagtgccgggaggtgagcgtgcagggcgtgacgctgcagaacgcgcagcagttccagctgacgttcacgcgctgctcctgcgtgaaggccagcttcctccgggtggtggcgccggcggacagccccaacaccgacggcatccacctcaacgacacctcccacgtccgcatcacggacaacctcatctccacaggggacgactgcgtcatccatggtcggcaattgctctgacgtccgtgtgaaagacatctcatgtgggcctggccatggcatcagcatcggaagccttggaaagaaccggaccaccgacatggtggaagacgtgaaggtcgacacctgcttgctcaccaacacgaccaacggcg

SEQ ID NO: 278579 - DNA, 431 bp, Zea mays
  unsure (1)..(431): unsure at all n locations
ctttctgcgtccgtgaagtccaatgtgccttccggccgccgggtgaagacgaagaggagagtgccctccgcgctggctgagaagaagcgtaccagtcgggcgctgcggcgccgtccatggcgagagagagcgtctgcaggccagccgagagcccgagaccagtctgctcgtgccggtgtgggtgacgggcgttgcgtcgtgtccaagagcaaggtacgccgtacgctgaagctgctatgccttttggccctgcgtcgtgtctttcgacgttggctggtggccctggcaccacgccgtggagcggtggagccgccggtgggccgggacgggaggcaggccgccgccgggtgctcagctcagctctgtcctagcgcgcgccatccatcgatctncgncaccggccacaccaccaactgcaagctggctgttga

SEQ ID NO: 278580 - DNA, 329 bp, Zea mays
cttggtctttctgcgtccgtgaagaccaatgtgtctcccggccgccgggtgaagacgaagaggagagtgcccccccgcgctggctgagaagaagcgtaccagtcgggcgctgcggcgccgtccatggcgagagagagcgtctgcaggccagccgagagcccgagaccagtctgctcgtgccggtgtgggtgacgacgggcgttggcgtgtgtgggggtctgtccaagtccaagagcaaggtacgccgtacgctgaagctgctatgccttttggccctgcgtcgtgtctttcgacgttggctggtggccctggcaccacgccgtggagcg

SEQ ID NO: 278581 - DNA, 505 bp, Zea mays
gtcacaagcaaccaccttgcatatttctttgcctcatggaattctgcccctaccctgcattgtctgccctgtgaagagagagaccagagagagagagagagggcttcgatgctcttctcaggctgcaggtcaaggagtgagaacaagaaagccttctttgaagttgggttgttgaggtgctctgaagaagtattagcgtgtgttccatcagtcagttctctcataatttcatcttcctttccttgtgttgtccttggcctctctttctgtgtccctgcactctcttgttatggactcctctcagcttactggggacaatgctgaagagtgcaacagtaatgaatctgggtggacgatgtacctgggctccccagtgaacagtgatgatctcaaagccaatggcagcaaatggagtaatgttggcagtggctgtagcaatggtagaagcaaaaacgacaacatggattatgatgatggagactatgattcattagcttctgatgct

SEQ ID NO: 278582 - DNA, 1281 bp, Zea mays
  unsure (1)..(1281): unsure at all n locations
ccaaattctccgtctcctcctgtcnctctccgcgtccaagggttgcagccatccgcatccaccggaccccaccgggaatggcggtttgagtaagttcccgtaccagggttcttcgatctgggaggccgaggggacaccgggtcggagtgaggggccgccatggcgagcgacgtgcccatgaccccggagctcgagcagatcgacggagagatccacgatatcttccgcgccctccaaaatggattccaaaagatggataagattaaagattcaaataggcaagctaaacaattggaagatcttactgtgaacatgaaggagtgcaagcgcttgatcaaagagtttgatcgcattctcaaagatgaggagtcaaataatccacctgagatcaacaagcagctaaatgacagaaaacagttcatgatcaaagagttgaattcctatgtcaccttgaggaaaacataccaaagtagccttggtaacaacaataagagggttgagctctttgatatgggtgctggaagtagtgagcctgctgctgaggacaatattcaaatggcatcagccatgacaaatcaacaactcattgatacgggaaggaaccaaatggaccaaacagatcaagctattgaacgttcaaaaatgggcgtagcacaaactgttgagactggagctcaaactgctgcgacattaacacagcaaacagagcaaatgaagagaattggtaatgagctagatactgtccacttctcactgaagaaagctagccaactagtgaaggagattggtcgccaggttgcgactgacaaatgtatcatggcattcctcttcctgatcgttttgggtgtgattgctatcattgttgtcaagatcgtccatccgaataacaaaaacatttgagacattccagggctggccccgcctgctcaaaactatcagattcacaacaggagattgttgtgggcagaagcttccataggcatgtgatggctctgaatgtaggcttcatgtggacgcactgcctgcgaagcagcagctatccatagggcgaaagatacatagtaacaattctttgtgcctgtatatctattttgtcttgttaactccgagccctaggtctgtattcctgcgtctggtgtttgtacaccgctggccgtttggctgtgtatatggtacagagatgagatcttaaaaccaaaccagtaattatgacaaatacttgaaagagctacagtaccgaaatactccagttggtactcgctgcacttcatgggcgaatat

SEQ ID NO: 278583 - DNA, 334 bp, Zea mays
gcgtttcctccctccgcgcatcgtttccttcctcaccctgtgcctcagatctcgcccacctggtagactcgccactccgtccgcctcctccccgcctcgatcgccgtcgagctcctctcccccacgcttgactaaccccacctgcgcttggattggtggccagggagaggcgcggaggcgacgcgcccagctacctaccggttccatactctgaagtctgaactggcctcagctgttccaccacctcgctgttcttggcccagctgctctgctcttgtcgagggatgatggtccagtgctcctccaacaaggctccacaccgacattgagctac

SEQ ID NO: 278584 - DNA, 775 bp, Zea mays
cggaacgcccgggccgacccacgcgtccgcgcaagtaatatggcttggtcttgtgctcgtccgatgagcatcgccctcgctgccgtcctcctgctgtgcggcggcgcgtggctgcagcaggcggcggaggcgcgcccccaccacatggacgacgacagcagcatcgacatggaccgcggcagcgacgacttcttctccatcgtggggtactcgccggaggacctgacgcagcacgaccggctcgtcaggctgttcgaggagtgggtggccaagtaccgcaaggcgtacggcagcttcgaggagaagctgcgccggttcgaggtgttcaaggacaacctgcaccacatcgacgaggccaacaggaaggaggtcaccagctactggctgggcctcaacgccttcgccgacctcacgcacgacgagttcaaggccacctacctgggcctcctgccgaagaggaccagcggtggccggttcaggtacgacggcggcgaggtgcccgcgtccgtggactggcggaagaagggcgccgtgacggaggtcaagaaccaggggcagtgcggcagctgctgggccttctcgacggtggcggccgtcgaagggatcaaccagatcgtgacgggcaacctcacgtcgctgtcggagcagcagctggtcgactgcagcaccgacgggaacaacgggtgcagcggcggcgtcatggacaacgccttctcgttcatcgccaccggcgccgggctccgctccgaggaggcgtacccgtacctcatggagg

SEQ ID NO: 278585 - DNA, 528 bp, Zea mays
cccacgcgtccgcccacgcgtctttccattcgtccgcccacgcgtccggcacctcctagggacacactgagaaaacctggagtgctgcaatgtagtgccaaagagaaggtccttgatcctaagaaggcacagaacattgccatcctgctgcgcgcgctgaatgtcactccggaagaggtctccgatgcactgctagatggcaatactgaatgtctgggggcggatttgttggaaaccttggtaaagatggctcctacgaaagaggaagaactgaagcttcgaaactttaccggggactcatcgaagcttggttccgcagagcggtttctcaaggcagtgcttgacatacctttttctttcaaaagagttgatgctatgctctatcgagcaaattttgagagcgaaatcaattacctcaggaaatctttcgaaacattagagggagcttgtgatgatttaaaaagcagtagattgttcctgaagctacttgaagctgtcctgcgaactgggaaccgaatgaatgtcggc

SEQ ID NO: 278586 - DNA, 549 bp, Zea mays
gccggcacggaccgggccttcctgggtcgacctacgcacgcgactatagttagctgccacagaccgggacacaatgccacccacacccaagagaggcgagcatctcccgctcctcctaattgtcgcatgcgctgccaccgccgccaccgccgccggcaccgtccccttctacccgtccgcggagtccgccgccgccgcgcactgcgacggcacgctgtacccggagctctgcctgtcgacactcgcggacatcccggacctacacaagaagccgctcccggacgtcatctgcgcggccgtgaaccgcaccgaggacgtggtggtcgccacgtccagcaactgctcgtactacctgcaggacaggtccctgtcggcgcgcggccgcctggccatccacgactgcctggagctgctgtccaccacagatggacgagctccgcgccagcaccgccgacctgggcgtcccccgccggcagggggtcggcgtcggcgggcgtgtcgcagggcgccaggcgcgcgacgatggagcacgtgatgacggtgctttcg

SEQ ID NO: 278587 - DNA, 407 bp, Zea mays
cccacgcctcccgtgggaagtgcaaacaccaaatccgcaatctatctatctatcagccattcaggcctgcaggctgcagctctctccactgcacactagagcgagctgccacagacaaggacgcaatgccacccatacccaagagaggcgagcatctcctggtcctcctagttgtcgcatgcgctgccaccgccgccaccgccgccggcaccgtccccttctacccgtccgcggagtccgccgccgccgcgcactgcgacggcacgctgtacccggagctctgcctgtcgacactcgcggacatcccggacctacacaagaagccgctcccggacgtcatctgcgcggccgtgaaccgcaccgagggacgtggtggtcgccacgtccagcaactggctcgtactacc

SEQ ID NO: 278588 - DNA, 778 bp, Zea mays
atggcgaacgaggccaagaaggctgcacttgtcctcgccgatgatgcaatgaagattgctgaagtcaatgcagagaaggtggagattctctcaaatgaagttgttcgcttgaaaggcttgcttgattcgagtgctgccagcgaagagagtaagagccgtgaagctgagcttcttgttaagaatctggagtctgaagtttcatctctgaaaggcaaacttgaggaggcaaaagtccttgaagacaggttagccgaagcagaaaaaatgattgaggagcttaaatcagagatagctaatgcgcagaaggtcgaggaagacatccgtcagcagttagaagaatggaagcagaagtcagtatcacttgagatgaaattggaggaagttactctatctgagaagttcaaaagtgactcacttgtttccacgactgaagagctgtacaagatccagtcgatattgcaagatcgagaatcggaaattgaagttcttaaaggaaagacaactgccttggaaatcgaggtgacaaggcttttagcagatgtgactgattcaaatgagcatcttgatgcatcacagcaagaggtgtttgggctgcagacaacaatagatgttctgaagaacaagcttgaggctgcagagctagctgcctcagaggctttggacaatgagaggactgctaccacaaagattgaagtcctgactgaggagaaaaccaagctcattagtgagctggatgatgctagagacagagaggagagagagaaaatggcaattgagg

SEQ ID NO: 278589 - DNA, 384 bp, Zea mays
gttggatgggattctgaaaagcctgggcatgctgaactaatggaggtagcaaaccgtctcatggtcaagggaaagagtgctttggagactgagcaggctgctgtccgagtacttaaaaaaaagagacacaggcactgtttccacctctcttgcttgttctttacaaagctcttttagcgccaattgctaatggccaactagccgctatgatgcttgctagggcgacagcaatttcatgtcaatggttgatgggctcatgctcagttaattcagtcactctgcctgatggaaaatcatggtcaagtggggtgttcgttgagaaatgcaagtacctggaagagagcaagtgccttggcatttgcatcaacacatgcaaactgccaa

SEQ ID NO: 278590 - DNA, 715 bp, Zea mays
cttcttccgcgccgacgaggtccgcaccttcgagtgcatgtcgcgccacggccaggggccccgcctcctgggccgcttcgccaacggccgcgtcgaggagttcatcaacgccaggaccctctccgccgcggatctgcgcgacccggagatgtccgcgctgattgccaggaagctgcgcgagtttcacgatctcgacatgcctggacctagggacgtgtcattgtggcagaggctcaagcggtggcttggggaggctcgtgacaggtgttctcaggaagagtctaaccaatttcagctgaataaactaggtgatgagatttcagtgctggagaagacgctctcggggctccaacagtcagtaggattctgccataacgatctgcagtatgggaatattatgatatatgaagagaccagacaagtcaccttgattgactatgagtatgcgagttttaacccagttgcattcgacattgctaatcacttctgtgagatggctgctgattaccatacagcaacaccacatgtgttggattttacgaaatatcctgacactggggagcagagaagattcgttgaggcataccttagctctgcaggtgaaaagccaacggatggggaagttgaagaactgctagggttgattgcaaagtacactcttgcgagccactcttctggggcctgtggggaataatctcggtgagccacgacacta

SEQ ID NO: 278591 - DNA, 786 bp, Zea mays
cccacgcgtccgcggacgcgttggcggtgctcatcctgtgccacttcaacagcgattggaggctaagctcgcagggggagctctggagttggacgctgttctttgctggtgtcacggctgttggatttggttcttcctattatcatctcaacccgaatgacgccaccctagtttgggacagactgccaatgacgattgctttcacttctgtcatggctatattcattattgaaagggttgatgatagagcaggggcaaaatcccttgcaccacttgtgattgcgggtgccttgagcatcatgtattggagacactttgatgatcttcgcccgtacgcagtagttcagtttgttccatgcattgctttacctgtgatggctatagtaattccaccgatgtatacacattcaagctactggttgtgggcagcaggattttacctccttgctaaagtggaagaggctgctgacaaaactatctacaattggactcatcagattgttagtggtcatactcttaagcatctatgtgctgcgatggtaccggttttcctggctctcatgctagctaaaaggactaccgaaacagcaaggttagcttctagactgcttgttgaagaacaaaccttgatcggtccatcaatagggatgtgcatttttttttgttgcatccatattgccatattggttgctgccattggactgactcatgtcaacttactacatcgattacaccatggatatgcatcacccgttgtcacatttaaatacctacatctgtttacgt

SEQ ID NO: 278592 - DNA, 664 bp, Zea mays
tcgcatgtacagcgaagcagctcgtctcgcacgacaccaagagcagcgtctacaattacaagtacaccttttcagtcgaaatctgccccgtctgccgcgaggacctcatcgcgctcagcccccaggcgtcccgggacatgggtggccttggcccgctcgtgctctgtgtcaaggtcacaaatgccattgctcttcttgatcccctaacgctgcgagtgcaccacctggaggagaaaaaatacagggtttataatttcaaagcagctctcaccagcaagcagctcgtggagtacattgtgcttgacattgaaccagaatcgcctgaaatttgcatcgatgggtctcggtaccagttggcttatgcgcaggttgcccggatgtcagatttcgggaagaatgacgccatctttactgtgaggacgcatcttgggcatctgctgaatcctggcgatcacgcccttgggtatgatctgtatggtgccaacctgaatgatgatgacatggacatggctatgacccggtacagcttacctgaggtggttcttgtcaagaagagctatgagaagaggcctcgcacacggcgatggaagcttaagaggttgccggtggaggaagatgctgcaaataaggccaagggcgaggaagagaagaggctagatgagta

SEQ ID NO: 278593 - DNA, 579 bp, Zea mays
  unsure (1)..(579): unsure at all n locations
gtatcaccccggtgctgaaccgtangaggtgactggcggacgtctctatggccgagccgtaggtggaggcggcacctcggcgccgtgggagatggaggacgatgacaccgagggtgtaggcgagagcacctgtccccccgccgccgaccgaggacgctcctcctcggccggcggcggcggcggcgactcgcacagttacactgacatagagaaggaggtcttcgaccgtctcatggagaagagaatcccggaggtcgtcgcggacccggtggccttccgcgaagagctccgccgccacttcgagcgcctgccgctgagctacgccgtcgatgtgaacgtcgacaaggcggaggacgtgctgctgcaccggaggattctcaacgagtgcgctcaccctgaaaatcgccccatcttccatgtgggctttctgaactgcatcccgccctcggtggatccacagtataacactcagtccatctctacgagcgagaacggtaattgtcggggttctcaggattccactttgagcaaatttgagccatgcgaagggatcgaggacctcagtttaactggacaaaa

SEQ ID NO: 278594 - DNA, 484 bp, Zea mays
agcgaacttgagccagagagagaatctcgcaccgcagcaggaggggaccgagagagaagcgaactcgagaaagggattcaaggaggctgttgccgatggccatggcggcgcggctgctgcgagcaaccgaggtggcatctcgatttctatctgcttcccatggtttcgtccagcgagctgcatacacagctggtgggatagtcgatgttggccaaccaacaccccagtctcatccagagttattagctgatggagagatcacaccaggcatcacaaacgaggaatacatctctagaagaaaaaaacttttagaggtgctaccagagaagagcttggccattattgcttctgctgatcagcagatgatgactgatgtagtgccatatccattcagacagaatggtgattacctgtatattacaggttgtacacaacccggtggagtagcagttttgagtgaagaaacagggttctgcatgttcat

SEQ ID NO: 278595 - DNA, 504 bp, Zea mays
gttagcggctcggggtcgggggttgggccaatcccttccccggcagacggcagtcgcctcgcatcccctccgcctcgttccttgctcggctcgccccaacttcgctgccggccgccgccgccgcattcccctcggctactcgctcctcgtcgctccccggtgcatgtctggcggtaacgcatggtcgccactgccttcgcacggatttggatccgagtctagcggcatggcgaatcgcgccggcgagcctgtggcgaggaccaacagcgatggcggcggcggcggcagcaaggactcgggcagcttcgagtgcaacatctgcctggacctggcgcaggaccccgtggtcaccctatgcggccacctcttctgctggccctgcctctacgagtggctccacgttcacgcgcactctcaggagtgtcccgtctgcatagccgtcgtcgaggaggggaaactcgtccccctctacggccgtggtggcagctccgccgtaccccgtgc

SEQ ID NO: 278596 - DNA, 497 bp, Zea mays
cggacgcgtggggtgaagaggcttctcctgattctcatgaaacgttcaagcatgatagttccttctgtatccagatgcatagtgttgaggaaacacagagtttttctgtgtctatggagacaaaggctgatatcaaaagtgattttgttttctttcagtttgctgtccattattccaatatatatcaaacagaaatcactcgggtgatcactatgaggctgcagactgatgatggtttgtctgcatatctggcaagtgtgcaggaggatgttgcggcagttatcattggtaaaagaactgtattgcgtgccaggactgcctctgatgctattgatatgaggctctcaattgatgaaagagtaaaggacatagctctcaaatttggtagtcaggctcccaaatcaaagctttaccgcttcccaaaagaactagcatcactcccagagtgcttgtttcatctgaaaaggggaccacttttaggtagcataatcggacat

SEQ ID NO: 278597 - DNA, 272 bp, Zea mays
ggcaggaggccctgcactgtcctcctcctcctcctccaaaggttgccgaagaagtcccccctcgcgtccggcagcagcaagtgcagcacaactgaagacggacagcatcctctgactgttggtcgtttggttgtaacagtgccagcaataagatccctctgcctccttttcttttcttttggtgtctcaggggggtgggcaatgttccttccttctcagatcgatcaccaacaaagtgtttagattctaatccaaaacagtagaatggtctt

SEQ ID NO: 278598 - DNA, 698 bp, Zea mays
tctgttgccaagcgacgccacgaggaccctgatgaggatccattggcggaggccgtacttgtcgtcaagcaggccggggagtttgtgctcgagtgtagtgagattggagatgatcgcccgctcactggctgatccttctctcgtgatgcatcgatgctcgccacaagttcctggagtggaatagtcaaagtatggagcatgccacaaataactaaggttgcaaccttgaaaggtcacacagaacgtgcaactgatgttgtcttctctcctgctgatgactgcttagcaacagcttcagctgatagaactgcaaaattatggaaaccagatgggtcacttttgatgtcttttgatggccaccttgatcgtcttgctcgccttgcttttcatccatctggaaagtaccttggtacagctagctttgacaagacttggagattgtgggacatcaatactggcaaggaactgctactccaagaggggcacagcagaagtgtatatggagttagctttcaccctgatggttctttggcagcatcttgtggtcttgatgcatatgctcgagtatgggatctgagatctggaagattgttctttacactcaagggccatgtgaaacctgtcctaggagtcagcttctctcctaatggctatctggctgccactggaagtgaagacaatttctgtccgatatggga

SEQ ID NO: 278599 - DNA, 593 bp, Zea mays
  unsure (1)..(593): unsure at all n locations
tgaagtacaatgacgattacaaactgaaaacatcagcgagtgagcacagcaggaagcttcaaaggtgtgacagattgctacccatctgtttccttgattcatgacaaaatgcaatgctgcatcagtacaacactacagcatatgcaatccttcacccgctggtgtattgtatgctggagcctcttacaagttacaacagattgtttgaaatgtacagcatggttttacacgctgttttaagtgaagactgtacggatggacaatggcctttacttatacagcaaagctgctgaagaaacaaatgttagcatgcacaagcacaactaccagaattccagaaaccaagctaatgcctctgtcaagctacctaattgggaaaacctgtagcttttcggcacttaagcaaccaacgtacctctccccagttgaactttcagcataccttagatcaaggaccggttgcctgtggggcttgagatcggtgtaccgctgaaacgaaggcagccgccaagtccggactccgtacaacgattcatctncataagcaaatagatgctgattgtctctgcagggtattattgcagacttcgaca

SEQ ID NO: 278600 - DNA, 446 bp, Zea mays
cccacgcgtccgctcgccgggctcgggcgttccggaagaaacaagcctggaaaatatatggtatataaacaactggaccaaacccaagtccagacccgcagcgcccgccggaggcggagggaaccgagccggcgaccggcagaccgcagagaagaggcctggagccgaccgcagagaagaggccaggagccgaccgcaggcagccgccaccgcaccagaacccgaggtctcgaggcaatcgagcgcacgcgggtcgggggctgcggccatgtcggtgagttgcgggctcgagtgggtggtgtgccttggctgcacgcggtgggcgtggaagcggctcacctacatcggcgcctacgacagcgagacgtggccgccggcgtgcgccgacgagttcgagcccgtcccgcgcctctgacgcgccgtgctcgcgaactacgacgaggagc

SEQ ID NO: 278601 - DNA, 483 bp, Zea mays
tccacgcgtccggagctcagtcatgactgttgttacgagttcatcccctcgtccctttcctggaaacggatcttaggccgccgtcgctgtcgagtactccacgccgccgagacgtttcgtcgtcgcctagacattccacgccaccaccgagtactccatcttccctctcaggtacgagttcccagcttccgagggctcggcgccgccgctgttttgcccttttccacgccgtcgctgctgcggcaggtactcccagagctcttcatctccatttccacggctcaggtaatccatggattccatttccacgctggcctctattgcttcgttctcctccacagaaaaggatgcaccgccagaaatggagtccccccagaactggatgaccaagctcttgattggccctcgccggaaatggagtccccccaggcgcaaccaaccttatccctctcaacgagatagttgtcgacatcaatggaacat

SEQ ID NO: 278602 - DNA, 661 bp, Zea mays
ttccccgcatcgcctcgccgcctcctgcccgtcttgctgaaaccctcttggtcaccgccgtggtcgatccgacccggcagtagccgcagcatcctacgagggccgttggcggggtcgtcgtcgtcgtcgtgttcggcggcgggaattggatgcgccacggagcgggcgaggggacctagttgagttgaatacggcagcgacgggaggacgtgatgccgggggtggcgtcagcagcgggatcggggatctggtcgcgccggcgggacgagatcacgttcgatcgccttcagaagttctgggatgacttgcctcctcaagcacggcaggtactcctcaaattggataagcaaactctcattgaacaagcacgcaagaatttctactgctcaaagtgcaatgggttgcttctggaaagttttgcatatattggtatatatgggaagtcattgcagcaagaagcttcatatatttgtcgactgatgacagctattgaatcaagagttacgcaaggagagcaagatggggctcatgacccatcaattcatccctggtgaggccttctatccacaaaagatggcttccttacacttcttgactgctttataaaagcataatcattatgtgtgcttcagaatgtatgagacaatgcacgggcaagaga

SEQ ID NO: 278603 - DNA, 683 bp, Zea mays
aaagagttaacaagttgggtaatatattcagatgaagagaagaagtttaacattgatatcatttttggccttattcgttcggagttgctgaatattggggagtacaatgttcatttggcaaagttaattgatgggggaagaaataaggttgcaacggagtttgcaatgtcccttgtccaagcattgtttgctcatgatcctgttggcttcacagagtttcagaatgttcttgatgcactatcgaagcatacaaagagaccaggttcacctgaatcgttgcaacaattgattgacatcgcaaggaataatgtgagcaccactactggttttgttgctgtgaaggatgaaaaggtcaaactgccgaaggataaaaaggttttagctacccgggcaaacaaggaggaaaacactgctaatgaaattacactagttgatccaaatcaggtggcagtcctgttttctgaatggtgtcagatgcgtaatcatgtaagtgctagtgatgcggcatacactcgttttgtcacacagttgcagcaagatggtctgctgaagggggatgatatctctgaacgcttcttccggattctcacggaacttgctgatacacactctctagtctgcgagcaaatcgttgctcctggtggatcatctcagcaatcaccacagcaacctcacatttcata

SEQ ID NO: 278604 - DNA, 444 bp, Zea mays
accggcacagtactcgtcctccttgcagagctggcaccaacacgccaccttaccttgctttgctcgcactcgcacacagttgcgagcgcattgcttgcattgcgcagccgcaggccgcagcacgaagctagccagtaggcggtagatggcgagcagcgcggggaaccgcttcctgaggcagctgagcgcgagcaacggcgacgaagcggtctgcggcggcctgcagatggaccagcaggagtacggcggcgccggcgtggggaggaggggatcccggcggtggtcgaagaagcgggccgccgccgccgccgccgcgaggggctacggcgccggcagcgggaatggcgtgaagcagccggcctctgccgcggggaagcgggtgatggtggtggtggacgagagctctggtagccaaccacgccatgatgtgggtgcttacccacg

SEQ ID NO: 278605 - DNA, 1174 bp, Zea mays
attgggttttatagcaaagcaatcgtttgacattgcctataaccgtcggctggctgcaatcaatggaagttggcttggtgcctggggactggagaaactctcgtgggatacacttgtgtttggaaaggtgcgtgctattttgggaggaaagattcggcttgtactttcaggtggagcacctctatctggagatactcagagatttatcaatatatgccttggggctccaatagggcaaggttatggtctgactgaaacttgtgctggagggacattttcagagtatgatgacacatctgtcggtcgtgttggtgctccactaccttgttcgtatattaagttgattgactggcctgagggtggatacttgactgctgatttaccaatgcctcggggagaaattgtcattggaggtccaaatataactaaaggctatttcaagaatgaagctaaaacaaatgaagtctacaaggatgatgagaaaggtatgcgatggttctattctggagacatcggacggttccatccagatggctgccttgaaatcattgaccgtaagaaagatatcgtgaagcttcaacatggcgaatatgtatctctcgggaaggtagaggctgctttgattgtgagcccatatgtggagaacattatgatccatgctgatcctttccacaattactgtgttgctctcgtggtggctgcacacattgagctggaaagctgggcttcgcagcaaggaatcaaatacaacgatttctcagatttgtgccagaagcaagaggctgttaaagaagtgcttggatctttagcaaaggctgcgaagcaagcgcgacttgagaagtttgagataccagtcaaaatcaagctgataccagagccatggacccccgagtcgggactcgtcactgctgccctcaaactcaagagggaggtgatcaggaagacgtacgagaacgatctggctgagttgtacgcatgatggttctactctttttgatacgtttagtgtggaaaatgtgtagagtgtcaatgtcacgctgagatctatggtaatttgataccgattatcgttctgggattattattattattttgttcagttagaggagatatataaaccttgaagttttgagttatatggcttctcttgatgccgagaagctatattgcgatg

SEQ ID NO: 278606 - DNA, 520 bp, Zea mays
cccacgcgtccgggaaaacctctcttcactatttctttccctggttgagaacaacgatgggaggacaaagttcttagaccatgacgcttggattcaattggatggaattctaccatctatgaaaaagttccgcaagctagcagagttgcttgatatgtcattgaagtccatcacatcatgttgggaaagtggagacctaattagatgtggtttcacatcatctgaggtgcagaatttcatcaaagcaatattcgctgactcgcctcttaggaaggagtgcctaggatggatcgttaggactccagcttagaatacagaaacatcatatttctgtctgtgggtcaatgatttttttttcatattcttttgtccaccataccatatagtgaagtattaattggtatgagctcagtttgcactggagacagacttgcaatctgactccccagttcaatactcaccccactgcctagaccttgactgatcagataaggctagcgattgtgcatgttaatgtgtt

SEQ ID NO: 278607 - DNA, 851 bp, Zea mays
tctatctcgaaccttggttcgccgcacggcatcagaagcacggccgtgttctcatcccgtccagacgtttccgcctcccgagccacgtccgccgttagccgcggccgacacagctcctcctcctcctcgcagctcttctccagctctcggaggcccgaggtttcatcgacccgcgctccttcatcctcgacacctcactccgcgcggcgcgggtccgcagtgctgcacatcgcgagccgcgcggcacagccgcacttgttgtccttcgtgcgtgcggtgcggttcgacgcgggcggcgggatggcggcgagcgcgcgggacagcgccgatgcagcggacgagttgtggatgaccacgacggctgggcgtcggacgccgagatggacgtggagatggatgtggtggaaggcgatgccgaccggatggacggcggcgcggatggtgatgatgagtacttgctgctcactaggataagggacacatcagcagctgaagcaagggcaggaaaggatatacaaggtataccatgggagaggatacacatagccaggcaagattaccgaaaagctaggttggaacagtataagaactatgaaaatttccctcaatcaggagagctcatggataagctgtgcaagcaagtggagaagagcagcaagtattatgaatttcagcacaacactagatcagtgaagccatcaattctccattttcagcttaggaatttgttatgggcaacatcgaagcatgatgtctattttatgtcaaattccacagtaagccactggtcatcattgtctcacaaattatcagaggttcttgacttctctgggcatgttgctccagcggag

SEQ ID NO: 278608 - DNA, 1260 bp, Zea mays
agctaccttgctcaagagcttatttccattgatcgactatctcctcaagcatggtgtgcagtgggcaattgctttgccttgagaaaagatcatgagactgctttgaagaattttcaacgttcggtacagcttgactcaagatttgcatatgctcacactctatgtggtcatgagtattctgcactggaggattatgagaatagtatcaaattctacagatgtgcactgcaggtagatgaaaggcactacaatgcttggtatggccttggggtggtgtatcttcgccaggaaaagtttgagtttgctgagcatcatttcagaagggcatttcagataaatcctcgctcttctgttctcatgtgctatcttgggatggccttgcattctcttaagaggaatgaagaggcactggaaatgatggagaaagctatagcagctgataagaagaatccactgcccaagtatcagaagtccttaattcttctaggactaatgaagtatgaagaagctctggatgagttggagcggctaaaggagattgcacctcatgagagtagtatgtatgcactgatgggaaagatttacaagcaactcaatattcttgacaaagctgttttctgcttcggcattgccctggatttgaaaccacctgctgctgatcttgctataattaagtccgcaatggagaaagtacatctccctgatgaactgatggaggatgacctataagttcactcaagcatcgtgagaaatgaacatttacttcgggttcatgatgacccgcctgtgcttcgtgttcctggcctagtggcctgcttgggcttctcaagtggaactcggaagtcggagctgtaccattagccatccagtttggaatgaaaagaaaaaaaaattaaccatccagttttgtagatttagttttagcctgtaatcagagaacacatgcgcagaagctgcggtagtttaggactctgtacaagtgttggcgaaatgacgcctgtaccattatcaaataacggaaataattaaaggatgaggatccagctgattcaagcagattgtttgtcgcatctaccacacttttaaaggtgtcacattcaaaggttgaaatcatttcagccttgaagaagagcggaggaaaagaggatgcttccgcgagtcagcctcctactaactactggcttggaggtgggggataaagctaggctcttcatgcaagcacagtgtagccatccgtttcttgctagtagcctgtatcat

SEQ ID NO: 278609 - DNA, 451 bp, Zea mays
acaagccaaagttgcaaagatggcttgatgagtttggggagtactatagcagagttgtggtagggctttctttggttgttgcacttgtgggaccattactttttaagtggcctttttttggtaactcaggggttcaatttaccgtggattatgacttatggtggctgcatctccctgtgcattggctgtagctccattggcatatgcaactgcaatcagttctcttgctagtaagggaattttgttgaaaggtggccatgtcttggatgctctttcgtcttgtcagtctattgcttttgataagacaggcacactaacaactgggaagcttatgtgcaaagcaattgagcctatccatggacatttgggtgtgaaaagtggtcgtagtaatccttcttgctgcactccaaactgtgaaagtgaggcattagctgttgctgcaactatggag

SEQ ID NO: 278610 - DNA, 468 bp, Zea mays
ggcctcctgctggaattgacattcttgtagtatggtcttgtcttatctccagcaagagagctccaagctgcaccatgcccaaaaagtgagaatgttctgtatggaactaatctattgcacaataatggcttcactcgcgggctttctgggtggagtcctatgggttcatgtcgattgagtatccagactgaagcaccccatatgttaccttctatcttgaaagaccgtgcaagccagacgcatattagtggtcattatatccttgccacgaaccgcacagatgttcggatgggtccttcgcaggtcataactgataagctaagattgcatgtcacttacagagtatctgcttgggtacgagttggttctggaggacatggacgtcaccatgtaaatgtctgtcttgctgtggataaaaaccaatgggtcaatggtgggcaagtggatgctgatggggatcaatggtat

SEQ ID NO: 278611 - DNA, 462 bp, Zea mays
cggacgcgtggcaatggaggaagagaaagcggcggcgtactacgacgagctcaatcgcaagggcgagggcgcccgccgcttcaagcaggggcttggcttctcctcctcatccgccactgcctttccttccaagcccaccgcctcctccttcctatccggttttgttcgcgcgggcgcagcccctggccccgccaaacagccgttaccgcattccaggaccccatccagtccgcaccatcgctcaagttcaccgcctctttcgcgtcccaggatccgctccaggtccaggtccaggtccccgtctcgctccagccggcgccaatcgagatcgaggtcccggtcgtgggagcgcaggccccgctccaggtcttcggagagggaccccagggcatcctgtagacgctcttaggtcgcgggggtcgagatcgccttttcgccggagcggcaggagcctgcacttgg

SEQ ID NO: 278612 - DNA, 679 bp, Zea mays
cgtgagcacagcattcggctcaatgtaagagataacagatgctcaaacgcataaggctaagataaaaaaagaaaccaaaagatcgagggaaaacttacatgctgcagatgccaaacttgcagaggcaaaccgcaagagctctcaagctgaccgtgatttagaagaggcggaagctcgtcaacgtagactggagaaggagaaactgtattttgagacagagcggaaggcccgagaaaagcaacttaaggagcaggaggaatcactgcaggaatgggagaaaaagctgaaggaaagtcagaatagacttaatgagttgcagagatctataaatgagcgagaggagagagcaaataagaatgatcaacttttcaagataaaacaggacgaactggaggaggcacgaaggacagtggaggccgctaaagttactctgaaagtcaaagaggatgatattaacaaaagactaaatgaattgcatttacaggaaaaggatgctgactcaaagcgcagtgcattggaagagcacgggaaaaaattggatgagagagaggcaaaggtcactaatagagaaaaggaggggctccagaagcttcttgaggatcatcaggtggagcttgaatccaaaagacgggattttgaattagaattagcagaggaaaggaaatcttttatcaaatat

SEQ ID NO: 278613 - DNA, 755 bp, Zea mays
cccacgcgtccggtgagtttccggcaagggttctaccaggaggcgatcatcttctgctccagcaagaacgcccagctccccgacggccaagttcccgtgccggcgcagcgcgtaccgtcgaatccggtgctgaattccgaggtctcaccggcgacagtgagccaaggtcctccagaccatcctcccggcgctcgtccgtcgccgcacagcggcgtggccaacggcaagcaaacgccacggaatcccgtcgctacctcgccgagccaggatgaccggtccggggcagggaaagagaaccagtcgtgcagcaacacgccgagcacgagcagccgccagtcgccgtcgcagcagaagacgcccaagtccagggcgacgccgccgcctgacaggcgcagggttactcctgctcagacaagccctgctattgcgcctgaccgtaaacggcctgccgacgctgctgctggcactggcagcaactctgacaaagtgacggcgtcccacgacgacgcgagctcgagcgtgccgaacaaagtatcggaggagctgctccggtgcctgctggccatcttctcgcagatggtgggctcggctgctggcggcggccgaggactaggagacgaggaccagcagcaggcgctgtccccgtcggtctccggctccagcgagagctcggcgtcgtcggaggcggacgcgtacccgcaggacccctacggcatcctggagctgggcgccagggacatcggcgcctacaagcg

SEQ ID NO: 278614 - DNA, 1026 bp, Zea mays
ctctcttgtccgtactgtgccatccggcgtgacctgctcgatgagtgcctcaccgtgctcggtgtggaacggctcagtatcgacgaggtgcagcgcatcgagtggaagcatctcaatgacaagatgaagaagtgggtgcatggggtcaagacagttgttcgctgcctgctcaccggtgagcgccggctctgtgaccaggtgcttgctgtgtccgacgagctccgggatgagtgctttgtggagtccaccaagtgctgcatcatgcagatccgtaactttggggatgctgtctctgtgtgcactcgctcgcccgagaagctttcccggatccttgacatgtatgaggcgcttgctgaggtgatccctgaactaaaggagctgttctttgggagttatgggggtgatgtcatccatgatctggagggggttcttgaaaggcttggtgacgcggtcaagggtacccttcttgagtttgggaaggtcctacaacaggagtcatcgcggcgacccatgatggctggtgagatccacccaatgacacgctatgtgatgaactatctcagattgttggtcgtttactgtgacacacttgacatacttttggatgacagtggtgctggagctgtagatcataatattttacataatggcaccgatgacgatcaggagtatctgaagagtttgaccccatttggacgccgcttagtcaaactgatatcttacttggagggtaatctcgatgaaaaatctaaactttatgaggatggggcactgcagtgcatattttccatgaataacacactctacattgtacaaaaggttaaggattccgagcttgggaggattttaggtgatcactggatacggagacgccgtggcaagattaggcaaaattcaaagagctaccttagggtttcatggaccaaagttttgtcttatttgaaggatgatggacatggcagcagtgggagcgggagtttcggcagcagcgggaactcaagctctaggatcaaagaaaaattaaga

SEQ ID NO: 278615 - DNA, 803 bp, Zea mays
cacacccacaccgcaccaaccaaccccggccggccagccagcccacgagccccatcccgccatccgcccgcgcggcgagcgcagagccgagccgagctgccggaacgcaggcagcggccaccgggaggcctccgaaacgcagcggaacacctgaggaggcggcttcccggcgaatgctctaggaggaggcgcggcgccggcggagatggggtccaagtacacgcgcgggtgctgcggctggctgatcgtggcgctgattgcggcgctggtggccacggccgcgatgttcgccatcatgaagcgcaagcccgggggccgccacatcaagccgctgccggtgccggggccgccgggggccatcgactccaagtacggcgacgcgctcggggtcgcgctccagttcttccaggtccagaaggcggggaagctggagaacaaccagatcccgtggcgtggggactcggcgttgaccgacgggaaggaagcggggctggatctttccaagggaatgtatgatgctggggatcacatgaagttcaccttcccgatggcattcacggcgacggtgctctcgtggtcggtgctggagtacggggatcagatgagcgcggcaaagcaactggaccctgccctcgatgcactgaagtggattacagatttccttattgctgcacatccttctgacaatgtgctgtatatccaggtcggtgatcctgatctggaccacaattgttgggaaacgccagatacaatgaccgagaaaacacctctcacacagatcaacaagaagactcccggatcag

SEQ ID NO: 278616 - DNA, 443 bp, Zea mays
catggcgagaaataagcccatagggcctggggggttcaaagagatgggtccacattttaccacagttccaatttcccgccggacagggacagaaatgttagtgaggatttgttacacgagtcttcacatgatataagttttccgactatggattgcgacaatatttctccaaaagggaaaagaaaagaagggccctaaaacagcaccatggcatcaaagattttctcctgatgataaaaatgccattttggtttccagggagctacactacacctactttgttttcacgtggtcctccaaaacaacggggggggggtatgggtcctggcgcgcccattaccccgccacctgggtgtgcgccactcccgcagaggtacagccccttacaggagttctgtaatccgaccatcccttggcaggcctcatgaggaagagagaatcca

SEQ ID NO: 278617 - DNA, 385 bp, Zea mays
cgccaagcggtgaagcagcatcggccatggtaggagacctagccagcgccagaggccgatgcgccgctgcgccagggccgcgctcctcctcgcctccctccgccggccacgcgcgccgacgccgacacaggatcgccgccggacctcctactctccctcctcggccgccgcagcggagctcgcgcggctccggtccgaggggctcctccgcagcgccgagatcgcagcggcgcggcgcgaggccgctgcccacgcgcgggtcgccggctccgagctgctcctcgtcctcgccgtggcgcccgccgtcctactgctcctcctcctcgggcttctctaagccagcggcggcctgggtagcgcggtggctggagtctggggcccgctt

SEQ ID NO: 278618 - DNA, 338 bp, Zea mays
cgggacgcgtggggattcatcagtaaaatgttccccaggggcgactcggtcatcatagtgctgaggaacccgaagtgatcgcccaaccagtcaccttgcagcagttatgccctttctctgggttcacggaatccgtgcctctgttgaaaaaactgtagcttatgtgtgtcttggcggattagctggttatcttgaactgacgttcatgtgacatggcaatggcacatgaacatacgtttcatgagtttgattgttaattggcgcttgcagcactttgatccctgagaaaataaaaaacccccaaaaaaaaaaaaaaaaaaaaaaaaataattaaagaa

SEQ ID NO: 278619 - DNA, 607 bp, Zea mays
gcgatcttgttccctcattgtcatcttgaaagattcctcgtcttctgacactatcaaaggttataagctatgggactggaagagcagagagcaaccaagtatggaaaagcctgttattgtgtccaaagatgaaagaaaaatacttctttatgaccttaccccatgcacagaatattctttcagagttatatcattcacagatgatggggtacttggccattcagaatctagatgccgtactgaaagtaaggagatatttgtcatgcgtgcaccaaagaatgcagtgggaggaggggctacacatgcgcaaaaaaaagacaggaaccagtcttgtaagtcaactgggttcaagatccgagatatttggaagaactttcaggaagctttagatgcagaaggctgttttgaaggattttctgaagatgtacatgaaggttcctgcagcagaagtgttacagagacagagttatctggagcttgtcgcaaacttcatttcaactcatcttctgtccccgacctaaacgccgaggttcctgtacccgtggactacactgagaaccattattattctaagaagggacttgtgaggtcaaatgacagtagcgac

SEQ ID NO: 278620 - DNA, 463 bp, Zea mays
cacacacccagcagccagcaccgatcgagtcatccttaattaccaatcagacacactcgattcgagcggcatctgtccatggcgtactcgtgcaaccacgtctgctatggagcacgccgaccaaccgccagatatgcttgatagaagcacgcctccggcctctccgagaagttcaccggacgctgcgacagcgtcgagcggcgcgtggaggtgcggtgcgactccctgcactcttcacagtgcggtgcgagaagatccaggagcaggtcgatgtcgctgcactctgcagtgacgaacatggcattgcgttggaggggaagcgcaccgacctcgagcaatggcggcccgatctcgtcaagcgggtcgaggaggtggcgtgtgtcaacaaactcctcgagcgggaacgtcgagcggaatccgtcgtcaagcccaccatcttcggcacttacacggcggcgcccct

SEQ ID NO: 278621 - DNA, 1286 bp, Zea mays
cagaggggagctcttggttctgtcaatcagctctccgtcacgattggtatattgcttgcctatttgtttggcatgtttgttccctggagaattcttgctgttctaggcattttaccctgttcaatcctgattcctggactgttctttgtgcctgaatccccaaggtggttggcaaaaatggggaagatggaggattttgaatattcattgcaagttctgagaggatttcagacagatatcacagcagaagtaaatgaaataaagagatcattagcatcatcgaggaggaggacaaccataaggttcgctgatatcaaacagaagagatacagtgttccccttgtgataggaatcggtctccttgtcctgcagcagctaagtggtgtcaatggcattctattttatgctgcgagcatcttcaaagctgctggtattacaaacagtaatctagcaacatttggtttaggggctgttcaggtgattgctactggagtgacaacctggttgactgacaaagctggtcgaaggcttcttctcattatttccaccacaggaatggtcattactcttgttattgtttctgtgtcattttttgtgaaggacaacatagctgctggttcgcacttatactctgtaatgagtatgctttcactggctggacttgtggcatttgtgattgcattttctcttggcttgggagcgattccgtggatcattatgtctgagatccttcctgttaacatcaagagccttgctggaagtgttgcgaccctggcgaactggctgacagcatgggccattacaatgacggcaagcctgatgttgaactggagcagaggaggaacatttgctatctacgccgtcgtgtctaccatggccctcattttcgtgtgcttgtgggtgcctgagaccaagggaagaacgctagaggaaatcgccttctcattccgctgacacgtcgtcatgatctaggtatgggaagccacaccacaccatgtgtccttgagtctgccgcggtgcgttcagttcatgaatcccgcagggatcttgcagccattctcttgcttggatgtaccaccatcttcagtgttcataccaatgtacattgtacaatatgacgacgacgccatagcagaaaggcaagtgggtttatgtttgtacgatggactagtagcagaaagcactcgaacccctgtacgggttgcggaggagagcaatttatttgctgtatttgcctggttcaataccggacacaagttagaattttgaaaaataaacatctgagc

SEQ ID NO: 278622 - DNA, 661 bp, Zea mays
ctttcttcgcttgcgtgctctcgccaacgagagagctggcgattcggttcgcagtgcagtttgaggcgcttggatcagctattggggtgcgttgctcagtgcttgttggaggagtggatcgggtgcagcaagtgttatccatcggaaaacgtccacatattgtagttggaactcctggccgtcttttggaccatttgacagagactaaaggttttagccttaagaaaatcaagtatttggtattggatgaagctgataaattacttaatgtggagtttgagaaatcccttgatgacattctaagcgagatgcctaaagacaggaggactttccttttttcagcgactatgaccaaaaaggtaaataaactgcaacgtgcttgtctcaggaatcctgctaaggttgaagtgtcctccaaatattctacagtagattcacttaaacaagagttctattttgttcctgcagatgacaaggattgctatcttcttcatgttctgaacgagaggctggagagcatgatcatgatctttgtgcgcacctgtgaatctactagactccttgctcttatgttgaggaatcttggtttgaaagctatgtctatcagtggccagatgagtcaggacaagagattaggtgctttgaacagattcaaagcgaa

SEQ ID NO: 278623 - DNA, 838 bp, Zea mays
cttttaaggggtatcagtggaataagcgagatagaggcatttgattgttctcactatcccacgagaatcgcgggagaaatcaaatcattttcgacagatggttgggttgcaccaaagctagctaagcgaatggacaagtttatgcaatatttgataacagctggaaagaaagcattggagaatgctggaatcactgaagaagtcatgaatgagttggaaaaatcaagatgtggagtcctcattgggtctgctatgggtggcatgaaggttttcagtgatgcaattgaagctttgagggtttcatacaagaagatgaacccattctgtgtaccttttgcaactacaaacatgggttctgcgattcttgctatggatctgggttggatgggcccaaattactctatctctactgcttgtgctactagcaacttctgcattctgaatgcagctaatcatatcagaaaaggggaagctgatgttatgcttttgtggtggttctgatgcaccaatcatccctattggattgggaggttttgtggcctgcagagctctttcacagagaaacagtgatccagcaaaagcttctcgaccttgggatgtggatcgtgatggatttgcatgggagaagggtttgttgcacttacatttgacagactattttcaacaatggcatatgacagcccgttccatggctatcgcctgaacaacggcataaaattcctcatggttattggagaaaaagaattttactgcaaaactaggcctaggaagcactgttctgtaggcgtgggagtttggaagttggattattctgactggtctccagacttcactggta

SEQ ID NO: 278624 - DNA, 442 bp, Zea mays
atcatatcagaaaaggggaagctgatgttattctttgtggttgttctgatgcaccaatcatgcctattggggtgggaggttttgtggcctgcagagctctttcacagagaaacagtgatccagcaaaagcttctcgaccttgggatgtggatcgtgatggatttgttatgggagaagggtctggtgtgcttgttttggaagaacttgagcatgcaaagcaaagaggtgcagaaatatatgctgaatttctaggaggaagtttcacatgcgatgcataccatatgacagaacctcatcctgaagggaaaggggttattctttgtattgaaaacgcattagcagattcaggagtaacaaaggaggacattaactatataaatgcccatgcaacatctacacagatgggtgatttgaaagaatttgaagctctcaaccggtgttt

SEQ ID NO: 278625 - DNA, 667 bp, Zea mays
cgaaccacgcctacggaaaactgcatccaggagaagaactcgagttttactcgctctgatagccaaagagcaccagcaacagaactatctcaaacctcatattcatcatcaccctcttcgtcattctcatcccttgatggcaacaggtcaacacaacaagacctatcatccactgaccgaatgctatttccagagaggccgtttaagagctcgccgaagctcaagagttcttttgacagtgacaatggactcgactaccctgatgacgcgcttaccaagtccaagaacatgcccatagttcaatccagcctgccaactcttggtataagaaatcttgtgaaggattcaatctacaaggatagccatgaattgtcagtcagaattagcactgaagaagaagtaaaagatcacccatccaactgtggagatcaacctatgcaattgaatgggcctcaccatgacagtacacgaggaaaaagcaagggtctcgtggacatcaatgaatcgcttagagtgctagccaagctcagggaagcctcatggactcctgctgaatctgtccatcatgcaagactttcatatgatgctcctcggttctcatacgatgggaaggaggctgcatcaaaactgagggaggcaccatgcttgtcactggacatcaaggaaa

SEQ ID NO: 278626 - DNA, 547 bp, Zea mays
cccacgcgtccgctttttcttttttttttttaaaccgaacaccataattcattttgaggtttttacccgctgccagctaccaaccaatgcatgtacgtgtgttgcccttgtggctgaccgcggtgccactcgtttgccagccaccgagtcatcggcaaatgaactggcggggtaccgagccaagcaggaaggccagtacgacacacgcagaagaagaacacggcgggccatgcacgccaaaaacattgaagtcttcagtttaccaacacacatgtcatgaagcaaaacagcggggactcgtccatgatatacaggttcctggtacagatgcagagtggccacgggacggagagaggacaccggtgtgttacgctagggctggctggctgacgacgttacggcctctctgctttctccacctctcgtcgccgagccgccctgcacttccctcagttttctttctggcctccggcgccgcatgatacacaggctcattttcaggtaccgttcgcagctcatccccgaggcatcatctgcgtagcgcaca

SEQ ID NO: 278627 - DNA, 538 bp, Zea mays
  unsure (1)..(538): unsure at all n locations
cacgcaccctaagataggggcatatctgtgcatggtaccatcttcatcatgtagctgggatgagctggcaccatgaaagaattcaagtggttaaatcatgcatctgcagaaatattgtactctcaaatggtgggttgctgcgtcatgggagtttgggtgaaggcctgaaggatgtgatgcaaaacgtcgatgcaggtctgggatgtccgcctcattatggatcaaaattcatgacgttctaaaggtgtcggatgagtacctatatactccctcccagaaaacaaggcgcctcattacactattggaagctggacgacatggatgactctggcaagatgcggtgggagcacgacgacatggatgactccgaccatgagttcgacaggaagcctagcaacagtacgcagtagcaaggttgacccagaggggcagtggagactaacccaacaccccctcctccgaccgtcatagcgcttctttcctctggcttcatttcttacctatgtatggatggtcttcaccactggntacatctagc

SEQ ID NO: 278628 - DNA, 789 bp, Zea mays
gctgctgctaccgcagcccctccgtgggccttcttatgccatgacatactcagatcaggatgaaatgtgttctcatacctttgtgattagagatattgcggcctttattaatctgatctgtttggagctccgttagctcgcccccaaactttagttagagaaggtgttatgtcttttgtcaagattataacatttctgaacaattgtgctacacacgacgtggcaccatcctcatcatgtagcctaggatgagttatcactgttaaatatttcaagtggttaaatcatgcatctgcagaatatattattgttgcactctcaaatggtgggttgctaacttgctatgtcatgggagtttgggtgaaggccagaaggatgtgatagacgtcgattcggtgcaggggtgggaatatcctagcgttcgccttggtttcggtcttctctggcagcaagtgtgctcccagttttcaagctgtcaaagctgtccaactcagttccttggggaaggcctcgattcgctcatctcctccgacccggaggactacaccaatatgaagcagtatgagaagctgaccgtcgcgtcaatttactttcttgtgatgagtgttgagcatcatcatatgattcatacaattgatatgcaactagaacccagattttaatgtgtacggttatgatttatcttttcccgttaaataatgtgagatattgaggtgtatgataaattatatgttcatctctatgtaatcattatacactaacattttaataacgagagcatagaccgat

SEQ ID NO: 278629 - DNA, 705 bp, Zea mays
cccacgcgtccgcccacgcgtccgcccacgcgtccgcggacgctggctcaagtcgtgggccgtcatgaagaaggacgccgccaacctgggcctccgcttctttctcaaggtcttcgagatcgcgccgtcgggaacagatgttctcgttcctgcgcgactccgacgtgccgctggagaagaaccccaagctcaagacgcacgccatgtccgtcttcgtcatgacctgcgaggcggcggcgcagcttcgcaaggccgggaaggtcaccgtgagggagaccacgctcaagaggctgggcgccacgcacttgaggtacggcgtcgcagatggacacttcgaggtgacggggttcgcgctgcttgagacgatcaaggaggcgctccccgctgacatgtggagcctcgagatgaagaaagcctgggccgaggcctacagccagctggtggcggccatcaagcgggagatgaagcccgatgcctagtgtggcgattgcgaccagtgtttaacccatgacgcaacgccgtcacagatgtcccgtgtggtcttgcgctttagcaatttctctctggagggagcgtgtattgttatcttgtgatcgagagcctgtgtgctgcctttgcttcttgtgattatatagctactgaataaagatgtagcgttcttcagcctgttacatcgaattcaaaaagattctatttcgttaaaaa

SEQ ID NO: 278630 - DNA, 405 bp, Zea mays
cccacgcgtccgcccacgcgtccgacccaacctcccactgtaaaaaagagcagcggaacgtgcgtgcatccatccatccatccatttccaatcccaatcccaatcccaccagtgtccagtgctcggggaaccgacacagctcctcagcagagtagccagcacgacaagcccgatcagcagacagcaggcatggcactcgcggaggccgacgacggcgcggtggtcttcggcgaggagcaggaggcgctggtgctcaagtcgtgggccgtcatgaagaaggacgccgccaacctgggcctccgcttcttcctcaaggtcttcgagatcgcgccgtcggcgaacccatgttctcgttcctgcgcgactccgacgtgccgctggagaagaaccccaagctcaagacgc

SEQ ID NO: 278631 - DNA, 1479 bp, Zea mays
  unsure (1)..(1479): unsure at all n locations
nattgacgcgtgggcggacgcgtgggttnngggttgattttacccgnaccatagatcggcgcccatggctccggccgttttcgtggtggtgtcggcggcgatgaggcaggcactgcgggaccggcagatcctcgatgccgtgggcactggcgctgcggtgctctcgctggcaggctcttccttcatcgtgatctgctacctcctcttccgcgagctccgcaagttctccttcaagctcgtcttctacctagccgtctcggatatgttttgcagcttattcactatattgggggggccatcgaatgcattttactgctttgcacatgactacagtgctcatttcttctgtgtggcttcttttctatggacaaccaccatatcattcactctgcatcgcacagttgtaaaacacaaaactgatgttgaagaatttggatctattttccacttatatgtgtggggaacttcactatctaccactgtattacgttcgataggaagtgactaccgaagaccaggcacctggtgctggattcagcagggaagcatggcaaaggtcctacatttaataaccttttatcttccactttggggtgccattttgtacaatgggtttacatactatgaagtaaaccgcatgctgaataatgcaacgcagatggctgctggcataagtgatcgatcaaatcagtctgacatgagggcaggcaggaaggcatttaaccgatggggttattaccctctaattctaatcggttcatgggcttttgcaactatcaatcgtctttatgactttgccaatccagggcacaggatagtctggctctcctttcttgatgttgggttcgctggacttatgggcctattcaattccattgcttatgggctaaactcttttgtgcgccgagctattgcagagagaatcgacacgttcctacctgagagaataaaaaggagcctccctgctttgtcaaggctgaggagtcaacaagaaaatgaactcacttctcttatcgttgagggtaactgatatgtaatggattttccatgcacacgaagccttttttttgtttatctgttcgttcttcaatctccaacaagggaatgcaacatcactgtaggagcagtgggttagtaacacgtcgaattggttccgctgtgtccattgttgatcgtcttaacacgagacctggggtttggggttcaccgctccggccggagtacataggagggctagagtaggaacagtcggtagatagactgatgttcatctgtagctaggtaagcagagtctgtttgttcagatgtacgagtataaccacctctgtacaatgcacattctagcgccacacgattgcaaattttcagttttcccccgtaccatttgttctggtacattaggtgagggaacttttgtgtgcttttgagaactatacccctgatctttcgctgtagcaaaaaaaaaaaaaaaaaaaaaaa

SEQ ID NO: 278632 - DNA, 290 bp, Zea mays
attatttggagctcaagggtctccttttctcctctttttcagcattttcctttagttttgtgtaatggatttctgcagcatcaagagtgatactggcaactccattgataagactgcatgctcaaataaagcttgggccatgaagtgagatcaagctcatggacaagtagcgatcatcttttatccaatcttagtgtattcccaatagagcacacgtgaagaaaatattttgtttgactactgtaaatgtttaaggcaatgaaaattcccaatatgaaatagttgtggtt

SEQ ID NO: 278633 - DNA, 684 bp, Zea mays
gacccacgcgtccgggggacggtaccggcgccgctcctccagctttggggcctgcgcacgctcgtgctctcggggacggcctctcgggcgagagcccgcggtcggtccgggcgccgctgctccacctggacctgcgcgggaaccggctgtcgggcggggtgccgccgctgccgggcacgctgtcgtacctgtcgctggcggggaaccgtctctcgggccccgtcggcggcgtgctgcggcgcctgccgaggctgacgttcctcgacctcggccggaactggctgtcgggcgaggtcccgggcgaggtgttcgcgttccggcgcatcgcgtacctgcagctgcggaagaacgccttctcgggcgagctccggcccgcggggcgcgtgccggcgggcgccacggtggacctgagccacaacgcgctgtcggggcgcgtgccgcccgagctggccaccgccggcgccgtttacctgaacgggaaccggctcgcgggcgaggtgccgcgcgaggtggcggcggcggcggaggccgggcggatgcgcgtgctgtttctgcaggacaacttcctgacgggggtcggcgtgggcggcgcgctgccggccagcgccgccgtgtgcgcgcactggaactgcgtcgcgccgccgccggctgtggtggccgcgtgccccgccagggcggcagggg

SEQ ID NO: 278634 - DNA, 1334 bp, Zea mays
tgctctcaaatccagacagttcttcgatttttttcagccttttctccttcttctaacggaacaggaaggagcgagcaagacgccgttgagaaaacacggggtggtattctgcagtaaaaaaaaaaaaaaaacactcgaggcgaaagtgtccaaagccagaggagagaaagagaagacttgtacttggagggcagctgggcaggtgaaaggaagaggaaagagggcgagtgcgacgggaggcgcaatgcggtggagatctcccgccgtgctgcggctgcagctgtggctgctcgccgtctccgcgtcgttggctgccctcggtgttctcgcggctgatcttagcaaagaaccatttactatccgtataagctgtggaagctttgacgatgtccggacggagcctacgaacacattgtggtacagagactttggttatactggaggcaggttcgctaatgccacccggccaagctttatcgatcctcctcttaaaacgcttcgatatttcccgctatctgatggccctgaaaattgctacaacatcaacaatgttcccaatggccactatcaagttagacttttctttgcgttactggacaaccctaatcttgacagtgagccgattttcgatgtttctgttgagggtactctgttcagctctttgcttctgggctggagcagcgacgatgagaagacatttgcagaagctttggtttttgtccaggactcaagcttatcagtttgcttccatagtacagggcatggtgatccatcgattctttctattgaagttctacaaatagatgacgatgcctataactttggtccaccacgggaaaaggggacagtgcttagagcagtcaaaaggctgaaatgtggctcaggaaagcctgcttttgatgaagatctaaatgggattcactggggtggggacagattctggttaggattgcaaactttatcatccagttctgatgatcaatcaatatcatccgagaatgttatagcagagacattgcttgcaccaaatttttaccctcaaggcatataccaatcagctatcgtgggcactgataggcaaccgagtttgtctttcgaaatggatgttaccccaaacaagaactattcagtatggcttcactttgcagagattgataatggggtaactgcagaagacaaagagtatttgatgtactcatcaatggagacactgcttttaaagatattgatataattcgcatgacaggagagcgttttactgcacttgtcctgaataaaaactgtgctgtcagtggaataacactaaaaatcatcttgcaacctgtgaaaggaac

SEQ ID NO: 278635 - DNA, 452 bp, Zea mays
gctatggtactgaaggagtccctggttcggatctagaacactactcccactgtgcccgccttagggccaggagacatcgtggagcacattctgcggacttgtttcttgcagctttttccttaggtctttgttgagatcctgcttctcttgttccttgcttttgagatcaaagagctggtcgagtagcgtctgattctttcttgacctgatatgcttcagggatacctctatctggttctccagctgctcgagctccttcatgctgagtgggcccagatcttcgccaaggatgtttctttgtgtagtctggagaaaatcaactctggtcctcaacttcaagtagtcctggtagttaatttcactctccagtggagcttttacttcctgtgtgctggagttggagctgcggtatctctcgagtgttttgtacatgcatgaggagctggagaact

SEQ ID NO: 278636 - DNA, 512 bp, Zea mays
tcgcggacgcgtgggcggacgcgtgttcggactcttgggcggacgcgtgggcggacgcgtggggggacgcgtgggcttggatgaggatattgccagtccagctagtggagcaagaaagaaacgagcatgcaacactagtactgcaacaaagccctatgttgaagattatgaggggaatgtggggaactttgcaatctaatagtgctactgcaaaaatggttctacagggaaaattaaggacagagtccatcaagaatgcgatgaatctggttaagaaatgtggtgcaccagaaggaagtgttgagcattacatggctacaaaattgttcatgaaagctgaaaactgagatatgttctttacttttgaatcaaatgaaggaaggttatcttggttaaagagaaattgtcaggactatgggttgtattgagttgggagttatcatgagtgtgtcataaaccttttatgtactactgtcttgaactattttatgtagtattgtcgtagaccttct

SEQ ID NO: 278637 - DNA, 417 bp, Zea mays
cccacgcgtccgcggacgcgtgggttttgttaggccgaggccattggtgccatgcggccagcccttttcttctccatggttcccatcgatgtgtttttgttcggttctctcgtcagatctgtataaataggcgcctcccttctccgccattcctcggtcctctgaagcgtttcagttcatcgattcagttcttggatgcctcttgctgtattgggtgtttcttctttctggtctaggtactaggactatagtaccaggatctgagtcgtttttttttgggtcttgctcctgtctgccgtttctttccccccttccagagttaggttctgttggtttcttgcctgcaatatagtttcgtggcgcaccgtcaagggtgtgtctagactttaaagactggttgttggcagttgggtttat

SEQ ID NO: 278638 - DNA, 517 bp, Zea mays
gcatgattgagacatctagctagaacttttagatttcaatgatggaagaaagctcagggggcagttatataacattatgggcttccagttttggcatcttctattgtgttaagaaaacttcattttaactgacaaagtgtcatcttactatttagtttgctaaagggatgttactcatggttagtccacaatattttacatttttacatatcttgtagctcttcactttcaggtttcttaaggaactagacttacaaaagagtggtgtgaaacatcaagaccatcagtggattaattggtttcccaagtcttcaacatcactagaatgcttggatttttcctgcttgactggggaggtgaatgctggtgcactggaggaacttggtgcaaggggtcccaatcttaaaaggttaagggtggatcttgcaggtccatttgatggtttggccaaaatcctttcttggacaccttagcttgagggtttaaggaccgggtcctttttaccagggaatggccc

SEQ ID NO: 278639 - DNA, 572 bp, Zea mays
tccagctctagtgaagcaagatttccaattcctgatataatcctaagaacagttactgggagtatgtttcctgttattgatccacggcaagtaatctccattcaggaacatgagtatgtttattgcctggcaatcgtcaagagcatgaagctcaacattattggacaaaatttcatgactggtcttcgtgttgtgttcgatcgggaaaggaaaattcttggatggaagaaatttaattgtttctcaccttcaacatctgagaactactctccgcaggaagcaaggaacccagctggtgtttcccagttgagaccactgaacaattcagcaccagcagcgttatatgatagcttgctcctgatgcttatcttggtccacctggctgtaaattagtttggttcttaaaatagatactgtagagcttgactagaggtacaccatagagaacaatattgtttagtggttacacgtcctgtaatagagatacttgtgatgccgattttttatggctcattgtacaaccattcccccgtcttgttttcacccaaaagggtatctcagattttatctgt

SEQ ID NO: 278640 - DNA, 575 bp, Zea mays
tgaaggagtcggaggctctgcaatccaggaaggtggaattagaggcgaaggtgggttctttggaggcagagctctcagaggccgtcgctaggaaccatggattggagttggaagggcacaaattggatgtagagatggccgctaccaaggcggaggtggagaagctccacgccttgcttgcggagatggaccagaagcagattgttgtggctgctgaagtggctaggctccaaagtgagcttgaccaagtggcgatggcgaatgaagctgctgctggggcacatgaggctgagaagaagatgatggagggtgaattggagatgctgaaggtgaacgtggacatggttcaggctgagaaagatagtgccttagtcttggtagatgctaaaaatgctgaggttggaaagttgagggatgaactgaagaagctcaacagttccatggctgcgctccgtgctctctatgatgatcttgatggaaagtcttctttcctccacgatgagaaagtttcggttctcaaagaacttgagcaggagaaagctgaagcagaaaagctgaagtccaaaatccaggag

SEQ ID NO: 278641 - DNA, 691 bp, Zea mays
caggtatccattctttccttttctatttgcatatatgtagcaacccacttttctatttgcatatatatatgtagtgtgtcttcagatatattgaattgtggtaatattattattattatccttttcgttgcagagcattccattattccaaccttattccagagtagttctgtgcactttaaagccgaacgtttgtggatccagaaaagaagcaaattttgtatgtatatatgtgtagatccaggtgatcgctattgttagcttttgtttacaatggtcgccacccaaaaaagttgtaactcgctcatttctagacttgtgaataatgttgttagcactatgtttgcttttgcagtgacactacctgacgcttgtaatgttgcttggtcgcgaactgttgtcgcgctatgtaaagatctagacataatcactttgtttgcatgcttgttgaaaaaaaaaaaaaaaaagggcgagttacaacttttttgggtggcgaccattgtaaacaaaagctaacaatagcgatcacctggatctacacatatatacatacaaaattttcttctttctggatccacaaacgttcggctttaaagtgcacagatctactctcgcactaaggttggattactcccatggtctgcaacgaaaaggataataataataatattaccacaattcaatatatctg

SEQ ID NO: 278642 - DNA, 376 bp, Zea mays
tttcacgcgtccgcccacgcgtccgaaataaacatggggcaaaacaagcaaagtgaagaaagctgccggcctgccgctgcctgctcgcagttgccagcccccgccgccgcggaggacggaaggaagcgaatcaaccgcgactgtctccgacgggaataaagcaggcgaggccagccggtcgcggaacccccaattctcagctgcggccggcgatcgagtcggttccgtcccgcgccgatgcggatcccgcggcggaagggcggggccgggccgctcgctgtcggggtgcccagcatgcgggcgcaagtcgccgcggtcttcgcgctcgtcgcactgctgggggtctccgtgctctacgacaacgcccacattggcg

SEQ ID NO: 278643 - DNA, 406 bp, Zea mays
  unsure (1)..(406): unsure at all n locations
cggacgcgtgggcaccaatgatgcgaagttttgtgatgggaacatatgtcatcgcaaaggtcaagaaagaagacggaaatatttatgtcttgttgaatgggatgggtgccacaccagaaggaaatgttccattcctcgatttgtttgatataaatactgggagtaaagagcgtatatgggagagcgacagggaaaagtactatgaaactgttgttgcactgatgtcagacaaaactgacggggaactgctccttgatcagttaaagatacttacgtcgaaagaatcaaaaacagaaaacacacaatattacttgcagacttggccagaaaagaatcaagttaagataacaaatttcccncacccatatcctcagcttgcttcattgnataaggaaatgataagatc

SEQ ID NO: 278644 - DNA, 528 bp, Zea mays
gttcttacgaggccgctgggtgagcacattccattcgtcgtggccggaataaaacaatctgaacaggctgttttattccggccacgacgaatggaatgtggtcagcttggctgctgtgatgttcttacgaggccgctgggtgagcacggcattggtggtgaagaccttattgccatttaccggcgtgctttccatcggtaccttccttggcggcacgaccttcctgaccggccttcttgctttcgccgccgctatgactgtctggctccttgtgggcacctactgcatcaaaggtctcatagagttgtgattagagtatgttagactcgttgtagggggttcaagggtggcatatttttaagagttcaagcgtggcacatttttgattggtattgcattcctgtataatggattcttgatgttattcatgcacctatatgttccaaattccgaatgaattgatgcactaaaaaaaaaaaaaaaacaaaaaaaaaaaaaaagggcggcagctcgcgatctagaactagt

SEQ ID NO: 278645 - DNA, 518 bp, Zea mays
ggagcgcgcacgcacacacgagacagaagccttgaatcgaagcatcaagccctttctctgagcgccgatggcacggtatcttctcgcccccacttccacctcctcctctgccctcctccccaaggatggcgtcaagaactcgccgacgtcacggcccctccgcctccgtgcgctcggctccaggaccagcaaggcgcggcacatcatggcggtggcgtccgagcaggccgcgccgccggccaggtaccccaaggtggctgcccctaccaccggcccgatccccgccgccgagctgctcggagtcatcgaggccgccgcaaaagctggggccgatgttataatggaagctgttaataagccacgcaatatccactataaaggtgttgcagacctggtgacagacacagacaagttgagtgaatcagtcattttggaagttgtcaccaagaacttcaaagaccacctcatacttggggaggaaggcggccttgttggagattccctatcagagtacctct

SEQ ID NO: 278646 - DNA, 550 bp, Zea mays
tggccacacggtcaggactttctggttcaccacgccgcccaagccgggccctgatgtgccattcaagttcggcctcatcggcgaccttgggcagacgttcgactccaacatcacgctgtcgcactacgagtccaaccccggcgacgccgcgctgtacgtgggcgaccgctcgtgcgccgacaaccacccgctccacgacaacaaccggtgggacacgtgggcgcggttcgtggagcgcagcgtgcgcgtaccagccgtgggtctggacggcgggcaaccacgagctggacttcgcgccggatctgtgcgagaccacgccgttcaagcccttcgcgcaccggtacccgacgccgtaccacgccggcgggagcacggagcccttgtggtactcggttaacgtcgcctacgcgcacgtggtcgtgctggactactactgcgcctacggcaagtacacgccgcactgggcgtggctgcaggcggagctggcgcgcgtggaccggaagaccacgccgaggctcgtcgtgctcacgcactcgccctggtacaacag

SEQ ID NO: 278647 - DNA, 1180 bp, Zea mays
tgccttatccttcaggtatgtctcatgttgactttgcttttggaatggtactgttggcttcattgctggaatgctggttataatcaacctttactgctctatattggtctttttttggtttgcacaaccagggtggttggttttctgaatcaatcaatccatttcctcggacacaagataatttttgtatgttacacttcccaaaattgcaattaattcagaagtctgcctactttcattcagttagttctcagcaacactgaaaggatatgaatcagtcaacccgatagatgtttatctggttattccaaacaatctgacatcacatctgtttctgcaggcgagataaggaaaatctgaaatgctatcaccatttaaaacattggctcctggaagttcaggtgattaacaaacctccttcatctacatctgacattggcatgtatggtagagtccagcaactcttgtgatggcaggagtcgttcttaaacagcaactgctccttcgttcagcgcttctcatttctgattgtattgaccgagagcatccacctttccttctggtatcaactgaatgagttgccgacaccgacccatctgcgcataatggcaggttaggtgttgctgtagaatgagatggttaccatctttacaagctcaggctatatgattccagcagcactgtaacctggggtgcaaatgtgaaggccctgcaagcactttccaggccacaccaattctgcttggttcttgaagatacattcttcctatggtgccacctatataaaagccatttctggttgttatgtttatccttgacatgtcaacagatcagtgttgggttgcagtcatgcggtccttaagtcccggagaaggcgagaagtcattgctgctagcattgtgatcgtcggccacaaaagtaatcaaaaagtgagagctacttgttcctagcaaatggagaagggcgatatataggttgatgatcaaattcagtgtatctgtgtatgcaagcagcatattttgtttagagttagcttttgaggttcatcatttcatttcacagctgattctctatgttgtaactccttagtcgtgtagaaattagaatgctaactgcttaattttcagtgaataatttgctagcacctctttgaatgtaattgcagtagctctgcctctac

SEQ ID NO: 278648 - DNA, 640 bp, Zea mays
ggggacgcttcgaactgctcgtctctcgctgtagtcaataccgcaagggagaggatcgccaagcacatcgacctgtggctgtcgcaatgcagcaaaccatcagtaggagcctggtaaccgcggactagtggttcatccactcgggaagagtggaaagaggtttggattggatgtcctggagcaaacttgtgtcgggacttggattacgtgtttgtgcactttgaaaagcagataaagctgatggtgtaaagcagcagtgcccggtaccccaccagggtacgtgatgcaggcaggggtggtgctgtctgtgtcgatgccgtcatccttttctggcgtggcgctgcatatgaccgacgtgtcacggcgcgtttgggtgcgcggcgcgcgcgcgtcaaaacgtatcaagtactactactacgtgccgtgccaggtgttgcgtcaaaacgtaacaagtttctcccttccgttcttttgtccgagcgagtttacaagtactatactaccaaaggcgaaagcgaacccgcaattttcctatgtaggagtatatactagtggactgcaccaacatccggtccacgtaaaccatgtgccttttccgacgtgtatgttttatttaatggcatgtgttcacttgtgcatc

SEQ ID NO: 278649 - DNA, 1266 bp, Zea mays
tcgttgacgcgtggggctttgtgtgattttccatatgataaattggacatatctgatgaagttagagagcaggttgagttagtgcatgtacagctcaaaagagccaaagaacgggttgacatgcctgatgatgagttctacaatgaattactttcactgtataacaagagccacgacccaagtgctgaattggatatccttggaagattgtcagaaaagctgcacctgacgaccatcaccgatctcacacaagaatcgcttgctttgcatgagatggtggcatccggtggcggtaacgatcctggagaacacattgaaaaaatgtcgatgctactgaagaagatcaaggactttgtgcaaactcagaaccctgaaatgggcccgccgatgactaccaagctaatggatcccaatggggagccaagacccagaaacatccctgatgagttccggtgtccaatttctcttgagctgatgaaagaccccgttattgttgctactggccagacatacgagcgggcattcatcgagaaatggctagcttccgggcaccatacctgtccaagcactcaacagaggatgccaaacacgacgctgacaccgaactatgttctcagaagccttatcgcgcagtggtgcgaggccaacgggatcgatccaccgaagcgctcgacgcagcctgacaaacctacatcttcgtgctcttcgagcgaacgtgctaacatcgacgctcttctctccaagttatgctccgcagatcctgaggaacagagatcagctgctgcggagctccggctcctggcaaagcggaatgcaaacaatcgtatctgcattgccgaggctggtgccattcccttactattgagtctcctgtcgtcatctaatctgcagacccaggaacatgctgtgactgcacttctgaacctctctatacacgaagataacaagacgagcatcatatcatccggtgccgtcccgggcatagttcatgtcttgaagaatggaagcatggaggcacgggagaatgccgcagccacccttttcagcctgtctgtggtcgatgaatacaaggtaacaatcggaggaacaggagccatccccgctcttgtagttttgctgagtgagggcagccaacgcgggaagaaggatgcagcagccgccctgttcaacctgtgtatctaccaggggaacaagggccgtgccatacgagctggcctggtgccactcatcatggggctcgtgacgaaccccaccggagctctgttg

SEQ ID NO: 278650 - DNA, 735 bp, Zea mays
  unsure (1)..(735): unsure at all n locations
cccacgcgtccgcccacgcgtccgcccacgcttacttacggtatatggccggcactgtgaaaggcatgaggacacccaaaacagcttatgactttgaggtttcttggagagctctttctgatgacactgcccagcaaatacagttactaaagtcgattccaccagcaagcctaccagagattttcaagaacgcactctctgcaccttttcttattgacatcgtgaagtgtgcagcctcaattttccgggatgcggaggcattagctgtcagtattttggataatttggctcgagttccacgcttcgacttgataatcatgtgcctttcatccatgcacaaatttgaactgaggaagatatgggatcaagtattccttgctgaaaaagcgctggctgatgatcagatggaagctctgaggcagctgcgaggcagatacattccgggaggatggcaggatagcatgctcacttcgagttaaatcaatcaatcaaatgacgacgatgtaaagcaggattgttacaaaaaccttttgctggcttcgcaactgatgtctctgcatccatctgttctagaatcaggagtgcctgtcgattgttaagcccactggtctggatgtagcgaacggttgaagcatccagtgtaggaacatgtgtcgactgcaaatggttcagtttggttgcgccctgctttttcaaaaaaaaaacccgttnggtgnnnnnntaaaaaaaaattat

SEQ ID NO: 278651 - DNA, 364 bp, Zea mays
gcagtactgattgcacttgctgttctctgtctgctggtatctcatgtgaaatgaccgagtgccgtgaatctagttttggttcacgttgtgttatatattaccacagtccacgctgtactcatagtgatcacgcttgtgctgtgtcatggattctggaggaccatcattgtttcaaagcatttcaatgttgtgctccaatgtgccatgccctacagatggtagttctggttgcttgcttgtcagtggcatgatctgtcataaaaaatattattcactaatccctgtatttattcagcaccaacacatgatgtaaaagtttttgctcatgcatcatatataaaaaagaaaaaaaaaggggggcccc

SEQ ID NO: 278652 - DNA, 657 bp, Zea mays
ccttcgtttccgcccacgcgtccgcgcggcgctcctgccgccgcctcgtgggcgggctcctcggggcgacgccgagcaccggagggtggtcaacgccggcgcccacccgcggacgcccttctacggggagttcctgcgcgcggccaaggccgtgtggatgctgcacctgctagccttcgcgctggagccgccgcccagccacttcgatgccggacgcggtgcggagttccaccaggagtacatggagagcgtgaccggcgcgccaccgcacggcggcgcgggcctggtcgtcgggttcgccgtcgcgcccgggttccggctggggaacggcgccgtcgtgcgcgcccgggtctacctggtgccgcgtggtggccgaccgtgacagacccatgcatggcgtgacagaccgcgtggtagcgttgcatagcgccgcggcccacggatcacctccgagagttgttggtgggtgccaatgcgcaccctgctggagcctgcagctggacctgcggagtagctgctggctggatgcgttggtgaagaacagacaaaggctcatagctactgtactagtggctccgtagattttatttcattttacttctccttgttaatctcaaaaaaagtaataatcgccatgtgtaagaggactttggattt

SEQ ID NO: 278653 - DNA, 450 bp, Zea mays
  unsure (1)..(450): unsure at all n locations
accattttgacattgacctaaacatacctgcagcaccaatagacgacggcccagtggagggtaacagaattgcagtgtgtcctagtgttgttatcaaggtacaaacagagtaaccatatgaaattcatacaaacaaggtaaactcaaatgtgatggagacaactgaagaacatgatccatccagtgcacccacacaaaaggttatccctgattttaacatggcagacttgaacacaatggatgaatctaaacttcgcacaatcctcgagcatacgtctccattgttgcaagcacttgctgaagtaaaaaatggggagtccaacaactgtgaacaggctaagtcaagctttgaagataagaaagtaaacatggcatactctgacggngccaccaaatctgagtgcgattagcagtagcttgcaagatattgatgtttatacgctaaactgg

SEQ ID NO: 278654 - DNA, 578 bp, Zea mays
cggacgcgtgggtaaaacgttaaaagtgcttgcccaagtttcagaagttaaaaatatgaggttaaacaacatagaaaagactttggaccgcggagaaaagttgagtgaactccaagacaagacttctgatctacatagtcaggcccaggagttcaagaaacagggggtgaagattcgtcggaagacatggctgcagaacgtgaaaattaagctggtgattcttggaatccttttgctccttgtgatcatagtctgggtatctgtttgtcaaggctttgactgcaccaagcatgaaacatagtagtaataagaatggtgcagcacgactgtggcagagctgcgatggatgcgagtttgtgctggtgaggtcaagtgtgtacccacatatgctttggctctcaagttcgattccaccagacaagtatcacggtacaaatgtaagtccgagctggtctttgttgcacgccggaggtaggtgtacttgcaatgcaagactagcatgatataaagtgatagcatggttccttctgtactagctgaattcgctagaatctagcataaaatgcatttcaattacc

SEQ ID NO: 278655 - DNA, 941 bp, Zea mays
ctcggtcatctcatatcctgagccagagatcaaacaaaccagagggagcgaggcatggcagcaggcttgcaggtgtttggccagccggcgtctactgatgtctccagggttctgacatgcctgtttgagaagaaactggagttcgatcttgtccgcatcgatacattcaagacgcatcacaagcttcccgagttcatcaggcttcgggatcctaatgggcaagtgaccttgaagcacggcgacaaaactctcgttgattcgagggacatctgccggtacgtctgcacccagtttccaaacgatggaaacaagagcctttacggatccggcgctctagaacgggcgtcgatagaacagtggcttcaggcggaggctcagaacttcgggccccccagctccgcgctcgtcttccagctggcgttcgtccctcacctcacccacctgggcgttcgtcaggaccctgccgtgatcgccgagaacgaggataagctgaagcaggtccttgatgtctacgacgagatactctcgaggaacgagtacctggctggcgacgagttcaccctggccgacctctcccacctcccgaactcgcactacatcgtgaacaccgagagaggaaggaagctcttcactaacaagaagaacgtggccaagtggtacgagaagctctcgaagcgcgagacgtggaagcaggtcgctaagatgcagaaggaacatcctggtgcgttcgagtgattgcttgtcttggggggagctgcgagtgcaccatcatgaatggcttcatcgtctgtgtcggtctggctctacagttcattttgtttttgagtgatccattgtttaatttctcccatcagtgttgtcgtgtgaaccaaaaataatgtgaagcccagctgtgatggaaatgatctttttgctctaatctatcatgacggataagctcc

SEQ ID NO: 278656 - DNA, 395 bp, Zea mays
ggttcttgatgtttacgacgaaatactctccaagaacgagtacctggctggtgatgagttcaccctggccgacctgtctcaccttccgaactcgcactacatcgtaaacaccgagagaggaaggaagctcttcaccaacaagaagaatgtggcgaaatggtatgacaggctctcgaagcgcgagacatgggtgcaggtcgtcaagatgcagaaggaacatcctggtgcgttcaagtaatggcttgtcttggggagttgtgagtatggcttcatcgtccgtgttggtctggctcatcagtgttaaaagcccatcagtgtcgtcaaccagaataatgtgaagcccaactgtgatgtatggtctttttttttttaaaagcgcatttgtaaactattgg

SEQ ID NO: 278657 - DNA, 447 bp, Zea mays
  unsure (1)..(447): unsure at all n locations
cttataacgttttctatacaagtttacccgtcatgactataagctttgacaaggatatctctgaaacaacggttatgcagtacccccagattttactgcattctcaagctgggaggcttttaaatctcactacattttgcggatgggttgggcgctcgctatatcacgcactcgtcgttttcttcattacgatatgcgcctactcagatgagaaaagtgagatgcacgaactgtcaatggtagcactgtccggttgcatttggttacaggcttttgttgtgacaatggatacaaactcattcacttgcccgcaaatccttctcatctggggaaactttgtggccttctacatgatcaacttaatactcagtaccgtcccaagtctccaactgtacacaatcacgttccgcctgtgtagccaaccttcctactgnatctccatggctc

SEQ ID NO: 278658 - DNA, 420 bp, Zea mays
cccacgcgtccgggcaagccttctcggcacaagatccagggcgtcgggccgggattcgtgcggaagaacctggacacctctgtcaccgacgagatcgttacggtgaccgcagaagatgcgatggcgaacgccaggaggttggccagggaagagggtctgctagtgggcatatcgtctggggcgaatctggcagcttgcctcaaggtggcgtcgagacaggagaaccgagggaagatgatcgtcaccgtgtttcctagcggtggcgagaggtacatgagctccgatctcttcgcggatgcaagggaggagtgcgtcgccatgaccttctgatcttctggacgctctgtgcggatctgcagcggcaaactgctatttctcagcgtggaatggatttttagtatcgtcgatccaatccagcag

SEQ ID NO: 278659 - DNA, 1459 bp, Zea mays
gttactaccaattgtcccacgtttccgaatgatccattgccgccaggcgagagagatcatggagtcgttgtgtcaactttggaaactcatggactctcctgaagaagaaaagagacagtttagtaacgtaatgagcagcctcatattacctgaggagggaatcacgtcacctgcagctctctccgaggaaacaatcgagaagatggaatttgaggtcgagaggttaacaagactaaagaccagcagactgaaggaaatcgtcatgaaaaggagggcagagttagaagcgatctgccagaatgcacacatagaacctgatgtcagcacggcccctgaacagactgatgctttgatcgattctggcctcatcgacccttctgagctcctggcgaatattgagtcacaaatattaaaagcgaaagaagagtctcttagtcggaaagatataatggacaggataaatagatggattgctgcttgcgatgaagaggcttggcttgaagaatataaccaggacccaaagaggtacagtgctggaaggggtgctcatataaaccttaaacgggcagaaaaggcacggattttggttagaaaaatcccaagtatggtggacgacttgataaaccgaacctttgcttgggaaaacgcaagaaataaaccctttctctatgatgggcctcttgatttgcgtgcgcttttgatagggacgcctaatatctgtactagaagagtacaggcttagccggcatcagaaagaagaggaaaatcgacggtaccgggaccagaagaagctggagagcatcctacttgcagagaaagaagcgatcttcggatctagaccaagcccaaggaagacgagcagcttaagtaggaaggcaaatgggtaccggccaaatgggaacaccaacggactcaagactccaactcctcgccgattgtctctcggcagtgctactcctgagcttttgacgcccagatcgtactctggccataatagatactttggcgatgtgaggcgtctatcgacttcccatctgaacttcggtgatgattcgctgtcaacgtttacatccatcagtggctctgaaccggaatccccctctattggatgaacaccgtactgctggatgactggatggtcagtattgcgtattgtaaatgggcaccatgttaccaagttcttgcactagcatgtacattcctgatgtcatatatttagctcatattggagtactaagtattggacgggctgacttggtttgggttgggtgtggagttgaattgtttcaagttgatggctttgtagattgacaattaggcggaaagatgtaggggagcgatctggatttgggcagtcagctgtaacatatcataacttatgtgtttggtttgtgtgtgcaaccttgtgtacaggtgcaatgaaaaaagaagaacgattacagtggcaagtcacaatcag

SEQ ID NO: 278660 - DNA, 521 bp, Zea mays
cccacgcgtccgcccacgcgtccgcccacgcgtccgcggacgcgtgggctcttagtcggaaagatataatggacaggataaatagatggattgctgcttgcgatgaagaggcttggcttgaagaatataaccaggacccaaagaggtacagtgctggaaggggtgctcatataaaccttaaacgggcagaaaaggcacggattttggttagaaaaatcccaagtatggtggacgacttgataaaccgaacctttgcttgggaaaacgcaagaaataaaccctttctctatgatgggggacgcctaatatctgtactagaagagtacaggcttagccggcatcagaaagaagaggaaaatcgacggtaccgggaccagaagaagctggagagcatcctacttgcagagaaagaagcgatcttcggatctagaccaagcccaaggaagacgagcagcttaagtaggaaggcaaatgggtaccggccaaatgggaacaccaacggactcaagactccaactcct

SEQ ID NO: 278661 - DNA, 796 bp, Zea mays
  unsure (1)..(796): unsure at all n locations
agctgcggtgctctgctcagagagcttcagcaaatctgggcagaagtaggggaaagtgagggcgagaagaacaaggcgttgctggacatcgaaagagagtgcctggaagtctaccgccagcaggtggacgatgccaatcggactagggtccagctgcaacagtcagtggctgccanagaagctgaggttgcatctctgatggcaacccttggggagcacaagctgtacttgaagacagacaagggcgttgtgccactcaaggaacaacttgccaccgtcgccccagtactggagagcttgaaatgcaagaaagaggaaaggatcaaacagttctctgatattaggtcacagattgagaagatccgctttgagctaagtgaatataatgatcagggtgatgacccgaccagtcttgctgctgaggaacacgatttgtcgatgaggaagcttaatagttaccaaacacagcttcgcgcccttcagaaagataagtctgagcgcctccgcaaggttctggagtatataaatgaagtgcattccttatgtggagtccttggaattgattttggaagtactgtacacgaagttcatcccagtttgcatcagaatggtgttgagcagtccagaaatatcagtaacagcacactggagggccttgctagtacaatttataagctaaaagcggaacgaaagtctagaatccacaaggcgagagagatcatggaatcgttgtgtcaactttggagactcatggactctcctgaagtagaaaagagacagtttagtcaagtaatga

SEQ ID NO: 278662 - DNA, 501 bp, Zea mays
atctggtcctaggtcctctagtgcagttttgctgtatgaagttaatgtgataccaagatttaacttcccggctatatttcttgaaaggattataaggtcagatcttcctgtaaatcttcgtgccttggcttgtagagctgaaaagatttatctggaaaatcaaggatgtggttcaagaaaattttctgttgaggacttgaagccatcatatacttctcagcttaataacttccatagtacgacagttgagacttctaagtttaaacaagcgcctcccaggtctggtgttagcagggtgcttccttcaccttcttctgaattgattagcaaatggggtgtatatggaaacatatgcagaattgataagccttgtgtgcgagatgagatccatcttcgaagatttgatggcatgttggaacatgagggggctcataggtgtgtttttgctagtatcactgtgaaagcaccggttcgagaggtatggaatgttctcacagcata

SEQ ID NO: 278663 - DNA, 555 bp, Zea mays
  unsure (1)..(555): unsure at all n locations
cccacgcgtncgagcaccttgcccatatggttgtggcggcggtgggggttataatatgtctggtggaggtggtggaggatacaaccgtggcagtggtgattatggttctggaggaggtggtggcttcgaccgagatggcggagactacaattctggtgggcgtggtggtggaggcgggggcagaggaggatacaatcaaagtggtggtagtgaccgtggttttgatgaccaccgtggtggcagaggtggcagctatggaggacgagaccaggagaaccaaaagggtagtgaaggtggctacaatgctggtggttatggacaaactcctcaaggtcctccttcctatggtggtcctgcaggtgactatgcagcacctacgagctcttatggaggcaacaatgcttatggttcagaatctgcagtgccgcctcctaatagctacagtggtggcccaggctcatacccaccaagctatggtgccccgcctccacaccaatatggtggtgccccaggcgggcaaggcggcctgcctcctacattgctggtggatatggt

SEQ ID NO: 278664 - DNA, 732 bp, Zea mays
ttttaagggcaaggggaattctcaaagatgagactacaaataagaattacacgagtacgcagactgtggattctcaagaaatcgagaacaaatctgcacaagagttgcctcctggttggattgaagtgaaggacccgacaactggagcgccatacttctacaatcaaggcactggagtgagtcaatgggatcgccctgacagtgttgtgaatatcatgcaacatcaagtttctccatccttgccagagaactgggaggaggcaattgacaaatcaacaggccacaaatactattataacacgaagacacagaccacacaatgggaacctcctacttctgtgaacaccagtgttacacctccagcttccaccaacactgcagttgagccagtcgctcaagctgcagatatttggaactctcaaatgcagagatgtttgggctgtggtggatggggagttggtcttgtccagccttggggatactgcaatcactgcacaagggttcaaaatcgtccttttcaacagtacccatcttacacatataatacgatgcacgccagtggtaacaatgctcccaaagctcaggggaatgtttcagctaagaacagatcaagctctaagccacctttagggaaaccaaacagaatagaccaccgcaaaagaaatcgccccgaggatgatgaacttgacccaatggacccgagttcttactcaaatgctccacgcggtggct

SEQ ID NO: 278665 - DNA, 439 bp, Zea mays
gagaccgatgattttcttaaatcccgtttttttcgctgcggctttaatccggccgtggcttaagcaactccgggtttttgctgtgtgcctgtatatgatctgttgttttctaggataaatggataatagtcaacacggtggtcgaagtaaagtcgacatgagaccgaggattttcttaaatcccggcttgttcgctgcggctttaatccggccgtggcttctacagtattttgtctctctatagattgcaactgcggctgccagccagctgatgaattcctcagttagggctacctcccaatacccacataaattcctcagtagaggtttctgggacatcatattgtaaagttcatgtctatcggtaatctgaaataatatgaagaatagtatagatgtgatgatataaaaaaaaaatcttaactcccctggcaccccc

SEQ ID NO: 278666 - DNA, 442 bp, Zea mays
ggtttatgctcaacttctgatcaagcagcatcaaatgcgccaacaataaaggcaactgcggttttttgctgtgtgcctgtatatgatctgttgttttctaggataaatggataatagtcaacacggtggtcgaagtaaagtcgacatgagaccgaggattttcttaaatcccggcttgttcgctgcggctttaatccggccgtggcttctacagtattttgtctctctatagattgcaactgcggctgccagccagctgatgaattcctcagttagggctacctcccaatacccacataaattcctcagtagaggtttctgggacatcatattgtaaagttcatgtctatcggtaatctgaaataatataaagaatagtatagatgtgatgatataaaaaaaaaaaaaaaaaactcgagactagtcttctctctctctctct

SEQ ID NO: 278667 - DNA, 682 bp, Zea mays
accatgagctgctgatagaaattgataaaataaatatggaaccaaagatagtacagatcattcctgatgacatgtctgtagatatactgattgagaggatggagtcctccagagatacagtttgttctccaaccttgatatggctaattcagcaatgccaacaccagtctataatcaatgctttgagacgatcattggtgaatgatgctaatagttcgaggcattgttttgagtacttaaacaaaaaggagatgattgttgctcacttagatcgtggtattgatgtctccatcaagatgtcttcagattggcctctttgttcctatggcctgaagctaatttcgatccgcaatgcaggggatcgtccaagaaatattgcttcaactatactttgtaagaccaaggaactggccaacgaattggagccgcagattcggcaacatcttctaacgcttgtggatgctgttgaagatattatcattcgagagctgcggtctcgttaggaccacgctgtcgacaggaatagctttgggggataatagacagcctctactggctcgtggatcaatgtttcactttcacattttgtacagaagcgactctatcaccgttacgcatctacggctgatttttttagtgtctggcgcgttgccagaaaagagaatcttgttcaactttatta

SEQ ID NO: 278668 - DNA, 486 bp, Zea mays
gcctccgctcatccgtcaggcggtgacggggcagtcgggcaccaccaccgcccccagcgggcagtgcgtgggcgttgcgctgccggtggtggagaatgtgggggcagtggttgattcgggtgatggcgagctggcgagggagcggggggcgccggtggggaagctggtgtccgtggaagatggggaggaggtggagcaggttaggtatgctccgtgtgtccagagccggagcccgataacagcgccattggggatttcagtcgctgggggcagtggtatgagggtaaggggggagttggatgattcagtggtgtcatgctatgatgcgggacatttgctggatacgggttctctgtgcgagggtttgcagccgtggctgtacagtaacggcactggagtgacggtgcaagccgtcgatgcttagaatcgtggtttagatgagctgttgcgaagattgattaaaccaaccgtagatttgtcaagggt

SEQ ID NO: 278669 - DNA, 461 bp, Zea mays
ttcttcggcgcgctcctccgctggaacggggggcagtatcttttagcatctcctctactccacctctctcggatctggccgaaggacgagcaaaggcccctgatcgcccgcttcttctacaactatattctgtcgccagcgcacaagcggcagggggcacggggtagattcggagcggctcttggcttgcagtccagacgcccttcacccctgatctggaccggagggagcggctccttccgtcagctgttcttgctttgcctgggcctcttccgcctgcttcgtgttcttcacaggagccggtgacctcggacgatatcttggaggacaagatgtcgggggctgttcttgtcgccatagtcgcctccatcggcaatctattgcagggggtgggacaatgccaccatcgcagctgctgttctgtatattaaagaagaatttcaattggcaaatgagcccac

SEQ ID NO: 278670 - DNA, 726 bp, Zea mays
ctaatagctctgaatatcgttcgatagtaaatgaattccgtgcttttcttagtgacagcaaagatgtattagatgaagcaacaacaatgcaactactggaaagttacggaagagtggatgagcttgtgtactttgccggtttgaaggagcagtatgaaattgtagctcatcattacattcagcaaggagaagcaagaaaagcattggaagtgcttcaacggcgcaatgttcctgtagaccttgtgtataaatttgctccagatttgatcatgttagatgcttatgagactgttgaatcatggatgatggcgagaaacaggttgaatccagggaaactcataccagcaatgatgcgttatgtgagcgaaccacatgcaaagaatgaaacacatgaagttatcaaatatttggaattttgtgtgaaagatttgaacaatgtggaccctgaagggcataatctattgctatctctatatgccatgaagggggaggaatcccagcttttgcaatttctcgacacaaaatttggtaaatgacaaacatatggccctgacttattttactatccaaagtatgctctgcgcctatgtcttcaatagaagagaatgcctgcttgtgttcgtatttatagcatgatgtccatgcatgcggaagctgtggcacttgctttgaaggtggatttggaacttgcaaaagcctaagcttgcaaagtaaaatactatgaac

SEQ ID NO: 278671 - DNA, 962 bp, Zea mays
gttgcgtatgtgctgcctatgaccccatgtctcctgtatggtctttactatggtggattccttatccagttcctgattgaaaagatgggcatgatgggatctcttccaaaaccatatggatattttgtgcctgatgttattgttggagctgtagttggattagtggttggttggtgttttggtcctctatcacctgttgctagtcgttggttgtcgaagacttcaattatccatggcttcctgcaaattacagtggttgctttggctatctcatcccaactgtttccttacagcactggagcaccaaaaagagttgttcttcaacatacttttgttacagatgctaataatatcgtggattcaagctatggtttctctgtggttgattctaactcattggagttccttttcaacaatgcacctgaggccgccaaatggctgaaggataactctgagttgtcctttgaagaaaaatatcggtctgatagaagctcatggttggctttgtatcctgtcccattcttgttctctggaagtttaaaattccaggcacaaactgaagagattaaaaagtactaccagcatttccctcagttagctgttcaggagatctgggataacaatggacagcgaagggtgcatctcaaacttgcacttggttccttatcagaaatttggacctctgtgctcaatattactgggccactatcaaattggtccttcgctgataacatgctcccagctcctcaaactgtaagtggtgggccaccatcatatatttgtcgactcagtggaaagagcgatgtggattggtctttctggttggaggcaaactcttctgaaagtctgagagtcgatgtcgcagtacttgatcagtaccttgttgatagtacaaagaaactcaagagcctcttcccaagttgggcagacttgacagccttcacaacatttttctcaacgta

SEQ ID NO: 278672 - DNA, 445 bp, Zea mays
ccctctcgtccgcccacgcgtccgtcccgctaccggcaggccacccccatacgcctcgttcgtctcctcctcaaccgcaggtcagcagcgcccgagctctgcgtgcgatggactactcgggcaccaaggagtcgcctccctccggggcttggtggtcgagggagacggtggccgtggtgaccggcgcgaaccgcggcatcggccacgcgctcgccgcgcgcctggccgagcacggcctcaccgtggtgctcaccgcgcgggacggcgagcgcggggaggccgccgcggccccgctcctcgcgcgcgggctcgccgtcgtcttccgcaggctcgacgtctccgacgccggctccgtcgccgagttcgccgcctggctccgcgacgccgacgggggcctcgacatcctggtgaacaacgccgacgtggcggtcacgagatcgacacc

SEQ ID NO: 278673 - DNA, 432 bp, Zea mays
tttgcatggatgtggccgtcccacttggcagtggggaaaacacaacagctcccgttctgatcttgtgtttggcatacaagggtttggcgtgatgccatggagtgatccgtggaggtgcccggtgtcctccctgccagtgcctgaagcaaaccatcctccatcagatttctctatcctcctttctttatacttacaatctctctgtttgaatgtgaaacatagtggtagagtagctaaactatttaggacctgagactgacgtgttcatgttgctagggagaagaaagatccccatggtccactgactcgggtgcatggggccttgaccaggatgcttaagctcgtcttggcattagttgaaggtaacctcgtgtgttaacaaaaagacaaacaactttgttgaaagacttgaagttcttttaacttgttgct

SEQ ID NO: 278674 - DNA, 657 bp, Zea mays
  unsure (1)..(657): unsure at all n locations
cccttcccttcccttggatccatacaatacgtcaggaacccannatgaccgcggcggctggggcgagaagagatggccgacggcaacancaactcatcggcgtcggtggccatgggacaagaggtgcaggctttcgttgagaacaagtatggtggaatggtgcctaagaagcctctgatttcaaaggatcaggagcgcgcctattttgattctgcagactgggtccttggcaagcaagctgcaaacagcggcaccgcacgggctgcgactgctatcgaattcttgaagccaaagctaaagaggacgccccatcaccagcttccccctcgcaagccgacctgtgcgtccagctgagctcaagacagtgcgaaaatccaaagggccaggcttacaaaagctccctggctgggagagacgatgaagagcgttatcaagttttttttagttggttgcattggttaggaaggcaaattcaggattgatgagccctgcatttggctttgttcgcagcactcgctgaattattaatttaagcatgtgggggacatagataaaactagactcctgctattatatgcttaattgtggaagtggtagatgacacccatctgtttcaatgtatctttggccggcagatgaaatgtatcccctctatct

SEQ ID NO: 278675 - DNA, 467 bp, Zea mays
ttctcattcgtccggtctagttgtcgacagcattcgtagagatacggatgggaaggtttggtagctttatcgttttatatgggctacaatgtcaccatccacggcaaatgacttccaaagctcacagatatcaggtgctcgatgctctagtcgaccttttctgctggacaaaggtttatgcagatgttcgcttggttggtggctggcttttccggcacctgctgccccatggagaggaagagttcactgcttttcatctaagacgactaaaggattcacacaaggattgtagctcaaacgctttctgtggaatctggaggatgctggtgtgacactgcttctccctattgttcaagaagcttggaggaactgcaagaaagcaattgaggcatcttcgccaccaaaaggatccaaatctattattgtacccatggatttgtgttcatttgaaggtgattcttctgttg

SEQ ID NO: 278676 - DNA, 694 bp, Zea mays
gttgtttctagcggtgcaagctactacactgggactttcaacacggtgaacagatcggccgacgggcgctacgtggctgtgtccagccgagggaacttctatctgacgtgggagcccgggcagccgttctggcaaccccacaacagggcggtggcacggaggattcagaacatggggtggagagcggacggtggactttggctgctggtgcgcggtggtggcctcttcctcagcagaggaaccgggataactgaagattttgaggaggtgcaggtgcagagccgggggtttgggatcctggacgtgggctaccgctcgcaggaggaggcctgggctgctggtggcagcggcgtgctgctcaagaccacaaacggagggaagagctggatgcgcgacaaggctgccgacaacatcgccgccaatctctactccgtcaagttccttgatgacaggaaaggcttcgtgctgggcaacgacggcgtgttgcttcggtatcttggctgacattctatgtatatgtgtgtacagcgaacggcatgtgctgctgctactactactgtaaaaggctgcttactgtgcttgcgttctctcttctgcaacccaaattgagtgtaaagatgcatgtgctgcttgctaggaacttgaaaaccttgtatacccgtatctactatctatatatatgctaccttgttgc

SEQ ID NO: 278677 - DNA, 391 bp, Zea mays
ctgcaacaacctgccggtccccttcctcctctcctggcagggaattcagcagcggaggagctcatggcaggacggcgtgtaccgcaccaactgcccgatccctccgggcggcaatttcacttacaacatgcagttcaaggaccagatcgggagctactactacttcccttcccttctgtttcacaaggcagctggcggttacggtgccatcagggttctcagccggccgaggatccctgtcccgtttgacccgcctgccggggatttcaccatattggcgggtgactggttcaagctcaaccacaccgacctgaaaggcattctggacagtggcaatgacctgccgtttcctgacggccttcttatcaatggccaaggttggaatggcaac

SEQ ID NO: 278678 - DNA, 410 bp, Zea mays
ggacctggcgcggctacgccggtccgcccactgactgtacgacagcacttccgccgcagttcacttgctctctgcctcctcttcgctcgtctgcgcacataaccacggccgtctccccaacgtggtgctcgcaccgcagccgcaatgtcgtggctccttgtcgccgcggtgcttgccggcttcgcgcttggtccctccgccggcacggaccacatcgttggggccaaccatgggtggaaccccaacatcaactactccctctggtccggcaaccagaccttctacgtcggcgacctcatctcgggccggtatcataaagggacgcataacgggttcaaagtgaacgagaccgggtacgacaattgcaccatggctggagtcgccggcaactggacctgcggcaaggactt

SEQ ID NO: 278679 - DNA, 560 bp, Zea mays
cggacgcgtgttctgacgcgtgggcggacgcgtgggcggacgcgtgggcgagcctgctgctgccgctgatccagcacctgaaatcaaatcagatgctgccgccgctgatccagcacccgggaccaaggcagatgctgccgccactgatgccgcgcctggagccgagccagacgccgctccactagagaacaccgctgccgacaaaggcggaagcgaggagagcagccagcccgtgaacaacgtgaacaacgggcactcaacgtgaagtgcatctgaggccggaacggaacaccccttccagcaccgtgtatctcatgtaggaacaaacatttgcattcgcattgtaatctgatggatcggtaagcatgttgattagtcagtctgacgctgctgggtgacatgttggtaattaggctctgcatttgagctctttttttttgtatggctgctgtcgccgccgtacatgtatcctgtatccaccaccatcatcatccccttggactattggttgtgttgtacctaactgcgtaagcatattattatcaatgttaggccatgtt

SEQ ID NO: 278680 - DNA, 603 bp, Zea mays
catcacccagtttccatttatatgggtcccgggtcttaccaaggacagccgccacggcggcgcgccgtcgtccctggcggcagggctcaaggcaaccggcggaggcgttggtagcaagaatcacagccaggggccctcggcgtggagcagcgggtggaagaagctgggcaggctggccaagatgaccggcggcgacgcggcggggcacgacgggcacgtgccgggagcgcccggagaggcgccgaggaagccgcggaggtggagaaactccatctcgtgagcagctgcagagcagagtagagacgacggagccccggtggcggtggaatcagcttgtttcgtagcgagcagagtaggcggcctagtaacttgtgtaacacccattttcatgcatgcagttccgagattgaaaaacaaagcagagtggccgagaccgagattgcgcgcgtgcaggctgcagactgtcctaggggaagaagatcgtctcgtctatttccagttccagtgtgctgcatttgccgtgttgtcatctgttttgtttatgaacagaattaacagggttgagatgcgatcgaaccagagcctcaagctctcaaccatgcg

SEQ ID NO: 278681 - DNA, 312 bp, Zea mays
tggcgcgcggcgtggtggctggggcgaagggtgtcgctgccggcggcggcggcaagaagaagggctccgtcacgttcacgatcgactgcaccaagcccgtcgaggacaagatcatggggatcgccacgctcgagaagttcctgcaggagcgcatcaaggtcgctggaggcaaggccggccagctcggcgagggcgtcaccgtcacccgcgataagtccaaggtcaccgtcacctccgacgggcctttctctaagaggtacctgaagtacttgaccaagaagttcctgaagaagcacaatgtgcgtgactggc

SEQ ID NO: 278682 - DNA, 415 bp, Zea mays
aaggtgaccatctatggttaggtcgaattggcatcatgagtggctgatacaggacttgaaaaaggcattgacattttttagccatgaaaggtcagataggaccaaattgcttcctcttatttggttggcgaaagtagctaagtacctacaaagtagatagcccacaggatgccatgaaagatcatagacactactgtcatgtgtgttacttgtttcaatatgtggagcttcatggctgccaaataaatggaaccgctagttcatcaaattgacactcgagacatcattttcagacaacaaaatacgtaacagttgtgtgttgattttggacggtgaaaagaattgaagaacttagcacaaagtatcaaagtcctagtctaaccaagatgagtaatttcaattatgctacatatat

SEQ ID NO: 278683 - DNA, 595 bp, Zea mays
gttcaacccttaggactacgggttcgtgacggccaaggtggcgtgctgcgggcagggcccgtacaacgggatcgggctgtgcacgccggcgtccaacgtgtgccccaaccgggacgtgtacgcgtactgggacgcgttccaccccacggagcgcgccaaccggatcatcgtcgcccagttcatgcacggctccaccgaccacatcagccccatgaacatcagcaccatcctcgccatggacaacaggggggactaactagtcccgccgcgtgctgcctccacccatctcgtcattggttggttcacgccaagaggttttgctgcattgcatgtgtcatggagctggcggataacaagttttcgttgcacctttctgtggtttattagatgacgtgaattagtggggaattgagccttattagagtgggttaaattaatacagctgtcccaagtttctttgctccagcagattgttcggggacagggctagctaggaacttcagaaattgctaagcggtactacctagccagtccgtccgatcatttcaagaaaattctcttgcactctgtagtgtgatcctgaacttttgggtac

SEQ ID NO: 278684 - DNA, 508 bp, Zea mays
cggacgcgtggggttggaactgctgaccgtcatcttgttgtcttcaatttgcagaatcctcagacggagttcacgcgaatccaatcaccactaaaataccagacacggtgccttgctgcattccctgatcaacaagggtttttggttggttcaatagaaggaagagttggcgttcatcatatcgatgacgcacagcaaagcaaaaacttcacattcaaatgccacagggaaggaaatgatatattctctgtcaattcactcaacttccaccctgtccatcacacatttgcaactgctggatctgacggtgctttcaacttctgggataaggatagcaagcagaggctaaaggcttttagtagatgcccccttcccattccttgcagtaccttcaacagtgatggttccatatttgcttatgcggtgtgctatgactgtagcagctgtgccgacgatcacaaccctgcagctgcaaagacatccatctatctccacagtccacaggaaa

SEQ ID NO: 278685 - DNA, 212 bp, Zea mays
taatgttagtttttgtggcatgcttccagtttgttgcggaccattgtcccttaatggctactcattttcaccgggcatgcttctttttctttaatgtgatatggatgtgcaagtgtttgaaatttaggctgtcgtgctatatgtaagttaccaaagtaccaatgcaactactgttctgagctgtttgcttgttaagcagcagcttgttccaa

SEQ ID NO: 278686 - DNA, 1264 bp, Zea mays
gggaggcctttcccttcatgaatgcgctgggctgcaattcctcccggtgatgtgctgtctattcacgtgagcaagccacagggatccaagtgcaggagtgggatgtatctgtttgttaaatgcccagaagtctcgcccttcgagtggcaccccttctctataacttcggcaccaggcgatgactacttgagtgtgcatatccgtacgctgggtgactggacatccgaactgcggatgctttttgggaaggcttgccaggcacaagtaacttccaagaaggctacccttacaagacttgaaactactgttgtggcagacgcccagacagaggacactaggtttcccaaggtctacatagacgggccatacggtgcaccagcacaaaattacaggaaatatgacattcttctgcttattggccttggaataggagcaactcctttcatcagcatactgaaggatatgttgaacaacctaaaatccaacgaagaggtggaaagcatccacggctctgagataggcagcttcaagaacaatggtccaggaagggcttacttctactgggtcaccagagagcaaggatctttcgaatggttcaaaggagtcatgaatgaggttgcagggagcgatcacagcaatgttatagagatgcacaattacctgaccagcgtgtatgaagaaggtgacgcaaggtcagctctgattgccatggtacagtcacttcagcgtgctaaaaacggcgtggatatcgtctccggcagcaagattcgaacacattttgcaagaccaaactggaggaaggtattctgtgatttggccagcgcacacaagaactctcgcataggagttttctattgtggatctccgacgctcacaaaacaactgaaggatctttcgaaagaattcagccagacaaccacaacccggttccatttccacaaggagaacttctgagacgacgtgtacccgaagatccgatggactggaaacataattgtatagggaaaaaaatacgatagcattggcatagcagatttagttttacaagttttgatgtatgcggggttgtacaaaatatgtgtagaaagctagatgtcaccatcatacatagattctgaaatgcttgcagatatatatattgcataagtgaaaccacttgcttcctaggataaccgagttctagatctcctgctttgaacacgcaaattttctcttttcagtcttctgctgcaattaataacagttataatattttttactgatc

SEQ ID NO: 278687 - DNA, 571 bp, Zea mays
  unsure (1)..(571): unsure at all n locations
aggaaatgcatattntttatgtggctggttgtgcatgatagatgttggacagctgacaggttggcaaaaaggggaatggatcatcccgtctgctgtccgctttgtgaccaggcggatgaaactattaatcacttattggtcgagtgcagctttgcgaggcagttttggttccttttccttcggtctggggacttccaggtgctctgtccctctgcaggggatggctgctttgactcttggtgggagaagagtgccgaggtggtgggcaagcctttgtcggatggtttcaactcgctggtcatattgggtgcgtggtcgatctggaaacacaggaataggtgtgtgtttgatggttgtagcccgaatgttgaggtcgccctttcggcagctagggaggagttgatgtgctggcgtttggctggcgctaaaactctctctttcttccatttagaggagctgtcttaggccttaatggtggtgtgagtttgtaaaactgttgtttctgttttggggctcccccccccttttttcttcttaatataaaaatacgcagacctcctgcgtattcaag

SEQ ID NO: 278688 - DNA, 730 bp, Zea mays
cggacgctgggcggacgcgtgggatgaatctcatggcaaccacctcagattgtatgaaaatgcaatcaaaatctgtaaagcaactttgcagattgtttccaatgcgacgagtaattaaagagggagaaaagaaagacggctacaatggtccgtatgattcaatatgtggggttcgtcttcctcgtggtcttgatccacattctatttcatcagaagaactgtcggcatctttggggcacatgctacatttcatcaatatagcagttcgtatcctatctgcgcccgctcttcatgtatcaggctgtaagggttcatgctcaaatatatggcagcggagttcctactgaagtatatgacagtcccatagcaaggtttaccctctttttatacctaggaaaaatgtttgcacaggtggtgaagaaaccccattgacagacagtggttcgagttactttggagctgactctgtggattctgtcaagaaacagtcttttggttccaagagaagcaatagttctagtttctctggtgcatcttctcactccatggagaggcatagatatttgcagagaggaatgttgtcgtcatcaaaggcccttcgaactgcttttgaatagaacattgcttcaaggtcagaaaagcaagcgcagccgctaaacagattgatttggaagtgaagttcagccgtatcatcagacatcatgcacacaaccatcgtggtaaattcctg

SEQ ID NO: 278689 - DNA, 540 bp, Zea mays
actgacagtatttatcttttgatggggcacaacgttaatggcggcctgagcccggaactactgattgctttccgcaagaagacaaacagaaagcctgagaggataatattctatagggacggtgtaagtgaaggtcaattcaaccatgttctccttcatgaaatggatgctatcagaaaggcttgtgcttctttggaggagggatatctacccccagtgacgtttgtggttgttcagaaaaggcatcacacaaggcttttccctgaggttcacggaaggcgtgatatgactgataaaagtggaaacattcttcctggaactgtggttgaccaaatgatttgccaccctactgagtttgatttctacttgtgtagtcatgctggcattcagggaacaagtcgcccgacccattaccatgtgctctatgatgagaacgaatttactgctgatgcactgcagtcactgaccaacaatctttgctacacctatgctcgttgcacccgagctgtatcagtggtcccaccagcgtactacgcccac

SEQ ID NO: 278690 - DNA, 722 bp, Zea mays
tgatcctcccccgcctctatataggccatgggtggcgctctcggtgccgggcatcagctgcgctgctcaccaggaaggccatctcatccatccttcattgtattgtagtggcatcaccaggaacagtccagccgcaagaagacagacgacagcagcgagtggggatcggtagaaagaggaagcggatacgaaggtgagagagagagagagaggcaaaagggcagccatgacgatgaagcagtcgaggttcaagaggatctgcgtcttctgtggcagcagccaggggaagaaggcgagctaccatgacgccgccgttgagctcggcaaccagctggttgcccggagcatcgacctggtgtacggcggcggcagcatcgggctcatgggcctcgtctcccatgccgtctacggcggcggacggcacgtcatcggggtcattcccaagacgctcatgacaccagaggagggtatggcacgctggaggagctgctggaggtcatcacgtgggcgcagctgggcatccaccacaagccggtaacacacacacaaccaacccctcgtagctgcactgcacctgcattttgacgaacgaacgcgcccgcgctgcatgccttcttcccgcgcgcgcaggtcgggctgctgaacgtggacggctactacaactcgctgctgaccttcatcgacaaggccgtggaggagggcttcatcaaccccagcgcccg

SEQ ID NO: 278691 - DNA, 507 bp, Zea mays
gatcctggaatatgcaccgagtttgtccactctttgaaggaggaagtcagcgtaatgtgtggtttctcttgctcaagacatccctcagcattcacagctctctctcttgggcgatccaaatggaatggccaggtcggcagttcgggactagtaatcaccttggagacaccccttgacaacatggcaaggccttctttatccgttcaattgaacgggggtttcgagttctgacatttcctccgtgggctctagaatacaactgtatatactggatctcatagcgagaagatgatatgccactgtatatattgcacacacgtagctgtgattaagtagatatcttcccaaccggtgaactgtatagtcctaaataactgacagatggcttactggtttggttcactgaataaatgagaaggcttgtatgtggttactgtgcgttcgaagtatttgtcttcttcaataaacattgcagtactcctaaagaaaatgtgttcaagaacaata

SEQ ID NO: 278692 - DNA, 569 bp, Zea mays
aagtcctagccaggcttcccttgccctagtgttgcgccgccgccgccgatccatccggcctctccccgcccgccggccgcgatgtacaacggcatcgggctgcagaccgcgcgggggtcgggcaccaacgggtacgcgcagagcaacaagttcttcgtcaagccccgctccacatccggccggggtccgggcgggccccataggccgctgcgctccgacgccgccggcgcggatggcggcgggatgcgcaagcccaacaaggagatcctcgagcacgaccgcaagcgccaagtcgagctcaagctgctcgtgctcaggaacgcgctcgaggagcacggctacaccgaagacgagatccaggagcgcgttgcagaggcgcgcaaggccgcggaggaggtagggcatcggtcgtggcgccgggcgatcgcctctgcccggcagaggatatggatctgttggcgtcatttaggtatcagattgccgcagattgtctagcaagacctagatgtagtggcttctatattagtatgggagtcttctagtacttaaagagcaatcccatattcgaa

SEQ ID NO: 278693 - DNA, 410 bp, Zea mays
caacccaacatctattatctaagctctgaaggcaagggtggtagaacactgaactctgccctgttgtcttcagctccgtctcggttttctccaacatcttatcttcattgccactatcggtagccgccactgcaaaatcaagcggaatactcctacatggattagagtaaggtacttagcttggccagggagggaactccgagctgaaacttgggcaatttctggttgagaaagaaaagacgagacttggtttccaccaatttctcatgttcggttgatcagatgtgtaggtggcagtgcagcaagatgagacctgtctgaagaatttggaagctgaaggtgagcgttggtggaaaccaagtctccagctgcacgcaaagcacaagatttggttcccattcaatgtctca

SEQ ID NO: 278694 - DNA, 384 bp, Zea mays
  unsure (1)..(384): unsure at all n locations
tttttcgttttcaaaataatgnattaccacataagccttacctcaacgaggaacagatccaccatcatccacggaaatgaatcctcccgagaaaaaataacaaacactccatcgtcatcgttcgccaccgcccattcacaacaggtactgaaagattgacttagtgttcccagcatccgatatcaaatttacaacattgcacacacagacaccacctaggctaaagggagagcaaacatctagcgtaatacgagaaccaaaccctacatttctccgacgcctacccctcctctacttcttcgccttccgagacggcgcttttcgggcaggggcagccgccttcttcgccggagcggccctcttggctaccggcgccttcttcgc

SEQ ID NO: 278695 - DNA, 672 bp, Zea mays
tcgggtgttgtgtcggactggacttttccctgttggagagggggtatcgaggagggctgccgcaccgacacgagcacgaggacgccgcggagggccgcgacccgaggccactggcgaggacggactgcagagcgctcgcagcggacgacccacgagcagagaagcgagctgcttacgaagctagatagaggatatggaacggcggaggccggctaacaagtgggctgaaggagtgcggcttgtgggtcactaggcaaggctacgagcttcatcgaacaagaagacacgcgggtcaaggcaatcggcaggattgagaagacgtgtactgatcggccggagcggaagaacaactcacatttgtgcagcttacccaagggatcttcagtgccgtcatattttgggaatccaagcttctgcgctcctggagggggtgggccgtgtattcacggtgtcgttgagagcgcaattgtactgtccaaggggctctgggtgatgacgggatcctctcctggcgctgagtcgttcaccgtgagaacaggccgaccggcggcagcagaagagaagatcaggcggaaggattgtctagtccattaccaaatgataggcacagggttacgagcagatttggtttggtaggtttcgagatgaagacgagggcaaggtctagcagtg

SEQ ID NO: 278696 - DNA, 484 bp, Zea mays
agtccggtcgggccgcgtacctggttcgaccagaccagaactcaaccggtcgcgcttccttcttcaccctcagtcctcttccgtcctcctcctgtccaccgccccgtgcagttcggcggcgacatggcggcggccggcgacctgtccgacgatgagaagcgggcgatgaggggcagcaagttcgcgccgcttcctccgcctcctccctcttcccgcccccagccgaggatggcccatcctggaggagcactaaccacaaacaaggctgctgctttagcaaaattcctcgagagaaaacttcagcaacctgatggcttggactccctggaccctgaccttgtaaaactggctgtgaaaaatgcaaaggaaaccataaaagctagcaatggtgagccttcaacttcaggaagagtagtacgacatgtttcctcatttgtggatggaactgaggattctgaagatgaagcagaggttaaggggatca

SEQ ID NO: 278697 - DNA, 409 bp, Zea mays
aaaaagtgaaggctgcttatggttatgtcataacatttggccgagtccttgaggccttcaaaacgtcacattgcctgtttctgagtatgttacgcctgaagcttttgagaagtatcgggcccttggtgtcgaaatggggttccgctacgttgcgtctgggccaatggtccggtcttcctacaaggcaggtgaattctacatcaaggctatgatcgaagcggacgagccaagggaaccgctgcagactcaagtgcataaccgagatagcacctcccggccccacccaccccttgacttggttgtgctgcaaataagctcctcactgcttttgtagtcagagagacatgtcgattttttacgtcataattgtaaccacacattcacttctattttttttggtcaattgaac

SEQ ID NO: 278698 - DNA, 1449 bp, Zea mays
ttctgtacgcgtgggcggacgcgtgggcggacgcgtgggcggtcgcgtgggcgcgtggcggctggcggtcgctggactgggagatccaagggccggagttctggaatctttgggtcaacctgaagcacatttgcacacatgtaccatggatgttcctcagttgactgctgaaggtgccacacaacttggagatagagtgtctttattacaccagacagggacacttcagtcagaaactccttgtctgaccttaggccgcgattctaatgcagtatcaatggagaagctgcatgctagcgattgcttgccctgtggtaaagagaatgtcgggacaggactacaacctaaatctgatccagaacgtgctgataataggatgagtgttgcacgtcttgggttggaccttaacacagtagatagtcctgatgtagcagagcctaaccctttcttcccttacaagaaattggggcagtcaaaagtcagcgatccatcggaatgtggcagcactactgctgctacagcagaaagtgagtcacacaggaaatggagagaaatgaagcggaatggctttctttcttcgtctcatggaaatgcggtggtgcctaggccacgtggtcgaccccccaaaaggaaaagggatgatgaattcaaaaagagcagttccacacagcatggcctggctaacaagtctgtgaaggttgctgctcctagtggtctattatctgggctaaaccctggaatcattaaccatgtgagaaatagcaagcaagtttactccataataaaggctatggtacactctgagaggcttgagaatgagaagcagcctgcatttactagtcaaacaggtggaagagggagagaagccagtgagggaattcaggatgagaaatatggtgctggtttcaagaagtgccatatgttgatgaaagacaataatgcggtgtttcaccaagcactgcctaccacatcacagttccttgcacaggacggcgataggctcaaactgcaactctcatcagcagtcactatgtcttcagacagggcctgcagtacatcagctgatgatccagcaactaatcatgattacatgactgtactgtcagtaaaagcggccactgttgcttctcagtggttggaattactgcatcaggacatcaggggacgccttgctgctttaaagcgcagcaggaagagagtcagaaatgctcttcatacagaattgccttacctaatctcgacagaattttcatctaaccaagagaacgaatcatccattgcaaatacgtgtgatgctggatgtactgaaaaagcagtttcagaagcgcatgtggcacgatggaggtctctgtttgtccagatggaccgagcacttcaggaggaagggaaacagctggtgagtttaccggttggattagtttgtgttgtagaaaaggactatgtcatccg

SEQ ID NO: 278699 - DNA, 430 bp, Zea mays
agaagatctatgacgtcatgggcacgttcctaaacccgggaatccggttcaaggtgaacctcctttgctaggacctatgcctgagctatggaagctgaagaacccagatatttctgagagtgagtgggcggtgcaagccgccgccgcatcaatctactcgacctgcaacatggccatgagaacggagaacgtgccttgcttctgacctcacacttgtagttgtagtttagtttcttgcttttgctgatttttacctcaaaagttaggcctcttttattaccttcagtctttgtgaattgtgaccccttgtccatacactagcggcgagtgatgtaatgaggaagaaacttgatgtatgttgtccccagcctacgatttcacgggcccgtgaaagaacccattctttttataaaaaaaaaaagattaagac

SEQ ID NO: 278700 - DNA, 450 bp, Zea mays
cgcgcatgtagcacgatggaggtctctgtttgtccagatggaccgagcacatcatgaggaagggaaacagctggagaaccggttgaagcaagtgcaagaaatgcaatcgaattgtgataaaggcctcaaacacatgagctgtgaagctcctctgctaggacctatgcctgagctatggaagctgaagaacccagatatttctgagagtcagtgggcggtgcaagctgccgccgcatcaatctactcgacctgcaacatggccatgagaacggagaacgtgccttgcttctgacctcacacttgtagttgtagtttagtttcttgcttttgctgatttttacctcaaaagttaggcctcttttattaccttcagtctttgtgaattgtgaccccttgtccatacactaacgccgagtcatgttacaaggaacaaacttgatgtatgttgtc

SEQ ID NO: 278701 - DNA, 353 bp, Zea mays
gggccccctggacctcagccccaaccggctgtggggccccatccccgccggcccgccgttcgaccgcctcggcgccgagtcgttcgtcggcaacagctgcctctgcggtggcccgctcggcaagtgcacgtgacacccctagcccgcccatacgcgggaagcatgtagacatattcgtgcggcttggttaacatgacatgcatcatgatgatttcgcggtgctgcatgtgcctgtctttttctttctttctttttatttatcttcttttatttactttttaaaaatgctagtggtttgtccatgtgtctgaacgaatggaagcaaaaattaagctcgtgtgtggataatgctc

SEQ ID NO: 278702 - DNA, 431 bp, Zea mays
agaccgcctcggcgccgagtcgttcgtcggcaacagctgcctctgcggtggcccgctcggcaagtgcacgtgacacccctagcccgcccatacgcgggcgggaagcatgtagacatattcgtgcggcttggttaacgaatgctagtactataggtttggggccggtgggtatacatgacatgcatcatgatgatttcgcggtgctgcatgtgcctgtctttttctttctttctttctatttatcttcttttgtttactttttaaaaatgcttgtggtttgtccatgtgtctgaacgaatggaagcaaaaattaagctcgtgtgtggataatgctcaaaaaaaaaagcacagatatatgatggagaactaacgccgtgatgctgctcgtagagacatcgtggtcttcaggaacacaaggatgaaaataaagg

SEQ ID NO: 278703 - DNA, 545 bp, Zea mays
ctcgagcggagcaacaaaccagacttctctcacaaaggaaacagccagaggccaaaatctggccacgcagcttctgagaaccccctgcgtgaacgcgctagtgctagcatggtgttcttgaagggctctgtcaagaggaactccccaggtttcctttcacataaaccgagcttcaagaaacatcaacctcacaaacccgattctggtagaccagacggcaaacgttttgttcgagatagtgatactagcgcaccgttcgtcaagaatgccggcaaacagaaacagtccattgctgacctcgcggacctggctggtaaggacaacctgactgcgtctgaagttcgcaaattgctgaagcctgaaatgtcaggcaagagctaatgagtttagggtgagcagaggcagcaattttgttggtcgtttttcctcgtatgttgcggaaagaaactgtggcacgtgatatgggtttgtttcagtagaaacgtattcgtgatacctgtcctgccaccggtttctcttgctagcccatctctttggctttgcat

SEQ ID NO: 278704 - DNA, 568 bp, Zea mays
ggtgaacagacaaatacaatctcgtttcagactgaatttcagcctatcctattctggccactggaaaaggccgcccgagaacgtcactgctaagacgtaccatcagatggatgccagaccaaagggcagattcgacggcgtgccgccagacccacgggaaggggtaaggagtgggcatataccaggaagcgtctgcgttccgttccccgagatgttcgacggcgcaccaccgagccttctcctccccgccgacgagctgcggcggaagtttcagcacgcaggaatctccctggaccgacccatcgtcgtgacctgcggatccggcgtgactgcctgcatactcgctctggggctgtacaggatcggaaagcgtgatgtgccagtctacgatgggtcctggacggagtgggagggtcagtcggactccgattaccccaaagtcaccgctcctggtacagcttgagcgtctgggactgggagttggcagttttagactgccagcatgatggcattgtgtttgcgacaggctgaaccgattttatcgagcactggaagcattgtattcgat

SEQ ID NO: 278705 - DNA, 492 bp, Zea mays
aaacataatacgatgctgcggcgccttgttgcgggagccgccgccgtgcgttcgccgctgccgccgctgttctgtcgggtgcttcacaacggcagcggaggtagtgggtgtagctcgggggatccggagagcgtggcgtaccgcatgtcgatgctgcggcgcccctctaccgtccgcaagaaggggctcacctggaactgctgcagcctcatcggtcgccttgccgcaccggtgaggccgttcgacactagctttcttgaagtccccagtgcgtacaccttcctctccgtcaccttctcgtcgcccgcgccctcttcgagctcgtccaacataaatgtgacattgcagctgactggtgagctggcaaatgttggcctaaagcatctgaagcatgatgacctcgtttatgtatctggtcatctgggctcttatcatacagtcagtccacgtggtgaacggcacattgtatataagatttatgtcagagagctg

SEQ ID NO: 278706 - DNA, 530 bp, Zea mays
ttggtgtcatgctttgggcagcatcttggccaagaacgcgctatgccatgttgcaaatggaggccttttccctgtgaaaatttatgtgggaatcctctcctttgtggcaaccattattgtacaaaatcttgccatgtgttagaagtcccattgaatcatcctgaaggagatcgtacaacatctatcagtaaagtgaacgcacttgctatgccttgtgaacaatgcaatcttccttgtcaaagggttagggagcctccttgttcacatccttgccctttgccatgtcatctgaacgattgtccttcttgtaaagtccttgttaaaagaccatgccattgtggtgctatggtgcatgcttttgaatgtgtgttttataacaacttaaatgcaaaggatcagcttaaaataagatcttgtggtggcccatgtcataggtcagtttggctcctaactgtttccgtatcgaaaattgtacaatttttctgttgttactaaactcctatcacaaatttccttaaatttatttgatt

SEQ ID NO: 278707 - DNA, 425 bp, Zea mays
atgcaatctttcttgtcaaagggttatggagcctccttgggcgcatccttgccctttgccatgtcatctgaacgattgtccttcttgtaaagtccttgttaaaagaccatgccattgtggtgctatggtgcatgcttttgaatgtgtgtcttataacatcttaaatgcaaaggatcagattaaaataagatcttgtggtggcccatgtcatagaaagctaccaaattgcccccatctgtgttcagaagtatgtcaccctggtgtatgcccatcggttgatcagtgcatgaaaaaggtcaacacccgttgtgcatgcagcactctgaaacaagagtggcgatgtcaagatgtccttaaggaataccgtaagtctggccgggatccaaaagaagtacctaaaagtcagtttggagttggcttacttg

SEQ ID NO: 278708 - DNA, 524 bp, Zea mays
agtaggtccatacccagaatcccctcggctagctcgggttgggaaccttcctgacatgtctccaaagaaggtttctgctactcataatgtatatgtctcgccactacgatcatcaaagatggatactttactctcaccaagcccaaagagctattatgcatgtgtcggcgagagtacctatgcgttccaaagcccctccaaggacctgaaggctatcaacaaccgcctaaatagttggaagaaagttagcggacgattgaacttcgacattgtcagcgatctggtcgttgccagtagcctcaacggcgttcaaaatgccaagcccgcagccacggaagtggttcccaccaagacaccggtgaagtgcgagccatctgaatcgtgatctactctgatgctgcatcaccaatccagtgtaacatattataaatggttaggtgtcagatgttctgatttaggagtgtttgaatgcactagagataatagttagttagctaaaaattgttagtggaattagctagcta

SEQ ID NO: 278709 - DNA, 500 bp, Zea mays
ctggatctcctaggtgacagcactgcggcttagcaagcccgagaccccaacaaataggatgcaggcggcgataagcgtgagcacgacgaggaccacgacgacgatggcgagacacttggcgtggggacgagacacagctcccaccgtcaccaccatggacagatacagcccgagagctatcgcacagaagaagaagaaaccaaccgtgttgaatggccctaccatgaagcgtccggcgatcgccgtgaagaggccgccagaactggcgatgccttgtgaaaggtccagcaaatggcccagagcgagacagcaagagagatgctgctggaaggaagcttgcgaattcgaaggacggtaaatgagttctttgcgcgcgcgaaaggatgggctcctgtgtccagaaggatcgtgggttgacaaaaagtctttggccctgtcttgcttattgatgtgtggttgcagtttggtagttctctgctggctcttggctgctggtttgt

SEQ ID NO: 278710 - DNA, 388 bp, Zea mays
cggctcgaggagtttggaaaattcagacttgagctagaaccagaggaacaccaaacacgcacgcgcccaccccccgaaacggatagaactgaccccgcagagaagatggccggcgagatgagctgggtgggcaagaagatccacctctacaacgtcaccatgggcctctacatgctcgattggtgggagcggtgcctattcaacatattggtgctgatcctgctctggttcgtctgcttcaatggctcccgcttcgcttccgacgtcttcgaaagccacctgaaggcgcggattttccaaggctcaaattacggcctggcaattggcacgccctcctcataggccttcagcgcaacacacagaatcagcgaaatctgctaggtcttga

SEQ ID NO: 278711 - DNA, 376 bp, Zea mays
cgtgactgactgaaactgagcactagggctttgagagtgcagcagaggagggcgaaccatgggcgaggaggagaagaagaacgaggccccgtctcttccaccgccgccgccggaggaggtggtcatgcgggtcttcatgcactgcgagggttgtgcgcgcaaggtcaagaagattctcaagggatttgatggtgttgaagatgttattgcagatacgaaggcacacaaggtggtcgttaaggggaaaaaggcagctgctgacccaatgaaggtggtggaacgggtgcagaagaagacaggccgcaaggtagagcttctctcaccaatgccaccaccgaaagaagagaaggaagaagagaaaaaggaagaacctgag

SEQ ID NO: 278712 - DNA, 294 bp, Zea mays
cgtgactgactgaaactgagcactagggctctgagagtgcagcagaggacggcgaaccatgggcgaggaggagaacgcgaaggaggcggcgcccccggccgacatagtaaaggaggcggacgagaagaagggcgaggggcgaggaggcgaggagaagaagaacgaggccccgtctcttccaccgccgccgccggacgaggtggtcatgcgggtcttcatgcactgcgagggttgtgcgcgcaaggtcaagacgattctcaagggatttgatggtgttgaagatgttattgcaga

SEQ ID NO: 278713 - DNA, 482 bp, Zea mays
aaaaatggttatcttgtactacctccgtccgtttcgaatatttgtcttccgttaattcacttttaactaaaacatggcaaataaaaaagaacagagggagtaacatatttgatgctttgtttgattaggcaagttctgctcatttaatttgtttgttattatctatagtcctggtcttttctaattttattagaaatgtgttgctgcattccaccatttcttgttttgtcatttgtggtgttctctcgacagttaccacttctagacgcacgacaatggatgtatacttctaggcatattttatctgttgccttgaagtttggcagtttctgttctgcctccctgttgctgtatgtgtttcaatcaatcaaatacaaaaagcaacaagcgtgaagcaaacagaagcttgttgccacaatacaaatgatatgaaagagggattaacaccttttctattcttccaggccctgacaacatggagc

SEQ ID NO: 278714 - DNA, 416 bp, Zea mays
tgttattatgtatattataaaaagaaaacattatcgaatttggtggtgaagtcacaattacattttttgttttgtatcagtaccgaggttttggctttgtattttcaaaacaaacacatacctattatacctactaacattagttgctacctattagtgtttctctattaaataagttcgatcactaagtttggtcaatcggttgtataaatttctttattaatataacaccagacaatgaaaggagcctatctaggagtgattctcctgataggtcaccaaaacacacaagtcgtagacgtgattttactccgggatactcatttgcaagataatatcattcaccttttattgatcgcttgcattttggtgggaagaaatcaccgtgacaggtacatggtttaccagggttcccg

SEQ ID NO: 278715 - DNA, 601 bp, Zea mays
ctcgagccgactgctcttcttggttctggagaattcaatggtgcagagtataatgaagcataagttgatccaatatatcaattctcaactcctatcacaagccatatgaacatggatcatgccaatgatacaaagctcattgtgcaacactccactactgtcaaggtggattttgcttatatgctggacgtggacagccttggttttaatgtgaaggctggttatgatggaagtgttctgaagttgagaatccccttcccaagacaggcgcaagacaggaaggatgttaagacactaattgtggaaatgctccaagctgcaagagcctcatcttcagatcctgaatgatgtcgtcgttctggaatgtgaagaatcgtgcaaattgaagtaaacctaatgaataagagttattgggtttccgtccaatctctgcaccgactgaaggtggggccacagacactccatggattgatacacgaccttgtatataatataacaaagagcgcgtgagccttgaagtacttgtagttgaatgaatacaaagcgacggcactttgttgtacttacccacatgcataacaatttcctcggattgttaacc

SEQ ID NO: 278716 - DNA, 405 bp, Zea mays
aagaacactcggggttaggagatctgacccaatggccgcgaccaaggtgtgcaacgttaggttcgagggcaacgtgatcaccaccaccgtgacggcctccggcgcggccgtggagagctggctcgacgagatcctctccgtccaccgccgccgcctgcacaagctcgtcgtcgggctggacgtcgagtggcgccccagcttcagccgcgcctacagcaaaacagccatcgtccagctctgcgtcgggcgccgctgcctcatcttccagcttctccacgccgactacgtccgcaacacgctggatgagttcctcagcgaccccgactacacattcgtcggcgtgggcgtggctgctgacgtcgagcggctcgagaacgactacgacctgtaggtggcgaacgcgga

SEQ ID NO: 278717 - DNA, 238 bp, Zea mays
tttagatctcaggatcaaagcaggactgaagagcggctgaatctgaatggagcaagttggctaacatacgcacggcagctacaaatacttataggaataaataaagttggtcaactgttggtttcatggtgttggagtacatcatctgtactgctcttatcctcatatatgatatatgaactctagttcatcacataatataaatctgtaagagagcccagattaaaaaatatttgct

SEQ ID NO: 278718 - DNA, 423 bp, Zea mays
atgaaacatctgttggtcgtgttggtccccctttgcgttgttcatacattaagttgatagactggaccgaaggtggatacttaacaaccgattcaccaatgcctcggggtgaaatagttattggaggtccaaatgtaactaaaggctacttcaaaaatgaagcaaaaacaaatgaggtgtacaaggttgatgaaagaggcatgcgatggttctactctggcgacattgggcgcttgcacccagatggatgtcttgaaattatcgaccgcaagaaggatatagtcaagcttcaacacggtgaatatgtttctctaggaaaggtggaggctgctttgagtgtgtgctcatacgttgaccagatcatgatccatgctgaccccttccacagctactgtgtggcacttgtgtaactgcacagagtga

SEQ ID NO: 278719 - DNA, 414 bp, Zea mays
cgaggagatctgggcaccggaggtaaatgacttaatccatatagccgatggcgcgtttaaccggagccagattcttgccgccgagaaggctattctgaacagcatggagtggaaccttacggtccccaccccgtaccacttcctgctgcggttcgcgaaggctgccggtagtgctgatgaacagcttcagcatacgataaacttctctggagagctcgcgctgatggactacggtatggtgatgaccaatccttcgacggcggctgcttgcgctgtgtacgctgctcgcctcacgttggggaggagtcctctctggacagagaccttgaagcaccacactggcctcaacgagcagcagatcatggaaggcgccaagacactggtcggatctcatgctgctagtgctagccctga

SEQ ID NO: 278720 - DNA, 552 bp, Zea mays
cctccttccttcctttggccccggttttcaagggaaaccaagcccagatcccaattcaagggaaccaccgaaattcaaggatggagctggaggtgggtgcgccttcgccggcgaggtacctggtgggggcagcgatcatgatggccggcgtggtgctcccgctggcgtacatgatcttccgcagcaagcgttcgccttcctccgcctccgccgcggggccctcctccttctccaagcagacgaacaaagggctcatctgatctgagcgagtgggtgaatcgatcgccttcccctgatgcttgtcattctgtctgttttggcaccgcgagatcctccaactgcttctcgagactgggcatcatcacgtcaaatactagctgattagtagtcagttccttttgtaccttgtgtagatcagatcgattgcttatttggctgatttgatacaattataaacaatgggtttacttttgagtgcactacttacaagcatcattcatacggatttcagtttaaaaaaaaaagaaaaaaaaaaaaaaaaaaagggcggcc

SEQ ID NO: 278721 - DNA, 297 bp, Zea mays
atggctggagatgcagatgccatgtaaacctgccaatgtgtacacaaaattccttcattagcttattttttgcctgttgtaaaatcttgacgctaatttttctctctctagatttagccgtaggtacttctgattggtcctaaccaaagaaacagttaggatcaccactctgattgttcagcttttgtagtagaattacgcccagctcatcctttacactgtaaatttagatttggagctgattttgtcggtcgctagacatttgataagcatctgccgtggcctgtttggtttcct

SEQ ID NO: 278722 - DNA, 414 bp, Zea mays
  unsure (1)..(414): unsure at all n locations
ctcgagcccattccgctcgaggagggccacgccccataccaggcaacaggcaaccatctgcccagggagaattggagccctagctagcggaataggagacggcggcgcgctaccctcctccatctcaggcgcctcctccatctacagcgcctcctccatctccggcgcggtggcatcgtcccgctcggcccctaataggagatggcggcgcgctatcctcctccatctccggcgcggtggcatcatcccgttcggcccctcctccatcttcagcgcggcggcgccagcagctggcgtgcagggctgaggtggtgatcttttggcccatctctgctgataccgacaaagtatgcatgatgttgctgtcaagggaagaggtgctggaagcaaggatcagagtgctngaagtgtgtg

SEQ ID NO: 278723 - DNA, 123 bp, Zea mays
ggctcctcaggtcggtgggtatttccatacctttacctaatacgtattgtatggtccgaagcctgagttgcttagctttggtcagagcctgtgtaatattgatcgaattttctgctttctaac

SEQ ID NO: 278724 - DNA, 413 bp, Zea mays
gtggacatgcatcctcctagcttttgtggctcttgtgacgggggcttactttcgagacagatattcagcaaagaagcacatacggtatcgccttgtccaggcaatcattgttgggagcactgtggctgctattgttgtgctgttggaattcacaaagtttcagtttgttgacacttttactagtcttttggcttttctgccgactggccggggaatcatatctattgctctggtattcaagccatatctgaggagatctgagatggtctggaaaactgtggttaccgtggcacgtttgtatgacatattgtttggagtaattgttatggcacctgtggctgtattatcatggttgcctgggcttcaggaaatgcatacaaggatcctgttcaatgaagctttcagcatgggac

SEQ ID NO: 278725 - DNA, 431 bp, Zea mays
cttccttagcctgggatttcggttcaggacagcgcttgcttacaccgccttagcccttgtcgactggggtcgggggttgaagcttgggtatcaagggcgtatctagcagcacctgatctgtcactaatttgagtatagagttatgttggttgttgcctgcctactgatcattagccgataggaaaaaggaaaatctcacccatatctgcaacatgtgatgttatctaacagtgttagattaggcgtcattttctgttgtgatttttggaaactttgtaatgcttccttcctggaactggagcaagttaactgcaagttaccaggttggcctttagagcatgaacatatcacttaccgtgcgtggtcgttatgtggtactacgtcaggttctcttcgtgtatatattgatgagattgaactgtgcattattt

SEQ ID NO: 278726 - DNA, 515 bp, Zea mays
tgggagagagtggtggggattcggcatggacatcatcactgctgctgctaggaccagctcgccgagatggccgcgctggccgtcaacaccttcggcacgctgcagagggacgcgccgccggaccgcctctccagcagctaccctgacccgctcaaccccaaccctaagcccgaggacgactccaaaccccaggtccaggcccagcccggcgcgccgccgccgccaccggcgcaggcgcaggcgcaggcgcagccgctccgcgcctgacctcaccgagcaacccaaggctatgagccgcgccctcgtcctcgcggccaagaagtttgatgcacttgttgcagcagtgccactatcatcagaagaggatcaagtgaaaagaatccaagagctacaggcagagaatgaagtcgtgggactggagcttcagaagcaacttgaagctgccgaaagggagttgaagcaggttgaggtgcttgttaatgaagcaacagacaattgcataaattttaagaagc

SEQ ID NO: 278727 - DNA, 573 bp, Zea mays
tcgaggtcaacattggaaaaggatcttcttctagaggtccataagcgcaggaatgaaatttgcttacagttctatgagaaggagcttctgacagatacatcctatctccacatatacgggttgcaggaacatgaactggatgcaagacagctggctgttgttgctgctctacatgagtggagagatcgtatagctcgtcaggaagatgagagtactggttatatactgccaaataaggctttaattgagatagcaaagcagatgcctacagatgttggacatttgaaaagaattgtgaaatcaaaatatccatatgttgagagcaatcttgagctaattgcttacactgtctggaatgcacttgagtattcttatgccttcgaaggaatagctgagcaactaaagaaggaacggctggaacaggtggcactgaaaagtggtcagaccagtgatgaagtgactcctttggatgctgacattgatacgagtaattttgattcatctgatcagtctgcaaatgtcaatgttgcttctggtagtagggctggttttatgagtgaagcagctttgatc

SEQ ID NO: 278728 - DNA, 372 bp, Zea mays
ggaagggcaagcgtggcttggtcctcaataaggctggttgtggcagccggaactggattcttctacgtgaagcgcaggattcctggtggattaaccgagaagcttgagtttagaaagtatgatccccgtgtgaacaagcatgttctgtttaccgaaccgaaaatgaatggggaactgtgttctccacaatgcagaactgtaataagttgtcaaccttttgggaccagaaacctttatgccgttattagacagatgattaacgatcctatgggtttttcctgctccaatgagctgcaagcagcagatggctagtgttttgtcattttgtgtgggaaactacaaatgaaatctgcactcccatctttttctttc

SEQ ID NO: 278729 - DNA, 406 bp, Zea mays
gcacaccaatttcatatgatgcgtcaaacaacactcaagggcgaatctggcagatctgtttgaccctgttctactggtggaggatccggccttggagctcgagctactagagcacctgaaaatcgtctgtgcgtgcttggatgaccgaccatccaagcgcccgacgatgcttaaagtcatggcgatgttcaaggatatgcacgccagttcggctgtggactcgaagacctcagcatgcacggtcgccgtggatgatgcgtgctttggcgacctgcagatgacgaccctgaaagaagacaaggaggagaaggactagagcaaggcccaccgacacgcgagaagctgcccttggttcctgcccagggccgagcggcagctacccggtcagggagatctcggatgcccc

SEQ ID NO: 278730 - DNA, 442 bp, Zea mays
actcgtaagagacatgctagcatgcctgcacgcctactctagcagatcctctcggtgaatcgcaattccacattttcaagaaataaggaggcaaaaatgttcatatatgaattggaattatttgttttcttattaggcctatcctgaagccaaaggaaatgagatcggaattcctcggggaattccaattccacattttcaagaaataaggaggcaaaaatgttcatatatgaattgtaattatttgttatcttattaggcctatcctgaagccaaaggaaatgagatcggaattcctcggcgaattccaattccacattttcaagacataaggacgcaaaaatgttcatatatgaattggaattatttgttttcttattaggcctatcctgaagccaatggaaacgagatcggaattcctcggctgtaccgatctcgaatt

SEQ ID NO: 278731 - DNA, 646 bp, Zea mays
tctgattcctctcttaacagttcaaaaagggaatgtgcaggcagtgctgcaaacaacttgctgaagttatccccagctattccagccacacctgatgaacttgatgagctgatatcctatcaaactaatcagaaagatgtaaatgctgaaaataacttggagatcggttctgaaaataacttggaacaaatatgcagtctgaggccccaagattctaatgataatctgaagcgcaaagccaatcaagagctcgagccacttgagcttgccgccccatccactggtgctgcgccgcaatcgacaggaactgccccaagaaaaccactcaggttgaggttgacgactttggggaaaccgaagccagctgaaggaactacctgaatcgaattgcccaggagccaaaattacctagagttcgcttttccttgtattgagtcaaggatctgtggaagcgctttggcaccgcgagttcaaatgaaagggaaaatgaaaaaaaaaacggagaccacctgacgtaaatgagtgcaattgtaataaattgtgtgtagtacatagctgagttggcataaatgtacgctgtggtacgttttcttgacgacttagctacgcttgttaaacgggaaccgatatcatcttcgaagcatat

SEQ ID NO: 278732 - DNA, 451 bp, Zea mays
cgacgatatctgctcctcacatgcatgcgacctgcttagagctattgaaggatcatttgcaaccaggaatgcatgctctggatgtcggatcaggtagtggctacctgacagcttgttttgccatgatggttggaccagaaggccgtgcagtgggaattgaacacgttcccgagatcgttgcttcttctgttgaaaatgtgcagagaagcgctgctgctccactactgagggatggatcgctctcttttcatgttacagatggcaggcttggctttccagacgcggcaccctacgacgctatccatgttggtgcagcggcacctgagatccctcagcctctgcttgatcagctaaagcctggcggccggatggtgataccggttggcacctactcccaggacctgcaggtggtggacaagaacacggatggatcattcagcgtccggagcga

SEQ ID NO: 278733 - DNA, 822 bp, Zea mays
gggaaatccagaagtacggagaatagttgagcagtctgttcaagaaaacttaacagagtacttagagcttcatccagatgttctggattcaatcctatcaaagtcccttaatgctctcaaggctgcgttggcagccaagcgtgctagggaactagtcaggacaaagagtgtgttgaaatcttcatcactccctgggaaacttgctgattgtgcatcagctaatcctgaagaatctgaaatctttattgtcgaaggtgattctgcgggcggtagtgcaaagcaaggacgggatagaagattccaggctattttgcctctaagaggtaaaattctcaacattgaaagaagggatgaagcagccatgtacaaaaatgaagagatccaaaaccttattcttgcacttggattaggagtgaagggtgaggattttaagaaggaggctctccggtatcataagatagttatacttactgacgctgatgttgatggagcacatatccggactctcctccttactttcttcttcagatatcaaagagcattatttgatgaaggttgcatctacgttggtgtacctcctctttacaaggttgagcgtggaaaactagcacattactgctatgatgatgccgacctcaaagagatagttaacaccttccctgcaaatgcatcatatcatatccagaggtttaaaggtttgggtgagatgatgcctgcacaattatgggaaacaacgatggatcctgagaggcggctgttgaagcagcttagggttgaagatgctgccgaggccaatgttgtgttctcgtcacttatgggcac

SEQ ID NO: 278734 - DNA, 405 bp, Zea mays
agagaatctgtacgcagagaaaatacagactaaattatggggggtgatcctgcacaaaaaatccattgataacaggtgactggattctaagcgaggctactcatcacccgtaactttggaagtgtcggtatgtgtagtgttgttgtgtgtaccttgaatttctttctacatcttcctgtggtggcatagaatgcgtgcagtaagctgcattccaccaatggtcagattgatgcataaatcatcatgtgcgtggtgattcaggataaactaattgcctgattgggtttttggtgctgccaatttatctgcgtaagtttttgtattgttgtcatacatctccataagcttttctaatctacacaagcttttctaactggtttgaatagagaataagattaacatctt

SEQ ID NO: 278735 - DNA, 295 bp, Zea mays
tagctcgccttacgtactcttgcgtctctgccctcgcgcgatcgccttcgtcacgctcgctcgcctggctggcttgtgtgccttgccttgctcggcgtacgcgatcgcagcgagagggaggagcatggaaatagagagagacagagagagagagagagaaaaaatcaagtcatccccctttcctctgagctcgttccatggagaactcttctcacaagcgggcgcgggaggcgggcgacctcgtcgccggcggctgcggagaggagggctcgccgcaggccgacgccaagaggct

SEQ ID NO: 278736 - DNA, 336 bp, Zea mays
gcttcagatcagcaacctgttcctccagagaagcagaacccaaaggaccttactcttctgtcttgtttctcttatgcaaactggcaattaactgactggtgtcttcctcaccgatacactttatgtactaatgataccgtgattaattctgataagcatacaggtcagatctgtacatgcccagaaagctcagttccactgtctgatattccagaatctcaagctgatgttcagactgaacaagatcaaatgactgatacagatgcaggtcataggcaaatagatgttgattctactgcagatggattgagtatgtcggacggagataattcatgc

SEQ ID NO: 278737 - DNA, 279 bp, Zea mays
aagcagttgagaatgaaagagagcaagatgatccattgaagctatcagggaaaactagacaacttggcctcattgtgtgcagaggcacggcagtcatgctggtctcaccgactgatgggactgatgagatcgccaaccctttcctcgcggacggagcatagcttgcgcccctcggaacaatatgtccctgtgggaaaagaacccgtttctcgtgtatttgttgtacatgttgctacggttactattgtgctgctgctgagtacttccgttttctttaaa

SEQ ID NO: 278738 - DNA, 340 bp, Zea mays
gaaaaccagacagcttggcctcattgtgtgcagaggcacggcagtcatgctggtctcaccgactgatggagcttgatgagatcgccaccccttttcttgcggaaggagcataagcttgcagttggtcgattatttagaaccgtgctctcatgtcaccctcagaacgatgtgtcccagtgggaaaaagaactctattctcgtaccggttggtgatgaactctgtaatattcaccgtgcaagtgcaacttaaaacatctgcgatacgagctctttctttttattgtgtgcggttgtgctttccttatttagaaaaaaaatcgcggcggctgactcagcaaat

SEQ ID NO: 278739 - DNA, 452 bp, Zea mays
agaccaacaccatgactacaaaatctgagtattgcgttgctcacaagcaggagataccaaggcccaccaggtgaacaaagggagatgcaatggacagtgtagcataatttcttccttgggaatatagcccgtcgataataaatcgaagaatcaatatggttggctgatgtccaggtcaagctgagtaactccttgacaaacatactctcaactcttggcacaaagactatgttccggtagtacttttagagatttgttgcgatgttgtaatagagcattttcctcttattacagacttaaatgtaatcatttttctcagtgatcaatgatcataaatgatgcctttaatggctcattgctcctgtacattgtattcagattatggcaatgaccgcttgcaattaagataaaagtttaaccctgttgaataaatatatgttttttatttgctc

SEQ ID NO: 278740 - DNA, 484 bp, Zea mays
ggaaaacgatacaatcacagtccagttggacaacaactacaacacctatagctttggtggcaagaagaagctggtgctttctaccgcaacctggctcgggggaaagaacgattttctgggccttgcgtacctcaccgtcggcggactctgcttcttcctggcattcgcgttcaccttgctatacttgataaagccaaggaaaatgggagataacagctacctgtcatggaacagacccccttcacgtcgctgatgatgtgctttggaagttaaatgcgatacacaggcagcaccaaacagattcagattatggtcggaatgtatcttgtaccacagagaaattttatccgtgctcgtcggtgtagaatatatacggcacccttgcacatattgtacattacatcgaaacacatagctttgttttctacaaaattgtatactcaaaattgtatactcaaaagtttcagaagtggatgccagtagt

SEQ ID NO: 278741 - DNA, 424 bp, Zea mays
gctcattccattagttcgaattggaactctttagtcagtgcgctaagatctctttgtagaggaaatgattggctattgtttctcaaggtttcactatctctgctggttgtcagcatccttagttctatgtcttctcagtctgcatttaaaataggtactgctctggttttcacaggcttcaaagcgtatgagaaatgggaggacaacattgatagtatggtgggcgacgcctgtaccattcttctgcactttggttctgccaaggaatcatctagctagaaacaaacgtaggtgtagcttgcagactaccagttgctttgtttactgatattatcttcagctccatctgtttctgggtttcgttgacctaaatttttcttctgtattcatctgatggtgttgtaaaattgcctagcggcacata

SEQ ID NO: 278742 - DNA, 384 bp, Zea mays
gaaaatagcaggaaaaggagaggatttaagaaaacttgatggctagtttggaaactcaaatcctcttcggaattgaaggggatgggagaggaaattagttcatttccacctcaatcccctccaattccgaacgagatttgaggttcccaaagtagcctaaaggtaatgagctgaaggttacgtttgatcctctagccttgctggcaattgaatcatactagtatatccgatgaagaaacaaaagtgcgtggagaagtggaggcacgtctatgaactctacactctgcagttgggctgaagcccctgcatccctcattggttatcaactcattcattatcttatataaaatgcagttcaaattaaaaaaaaaaaaaaaagggccg

SEQ ID NO: 278743 - DNA, 430 bp, Zea mays
tcccgggtcttcgagctcgctataatacggccgcccataatttctattcattattgaacactcccgacagagttcgctttggaatggatcaaggggtgccgcaaaatattagcacggctgcaaaggctgctagcctgtagcctgctacgtcgactgattcaccttcgtcattcacagatgcagcggatgatgattgtttttgcctgcgtttaccgtctctgaaatccacactgcttaactgcgctaatctacatgaacaggactgcgagtctcttttatgcgttggattgcacctacgtagttgatgatcagtaaccggcggccggccggacgccgtcgcgctggaagtcagcagatccggtcgaggctctcggcgacggcgcgcatgcgcgggcgcatctcggggtcgggctccgtgcacccgagcgcg

SEQ ID NO: 278744 - DNA, 681 bp, Zea mays
cgcggagcacgagaagctcgtcgagttctcgaccaagtccgggattcttacggccaaaaaggtccctgcgccgcagagcacgggcgtgtcgggcgaggggaagctgttcattgagctggatttccccacgattgaccttgttgattgccatccttccgagctgccggcaatccccgacaccctcaacggagcctccattgtcagcgttcacaagtcaacgacggccggtgacctcattgtggagctttcatcaggaaaggaggttgctgatatcattcctaaccttcatgaaattgaaaagtgttccggcagaggaattattgttacagggccagcgcctgctggatctggctacgacttcttcacgcgttttttctgcccaaaatttggaatagatgaggatcccgtttgtggcagtgcgcattgtgttttagcaccttactggggtgggaagctggggaaacacaaactgatagcgtttcaagcatcccctcggagtggaatactatacctggagttagaagctacaggcaggagagtgcgaattcagggagaagcggtcagtgtgatgactggcaccctcttagcataacccctgctcaatgaacatcctatgtcttcacttcagttgtgtggcatgatttctctcagctaggaataaattaagtctcttttcacctg

SEQ ID NO: 278745 - DNA, 276 bp, Zea mays
gacgccctggacctggagttcagggaacgaaggccatacgaggtcaggcatgccgggcacctgcaccgcgaccaccaccaccaccaccactcctgggaagtgtaggaatagttctgaccgtctgaactttaagacatctagcgtaagatgaagttggtgtaccgtgggcacgggacatgcccttttgcatgcatgcagtgagttagtgggtgtttaatttctagtaaactaatttgtatcgcttcattttatttcattttagtctttaatttgctt

SEQ ID NO: 278746 - DNA, 276 bp, Zea mays
gcgttaagtggtgaggcaaatgtgatacataagcaatggagtacattaagtatcaaaacaattgaggctcttgtatgtacccgagattgggtaaatagaatgttcacaagcagttcataaccatagtgcttctaacccgggaatacaggatgatacagaaagagtacaccagccatttattgtgcagtatatcagacatctcgcagccaactgtgccaatgacgtgctgctgctttagcctgattgagaattcttgtacaacgtctctagaaagcc

SEQ ID NO: 278747 - DNA, 475 bp, Zea mays
gtctgcaagggactttgtagataaggtgcgtgagacgtggacagacgagcacatagcatccgagcactcagcactagatgcagtcagcctccaggaagtaagaacatgcattgaaattgggctaaaatgtgtggatattgatcagaacaagagaccttctatagttgaaattgttgacaagctcaatggaaggcatgctcactgaatgatgaactcctgcatactatacatgcaagtgaaaattatgtcgcggacccatggagattcgctctagatggaatcatggacacagtaattgcatgtgttaccgattatgtacttttgaatcatgtgttcctcgtgttgtgtcactatttcaggagttccttgattagccattgagtattactatcttctgacacatatctgaatgcataacctgttgaaaaattgcgtgcatactagttatcagtgtgttctcattgaaacgctagaa

SEQ ID NO: 278748 - DNA, 580 bp, Zea mays
ccaaatgccaatgggtatattaagcaacattttaactctgcactttgccgtggcggttaatgttctagtttcttgaatcgacgcaatttatctctagaacatgctggacctcctttgttgaccaagtgggttgctgatggaaatgcatgtctggttcatttgtttcaaacaggacagtacattctttccttctgtgggccaataacaagagctttaatttatttattttcttggtataaagtgggttgcaatccaaacagattgcatttggacagttgcaactgtacactcatttaggaaggataggcctagcggcaattgtgagaagccttttcactgagtcaaatgacctaggttcgacagtctctatgcaaaaatgtaggaataaaatttgcctcggttttttagaccgcaatcgacatgtccttgtatgtaccctcagttgtgtctgtacgtaccctcacatttggtgcatttgactttctgcaaacagtgatgcaaagcatgcaatatcatgaacaaaaccattttccagtgaaaaaaaaaaaaaaaaaaaaagggcggccgccggacgcgtggg

SEQ ID NO: 278749 - DNA, 535 bp, Zea mays
caaaagattgatgagcatgttcagagggagattatgaaccaccggtccctgaagcacccaaacataattagattcaaggaggtcgtgctaactcccacgcatttggcaatagttatggaatatgctgctgggggtgagctatttgaaaggatctgcagtgcggggagatttagtgaggatgaggcaaggttcttcttccagcaactgatttcgggagtgagctattgccattccatgcaagtatgccatagagatctgaaactagaaaacactctcctagatggtagtgtcgcaccccggctcaagatctgtgatttcggttactccaagtcttctgtgctgcactctcaaccgaaatcaactgttggcacacctgcatacattgctccagaggtcctctctagaaaagagtacgatggaaaggttgctgatgtctggtcttgtggagtaacactatatgtgatgctcgtcggcgcgtatcctttcgaagaccctgatgacccgaagaacttccgcatgacgatcacgaagatac

SEQ ID NO: 278750 - DNA, 501 bp, Zea mays
ctgcaacaggcctgacagctctcaagaccccgttctcctctgagggtagctgtcccaaagaagaccccttgtctctggagggcttcaggaaactagccgagcctctgcccttctctaaacagcaccactcgaagcttgtttgttacatcaccaaggagctcatggacactgagaacccgcctcaggttctgccgaacggctatgtctacagtgagaaggcgcttcaagagatgtccaagaaaaatgacggcaagattacatgccccaggacaggagatgtttatgacgtttcagagtgtgtcagggctttcatctcctaatcatgaaatactctgatttggtgtggctttgggaatctgagtgaatgtacatagagtggtcagcgcattgtgcgccatgtcgagttgattgaactaacctgcaatgttgaactggctggatgttggattgtgcgcatcgttgcaaccgtgaaactggcggttttaacaaaaggggtaaaaa

SEQ ID NO: 278751 - DNA, 412 bp, Zea mays
ggtactgatgcagtggatattccgtacgcacctagctattctgtctcatctgtacggcttcaatatgctcgaaagagtgaagatgaccttttgaaagaagtaaatgatccaaaacagtttgtggacacatccttggccacactttctgcccagtttcctgggaggtttggacttgtcattgagcagcatgtggacccagcgaacaaaagtgtgcttcttcaactttgtgcagcctacaatgccaacattgtctaggtaacaacttcaatgatattattttataagtttaaaccatggatcaaacaaaaaaaaaaaaaaaaaaaaaaaaaaaaaaaaaaaaaaaaaaaaaagacaaaaaacaaaaaaggaaaaaaaaaaagcaaggaaattaaaaaaaaaaaggggcggccgc

SEQ ID NO: 278752 - DNA, 265 bp, Zea mays
ttgatatcacgcatgtatgtaagctgcaacctacatatatgcattactatggtgtgtgtgtggtgagagcagacgacggcaaggtttattttaacttcgatcacgacctgcttgctgttcaagtatattaattctcgttgtacaatactacgtatgtacgtagccagaattgtttggaccgagcgagagcatgcatatatgcatgatcgttagtgtgtacgtcaatttctatctatatatctatctcttcttgatctattatatt

SEQ ID NO: 278753 - DNA, 413 bp, Zea mays
gaagatatatgtaaggaacttcataaatcatattcatcagtcaatgtaagccaaatctaaataaatgcttctatcaataggaggacatgattttgcacactgaaaggataataattctttttatattacagtgataaaaatgaatcatacctattgtccagaatttgtgaagaaaacagcatgaaaagatcatcaattttacttcaggatcaacaacaccattcttacactgggaaatgggctaaaacctaaagcagtttagggcctttggcgtgaatgtgtgctacagtcaggatttgttcaattttctttttaccccttcatgcattctaagacaatgtcgatacttctttcattttagggagacaacttaagcagtagcaaacatcaaacaacaaaaattgatagtgggt

SEQ ID NO: 278754 - DNA, 728 bp, Zea mays
tagatcgcgagcggcattggctatcgtgactcatgtactcaaagttggtgtaaaatttgtggcgaagatatttcggggtaaagatacgagtctcctgtactgccagctaaaactgttcttctcgcaagttacgcttgcgaagcaaaaagtagccggaactcaagcatcgaggcgtttgcggtctgtgagaactactcacctcctgaagggttcaaggaggaagacctataccaccttgctagagaaagtgggtactccctcaggagctggcgatctagattgcagaagcggatggctggagggaccaaacaaggtgtacatcccgttcctggcctgcggggatctcagcggctacgactcggaccgctcgtacccgctgcccagcagcacggacggtggctcgtaccggagcctggaccccgtgcagcctcccatcgccccgccttacaagaccgccctgcagatgaagaaggcttccagccacggcgccggcgcggacgccgtcaatccgtccgcagactcttgagccgcagcccgtttccgtttaccaccttgcgcggtggaagttgctttcgctgggtcctggacctggctctctagtctctctctacagaaccttcatctactaaactcaaaaaaaggaaaaaggattggaaacatttttgtggtaattttgagctggggatctgtgcggcacgtaactggttactactgattaggctgagatc

SEQ ID NO: 278755 - DNA, 339 bp, Zea mays
cacgactggatatcttcttcgcgttgtctgagtgccttccccactcaatgttacaaagccaccatgaaaaagtatactcccttgccctcaaggacatgtccaaaaaaaacagttgaaaggaaacaatgccttgttggcaaggaatgtgtttttataagatttttgttttgcaccgagagacacgtacagattctcctcttgagatgtccgaatctggttattgtggctattgtgaatactctgcatagcctcatcggcaatcgtcatccaggttgagaacttgtaaaccgtatttgattttgtttatgaatgtatgtgctctactttatgttgtgtaaa

SEQ ID NO: 278756 - DNA, 887 bp, Zea mays
tgccttcctctcccgcggcaaacccatggtgctcgaaaagatccgggagttcgttgctgccatggccaagggtggaccggcgaaggacgagctggattccaagaaaactcctgcgaaggtcgccgctgcagcgcctggcgccgctccggcgaagaaagaggaggtggtggctcctgcgccggctgcggggaagaaaaaggccaaggggaaggacaaggaggggttcaagaccattaagatgacggagacgttctactgccgctcaaaggacatatatgagatcttgatggatgagaacagatggaaagggtttacgcagagcaatgcgaggatcagcagagaggttggaggggaatttagcctcttcgacgggtccatcactggcgtcaacgaggagctgcaggaagggaagctgattgcacaaaagtggcggtttggaagctggcctgacggcttgtactcctcggtccggttggtgtttgatgagcccgagtctggagttacaatcataaagctcaaacaaactgatgtgccagaggaagacaagtatggaaattcaactgtggtagagaacaccgagagaggctggagagaactcatattccagcggatacgcggagtgttcggttttgggatctaaagaatctaaagaggcgatttggcatgaagttagatttcaaatttttacggggtcagaccatgcacgtcatagcaatccatgttttattcacccatttgttttccatgtccttaaacacagaacactgcatatcgtggggggtttaaaaacatctgttattcgaacgctgcaatgttgcttgctcccgaaatgagtcgacgctgatctgggttggttatcttgttgcaatgattaagaatgtgtgtcg

SEQ ID NO: 278757 - DNA, 351 bp, Zea mays
catgggatgtacctcgtttcactttattacatgcctgcctatgtgctctcactcggctctaggcattattggatcccttctgttcgagtccttcactttgctgctcagaccgttcgttccctagatcttgccacggcctccttgggcgtgtgtgttagctgctgttttacccaaaccttttctctacaaagggcaaaggggtcaactgaatctgtgttacggttgtactttgtttcttcctcgttcatgttaaccgctataggctaacctctttttccttatttcttggttctgcttctcaaggatcagacatcccagagaggagctcaccatgggttagatcccatagtg

SEQ ID NO: 278758 - DNA, 455 bp, Zea mays
ctcttcctgttggccgctagagagattggcatcgcactgctctctgtgtttggccgctctatgtttggcggagtccctttcgtttctgtcggcttcgtctgtttctgtacgccgccagtgagctttctttggccgccgttctactttccctcttctccctctctgttttttttttaatttcacctgccgcactactactcggccgccagggagaacctgacaaccggtcattggtttctcaatgtcctctctttgctataattatttttttctttcagccgtacaagaacagcttcctgtttatcgatctgtctctctgcactgaaaacacgggccccgcagacctcgccgccaacgagcacatccctttgggcggacgagctgctgtctgatgtgagctgactgtggcccgagcacgacaagtcgggtgtgtgtaagatcagtcggtctcttga

SEQ ID NO: 278759 - DNA, 393 bp, Zea mays
cgcttccaaaaaaagagaggcaaacaaagttccttcttccctcgggaaaaaaatcagtctcgcaatggagagcagcgtaggcatagagacggccgccgcagtggcggttggtgcaggtgtgggcggaggaggagggtacggctgccgcgggtgggagacgccgaagcgcgaggagtgccgcatcccggcgacgctgccgtgccccgcggcgccgaggaaggccgtgccggacttcgggaagcggcgcagcccgcccaagaacggctacttccagccgccggacctggaggcgctcttcgcgctggcgccgcgccgccaggccttctgcgcgtgacttggcgcggactttgatttttggggagggagttgtagatagcttgccggtctcgctct

SEQ ID NO: 278760 - DNA, 723 bp, Zea mays
cccacgtgttcgcccacgcgtccgcccacgcgtccgccctcgcatccaacctgaagattggcagagtcaaacaggacatggtcagttaagtggacgtttctcaattgttgaaggagagccttttacagtaacactgtgggctggtgtagaggggttccatatgacagtaaatgggcggcatgagacatcatttgcctatagagagaggtcagagccatggttggtagcagaagtcatgttttctggtgatttggagctcttgtcattcttggctaatgagttaccagtatcagaagatatagacatggaaaatgttgcagttttgaaggccccacctctgccaaagaagcaaacttttctgctggttggtgttttctctactggaaacaacttcaagcggcggatggctttgaggcgaacatggatgcaatatgaggctgttcgctcaggcgatgtagtagtccgttttttcactggtcttcacaagaatgagcaagtcaatatggagttatggagagaggctcaattatatggtgatatccaattgatgcccttcgttgactactatactttgatcactttgaagaccatatcaatttgcattttcggaacaaaaattgttcctgcaaagtacatcatgaaaacggatgacgatgcttttgttaggatcgatgaagtgatctcgagcctaaagaagagcaattccaatggccttctttatgg

SEQ ID NO: 278761 - DNA, 519 bp, Zea mays
ggcctgttggggatgagggcagcaccaatagcacgttgcaacggagtccagtggacggccttgttcattgcaatgagaaagtgggtgcaaggatcgtccaggagagtaataatactgtggtaaatattactgggaaccaacctgaagattggcagagtcaaacaggacatggtcagttaagtggacgtttctcaattgttgaaggagagccttttacagtaacactgtgggctggtgtagaggggttccatatgacagtaaatgggcggcatgagacaccatctgcctatagagagaggacacagccatggttgagagcataagtcatgtgttctgatgatatggagctctatacatctatggctaatgaggtaccagtatcataagatatagacatggaaaattgcacagttttgaaggccccacctctgccacagaagcaaacttttttgctggttggtgttttctctactggaaacatcttcaagcggcggatggctttgaggcgaacatggatgc

SEQ ID NO: 278762 - DNA, 546 bp, Zea mays
cggacgcgtgctccgctattaaagtctgcgtacagtccgccgcggctaggcgaccgcatccgcatctccccaacgtcttctcgccggtcgcgcacgggcaaagcagcgatggctacagcgacggcagttggcggacccgacagggtggagactgcggcgtcgtccgcggcggcagtgctggccgtcgccgttgcctcgcagaggttgctaggtctgctcgctcttgcggttcaaactgtaaatgttggagcagaaatatataataaagatcagcgggcaatatacaagttattatctggaagaatcaaatctgaaaatgtccctgaaaataaggatgggtcagacgacgacgatgatgacgacgacgatgaagacaatgacgatgagggtggtgacgacgatgatgatgctgaggaggaattctctggagaagaagatgggggtgatgacgatgatgaagatgatgatcctgaagctaatggtgaaggaggaagtgacaacgacaatgatgacgacgaagatggtgatgatgatgacgatgaggac

SEQ ID NO: 278763 - DNA, 537 bp, Zea mays
  unsure (1)..(537): unsure at all n locations
ctcncacactcccaccacgcgacaggcacacaaaaaccctagcacaagcccacacgacgccacccggccccggacggccggcccccccgtcccacgttcccaccgggctccgagcacaaaaccctaaccttctcgctattaaagtcggcgtccagtccgtcggctgctgctacgccaccgaatccgcatctcctcgccggtcgcgcacgggcaaagcagcggatggctgcagcgacggcagttggcggacccagacagggtggagactgccgcagtcgtacaggagatcagtgctggtcgtcgaatttgaattgcacaggttgctaagattgctagctcttgctgttcatactgtaaatgttgtagcagaaatatataataaagatcagcgggcactatacgagttattatctggaagaatcaaatgtgcaaatgtccatgaaaatatggatgggtcagacgacgacgatgatgactactacgatgaagacgatgacgatgaggatggtgacgacgatgatgatgctgacgaagaat

SEQ ID NO: 278764 - DNA, 628 bp, Zea mays
tactcaccaagaggatcactggtaaggtttcaaaggaagaaactcctgatcttggaccttaatggtctgctagcagatataaatcaagattaccataatgcacacttggcacatgcaaaggttcgaaccaaattagttttcagaagaccatactgtgacgattttctgagattctgcttccagaattttgagctaggaatatggtcatcaaggaaaagggaaaatgttgaatcggttgttgatatccttatgaggggtcttaagcaatgcctactattttgttgggacatgtcttactgcactgttacagggtgcaaaacaattgacaacaaggacaaaccattagtgctgaaggaactaaaaagggtttggaataaggatgagccagacctcccatgggggcagggagagttttcaccttcaaatacattactggtggatgattcgccctacaaggctctgtgcaacccgccaaacactgcaatcttccccgaaccctacaattacatgaaccagagggatgattattccttgggacctggtggagatcttcgggtttatctgcagagaattgctgctgcagacaatgttcaaaattttgttcgggataacccatttggtcagaagt

SEQ ID NO: 278765 - DNA, 591 bp, Zea mays
actagcaatactggaacatctgtacagcaaagcaacattgatagtattgaagagaaggccggccagatcgatgcagtttctgatccacatgcacatataatccaagatatgggaatggacaccaacaatggaccaccagtagctgaaagcggcagtcctgttgctgaagaaaagccccccgaacaatcctcttcaattggtgatgtgtgtgtcaccgctaatgctggaattccaacagatcaaacacaacatccaaatgggtcaactgaaaatgtagtcaggaaatctcccaacagagaactatatgaagagaaatcaggcaggctgtaatgtagtctcacccaaaggacaaaactttatgttttcatgaagatgaagcagtgggttgtgacacagaagcaatagaaaaggcaaactaatttagtaggaggttgcaccaattttcgttttttttcaggtgtgtttctaaccaaaccagttgttaggaagtcttgtgtctgtgaaaatcttgcctgttttgatttatgctaatagtgattcttttaaactacattatttgaaatcgatgcttgtagctctgagttatttttt

SEQ ID NO: 278766 - DNA, 464 bp, Zea mays
ggcgccgtgccctgcgcgaccgtgctcatgaggggccgccccgtggtgatacagccgttccttggcaccgtgcacgcgctcgtggcggcctggctgccgggaagcgaaggccagggcatcaccgacgtgctcttcggggactacggcttcacggggacgctgccgcggacgtggttcaagtcggtggaccagctgccgatgaactacggcgacgagcactacgacccgctgttcccgctcgggttcgggctcaccacacagggcaagaaggggtgctagaagaaggcgcggggtgcaatagatggggtggtacttggtagagataggaaattggattaaacagtgctctggcgaggggacgtgaactgggagttcttgtttccttgctttatgtcgataattttgttgtatgctcagttctcgctgtggtgtagcatccaacttttctcaatttgacttttctc

SEQ ID NO: 278767 - DNA, 367 bp, Zea mays
aggaaattggattaaacagtgctctggcgaggggacatgaactgggagttcttgtttccttgccttatgtcgattaaggccccgtttcaatctcacgggataaactttagcttcctgctaaactttagctatatgaattgaagtgctaaagtttagtttcaattaccaccattagctctcctgtttagattacaaatggctaaaagtagctaaaaaaaagctgctaaagtttatctcgcgagattgaaacagggccttagctagagatactgaagggtgtccttccgatctagctacttcctccatcgtcacggcctgcatgctgcacccggtcatcctcacttgcaggtgcaggggtcgcaggtgc

SEQ ID NO: 278768 - DNA, 457 bp, Zea mays
gggcggtacagcttgtcgtcgagggaaaggggacgaggagctctggcgacgccaccttaacggcggccagagtaaccagccgtgtgctggacgaagcttggagtctgcgaaccaaggacaacacatccgtaatattcgtagattttgacgtcctgagaagggatccctgtatctcgccggttgattgacatggcatattccggagactgcagctccccatggatcggcgtcttcctggctgctctattaattatagctcccaagttttgttgtgttttcagtcagatgatgtggtgtaggaggcagagtgcgtgcataccgtgtaatctggtgcatgccttttagagtctcctctctctctctctctctctctctctcgctccctcgctctctatctgtcaccctagttgatgaaccgatgatcacccatcatccaggaatggcttaacaattctcc

SEQ ID NO: 278769 - DNA, 297 bp, Zea mays
tgcaatatacacaatatcacaattcacatatacagattcacaagcttaatacataattcacaaaacacattcacatatacataaatagtccatagtccattcaaataagtctagagtccaaaagtctattgtccattcaaatacacaattcacaaaactctagtccataagtctctgtccataagtccataagctactcactactcactactcactcctcactgatcactccggcgggctgtgggagttttggccactccctcctccgccaccaggaaggtggccactccctccagc

SEQ ID NO: 278770 - DNA, 434 bp, Zea mays
gagttgccaaaatctaagaagcctgtcagggatagtacttcagccaaggaagcaccttcaacagacatatccacaagattgctaactgttaatgggggattggttccagagtcatcactgatgcctgtaataggcaggaattttcatatcctgaagcagctaaagattaacttgcttgacatagaagcagctttgcctgaggaagcattcagagcctcaaagttctcagcaaataagaagacgttcatggcgtgcctttgggaaggatgcagaattaatatcatatgtggtattggcaatcaatttcttgcagagcatgataaaagccgagtttctgaagaaagattggtggtactggtcctccttcactgcagctatcaagacaacaactgtatcatcgcttgcgctcaggatttacaccctcgacgactgca

SEQ ID NO: 278771 - DNA, 497 bp, Zea mays
tgttctttcgagaagagccggcgcgatgagctcgccggcatggtcgaccgtctcggcggcgagtgggggagccgtctcggccgccgaagacgttgccgattccatcgtcgcgctctaccgcaaggacgagaccatggctgaactcatgtttgtggcgatggaagcgctgcggaggtgaggccgctcgacgatgacaattggatgttcgcgcgcgtcgcggttccgcatcaatctcgaatccagaactggtgcttacatgcccaagcaacacgggaaactcccggagctggggcaagcatccatgaaaacaaggaacttctagggtgtagatgcttgtgcttgcaagaagcctagttcatgactccatgatgatagtgaaggtgggattccatctaggctgtagcgtcaaggatgattttgtccagttccaaatcaatctagttgcttgctgctagttcaattgcaagcacatgtaaggattttcgagtgattgagat

SEQ ID NO: 278772 - DNA, 452 bp, Zea mays
ggcggaaacccagttcagccacgtggagagggcagatccgagaagagccggcgcgatgagctcgccggcgaggtcgaccatctcggccgccgaagacgtcgctgattccatcgacgcgctctaccgcaaggacgaggccctggctgaactcaagtctgaggtgatggaggcgctgcagagggaggtgaggtctctcgacgaagacaactggatgttcgccgcaccgcggtcccgcatcaacctcgtctccaggcctggtgcttacctgcccaagcaaaacgggaagctctcagagttggggcaagcatccaagaaaacaaggaacttctagggtgtacatgcttgtgcttgcaagaagcctggtccatgactccatgatggtagtgaaggctgtagcatcaaggatgatttgttcatgtttcaaatcaatctggttgctttctgctaattca

SEQ ID NO: 278773 - DNA, 471 bp, Zea mays
tcagctgatgatgagttcctggtgatggctagtgatggcctatgggatgtggtaagcaaccaggacgtgctgtcaataatcaaggacacggttaaagagcctggaatgtgctcgaagaggttggccacggaggctgcggagcggggcagcaaagacaatatcactgtcattgttgtctttcttcgccccgtctccacagctgagcgaatctactgagtcacctcccaaaacctattctcattaacttcaggtggccataccgcacgccttccgctgttaagtcgcaatttttgtattcgatccacatcggttctcaagaagaaaagaagctatactatacgtccattcttgtatttgtagatagaagaaacagcagcctctgcggcggctctttttttcaatcttttgaaacatttctcgtgtgtaaactatgcaagctgaatggatattgttggcatcaaaaaaaaaaga

SEQ ID NO: 278774 - DNA, 780 bp, Zea mays
caggtatacacagagacaacagatggatcttcaatcgagtcaaaggaaagcgccctagtatggcactatttggacgcggaccatgatttcggttccttccaagcaaaggagctacaaggtcatcttgagagggtgctatcgaatgagcctgttgttgtgaagtgtggccattatattgtagaggtgaaaccacagggagttagcaaggggcttgctgtcaacaagctgattcacacactggtcaagaacgggaaggcaccggatttccggatgtgcgtcggcaacgacagatctgatgaggacatgtttgaaagcatcaacggtatgacctccaacgctgtcttatcacccacaatgccggagctgtttgcctgttcagtcggtcagaagcccagcaaagcaaaatattatgtggtcgatcaccagcgaagtaatcagattgctcaagaatgtaacccgcatcccctcgcagcggcaggatgtcagtgccagccatgggcgtgtgaccttcagaggcgtgctcgattacgtggactaggcaccaccacttagttactcgaaaaattattagctgggaagcatgtaaattccaccgtcttctgcctctcaatggttcattctaggagggtgtgttaatccagaattgtagtgtagcctacatgaatcgtcaccattacacaaacagcgtaaatgtgttcgccgtttcagggttcaggtgatgtgtgtaggcaattttggtatggaggttcgcggtgtgaaagggaggcctcttgttcaacc

SEQ ID NO: 278775 - DNA, 458 bp, Zea mays
atcaaaggagcagctgccactgcacgcgaagaggggacctattcccttccaaagcaacgaactttcttccgcggtttatctgttgtagcgcttgcctccgcactcgtcactcacctaacagcctccatccccgctgtgttgttgcatcgaccgtccctggagatggatcggcggacatctcagcagcagtgcagcacgagcaggcaacacgagagatggatcgagtacatgagcagcacctagacaggaactggacggacgtggacaggaaccggatggagatggatcgagtacgtgagcagcatggcagcacgggatgccaaggggaaaaaaatggattggcgccgatgaaaactgatttagttgctaaatactatatttgaggctctgttgttggagacccaagttttatgtcactcctaagtagattagatcggttctacaaattaaatttagga

SEQ ID NO: 278776 - DNA, 392 bp, Zea mays
cttggccgtgcttagtccttatgaacgccatgtaacttattgatttcccatggaaatgaaatggtatatttatcttgctatcagaaccgcagtcattagattggttatttctgtcggcatgttttcaccagagctgtattgctgtctgctttagccgtcttgctctgcgctgcaacttgtatgataaaacgaacaatgggtgacaatagcatgaatccagcactcaaaatttggtacagtcactcagttacatttttagattcctttcctttctaaggtacctatttggaatccaggtgaagaggatttgcggtttagtgccagccagtctgcggtcttcgacgaatagctattactgatcgtcatcggcatacgagtccaactgctcgagc

SEQ ID NO: 278777 - DNA, 324 bp, Zea mays
gcacactccgccttgcttcacactcgtcacccttttcccgtttcgaggacccggagcgctgcgcttttgtgccctcggttgggatttctgctcgcagggagtcgcaaggaggacgtagcttctgtcggtggacggagtaggttctgcagggccgagatggtggtgcatctggtgctggcttgacttgctgcctcgtgaggttcgatcgggctttgctggtgtctgctagtaagtataggagctgaatcggaaggaagcaatactggaggagacgatgagctacggtgccgtggacatggacgaggagagcggagtcgaagaggt

SEQ ID NO: 278778 - DNA, 401 bp, Zea mays
aagcggactaggacatcgccggaggggaagaagaacgggacatcgccggaggggaagaagaacgagagcctcttctgatgcttgacttcgtgtacaagttgtagctgaatgttcctcaaaatataggattaactagttctgtaacactaacaccccggcttggttatgacttagaaactgttaggccatgtttggttcacatctcctaaagtttagtcacttgtttaaacatgttaaaggaggtaactaaaaaaaaacctcttaaataggacattatagggactaatgtttagttcctaaaatttaggagatgactaaaggaaccaaacatagtttactaagccttagtaaacgtgtgaataaatgcctctcttgtgtggcggctatttttatttctgcat

SEQ ID NO: 278779 - DNA, 734 bp, Zea mays
cagcagatgagcttgccactcctcgaaaagggtctacatctgaagcactcagccaggaagagaagtcagccgcggggggcttctcgccgtccaagggcagccgcttctcgtggtcaccggattccggagaggcatatggccaggaagggctggcgcggctggacgtgaggtcgcctgacaggctagcgggggagctgcatttcctggacgagacgatcacgctgacgccagaggagctttcgagggcgccggctgaagtcctaggcaggagcagccacgggacctcgtaccgggcgacgctggagaatggcgtgttcctgaccgtgaagtggctgagggaaggcgtcgcgaggcccaagaaggagttcgcgaaggaggccaagaagttcgcgaacatccggcatccgaacgtggttggcttgcgcgggtactactgggggccgaccccgcatgagaagctcatcttgtcggaccacgtcgcgccggggagtcttgcaagcctcttatacgatcgaccaggaagaagaggtcctccaccgacccgggcgcagcggctgaagatcgcggcggacgtggcgcgcggcctcaaccacctccacgtcgaccgcgccatgccccacgggaacctcaaggccaccaacgtcctgctggacgggctggaccagaacgcccgcgtagccgactaccgcctgcaccgcctgatgacgcagcgggcgtggcggacagatcctgga

SEQ ID NO: 278780 - DNA, 456 bp, Zea mays
tttgttgctgtcgacgtcttagtcgacgtcgggtggggtgttagacgcgccgccgaccgagggcctgcggatggacctaaacctggtgctgccgccggtagagatggtgatgtgattgctgccgtccaggaggctaatcgattgctcagttaattaggcaccattagtagctaatcgatcaaggcagccgtcaggcagaggtgtaaataggatgcagatttgctcggttttcgttgactgtggtggcatggtttgcttcttcgctgtgactctgcgagtcacgcaacaatgcaaaagcaaaatgaaaaaagagagagagagagagagggataattatgccccagcggctctcattttattccctgcattcacttctgagcctcttcgtatgattttttactagaaccacttctgaaaccctttaagttctgaaagctgaaccgtaatgtgtgagac

SEQ ID NO: 278781 - DNA, 843 bp, Zea mays
ctatgaccgcgatgcacacctacgttggccatagttgcgtgtaaggaacatcggttactagcgcgtgaggctgttcgcaagtctttggtacttctgaaaaatggcaaggatcagaataagccattccttccattggccaaagatgcaaaaagaatactggttgcaggaacacatgctgatgatattggatatcaatgtggtggctggacgatagcatggcatggagacagtggaaaaataactcttggtacgagcatattggaggccatacaagaattagtgggagtgcaaactgaagttgtgtatgagaaatgcccaaccgaagctatgattgaaactggggggttttcctatgcggtggtggttgttggagaggttccatatgccgaatggacaggagatagaactgaccttagtattccgtttaatggctctgaccttatcatccgtgttgcaagtaaaatcccctaccctagtgattgttatatctggaaggccattaattattgagtcacaagttttggaaaagatagaagctctagtcgctgcctggctgcctggaagtgagggcatgggaattaccgattgcctctttggagatcatgattttgtgggcacattgcctgtgacatggtgtaagtctgttgatcaattgcctatagatgctggagactctaactatgacccgctattccctgttggatatgggctaaaaatgtttcgaagcgataatgattcaacataactttattatttattgggtacatttgaatctttgtgatgttaaatactctgtatttattggctattggaacttaaaatgaaataatatattgttgtaat

SEQ ID NO: 278782 - DNA, 475 bp, Zea mays
cggacgcgtgggatacagcatacttcagcctctctctcggttctcccgggcccctcgcgtgcgctctgtcgccgtcgccgccgccgccaacctacgccaagtgcccagatctccaccctcgggaccttcgccggcagcgaacacccaccaccagctgatatagggcatttacccttttgtgactatggcactagcggctatctataaccttttcatcattaacaaatcaggcggccttatatactacaaggactatggttcagcagggaggatggataccaatgacagtctaagattagcaagtctgtggcattcgatgcatgctatctcccagcaactctcccctacccctggctgtactggcattgatctcttacaagctcataactttgatctccattgctttcaatccctcacagggacacagttcttcgttgtatgcgacacctggagctcatacatggaaatgctgctg

SEQ ID NO: 278783 - DNA, 477 bp, Zea mays
  unsure (1)..(477): unsure at all n locations
ccaaactagccaaacaagtggtaataccacggcccttgtggcgacaggcgacagcaacagtgaaacgccccgctcccaagccggcaaacaccagcccccgcgacggcgccgcgccgtcctctcccgaccgacggcaacggaaaccctggtgacttctgatacaggaagattacttttatctatactccaccttctttcgtggctatggcactagcagctatctataaccttttcatcattaacaaatccggcggccttatatactacaaggactatggttcagcagggaggatggataccaatgacagtttaagattagcaagcctctggcattcgatgcatgctatctcgcagcaactgtccnctaccactggctgtactggcattgatctcttacaagctcataactgtgatctccattgctatcatcgctcacagggacgaaatttttcgtcgtatgcgaaactggagctccaa

SEQ ID NO: 278784 - DNA, 322 bp, Zea mays
gtgcactactactgcgaatctgcgattaaagatcagaggcgacatctaatgtaccgtagtctgtttacctgaagaaaagctccgctatctgcttgggttggaattcatgccagattgtgggtgcaaacctgtttccttactacctagtgtcccagtcggaatattaataagctatgccaggattcagatcgaaatatttctgtctctgagagatgtgttgcgtcacaacttttcgaagactgttgcctgaacaatatctgtgtgtttatccctagactctaatgtacaaacagagtcttatacagtactatgcattaacgtc

SEQ ID NO: 278785 - DNA, 1570 bp, Zea mays
caagatagcaatcttgctgcaccttcttctgcaaatgatcttgttccagctgctgttcctgttccttccactggtccgccctcgcgtccggcatttagtcccaacaatgcacctgcaccagctgtaaatcccccaagtaggccaccaacggtccccagtactaccgctggagaagttcaggaaaggaggtcaatgaaatggctttatttcattgtgctgccactggtcgtgcttcttattggcatcgcatgcatgcttttgctatgccgcaccaagtcagggacaacaataggtccatggaagacagggctcagtggtcagctccaaaaggcatttgtaacaggagtaccaaagttgcaacgctctgagctggaaggtgcgtgtgaagacttcagtaacattgtgtcaagctatccacagtacactgtctacaaggggaccttatcaagtggtgttgagatagctgttgtatcaaccatggttatctctagcaaagattggtcaaaacattcagaagggcgattcaagaagaagatagactcactctcgcgaatcaatcataagaactacatcaacctgcttggatactgtgaggagggaagaacctttcactaggatgatggtgatggaatatgctcccaatggaacactatatgaacaacctccatgtcgagggatttgatcctattgattggaatggtaggatgaggataattatgggggtagcatactgcaccctacacatgcatgagcttagccctcctgtaacacacccagacataaagtcaagtgctatattgctatctgaggatggagctgcaaagatagtagacatgagcgtttggcatgaagtatatttcagaggaaacatgcccaaggatggcgacctagttgatcaccaggaacgagtagctgcagatccagctgggaatgtctacagttttggtctactcatgctggagatcatctcagggaagcctccgtactccgaagaaaagggttccctttcagacttggctttggagtgcattagggataaccggagcatgtcttgtttgcttgatcctagcttgaaggatcacaaggaaaaggacctagaaaccatatgtgatctgctccaggactgcatccaaagcgatccgaagaagagaccagccatgagggaggtcaccactagactgcgagaagtactgtcaatttcgcctgaggctgcgacgccccggttatctccactctggtgggcagagcttgagatcctttcagttgaagcaagctagcgaaaatgtgctttgtttgcagcaacaccgaggtacttgtgcatactgtaatgcaaccctgtacatccctgttgtatttttccatcctgtgttgtaactttggtggtgtctgcgtgctacatttccccctccccggtgaattcagctgcctggtttgtttttctcatctgtatactaaacatacatggtgtgagagcagaatgctttataccatcctaggactgattgtaatcaggaaatgtgtagtgttccatggttttacagaaatatacattctttgattgttgatgtgg

SEQ ID NO: 278786 - DNA, 436 bp, Zea mays
actggtatgtcttgtttatctactacagctcaagactgtgactaaatttcaacggattaaggtggatagcgtcagattgggagatgagaagcttcacaataccttgtattgggctaacattaccattcccatggcactgttaccattccatgtttctaatgcactgatggtatgaggccacgcttctgtatgtgcctaccgccaagacaccttgagctacacatgtggtttgttattatcttgaaagcgtaattgtgtcaatacaatgaccttaatatgcttgcttgatctatatttgtctgccatcaagaatgaggcacttagattaggatatatgttagctttgtcagtattggctgagtctttaagcctatcagctaaagctttagcaccccattattttaggtattatgatcctgaacaaccctgtttatat

SEQ ID NO: 278787 - DNA, 747 bp, Zea mays
cttgcttttcaaaagtcgtgggacctaacttatggtatggcgatcgcacaagacttacacccaagcaagaagaagctgcgcttggtttgtcacgtgcctgtggctctggcattccagcatacatttgcaccatgaagaagtctaatgttgtcaagagacagatggtattttcaagacagttcagtaagcgacacatattcggtcgtctgggcacttatgggtgtgaaaccagagtttttgcaggcagggacctggtcggcagtaagctcaacttctcaatgatccatggagaactaaggcttcttggtggatggcccctctttgtgaagagccaccgtatcgaagcaggacacgtgtgtgctttcatgttccaggaagaggaagaggaagagggcgaactgtcacttagggtgcacgtgctgggtactatgccagtgccaacaatctagcctttgcttgtttcgttgatgaggcacgggatgaacgtcgctaacgaattatgcatcagacattagtattggaaacagcagcatgtggctatcttgctctggaattagttgttgttgttctatctagataactatgtatggacatattgttcttttgtgttggagagagtaagcgttagtgttttaagacacaaagattgttatttttagactgaccgctccagttgtgcaaataggaactgaattagtggcattgttagcatgtacatgaaaacgtgatttgtgcagtgctgggatt

SEQ ID NO: 278788 - DNA, 442 bp, Zea mays
gttctagatcgcgagccgccgcccttttttttttttttttttaaacgccaactcagggagagtttttccaagcagataaaacagtcatacaggtcaatgtttttttatagcatttcagtttagttcgttggaaagcagcttgttacgatgcctgaaacagctccacagtccgttgcggttgtagacgctgcaaagaaagtaattgggagacagttctgcctatatatgaatgcttacctcctcaagctacataacacctatgggtgataagtaggtctaagcgcaccattgacactgattcctcacaaaatcgcccactattcacagctaatatcgcctataggccctcccaagatcatcatgcctctcatgttgaaactcaccatatgctgcatgagcctttggggctgaatagctatcagaagcatacggatatgtgctc

SEQ ID NO: 278789 - DNA, 660 bp, Zea mays
gtcgaaagcggcaaggatgctatcagtctacttgaacccccgcatcgcttcgatgcatgtgtgatggatgttcagatgccagatatggacgggtttgaggcaaccggacaaataaggcaaatggagttgaaagcgaacgcggaaaggaagaacaagttggctccgatcgaaggcgcgacaactgccgagttccatctgcctgttctggcaatgacagccgatgttatccacgcaacttacgaagagtgcataaaatcgggaatggatggatacgtatctaaacccttcgacgaggagcagctataccaagcagtctccagattggtagtgggaacgacagattcggctgtttgatgttcaaaatacgatggacctgacttctcattcatcgatcgaagtgaagcatcaccatcttgccctctgtccagctgactctatatcccttgacaatgggcctctgacatggcctctcacaagactagatgaaaaaagaagatgaaagtgccgtgagttaggtacgtgtcacacatgacatgaagttgctgcggcagcccagaggagtgtaggtagatcaccctgtaactctcttgttctttgatgtttataggctgttgtgtcttctgacaattcattggaaataccacatctcgttgcaatccc

SEQ ID NO: 278790 - DNA, 840 bp, Zea mays
caaatgttaggaagcagtgcagggctgaatcatgtcgatggagctccaagggttagatcagttgtgagcatacccgctaggtaaaggcttgatggtagcacacatactacaccccttagccccagtgaggattcttcccctgttgaaagcggcggcaaagttggactccctctgaatgacactaacaaggctgaaggaaccaatggagagaacagaaaaacaagtgaagcttcggcctctgacggttccgtattgtcacctaccgaagacaagagccaggctaatattgagggtaaagatagttttcagaagaggactttctctagaatgcatgatggagagacggtggaggtcagctacaaagtctacatacccaagaggaccccagcccttgcaaggaggaaactgcagcgctgaaaacgccaaacgccaagaatagacaattcatcgtcgggcttactatctgcaaaaactataggttttggctggagatgcctattctgtgaaccacgagtgcccagcatacatgccttgtggaatctggatatctgttgctcaactaaataaacagttttcctacagcaaatgtattaattgtctgggattgggtgattgagtcgttgtaatcagcaaacgtgccgtccaatactgatgaatctgtcacctgcatctattgctgttggcatagtagtcttttagacatgcagtagctaccttgctgcaagcggacgttggacagacactgcagaatgcagatgtgcctgactgtactctctagtctgagattgttaagcctgaagttcatatttctggtttatattatggtcgtttggatttgtt

SEQ ID NO: 278791 - DNA, 1052 bp, Zea mays
cttgtttcatggtatacagccaccaaggacgaattggctcctataaagcctctggctaagtttctttctttcaaatcgatagtgttcttgacttggtggcaaggtgtggtgattgcaataatgtatgctttgggccttcttagaagccctttagcccagagcttggagttaaaatcaagcattcaagatttcattatttgcatagaggacagatgggcattgcttcagttgttcacctctatgtgttcccagccaagccctatgcactcttaactaatcagtcacacggaaacatttctgtacttggggactatgtatcctctgagcccgtggacccttttgaaataaaggaaagcaaccggcctaccaaaatgaagcttccacagttggaaccagatgagagaagcgtgacaaacataaaagaaagtgttcgggactttgttgtcggcagtggtgaatatgtgatcaaagattttaagttcactgttaaccaagcagtgcgaccagtggagaagcgcattgataaattgatgaaaaagaatgataagagtaagaaaagccaggacgacaactgggtgagtgcagcaacaccagagaggcctgttcgtgggattgatgatccattattaagcggaacgcaagtgacagtggtgtcacaaagggcagaaaatatcgcagagttgtgagctcagttactgctgtggacagctggggaggtggtgatcaagcttctgacggatatgagatcaggggtcgccgctgggctgtaaaaagctaacgatttacatagcgagatggtaaattcgaaccatatcgcgtggggggaaaaggacttttaggtttgcaactgtttctgcgatactggccatttaggagccttcgcaagttcagattgtctttgtataggtacttaggtagctgataatgatatgtaacctttttgcgtagattgtttaattctcttttctttttcttggtcgagtcgtactgacatttggtattgcaaaatttgaaagtacaataatttttttccctttcaaaaaattcccctt

SEQ ID NO: 278792 - DNA, 447 bp, Zea mays
ccttccgccaacccttccaaccatacaaggaccaccattgctcttacatttttaggtggaaagatctggagattgtaaaactagctatggagtatggtttactccagatcccatccatgccagaagtgaagcatcattctctttcactagagggatttatttctgttgatgatgttgatattacacaaatcaagtacaaggataaagctcgagaaaaacaacgcaagaaggcgctgaaaaggaaagcagaagaggaggctcaaaatccaaagccggagaggaagagacctccagagaagccggagaagccaaagcggaagaagacgggcaagcagcgtcagtcaatccaaactaaagaggacctggatgagctggcgcacgagtaccggcttctgaagaagctcaaacgtggagacatcgatgaagaggagtacgagaagctcactg

SEQ ID NO: 278793 - DNA, 490 bp, Zea mays
cccacgcgtccgcccacgcgtccgcccacgcgtccgttataattgtacctctttctcttgcaaaatacattagcaatggtgttggggtttccttgcctactgagcaattattcaaaagtcttgtcaccagccttctaatccctcttattatagggaaggttgctcgagaaacctcaaaaggtattgctgattttgttgatggaaatcgacaaggcttttcagttgcaagtgctgttctcctcagcctagttccatggattcaagcttcttcatcttgctctgctggctttcaatgctgcaatgttggcgatcttgtcacgtcttgaacagaaaggggagtcagtctttgcaaagaaagagtacgcacgagcagtcattttggtggccagtcagaaaacgttgccagtgttggttgctgtggttgagcagcttggaagagcgttcggggagtctggatttctggtcattccctgtgttgccgcacacatta

SEQ ID NO: 278794 - DNA, 876 bp, Zea mays
cctggtcattttgctagagagtgcccatctggtgatggtgggagacgggacagatatggtgggagagatgacaggtatggtggcggtcgcggtggcggtggcggtcgttatggttctgaccgtggtggtgaccgatactctggccgtagccgagatggcggcagctatgggggtggcgatcgctacagccgtgaccgatcaggtccttactgatggccttagttcttgattgagaagtatgtgccatccaggtatgaaagtctatctactattataaggcttgttattgtgtctggaactttgttatcctgtagttggagtcgacatgtaccgtgagaaatcagctgctttgttatagaccgtattactgaccggtttattatcgtttcctgcttgccaggcatatgacttggtcatagtgcttggcgcttggatcctgcatgtttgcttgatgtgctatttggctattaaaagatggattttgtcactgtgtttgatgaccctgatcctaattaagcttatgcctgtgatacgggggattggatggcaagttagtgtccgcatttgtgttctttttggggaagcaaggggttgactactataatctgcttgaacacacctacagctacaagaaaaaactatgttcttgttacctcttctgaaagcaagtgatgaatcgtccattagagaaaattaactggtaatgttttcaatcttacatctttaatactgtgttacaacgtcattctcaaatgacttttgttttggcaggcttctttttggttatctgttcttgctctggattggttgatactgtggttctggatttggttacttgcgtcccaagatcatttaagttgcctcattttagtctgg

SEQ ID NO: 278795 - DNA, 539 bp, Zea mays
cacgcatatgacttggtcatagtgcttggcgcttggatcctgcatgtttgcttgatgggcggtttggctattaaaagatggattttgtcactgtgtttgatgaccctggtcctaattaagcttatgcctgtgatacgggggattggatggcaagttagtgtccgcatttgtgttcttttcggagaagcaaggggttgactactataatctacttgaacacacctacagctacaagaaaaaactatgttcttgttacctcttctgaaagcaagtgatgaatcgtccattagagaaaattaactggcttctttttggttatttgttcttgttctggattggttgatactgtggttctggatttggttacttgcgtcctaagatcatttcagttgcctcattttagtctggcaagttgatccacgatatccaaagagattatcctttggtcccattctatgtgcctttagcattggagggcctctatttatggttgcttgacgaactggttatgtttgcttcgccatgttggtcgggtgttc

SEQ ID NO: 278796 - DNA, 844 bp, Zea mays
cccacgcgtccgcccacgcgtccgcaaaaagcgcagttggtaaagaagctggagtcaggtcttcgcgagatttcctccatctcgattcatcctggtggtgataatgttattgtcggaagcagagatggaaaattatgctggtttgatactgatctatctaccagaccatacaagactctaaagatccattctaaagatgttaccagtgttgcctttcaccgaaagtaccctctttttgcctcatcctccgaggattgtactgcctatgtatgtcatggaatggtctattctgatcttaaccagaacccacttattgtaccattggaaattcttcgtggccattctagttcggatggaagaggggttttggactgcaagttccaccctaaacaaccatggttgttcactgctggcgctgactctgtgattagattatactgcgactaagcattcctccaaggattcatgattttgccaagcaatatgacgtgtagccttttgttgggcctcagtatggtgatgattgctatattctggtatgaagttggattggtacacatgtatgaagccaagagtggtggatcttttgttatggggtcatggctgctctggaaaggaacattcaaacagcgggtagggtgtttaatcaatgtcaacggtttgccagcaagtgaaaattttcaaatgttcagtacagccacagaggccttagagtagtggttatgttctttagatgtgagactttagacgcttattttggtgattttgtaatgtcacctatcttgtaccatgaatcttgtaatactaaaaatacttttcgccaagctcatccaaggctgaggtt

SEQ ID NO: 278797 - DNA, 704 bp, Zea mays
  unsure (1)..(704): unsure at all n locations
gcaaaccgaaggtcctggcattggcagtttcactgcaaaatccatgcttaagaagggggggatgttcaacagctacctggaggagattagcgcggtgcantcagattgggtgattgcagatgagcacttacaagcagatgttaagtcagcgatagtggattctgttatgcctgcatatagaggcttaattgggagattgagatcatctcctgaagctgcccgagacttgttcatcaaatacaccccagaggatgttcaggaacgcatccaacatctatttgaaggggtggccaagtgattagtctagctattttagtggatatcacaaccttagttatggtgacattttggactcaatgatgtgttgcaaaaaggctggactttgtctcagatgaggaaatgctattgtctccagctgtgtaaaatctgtaggtgtttctgtatcaagtatcaactggtaattttaacctattgtgtcagtatcgtttgtttctaaaaaaaaaaaaaaaaagggcggccgcacgccgcggtttcatcgacgagagcgtcgctcgccttggcatccgttcccgtacggtcgacgaggtccactccttaccatgggaggagctcgagtttgacattgctcgctggatcccagccttcaagatggtgtttcgcatcctaatccccagcgagcgccgccttcgaagacaaaataacag

SEQ ID NO: 278798 - DNA, 461 bp, Zea mays
ccttgttgtaacagcaaacaaggtgaaatcaaggggctgcggacatatgatggctgcgggggctggtttctcattatcgtcagcgtcacatggatctacacttagagatggcagatggcaaaggggcccgattccccttttttttgcggggaattcctcttgtttggttaggtatgaattggtgggaatttaagtggaatccacctcaaattctcattaatccacccgtaaccgaacaagcctagaggtgatgaaaaatgttcttcctccacagagatgtaatccacccataactgaacaagcctaaaggtgatgaaaaatgttcttcctccacagagatgtaaacggggaaaaaattatctcggcggataaagagagatggagaagcattcctcattatcgtttcccgcgggtccaatttatatatgatgatgttttcatatacacaaaatgatttctta

SEQ ID NO: 278799 - DNA, 483 bp, Zea mays
cccattcgttcgggagaaagcattgcttgctgtgcttcctccgcaagagtgccatgtccaacttctcgtcgattaaggcctccacgtttggcaacttcaggtccgtcgtctcgtcgccgacgactcggcttctgctcatcaccaccagccactagctgtcgtcgccgacatcgacgcacgcggaggagatcgatcggcccggccggccgcaggagaagatgagcttctttggccgcggcagcagaaaccagagaaccttcaggccgaagaagagcgcgccgtccgggaacaaggggatgcagctgaaaaggcacatcgacgccaccctcggcagcggtaacctgcgagaggcggtgcgtctgcccatcggggaggacctcaacgagtggctcgctgtcaacaccgtcgacttcttcaaccaagtgaacattctctacggcaccctgatggagttttgcacgccagcgacatgcccgaccatgt

SEQ ID NO: 278800 - DNA, 355 bp, Zea mays
gcaagcgcgcgcgcacaccaaacgcaactgcaactgcaactgcaagatcacgccacagcagaaaccaacagttccacacgaagcaaaaaaaaaagggggaccctccccctctgccgatttccatccgccggggcgtcgtctgtgaccgaccaggccatggacaagatcctggccttctccatcctgagctcgtcgccggcggacatctccgcggccggcctctcctcctcctcgtccgcccggctctcgtggcggccatcggccgccaggcggctgcggccgacgcggcgccaacgccgaggcaggagaaggcggccgaccagcgggccccggcggccgagcgccggcgggaggc

SEQ ID NO: 278801 - DNA, 494 bp, Zea mays
acgcaccagacaggtccgggacgcgtgggcgaccgtgggtccattggtcttggtggtatcacggaaagcctgagggagtacttgaagaacatgccacgtctaataatgcagcagcagaagccagaatcatcagagtcagattcaagtggatcagaatctggttcggaaagctctagttcaggttccagttctgagtctgagtcagaatcaagccctgatgagcgtgacagaaggcgaagtaataagaggaagaggacttgagagcacttccaactatgccttttggaattcatgtatttggttttgtttaaatgtgcttcttcagtatacatgtgcagtatgtgatctagctcttgatgtgttagtggtaatcagaaagccgtaacagtaagatactatccgaacttgtacgtggcaggttggtagtccagcaacaaagggccaacagagatcttgtttatttttcataacttccaatgcagacccagttttgt

SEQ ID NO: 278802 - DNA, 572 bp, Zea mays
  unsure (1)..(572): unsure at all n locations
cccacgcgtccgattgtgtatacacatctactattttgagaaaatgtgctagatggggttccatgacactaaatccttggaatcgatgttccaagtggaaattagcacatgccgagaggttcgctgctgatttctacgtagcggatgcaaaatcaggtaggagggccttggtgaaagctgggcaccactcaaaggtcgtgccgctgatcgacgagaacctcctggtgacaacaagcaggggcaccgagttatcttccactctagagcactggctcgaagaaaggaacctttcttccgaagaagcccaggttatccgtctagaggaagggtatatcagagaacggatgcggttgagcgtggttggagtgctgagcaagaataagaacggggatgccgtgatacttcctccgctggagcctcaatcgacgggctttgtgttgctgtcgtgtctcctcccgtcatatttcgacgggatagtgctgagactggccgncgtgccgaactcgggcgtctcatgaagagctgctgtgtgggtaagggagctcggtgagatgtaacagctaacaacaact

SEQ ID NO: 278803 - DNA, 387 bp, Zea mays
cgctccattctgtcagccacagttcacgccgctgaacggccggagatcgccccccactccctctcgccggacggttgcagatcaggtctaccagatccgtctcagattaggtggcaggagaggaggaattcgggtctgaatctgatcgatatgcggcagcagcggggcggggccggggccgggaggagggcggacgacccggggctcctcaagagggccttcgacagggtgttccgcttcgtccgcctcgccgagttcgagatcttcttcgtcctcttcttcctcatcgccttcttcctcttcaaggaccttatggcacggcctcaatacaatcagctgtttgtcaagaagcctgatctagatgattcctggcctttagtacccaaa

SEQ ID NO: 278804 - DNA, 426 bp, Zea mays
ttgctttgtttttatcagctgaaccctccaaccaactgaaggctacaaatactcgggtgtttggacgagggtgaacatgagcttagacttgtcctcattcgatttgcaacgtctcgacaacccttgcacgatctgactctactgttagatcgtccgtacccatagtttatccaaaagaattattttacacggtatgtactgttatgtgttgtagattatattgttagaaaagtgaagtttgaatatataggtatagagatggataaactgtcatagatttagtcttagaggtacaacaccattccgttgcaagcctctgcctcaacaacttgtgccatttaaaatcacttgtcgtctctaccagtctgcctcgtgccatgtaaaaatcacttgcccagccgtaaattagacaggtgtactatcatc

SEQ ID NO: 278805 - DNA, 889 bp, Zea mays
  unsure (1)..(889): unsure at all n locations
tacgcatcataacaaggccttaaatttttgttgcaacacaggagacttaaaatgacgaatgactggcatacatacttcaaaggacaagaagtaaaaaacagcgataagttttgttacttggtacaccaatctcttcaaacacaactaacttaccccagcttgaaacatgagcaaacttttaccaaagctctgagttaaaacggggagttaaataatctaggcaaagtgatcacgccaccgctgctttcgtagtcgtagttgtacatcaagcatccaagattatttcttctttccaccagcctttgttttcttgttcgcagttgccttgcttgttttatccgaagtctccttccgttttagcggtgctgatgtggtggcagttggcttgaaaaaggactcgagtcttccttgcgacgatttattcttggcagatttgatcttctctatggcctttgtcacccgatcttcattgaaaccattatcttttaccaggaaacttatgagaccctcctcatcaggtgcagtccattttagctcaggaatatccaatgtgacattaggctccttgaacaagcgtcgagcttcttggtaaggccagtcctcaggaatttgatatctgtctttattaagattctccaagatgctttctatggacccatgttgacgaataagtttcagagctgtttgccccccgatacctttgatgctatcacaatagtcacatccacacaggatgcacaaatcaatgaactggtccatggtgagttcaagctcctccaaaaccttggcaacatcaaattccatcacaggtattttcttggaacttggatacattaaatgacgaagganccgtggagccccgaatgtaacngaacgcgtgggaaaaaca

SEQ ID NO: 278806 - DNA, 593 bp, Zea mays
  unsure (1)..(593): unsure at all n locations
gtgctgtggaaggtgatgctgcangtattttgtcagaatctaccttcccaaacggttcacgaccgaacaaggactcaagtgttagtactatgccaggtatatgcacagaaaattctgggaccgagtcgtgcaacactgtcaacaccagagcttctactcccacaagcatggctgttcgtgaaggagatttgctgccgcctgaaagcactactgatggtgtcctacttaacattgtgaaaagagacgccctgcaggatggtgtaattgaattggtggaaagctcctgcgctgaaggatatgcggcaaactgtgacaccgtctcagggctagactgctgaaggtaacaagacgctcgctgctgacttgagcaatcaacatttagctgatgattagattcttcttgattttgatgatgaaaggtcatttatatgtagctcactacagcaacgcagtgtaggaaaattgtacctgctcgatttaaactttaaagagcatgccatgagtagctttgttaatgttaatattcacatccattgtggaattgttggttgatgcatttcttagcacgtcgagcaaccatatcacagcatgcc

SEQ ID NO: 278807 - DNA, 596 bp, Zea mays
agcacatcttcctcgcagcgccggcgctccatcttccgctccctcccccaccttcgatcggcacgcaggctcggcgtcgtcgtcagcggttcctcctcccgcctctcgccagtagcctcgcgccctcgccgactggcgaccctgccttgaaggggctggcaagatgatcggcgtagggaaggcgaacagtacgccaacgtccttgacaagcccctcagccgtggcaggcaggaggtcagtttgagtgcatttgcattcttgttctctgagttggttcagtacaaccagactcaagttgacaacattactgagctggaacggaggctggaggatgctggttatgctgttggtgcaagggtgcttgaactactctgtcacagggagaagggaaatagacgagagacacgacttctgggcattttatcattcatccacagtactgtttggaaagtgttgtttggaaaggtggctgactcacttgaaaagggaacagaacacgatgatgaatacatgatcagtgaaaaggagcttcttgttaaccgtttcatttctgtgccaaaagacatgggagcattcaactgtggagcttttgttgc

SEQ ID NO: 278808 - DNA, 438 bp, Zea mays
  unsure (1)..(438): unsure at all n locations
ttaatttttctccttgggcatccaatcgtactccaattccaatgccaagaataggaggtttgcaaagaaactccaactgtcctcaagtggagcaacgcaatatgcttatctctcagttaaccaggggatgtttcagagaagacatggatctcgaaacgaggttggctgtactggactcactttctgaagcatttaagaactgcgaggacacactttctccagattctgatgatgatgattatgaggacctcatagcacttgacgaggacaaccatcacagaggtgcttctgatgaccaaataaacagcctgccactatcactgatcgagggtgaaaattgttcagatgaaccctgtaatatatgcttggattgcccttctgctggcgattcactccggcatttgccttgcttgcacaagtttcacanagagtgcattg

SEQ ID NO: 278809 - DNA, 409 bp, Zea mays
cccacgcgtccgcccacgcgtccgtccacgcgtccgcccacgcgtccgcaacgaggaaaaatgtggagctattcccggagaaacgaacatcgcctcaatcctcttcaatccatttgctcccaaacaagccaacgggtgtttggtgcaggagctatgtgctcgaacaatttaatcaacaggttcttctgctgcagttaccgcattttctgtgctcatttatctatgctgtctgttctaaattataagacgctttgttatgtctatatttgtggcttgtattatgtatcaaacacaatatatatataccggtgttataaaagatacagatgtagaaaagctaaactatacggatgaaggtataggttgcaaaggatgatgcttagcagatacaagttagtctgtgtgcatc

SEQ ID NO: 278810 - DNA, 606 bp, Zea mays
ggttttgttttcattcaagagggtgatgttgtgaccatgtatgcttgggtctcgctacaacggcgcaatggactgactgctgctcttcctcattgtcccaacttcctgttccacaaggaagaaaacttctggctgcttctagccaacgtggcatctaatgatgtctggttgtcacagaaagtcagcttcatggatgaggccacggccataactgcagcatcaaaagctatacaagagacccaggaagcactaggtgcaagtgcaaaggaaataggaaatgcagttagggaggcagttgacagggtgaagaaaggcagtaggctggtaatgggcaagttccaagccccagcagagggtactcacaacctcacctctttttgtttgtgcgacgcttggataggctgtgacacgaagaccagcttcaagctcaaggtcctgaagcgcagccgtgctggaacaagaggccatgtgcctgaagaagggccagtggctgctgcagaggatggtattgaggaggaagaggaggaagaggaagaggagtatgatgactatgagagcgagtacagtgatgacgaggaggacgcgaagaacaagggggaagggaag

SEQ ID NO: 278811 - DNA, 407 bp, Zea mays
ccgtcgcatcggcggcggcaagggcaataatgccccgcgactgcgacacggctggcgccttcgcggcgggcgacggcagtgccggcgccgtggacgaggacgacgagcaggccaagaccgccgacgtgttcggcgggcggaccggcggcggcggcctcttcggcggcgtccacggcccgctgggcggcggcgtcgctgggttcggcccgttcggcggggccgtcgccggcgcgggcccgttcggcgggttcggaggcggcggcggcctcggtggcggaggaggagcaggtggcgccggcgtcccgtgaggcgtgagcaacgctgtgcttgtgcatggccatggatgcatgcgtgcgtgcgcgtgtaataatgtgtctgtgcggtacgactgtacgtacgtgccgtgt

SEQ ID NO: 278812 - DNA, 887 bp, Zea mays
agaggttgagacatcagagagtgctataggagttataacagaaaataaattagatgatgtgactgctcaagatcccaatggcttagaaggcaagcaaattgtgtttgagagcaagaaggatccattacaaaggcgacatgaactgttgataaaaagtgagcttgccgaggctctcgttcagtcatgcattgaaaatgttggagaattacttcgaacaaattttggcaaagaagtattgtatgagatggctgttggtggtaaagacaacgttctggatggcctcaccgataggagccacatgttgcacgatgcaatagcgtctgatgcggcccaaccgaagactgaagatacggaacatgcatttgaaaacttcttttccagccgtgtaatcagaagaatggtaatcgactgcccagcgtttgcagtcactctctggagaaaggctcttcagggcaagtgcaagatatgggctgaaggacacagttcgaaggtggttgcgggtttcctggagtcgccaagtacggaggtcaaggatcttgcaaaacctgagttgcagccactggttgatgctggcatccttaaagtgccagaccctaaggttgttcaaaaatgactcgtgcgcgggggcctttttgcgccagtaaatgactcaaggaccatcccttgtttaagggatacggataggttttttgaagctcgttctgccgataaaaattgttaagtcactcgttcgtgtgtacgccagtccgttgtacacttaccctggatatatggtgaatcggataacgttattttgttttaaactcgtaacgctcctttttatctatatttttttgggaaaaaaaaggggtgtttactaaaagaggcgagcaaaaaaaaagggcggg

SEQ ID NO: 278813 - DNA, 492 bp, Zea mays
cagacggatgggcggacgcgtgggcggacgcgtccgcggaccgtgggcggacgcgtgggttcagacccaaaatcgatgggcaaaagcggagagaaaccgagggaatcgcaccggcagggccgcggccggcgggcgtcgcacttctgcgacgaggacggctacgacttaccttcgtcagcctacgatgcgacgccgcgccaaaacgaggaatcctctgaagacaacgacgacaccagcgaagaacagcggaggacgaaccagagagggatacggaagcaggcgagcaggaccaatggcaaggatcaatgccttccaagtttcacctataccagctctccgtgcagtcgccgaagggggacatcagctacttgcagaagttcttcctgatgtatgtcggcgggcgcgcccctctccacctgcaggaggttttctgtggcacggccctcctcagaccgagtggatccggactgatgcaagaggacagcaattggc

SEQ ID NO: 278814 - DNA, 339 bp, Zea mays
tgccagattgagctgctaacttactgtggagtttacatcactgcaaaggtatcctgtgtcaggtagactcgctgaagatttgctccggctcagaacaaaatctgacttcattgcatttcttaaaatcagtctgctagatggcatggtttggtttggattggtttggtgaaggcgtgaggcccatctgaacatcggtgcggcctccttttttttttggcgaactcctttgtatgctatagcagctgtgcagtttctgtagaagaaaagatacaaggatcatttatagcatcgatatatgatgtatgcaactcctctgaattgtactcggtgtaaattatt

SEQ ID NO: 278815 - DNA, 573 bp, Zea mays
  unsure (1)..(573): unsure at all n locations
ggcctcccggcgggggcctgtattatccgaccaccaggctcatctgcttggagaacacgcatgggaattccggagggaagtgtttatccccanaatacactgaaaaggttggcgaaattgccaagagtcatggcctgaagcttcatatcgatggagctcgcattttcaacgcctctgtggcacttggagttcctgtggacagacttgtgagagctgcagattcagtttcggtatgcatttctaaaggtttaggcgcccccgttggatcagttattgttggctcgaaggccttcatcgacaaggccaaaattctccggaagaccctaggtggtggaatgagacaggttggagttctctgtgctgctgctcatgttgcccttcatgacaatgtgggaaagcttgcagatgaccacagaaaggctaaagctttggcagacggactgaataaaatcgaacagttcagagtggattcagcatcagtccagaccaatatggtattcttggacattgtggattcacgcatatcatctaacaagctgtgccaggttctgggaacgcacaatgtgctcgcaa

SEQ ID NO: 278816 - DNA, 839 bp, Zea mays
atgttggctggattcaatccatatagagaatatgatgcttatgtaagcaatgtaagccctttgctatcccctgaattatcttgaaacacgaggaccaatcgagtcgagagacattaataaatttctccaagctttcaacaatcggtatgtattcttcgaccagaaagtatagcttttcttcttctgggatattgcctcgatgcccaagaaaaagaaaagctatactttctggtcgaagaatacataccgaatgttgaaagcttggagaaatttattaatgtctctcgactcgattggtcctcgtgtttcaagataattcaggggatagcaaagggcttacattgcttacataagcatcatattctctatatggatttgaatccagccaacatcctcgtccgttcagatatgaatcctgtggtcatcaattttggatcatcaatagtgctggatcgtgatgatgataaggtcaccggggatgccgtagcaggcacactgggttatgtcgctccagaaaaacttatggaagcttatgcatcaatgatgtctgatgtgttctcttttggaatcatcatcattgagatcattaccggcaggagagcttcacctttcgttgatttaccggaatggggttcagttgatgagatgattacatcagcgaaagggttatttgatccggcgctagctaacgagtctcagctgatgaagattaataggtgcagagaggtcggactgaagtgcattgagcgggatccgaaacgtcggcctaccatgggaaatgtccttgagatgctaagtagctagagtgacaggcaccgatttgaggtgttctcggttag

SEQ ID NO: 278817 - DNA, 378 bp, Zea mays
ctttaggagccatatcttctctaattcgtcataaccagcctggagtttccgcatttcgattgggaaatggctatgctggattgaagggtgctcttggttccgatgatgccagactccaaaggaaagctctcaatctcatacaatacttgctgcacaactacaaggcagacaggagtgttgccacagagcttggtcttccgaagctgatgatgcaccttgtgtccagcgatgattccttagtgcgtgaagctgctctaggcggcctccttgagttggcgcgggacaagacatctggtaacgcgctacctgaccaagaaaagctgaaagacatgctcaagagccgaatagaagggatcagcgcaatggacactgacgatc

SEQ ID NO: 278818 - DNA, 463 bp, Zea mays
  unsure (1)..(463): unsure at all n locations
acgggcgccgtgctcgtgcagatcgtgccgtggggcaagattgaccggatggccaccaacttctacggccagccggcgcgcgacatgcgcctccggtacgtcgagtactacgtctcggaggaggagacgacgctcaaggacaagtacccaagggaccactacgtgttcaaggacccaatgcacatccacgcgcaggggtggccagcgatcgccgagatcatcatgaagcaggatgtcatggtcaacatgacaaggttcaaacccttcttgctccaggcgctcaacgagttgcaggactagctgcagctggagaagggtgattccctttgtatggctcgatacggacagttcggatagggcgataggccagcacagatgcggtacaggagggcctttcgtttgtttcccttttttatttgtcattttaaatcaactaaaaattgatatttttattaaanaaaaa

SEQ ID NO: 278819 - DNA, 470 bp, Zea mays
  unsure (1)..(470): unsure at all n locations
gggaagcgagagcgagagagacaggagatgctttaattcgaacgcggttgcctcctccctcgagcccttctccttccttcctccccccacagccacagtggcatatcgcatcacgccaaagcccatccgccggccgtagatcggctccggcaaccggcttcgaccgcggcctcccctctgaggattttcggcctagaggttccccatggcatcagttacttatattgatgatagccatgctgaggttattgatcctccaaagaatgaggaaatgctggatgccactgaacttgttggtgatcatattcagaattcaccaaaaccaaatgtggcaagctatggcaacgtgcgtgagctactggaatgccctgtgtgtttgaatgccatgtatcctncaattcatcagtgctccaacggacatactctgtgntctggatgcagccaagggttcataatcgctgtccaacatg

SEQ ID NO: 278820 - DNA, 440 bp, Zea mays
tcgggctctcgctcgtgctctcagcacggcttcttccgggccgtgaaccacggcgtggcgccaggccgcgccgcacggctggacgccgccgccaggacgttcttcgcgctggcgccgcacaacaagcagcgcgccggcccgcccagcccactcggatacggctgccgcagcatcggcttcaacggcgacgccggggagctcgagtacctgctgctccacgccaacccggccgccgtcgcgcacagggccagatccatcgacactgatgacccctcgcgcttcagcaatgtggtgaacgagtatgtgggagcgatgaggcagctcgcatgtgagatcctggacctgctcggataggggctagggctcagggaccccagatccttcagcaggctcatcgctgacacagacagcgactcactcctgcggataaaccactaccc

SEQ ID NO: 278821 - DNA, 428 bp, Zea mays
acgaatggtagttgcctgtgcaaatagagatcggaccggtgtcttagagatgtcccgcagggtaggattccttactggggaggaaccagaagtcatgctggatgctcatgtccaagcagccttcattgttggtgtgccgttctcaaagccaggcggtcacgattttcgagcgaataatatcacgcatagtgtttccaatcttggggccaccatgttgaagcacaggctgaccccaccaccggatgaagtgtacagcctccatagaaagctgtcaggtgcattccttgcctgcatcaggattggggcagttgtcccctgcagagagatcctgttccaagtttacgagcattataatttcagcgacggccattcagacgttgaatctagtgctggatagtaggaacaaaccaattcgttttcgatgtctt

SEQ ID NO: 278822 - DNA, 399 bp, Zea mays
ggtatggtgggatctcccttggtatagctaatgtttctcatgtgcttatccgtgttccacgcctgccgctgcagaccaagtgaaggatcctattgaactgaggttttagaattttcagatcctgatctgcagtatatcttagtgccaagtgaaccaatagctgccttgctaatcttatgcgatgcaagtggtagctgtttctatctgcagtgatggccagaagtctgaaactatgtacagatggcattgtgctcacgtcgtcacgtgcttgttggttagagaatagggttgttacttgcttagttagcagcctaggccatggaatagagaaggtgttaactacattgtaagcataaaatttatttatccccactccgtgttcatgagtctctttccccc

SEQ ID NO: 278823 - DNA, 653 bp, Zea mays
caggttctgaggacgacctcctcgggcactgcaaggtgttcatgcagtcggaggacctcgggcgcacgctggacctctccgccgtcgcgtcgtacgaggagctctaccagaggctcgccgacatgttaggcgtcgacaaggccgagctgaccagccacgtgttctaccgcgacgacgcttccggagcgctcaagcaccctggcgacgagcctttcagtgagttcaccaagaccgcccggaggctgaccatactgacggacgagagcagcgacagcttagcgaggtagagtccagtctcaaggagacggcggttcggcagtttcggttgggagtgggaggcgccccggaacgggagcgcgtgcgtgcgtctgatccaggaccaaagatttgtcggactagtagctctacagtagtggagtacgtacgtacaccttgatgctgctgcttctgctgtcagttcaagtggccataaccataatgcagctgcctttggtcacagtgactgatcggatgtgttgtgtacatcggaccgttgatttgcgaacgcgattactgaaagattattattatttttttgtatttttgatataactaaggtgctttggttagttggttggtttgtctgggatgctcaagtattctctgttctcgcg

SEQ ID NO: 278824 - DNA, 622 bp, Zea mays
ggacgcgtgggcaaatatttcgcgctctgcccagccagcctatccactccagctccacttcttccccgcacaccacagtcacacgcgcagtgctagacgacgaacaccagagggcaggcagaggatgatggcgtccgttctcgccgtctcccggtggtcgtcgctgcttctcctcctcctggtggcgacggcgtcgcaggccctcaacgtcggcgacctgctcgggacagcagcgccttcggggagccagggctgtagccggacgtgcgagtcgtcgttctgcatagtcccgccgctgctgaggtacggcaagtactgcgggatcctgtacagcggctgcccaggcgagaagccctgcgacgcgctcgacgcctgctgcatggtccacgaccactgcgtcgacacccacaacaatgactacctcaacacgcggtgcaacgagaacctgctgagctgcctcgacggggtgagcccggcggggccgacgttcccggggaacgagtgcgacgtcggccagacggcgtccgtcatacgtggggtcatcgagtcggcggtgctcgcgggcaagatccttcacaagcgcgacgacggccagtagccggcgtcctgggctcctcctggc

SEQ ID NO: 278825 - DNA, 509 bp, Zea mays
ttacgtcaactagtcctggcagccagttgtagtgaggtgacatggctgcatacagacatccaaccaaaggaaacagagggtgtggtgtggaaagaaggggagagtggacaaaagccagacatggctggcgctgctgctgcataggcacaggcacaggcacagggaaaggtgatgagacgagaggggtggggtggtactctgctgggaccggcgcactcacgggtgcggagaatcagcttcgcctcacgagcgatgcagcagcggagacacagacacctctcgtctgcgtactgtttcgcccatgctcttgtcttgtacgcatgcagcagcgctccttgtcctttggctccatcgatgtattacctgctcttcttttcaactaggagtttagcggacaaagaaatgaaaaagtaattagcagtcatttatcttggtcaaaaaaaaaaaaaaaaaaaaaaaaaaaaaaaaaaaaaaaaaaaaaaaaaaaaaaaaaaaaaagaagaaaataa

SEQ ID NO: 278826 - DNA, 861 bp, Zea mays
agattttggatgagcgtgacagaatcttctctttaattgagacttcaccatttggaaagaaaaaagttgctcttggcggtccattaggaggaaccagagatgacagttcaatcttgcatggtgaagtctcaattaaagagaagattttggatgagcgtgacagaattttgtcagtaaatggcctagtgaagtcacgtgttctgcatggagtttgcacagctgtgtacaatgataatgtaatgagcattaaataccgctacaaggatgatgaggtatcgtttatccccagcatctcattaccatccaattctctgtcatttgcattcaagcgccaattaacgcctttggacaagttgagctattggtacaattttgacacaaactactggggcgccatctacaaacacaggctcacaagcatctcaagtggaaagctggctatgagtcagacaacaggcttggatgggcatcgctttgggttggagatgctggcggcagtacaaaggaggcgcctttgaaagccaaaattcccctcacgcttaaagtcccccaggccaatatacagaattcagttgtagtgttccatgttaagaaaagatgggatttttagtttctatttgtgagcccagatggtgttacgtcatgcgcccataagcaagcgtgtacagatggagagccaataagagatggatgcaactttgtgatgtggtctgcaaaattgtttcatgcaaatgctagggagaaatcctgtaatgttagtcctctttcataggtgcagtttggttcaaggtcttgttaagggaatgctaaagagctcacccaaccaaaagtattggtatctactacaggtgtaatccgatc

SEQ ID NO: 278827 - DNA, 571 bp, Zea mays
cccgcaccccaccgcagcaggagccgaagcccgcggtcctacgctggcgcccacccgtccgcgtgacctcggagtttgacagcgaacgacggctcttctcccaccgcctctcctgccgcgtcctcgacggcctcgccaagctccgcctccgcattagccatggtgctgggggaggagggattctctggggcccgactgatgtggggctcctggcgcggaacttctccgtcgtcgtcgaccctgcaacccgaggcgccgtgctgcgcggcgccgccgacctcgccggctcgctgcgactgcgcgcctcgcacaacaccaaagagcaacaaggagaagtggcaattactgcaaatttgagggattcaccatgcaagattgaactgacatctctggatcctcctaatggaccgccaagagcaacttttttctttccaaatggtgaagtctcaattaaagagaagattttggatgagcgtgacagaattttgtcagtaaatggcctagtgaagacacgtgttctgcatggagattgcacagctgtgtacaatgataatgtaatgagcattaaata

SEQ ID NO: 278828 - DNA, 502 bp, Zea mays
attgagacagttccctgctgtctccatgaagtctcctagatgctgtgcttaaccgtatggtaaacaaatatggtctgtatcagctcagaattaagcatctgccgaggaagcgcggtccatcccgactcgggtgtacaaggggcgacgtggcgttacgtgcagtccccaacgaagcaaagagacagaagtacagctgtacagaacggatatcttgtgaagcacacattgggatcaggacgtttggtgctgcagctactttcggtgcagaagcacatatatacgagacctgccagggcgagcaaatacccagttatacacgcgattgctcagctctatcaagctgtgaattgaaagatttctatagtgtattcacgcaacgttttcatacactagtgagttatgtatgaccagtagtgcgaactctgtataaaatgcttaaatgacgtctaagactagaggggttcttagaaatgagagaaaagaaaagttatatggggtcaaa

SEQ ID NO: 278829 - DNA, 384 bp, Zea mays
cccacgcgtccgagagtacaaggtctatggtctcccgactttgattttcttcaagaatggacgagaggtagcagatagccggcgagaaggggcaatgacaaaagacaagttcaagcaatacctggaacctctcttgactacgacagtcacttaagaccattgcctgctgcttcagcaccgaccaccgaggatgccaatgggattgttgaaggaatttccttttatgagtttagcttgtaattaactatgctgcggggtcatggtcgtcatttgcgtatatgtggtacaggatacatgaagagctaattttgatacaagcaagtttgtttttcgaaaaaaaaaaaaaaaaaaaaaaaaaaaaaaaaaaaaaaataaaaataaata

SEQ ID NO: 278830 - DNA, 370 bp, Zea mays
gatgctttaaataaagagctaagcagtaccactcttgagaaaagctttgctcatgcaccaggaccggaaactaacaatgagggtccatcagatgatgcagctactgatgcagagatgactccagttgatgtagatctgaaccttgtcgagagtattctgaactcgtactcctcgcaacaaggtcttcccggtccggcttccagtctgctaggactcatgggcataaaggtccctccagatgttaaaaagatgtgatttttgtattctagtgtacacgtgacatcttgtgaagctgggatatataggaaaaacttatcttccgttcaaaacatgggcggacacggttgccatctaggaggatggcctcgcg

SEQ ID NO: 278831 - DNA, 449 bp, Zea mays
  unsure (1)..(449): unsure at all n locations
ggaactcctagctacatgtgcccagaacttcttgccgacataccgtatggtactaaatctgatatttggtctctaggatgttgtatttatgaaatggcagctctcagaccagcatttaaagcctttgacatgcaagccctcattagcaagagcacaaagtcgatagtatcgccgttgcccacgagatattctggttcctttaggggactcatcaagagcatgctacggaaaagcccagaacaccgaccaagcgctgcagaactgctgaagcacccacacctccagccatacgtgctgcaggtccagctgaagtccagcccctctcgcaccacgtccccaatctaccaagctctgacggacaaaggtgaagaagatgacgttcgtgagcgacaccgccgattccgcgaggaggagggctgcnagactgaactctctggtgagcgagagga

SEQ ID NO: 278832 - DNA, 913 bp, Zea mays
  unsure (1)..(913): unsure at all n locations
cttcagcatatatttgcttcatcaagtcacacatatggtggcttgactctggatttacattgtaatcgattgggtccaactgctttatttcagatatgtgagtgcgctgttttgactgatcgattggaagtacttaatctatctgggaatcgcctcactgatgcatgcagttcttacctattcacaatcctgaaaaagtgcaaagcactttatagcttgaatgtcgagcagtgttctatcacgtcaagaactgttcagaagatgacagatgcactccatgaagagtctgtcctttcacatctctcattaggaaagaacaacccaatttctagcaatacaatgcttaaccttctatccaaacttgcatctctcacaaggttttcagaactaagcctgactggtataaaactgaataagttaatggttgataagttgtgcctccttgcacaatccttgtgcctatcaggacttctgctaggtggaactttcattggaccggtggagacaactaggcttactgaggcattgtcttgcacatctcaagatttcctaaggctggagttgtctaattgtgggctcacaacacctgatttcacacatatctgtacaaatctctcccggatcaatattcttgagttaaaccttggaggaaatccaattaacctggagggatgcgatgctgtacagcgaatgcttgtaaatccccaatgcagtattagatctctcagccttgacaaatgcaatcttggacttgctggaattgtccgtgtcattcaatcattaccagataacagccaattagaggagctgcgcgtgtctaagaacaccaacttggcgttggagacaacaacaaagtatgacgaagacatgcangaagtatcaacagcttctgagcaaaagcaatgtaatgacc

SEQ ID NO: 278833 - DNA, 438 bp, Zea mays
tgcctatttgctgtgaaaggattactacaaaattcaggcccatcaaagaagtggatgtgggattcttgctatgttggcattttggtagccatcttttggacatactacatcttgaggttgccaagaattcgatgggatgttgcatggctcccactcggtcctttgatggctggtgcattgagcctgtatgtggaccatgtgctgctggagtcaatgcaagatatcagcacattgagaagttacatgtataacttcaaggccttgtagttttgagcatagtttcccttgcacctatatgcagctatatgtggaacaggttcaggtcatttctccttttttttagtggcagagttgcggtggtaccttgttaaatggtgtgttagcatgaatttttaatctcacagaatacttgtgcatcacttccgctctgtggcgggt

SEQ ID NO: 278834 - DNA, 400 bp, Zea mays
tactgctgctttaagacgacagaagggtacggcttggagaagagcgacagatggggactgctgctagaagacgacagaagggtacggctgcgagaagacgacagaagggtacggctgcgagaagacgacagaagggtacggctgcgagaagacgacagaagggtacggctgcgagaagacgacagaagggtacggctgcgagaagacgacagaagggtacggctgcgagaagacgacagaagggtacggctgcgagaagacgacagaaggacactctctgaaacacttatacaaatccctgtgtccgcaataagataaattcaataattaaattataaataaattcttctaaatagccaaaaaaaaaaaaaaaaaaaaaaaaaaaaagggggccgtttta

SEQ ID NO: 278835 - DNA, 560 bp, Zea mays
ctccaagtgcaaactcacaaggacgattcagtgaggagatgcaaatggtgtgatttgattcgatgatgcgtggtttgtcgattgaccttgctgagttcagagttccaaggaaatggaatttgccaaattgacgaatggtaataatgtgcatgtatagataaacctgcagttttagccctggcatcttatccgaagagatctgggtggttgagcagatggcaagactggtggttaccacaacaatttccggggagacaagaagcgatgcagcctaatgactggcaagttagatggcaagcaggcgggtgtacatgcaaattgttgagaatttgatcagctcaataagcacatgaggctgggtggtaagtacagccagttttgccattaggagtagctagcattaagcaaaaccagcaaacttagatttttggcaatgtgggtatctcagagctgtagatgtcgttcccttccttgtaattacacagtactgttgcttctaccctggaatatacattgccattgctccgggaaaaaaaattgaattgtcatcttgatcgagt

SEQ ID NO: 278836 - DNA, 392 bp, Zea mays
ttacgaatggtaataatgagcatgtatagaaacctgcagatttagccctgtcatcttatcccaagagatcagggtggttgagcagatggcgagactggtggttaccataacaattccaggggagaaaagaagcaagcaatgcagcatgattactggcaagcaggcgggtgtacatgcaaattgatgtggatttgatcagctcaataaacacctgaggctgggtggtaagtacagccagttttgccattaggagtagctagcattaagcaaaaccagcaaattttagatttttggcaatgtgggtgtcccagggctgtagatgttgctccctcccttgtaattacacagtactgttgcttttacactggaatatacattgccattgcttcgag

SEQ ID NO: 278837 - DNA, 512 bp, Zea mays
atatcgagcgatacaagtgaatatgaaaccattccgcgagaatgccggcaggtagctatttcttgctgcgaccaccacgcctaggaggcacaacagtccacccatcggcgtctggagtaggcttggggggccttggcctgtccactgccatctcttctggcccagcctcttcatcagccaccatcgatgtgtcatcacccgtcatctgagctatcactgtcatcgtcgtcatcgcccactatctgtctactttgagaaacagcattccccggaacatgagaattccttagcttctctacagacgaatagttgttttgcaggcattcttcatgtatgatcaaaaactgttcagcaacctcctcaatactattatcctcaaagtaggcattaaaagattcagaaattttgtcatacatcatatcgaccaagtcttcgaaataatatggacccttagtgcggcagaaccagaataggatggactcgcccaactggtcggccttggcgcgggagtc

SEQ ID NO: 278838 - DNA, 442 bp, Zea mays
cttccaccgcgtactccctccctccctcgtctcgtcttcgtctccaggtttcgcgggggccaaggtttctgccggagcagtcgcggtctgcgctgcggcacggcgacgaggtggggatggagtaccgcgacaagctcgtgctggcgcccatggtccgcgtgggcaccttgccatttaggctactggctgctgaatatggtgctgatattacttatggagaagagcattattgatcacaaattcttgaagtgtgagcgtgttacaaatgaatctcttgggactactgattttgtggagaaagggactgacagtgtagttttccgtacatgcccacaagaaaggggcagggttgtattccaaatgggcacatcaaatgctgtgagggcacttaaagctgctcagatcgtgtgccgtgatgtttctgctatagatatcaacatgg

SEQ ID NO: 278839 - DNA, 654 bp, Zea mays
aaacaagcacagagagagagagaaccccagcgggcaaacgcctccctccccctgcctccaggccccagatccggccatccgggtagctccagaccttctccaatggcggtcaaggtctacgtcgtgttttactccacctacgggcacgttgccaagcttgctgaggagatgaagaaaggcgccgcttcagttgaaggcgtggaggtcaaagtatggcaggtcccggagattctgtccgaggaggtgctcggcaagatgggcgcgccacccaagaccgacgcgccggtcatcaccccgcaggagctggcggaggccgacggcgtcctcttcgggttccccacgcggttcggcatgatggcggcgcggatgaaggcgcttcttcgacgcgaccggcgggctgtggcgcgagcagagcctggccggcaagcccgccggcctcttcttcagcaccggctcccagggtggcggccaggagaccacgccgctgacggcggtgacgcagctgacgcaccacgggatggtgttcgtgcctgtggggtacacgttcggcgccaagatattcgacatggagagcgtgcatcgcggcagcccgtacggcgcgggcacgttcgccgggacgggtcgcggtggccgacgggactggagctggagcac

SEQ ID NO: 278840 - DNA, 690 bp, Zea mays
cggacgcgtgggtttacgcgtgggcggacgcgtgggcggacgcgtgggcggacgcgtgggcggcggtgacgcagctgacgcaccacgggatggtgttcgtgcctgtggggtacacgttcggcgccaagatattcgacatggagagcgtgcacggcggcagcccgtacggcgcgggcacgttcgccggggacgggtcgcggtggccgacggaactggagctggagcacgccttccaccagggcaagtacttcgccgggatcgccaagaggctcaagggcggctccgcctgatatcgctcgcaccctcctatacgtatacataattattatagggaacatatctggtgcatatataaatttagtgtacatggtgcatatattaaatcagcattactcattttagatataatgtctctagttgttggtatattttgctaagaacaccctccgacgtggtgaagtatagcggtggaaaatattatttataaattgcaatgatcaactagagacgttaaatctaaaataaatagtgatgatttaatatgtgcaccatatatactaagcttccatgtacaccagatatgtcctcgttattacatgtacaccaggtatgatatgcattccatgttttcgtggtggtttcgattgtattgttgtgtcaaatttggtaatcggacccctatcaattaat

SEQ ID NO: 278841 - DNA, 1365 bp, Zea mays
tttttacctggagccagctatagtactcctggccttcctagtaagcatctgaacaatgagcttcatagtgattctggaatgctgaaatctgcaatgaagtcctcttctgcgggatcccgcggaagctcagattcagtttctcctctgcccagggagagttggaccaacaagtccttcaagggaagtgcagaggctccccgtagtttaagaatgacaatgaaacttcgtgatttttacaaaaccccaaaggttgatcctgaattgctcaaagagattgagcagtggaacgaagcacttaagaatgatgtgatcaaattttgccaagagaacaattttcattctggtttctttgatggaactgaaaacaacatggtagctgatgcctatgaattgaaggtgcgtcttgaacacatcattgaaaggatagccttgatttctgatgctgcaaatacagaacgaccttctcttgttgtcaacaacttgttcataggtggggctctggctgcaaggtctaagtacaccctacagcatttgggcattacccatgtactctgtttgtgttcaaatgagattggtcaatccgattcccaatttcccgatctttttgaatacaagaacttttcaattagcgatgatgatgatgcaaacatcagtgatctttttgaggaagcatcagacttcattgatcatgtggatcatgttgggggcaaggttctagttcattgctttgaagggaaaagtcggagtgccacagtcgtacttgcctatcttatgcttagagagggctttactcttgcaaaagcctggaacttactgaagaaagtacaccgtcgagcgcagccaaacgacggcttcgcaaaggctctcctggcccttgacaagaggctgcatggcaaggtatctatggactggcaacacaagcggccagaaatgaaggtgtgtccaatctgcagcaagaatgttggtctaagtacgagttcactcaagctgcacctgcagaaggcacacaagcgtctatctgcaagcagtgtcgacagcgccatgaccatggagatccaaaaatcgatcgagtcactccagatcagccgaggaggaagcctgagcccgtcccagaagctgaccaaggtgttcagcaatgagctgagcttctgatctgttttcctgtactatagatgaggcaatgtacttggctcccattgtaataacttgtactatcagactgaacttgtgactgtaggtttagttcacacgcctatatgattagcacccgaatgttcaggtgtgaagggtgcaacactaaagaatgttcaggtcttgtatttgttgcctccagtatgcagttttcttctaaagggatctcctctc

SEQ ID NO: 278842 - DNA, 932 bp, Zea mays
ctcatttattttctgcaataaaggaaaatggataccagcttctatttctgagtgcacgcgctatttcacaagcccacatcacaagacagtttcttttcaacctaaagcaggacggcaaagcacttcctgatggccctgttgttatatctccagatggtctcttcccgtcactttacagagaagtcatcagaagagctccgcatgaattcaagatttcgtgtctagaggccatcaaagatttatttccacacgactcaaatccgttttatgctggatttggaaatagagacacagacgagcttagctacctcaaggttggtattcctatgggcaagatcttcataataaaccccaagggtgaagtcgcagtgaaccgacgggtcgatacaaagtcgtacacatccttgcatgctcttgtccacgggatgttccctccaatattgtcgtcatctgagcaggaggactacaatgcttggaattactggaagatgccattgcctgatgttgatttgtgaggtacaagtcgagtctgcacaacagcactgcactaattttatgatgtgccgtagtgatcatgagaaggccattacttggttggctacatgtggatgctcctgctcctgatataagttcctgcaagatggaattttgtatatataggatcataatagatgtagtagctatttcttgtgtctcctgttgttgttgttgttgtcgtcgtaggactggaaatcatacctccgtgtgtcctgtaactgaaggtacaaaatttactggatggagggatctgatagtatgttgcagccccccctttttcgtttcatccttgatgtaattgtggtaccgatgtattttgtacaagaacaaatcaataataatgcaatcgaaagcgagctgttcatacgctcacaaaaaaaaaaaaaaaaaaggaa

SEQ ID NO: 278843 - DNA, 425 bp, Zea mays
ggaccacaaggcctaccttgctgaccatcctggagcgtcgtcgatcacgacggcacagggcgaggaactgaggaggcagatcggcgctgcggcttacatcgagtgcagttcgaaaacgcagcagaatgtcaagtcgggcttcgacacagccatcaaagtggtccttcagcccccgcggaggagggaggcgacgcctgccaggaggaagaacaggtgtggctcggggggctctatcatgaccctcatgtggggcagcatgggcgctgcttaagagtctagaacactgatctggaaggatgtgaaggtgaaggcatgatgtgtatgtgctatggcgactggcaagtaaatggggccgcatggatgactgctgctcttgttttctttaactcgtctgcccgatgctttgttttttaggcttcaagact

SEQ ID NO: 278844 - DNA, 344 bp, Zea mays
cacgactgccgtcgcggcggtcgccggcgccgtgccgccagctcggaaagcccaagcggtaactgtggccacaaccacagcactacctcccaccctcactagaaggcagctcctcgccgcggtcgccaccggctccaccctccccacggccgccgcctcagctgcggcccccaggttcgccgagattccgggctccggcggcgtgaaggccctggacctccgggaaggttcgggagagatcccggccgttggcgaccaggttggcgttcactattatgggagattagcagcgaagcaaggatggcgctttgattcgacgtatgatcacaaggacgagaccggcg

SEQ ID NO: 278845 - DNA, 407 bp, Zea mays
acgggggctctcatagggccttgcatctccagcgtcggcattcacgacgccggggaccaacggcgatgcgtccactttgctgtggggctctcgtccgtctccacaatttgtgcagaccaaagacaaagtaagggtatgctgaaagaagaaattgacctacttaaggtggaaccaaacgaaagcgaagtggatctagaaagaagcatttaacgaccggccgcactagaccaaaccgtagcagaactcaactgaaggcaactgcgggcccgcggccacaatgagtcagcaggaatgcagtctatcagatgatgaaaaccagaaggaatcccttctcaaagagtgaaatccaaaactggggctttcaaatatttcaggatctgatttacatgcattcacatggatatttt

SEQ ID NO: 278846 - DNA, 513 bp, Zea mays
tcttgtgcccacgcgtccgcaagtttcctgaatggaaacaggcactatctttactcatcaccagaagacaatgatcttggatgctgatgctgggaatcatagaaggaagatcgttgctttcgtgggaggacatgatctatgtggaagccgatatgatacaccaaagcacactctatttcgaactcttcagacatttcacaaggaagactactacacccaaattttgcggttgaagatgctcgcggcccaagagagccatggcatgacttgcattccaagatcgacggtccagaagcatacgatgtcctgaaaaactttgaggagcgctggttaaaggcatcaaagcgcagtgccgctaagaaactgtcaaaattgtcgaggtcgcataatgattcgctgctgtggatcaacaagatacctgatattattgctattgacgacgaaatctattcatatgacgatgatccagagagatgggacgtgcagattttccgatcaattgattcgaattct

SEQ ID NO: 278847 - DNA, 422 bp, Zea mays
cgcagcttggcgccgggccggtttccgaccggcgctcgttgccggatccgcgcctccccggggccactctggtccccgccccggtgcgccgcgccggattgcggaccctgtggcgggcgacggttctgcggcggtaggggttggggttggggaccgtggcggcggggtccgtgcccgcttctggtcggggccgtggtcgggcagcgcgggatctgagccgcctttgatggacctttttcgagccttctgttgcgaatgagtggttttgagacattgcgagttgggaggagttgttggagagttctcttccatcctgccgaaaaaaccaaatttgggagtgagttttgggaactattggagatgctctgtgcatattttcactactgctgactgatggaacatgcatacttttctctgatgcg

SEQ ID NO: 278848 - DNA, 756 bp, Zea mays
tgagacatttgggcctaatataacaatccaggaattccggtccggattgaggaggtaatcaaattgcaaacgactcaaaatatggtcctggctgtgctgtttttttctggcaacaagaagcgtgccatcagaatagcgtcccagttacactgtggggtagcagcaatcaatgattttgcttcaagttacatgtgccagtctttgccattcggtggtgttaaagacagcggattcgggagatttgctggcgtagaaggcttgcgagcttgctgccttgtgaagtctgttgtagaagatagattgtggccatatattagaacagtgatcccgaagcctatccagtatcccgtctcagagcatggatttgagttccagcagttgcttgtggagactctgtatggctatagcgtgtgggacaggttgcggtcccttgtgaatcttataaagatggttaccgagcagaattctgccccggcttcaaatgcgaccacgaagaaaaggcgatgagacgaatgcccggggggttcattgaatctgtttatggtaagtctgatctctggaccctgtaaacctccccaagctgctgtgatcggccttgtttgctctctgaaacaatctcgagcctgggagcttgtgtattcaagcgctttagctttcatttcagaaccttcttttctctctctctcccttgcttattaacacccaaatgcgtgggcaatggaaatgaaattcccctgtggatgtgctaggccaacc

SEQ ID NO: 278849 - DNA, 404 bp, Zea mays
cagaaaatgaagtgcctcctgaagatattgttttccaccgtttctatttgaacatgaccggcactgttaagcgtaagactgagcagaaggactcagttcttgatgaacatgcgggggaactcttagctgataatgacgctgatgaggctagtgacgagagtggagatgagataccggatctgggagatgggttggcagatgatggagaatatgactatgacgaccttgactcaaatgcatttgaagaggaaaaagatttacttaaagatgacagtgatgtggaatttgatgacgtttcacatgatactgcatctggggatgaagggtcagaaaatgacgatgacattcctattctcgcgggcgattcagatggcaacttacgtgatgacgagatgggtgatgct

SEQ ID NO: 278850 - DNA, 525 bp, Zea mays
gatactaaaagatgttatttgaagcaaaataaaactgatcttgtgcttgccaattgtatccatgtccccttgaaaggcgcctagagggggggtgaatagggcgaatctgaaatttacaaagtttaagcacaactacaagccggggttagagttagaaatataaacgagtccgaaagagagggcaaaaacaaatcacaagcaaataaggtggatgacacggtgatttgttttaccgaggttcggttcttgcaaacctactccccgttgaggtggtcacaaagaccgggtctctttcaaccctttccctctctcaaacggtcacttagaccgagtgagcttctcttctcaaccaatcgggacactaagtccccacaaggaccaccacacgattggtgtcccttgccttggttacaattgagttgggaacaagaaagaaggaagaagaaaagcgatccaagcgcaagagcttaaatgaacacggcaaaactctctcttttagtcactattgctttgagtggaattggg

SEQ ID NO: 278851 - DNA, 744 bp, Zea mays
cgtggtgacttcttttaaatttcttcctcaatttgtccattcccatgaatttcatcttccctccacaatgaaatctgccaaatttgtcttcgtcatcaccaacttcttgatcaccctcccctacctgttggtcgtcctcaaagtcctcctcaaccggcgcaactgatagtcgcctagagggggggtgaatagggcgaaactgaaatttacaaatataaacacaactacaagccgggttagcgttagtaataaagaaacaagtccgcgagagagggtgcaaaacaaatcgcaagcaaatgaagagtgtgacacgcggatttgttttaccgaggttcggttctcgcaaacctactccccgttgaggaggccacaaaggccgggtctctttcaacccttccctctctcagtctcaaacgatccctcggaccgagtgagctttctcttctcaatcacttggaacacaaagttcccacaaggaccaccacaagtttggtgtctcttgcctcaattacaagtgagtttggttgcaatgaaggaatcaagaaagcacgattgaaaacgccaagcgacaagagcgacaaatgacacacggatcactttctctctcaagccactaatcactaatgatctcttttctcaattgggaaacttggagagatggaggctttgaatgtgtcttggaatggattgctagctcttgtattgaatgttgaaggttggaatgcttggataaagggaatggag

SEQ ID NO: 278852 - DNA, 721 bp, Zea mays
ccttctcaaggaatttgtggacactttagagaaggagtttgggagtaccctcgatagcactcgcgtgtaatgagcttatgatagttgtatgctgtaatgaactgatgtaatgaataaagtaattggttgaaaaaaaattggcatgtgcatggtagtaactcttttcccctggcagatggcttcggataaaaccacgcctacctgatagtcgcctagagggggggtgaatagggcgaaactgaaatttacaaatataaacacaactacaagccgggttagtgttagaaatataaatgagtccgagagagagagggcgcaaaacaaatcccaagcgaataagcaagtgagacacggagatttgttttaccgaggttcggttcttgcaaacctactccccgttgaggtggccacaaagaccgggtctctttcaaccctttccctctctcaaacggtcccacggaccgagtgagctttctcttctcaatcacttggaacacaaagttcccacaaggaccaccacaagtttggtgtctcttgcctcaattacaagtgagtttgattgcaatgaaagaatcaagaaagaagaaagcaatccaagcgcaagagctcgaaagaacacaagcaaatcactctctctaatcactagtgtgttgtgtggaatttggagaggatttgatctcttgggtgtgtctagaattgaatgctagagctcttgtagtag

SEQ ID NO: 278853 - DNA, 429 bp, Zea mays
gtcgcctaggcgaggcctaggtgtccaggcgcccggccaggctcatcgtgatgcggcacctcgcctgaagatggctaggcggacgcctgaagggatggtggaggcaagcaatcacagcagccccaaaggaggctcgcaaggggctgaattccttaataatcttggtggcctgggagttatggaagcaccgtaatgcttgtgtttttgagaagcataggcttaggattcaagatgttcttagttatgttagtttggagggagacctgtggtgtttggcaggggcctccaaactcaaggagctagtgtttaggtcgtcgacgttcttggcctaaggcataaggccgctctggtcgtgtcttgttttcttctgtggcgcttatgtaatggtgtgagtggtgccttcgttaagcacctaaggcggtctttcta

SEQ ID NO: 278854 - DNA, 440 bp, Zea mays
cagctatcaatccagtattccagatttcccgcgccgcttccttttctccgtcgcgctctcctccgcctgcggtcaccattaacctagccgccactctcctcggtgcggcggagcccgcctgcccggatcccggacaccggggcgacctcaagtgttccacatgcatcatgggacacgacgctcaccgctcgctatcgctggcggactacggacggctggagctggatttctgtggagaagtggattgctgactgctgtggagaatttcggactttgaagcctgaagtgtgaagtatgaaccatctgtgaagtccaaactgtatttttcttgtggatttgtgatgcaatgcaatggcacttggcggctgtcactggcaggcaacagcagcaccgcagcaggcttaatgccttgcagccttgcacttttgtatcttttgtcg

SEQ ID NO: 278855 - DNA, 484 bp, Zea mays
  unsure (1)..(484): unsure at all n locations
cggcggaaacgtcctgtgccgccttcatggcccttagggcgccgctcgagcagcagttccgaagcggcggcggcagccgccgcgcgcggtgccggtgctggacgtcgaggagcggcgacgcgcgaccatggatctcttgatgcaattccatgcgtgatgcgtatgaaggaacgaatgggtttacaagccccatataataaatcataacagtgcgggagcattttttggatgtccttcacacagatgcaggcaatgaaagaaacagaaaatagacaatgttagcgcggagtgagacagataggaattgggatagaatcatccttgttctcagatcagctgtactgctttctttattatggtagtatatcatacctgtacgagtagactgacggttgcttgctctacattttaataccgtgtaattgcaatggttttgcacaataatttccagcanaaactcgttcacggttagcatgttgatacg

SEQ ID NO: 278856 - DNA, 432 bp, Zea mays
gaagaatcttggtaaagtcgacgtgtgttctgattcagatgagtacttattaggccatgatgatgatgatgatgtattggatggtgaaagtgaaaatccagatgacatcttagatgactgttctatttcagatgattctgagatggatttaggggatgcagatgcagatgaattttgcagagactgagttggtggcatgtgtgtagcataaaagaacaaaaaaaaaagttgtgttaagtttgctatgaaaacaaagttcagcaataactgtttgtgactttaagctcaggatataattgcgtactatactctagctgctgtcatctatggagttccaagtaacacttgaggcggactgtattcttctctcgtcagttgtatttggactttcaaatattagtcaaagctcaaacagatcacaatgatttgaaa

SEQ ID NO: 278857 - DNA, 403 bp, Zea mays
cgtttatcctctcctctctctttctctgtcttgctgcggcgacacctccgcttccgccgggcgagtccccagcggagccgaagcaacaaccgccggggaggcgacggattgattcggagatggcgtcaactagctctataggcgacgtgggagcctcagatgcaaaatcacgtgtggaggatgtttggaagaagatgaatggtggctttcctaataagatgcccaaacctgcaatgacgaagctcagttcaacagcaacagaaaagaaaaataagccaacaaataattggatgactgttctaggcctctcaccaagtaaggcatgtaattccagtcaaggatcaaaaaatggtctaaaatggacacaacatgaaacgagagaggatgccaaaaaacttgcagc

SEQ ID NO: 278858 - DNA, 327 bp, Zea mays
acggccttatgatatggattgagacaatctgtctgttatcatctgccttgccgattttttggcgggtggaatctgctctacctgcgcggagttgtggacagacctggaactaattaggacagtgaagacttgagagctggtaggtgagtgtgtgcagggtgtccattccattcgcctgtgcatatatacacccaggccccagcgtagactgtgcatccggtgaccgggacttgggggtcctgtcaggacctagtgcttgtgatgctaatggacctaatggtgcgaaggaacttgtcgatatctgattttggcaatttagtttattac

SEQ ID NO: 278859 - DNA, 405 bp, Zea mays
tcgttgacaaggagcaagcctgatcccagaaccccacggtcgtgagaccctagctgccgtcgccgccgccgccgccgccggtgaccggcgacggcgatctagatgggggcgtcggcctccgtgctctcgttcccaacggccgccgcgttcccagcagccgccaccgccgtcgccggggccgccggctgcttcgcgctcggctacctcctggccttcacccgcctcccgcgccacgccgtcggcccaggttcgggagggacctccgatgacgattccgaggatgactcggaagaagatgatgacgaaaactcccgccgcagtcgcgcggcgaagcgggcgggagggcagaagaaggccgggctccggctgctctactgggcacggaacgtggtgaccaagtccgac

SEQ ID NO: 278860 - DNA, 887 bp, Zea mays
  unsure (1)..(887): unsure at all n locations
gccgtgccgaccaagctgctggcgggcattcggtcgcgctgcgcgccgggcgcgnccacgtactgctcggtgacggcgcacctgtggcgcgccatgtgcgtcgcccggggcctcccggcgggcagcgacacgcggctgcgcgtcccggccaacgtccggcagcgcctgcgcccgccgctcccgccgtcctacttcggcaacgccatcgtgcgggacctggtcaccgtgcgggtggccgacgtgctgtcgcagccgctgggcttcgtggcggagcggatcaagcgcgcggtggcccgcgtcgacgacgcccgcgtgcgctccgtcgtcgactacctggagcttgagtcggacaagggcaaccaggcggcgcgcggccagttcatgcccgagtccgacctgtgggtcgtcagctggctcggcatgcccatccacgacgccgacttcggctggggccgcccccggttcgtggcccccgcgcagatgttcggcagcggcacggcgtacgtcacgcagggacgcgacaaggacgaccccatcaacgtgctcttcgcgctcgagccagagtacctgcacaccttcgagaaggccttctacggggagtgaccgtgacccgaccacgaccagccatggcgacgagtccgatgacgatgggatgggattgtgatgccatgccgttgtggcatctcccggggtgtgcacactgttataccatatcatattgcatgtttcggaatgcaactcaatgcttactgggtgtgtgataaggtgcttcattccagctttgtactagtgtcaccaagcacattctgtcctaacatctacgtaaataacggaatgacaaactggaacatgcaacgctggaaaaaagccatgtagatgtagctgcc

SEQ ID NO: 278861 - DNA, 456 bp, Zea mays
ctatgatctcaggttttgtgcacaatgttcttggtgaagaagcaatagatttttttgaacgggttaagcagacaggggacaagccagatcatggcatgttcagacatgttttcttggcatgtggaattttgggatctgttaatgaaggaatgttgcattttgaatccatgcagaaagattttggcatacatcccactacagagcattatgcaagcattgttactatgcttggacagtctggctacattgtcgaggcttatgaattcgtggaacggatgcctgtggaaccaagcattgaggtatgggaaaatttgatgaacatgtgtcgacttaatggctttttagagcttggagatcgttgtgctcagatcatagagtgcttggattcttctaggctgaatgaacagtctaaaatgggtctgttccctgtcgatgtgtcagatcttgcaaaggaaa

SEQ ID NO: 278862 - DNA, 395 bp, Zea mays
attgagaacagccctagttattgagctgggccttgttgtatgtatttttgctttttgcattgctcggcgtcgcactagaacacgcaggagacagcatattttgaaacgttagctgaacagtagtaatatacaaagacgatagatcggtgctcatttgcaaacattaaagcttccggagatggtggagaatcagagatgggatgaaggagcctgcacgtcatcctctttaaatcacgaggtccatctgctgttctgaactttgtagggtaggaaaattaagtatgtactccctctagtcgcagaaacttgtcatttatgacagatatggtcaaacctttaaaagtgcaagtatttacattatttactttggaaccatgtaggtctaatgtcgatct

SEQ ID NO: 278863 - DNA, 436 bp, Zea mays
agcagaggcctcttgagcggccctgaagattactattacgaccctaaagcgggccggaaaccgtaccaggctggcgttagaacagaaggccagaaccggctgatgatccttaggtccgcaattgtactgtatgttctgctgctccatgtcatcgtttgcataaagatatcagtctgaaagcagttgagctagcgcttcataagttcgtatagggaaacagatacttgcttttgtgttccaaaccatgcaaacgtttcttgttgtaaataactttgtatgtgagtatgtatctcgcttgatggatctataggagaggtatatgaaatacctgttgtcatattttggtactctttctcctgtgcttttgtaaaaacttcatttgaatgagataagaatccatgaaaaaaaaaaaaaaaaggggcggccgccgcctatt

SEQ ID NO: 278864 - DNA, 403 bp, Zea mays
cccacgcgtccgaccttccggatcgttgccgccgcggggttcacgctaatgactggactcgatgcggcttttacggggacagatcactatggcttcaacctcaagaccgctatgttcatcctgttgcttgcagttgtgtcgagcttgagccgtctggcaatcccacttcacatgcctaaggcgggagtgggaggagtcatcgagttcggcattgttagtatagctctctcttttcccctgctggcgcttctggctgccattccattggtgttcaaggtcttcgtcgaccattacatcaatcgctagtctttgggttgtctggcgcaattcttcctgtggtacagtgccagtaatgaatgatgcgtttttaaactaagggcataaatttaaaaatcttattttt

SEQ ID NO: 278865 - DNA, 432 bp, Zea mays
actagttctagatcgcgagcgggccccttttttttttttttttggacaagaggcgatatcggttcagctgactcacagcatattcgaaattcgaaatcgttgaaggaatgcaaaatctacaactccttgtgggggaaaaagagcagtatcaattcaaaatggtggcattcaccgtcctgaagtcacgaattcgaattcaccgtcctgcagttgagcctgacctcccccgcggaacccgtgagcgggccgatgttgccgagcctgaccatggacgcggcgaagtccgacgagaaggcgtcggcgttggtgccgtagaggcgctcgtcgcgagtcgagtgcgccgttgctgaagagctcctggtccgagtgcagcaggccggcgccggccatgaggctccggtagtagccgttgtcgaactggtcgggggtgag

SEQ ID NO: 278866 - DNA, 457 bp, Zea mays
cccacgcgtccgaaggaaagctgaagtgttacaagctaaacactgacgagaaccctgacatggcgacccaattccccatccggagcatccccaccatgatgatattcaagaatggtgagaagaaggacgcggtgattggagccgtgccagagagcaccctggtcacctgcatcgacaagtacgttggtgggaggtgaaatctcaatctgggccactagccttggacttccatatgtagacggatgggtatgtgtataccgttcatatcgaactgctgttgagtagttgtatgtagataataatgtgatgctcactccaataaatgcgattcaaggatgggcaagtcatctggatgaaaggttgcttttggtctagctttttaggttctatgtttcattcattgagttgtggtctgtatgtagatctgatgagtcatatgcagctaattttcctccct

SEQ ID NO: 278867 - DNA, 621 bp, Zea mays
tgcatacggtgtttccaaagagttgggaattggtgattctgtcaccaagcttcactgtgatatgtctgatgcggtcaatatcctcacacatactgatgaaataaaactcaaagcaaaaaggattgccgcggtggaaaagaagaagcggcgtttaggaatgaagattctatctaccaaggaagcaagtggaggccttcaacggtgtgcagattatgttggtatgccaacagctcccagtgaatctaacaaggagccaaggcctgaagagtgtgtaaatgaactgggcattaaacaaccagtacagcatgttgcttccgaggagcaggaaggagttcaagatgatgccaaggcagatgcaaatgttatgaatgtttcttttggtaagggaaaatcagaagattcttttggcacaattaatggtaccaacagtggagataaaatagaatctcctagtggtttagcagaaagaacattgactcagcctaccactaagggttgcagtaagcagcgtggccgtagttctaatggtagaggaaacaggactaaaaaaatagaagaggggaatgcgtctggactaattgctgtggcttcccagtcagaagatgatgatgatgccccatt

SEQ ID NO: 278868 - DNA, 419 bp, Zea mays
ttcagatccaatcggaagcaccggaaacacaagctcacctcagtccaaggtgaatgacaatgctgacagggcttcaaatctctcactggttaagctatcaagaagtggcttgctcttctttaaatttcctagtggaggcgttcatgtagttgagatgcttactgaaatacttcattcactcagatccgggaaactcaaatctccacagtaaggatccaacttcattatggtgccaccgcatattcccaattcaagaaacttgcattctatcagaagaagacctgcatgccactgtgtcaaagccattccttgacttctcgaggagcaagacaaacgaagacaagcctataaagtttgcggttgcctataatagaaggggcattgatgagccagagaaggacagtaatgaaggttccaac

SEQ ID NO: 278869 - DNA, 546 bp, Zea mays
ctgaatattcacgaaagtcgtgggctgatattctggattatgttgaatgtgaagaaggaaaagattattcaaatgccttgaagcaactccaaaagtttaagaagtttaaatatagaaaatggttcgacaagagacaatctaaacggcagtgtatcatggatactttgggactcaagtcaaggagctagtgtggtgagagcatctcaatcaccaggtcgggttcgaagcagcatctccattttttagagagaaaggtttgccccgatttctcctcctaggagttctcactcacgtgggactgtgggagcctcgggcactagatcagtcgcctctaaagtcaagaagctagtgtggcgaatctagttttttagagagaaacgtcgtcgcgattcaccaaggaagcatgctgtttggctggagtggatcgaggccacttgccttatgcgtgaatcttgattcctgacttatgcatgaatcttgatttggggcctaatgttagattttaattctagcaaaaaaaaaaaaaaaaaaaaaaaaaaaaaaaaa

SEQ ID NO: 278870 - DNA, 440 bp, Zea mays
ggaaaagattattcaaatgccttgaagcaactccaaaagtttaagaagtttaaatatagaaaatggttcaacaagagccaatctaaacggcaatgtatcatggatacttttggactcaagtcaaggagctagtgtggtgagagcatctcaatcaccaggtcgggttcgaagcagcatctccattttttagagagaaaggtttgccccgatttctccccctaggactgtgggagcctcgggcactagatcagtcgcctctaaagtcaagaagctagtgtggcgaatctagttttttagaaagaaacgtggtcgcgattcaccaaggaagcatactgtttggctggagtggatcaaggccccttgccttatgcgtgaatcttgattcctgacttatgcatgaatcttgatttgtggcctaatgttagattttaattctagcc

SEQ ID NO: 278871 - DNA, 443 bp, Zea mays
gagagagggaggagcggcaccttagcctggatgggtgatttcgtttggcgcactagggagtggagagcgatagagttggaaggtggaatcagaaatccacggcgaatacagggagtaggggggatctggagctcctgaggagtagtagtaggtaggagctgtaattgtaacggttggcatagggggatcctctcgatctgttcttgagctggaagactcccatcttttgagccgcggagctggagaaacttggatctcgaggccctccaagagaaaccgtttctcgctgctaccctcctgcattgctgcctctccccccttacacccgacctgccacaaggagaagggtggaatttttggtcgccttctccctaattggctcaaaatctggggttcttgacctgttcttgggagcgccgtgcctcaaattttaggggggaaaa

SEQ ID NO: 278872 - DNA, 538 bp, Zea mays
aggagatcgatcttcatttgctttgcttgtttttgtttttttataaaggaagcatttttagtaataaccaagggcaataagtggatttgctttgcttgtgtgtacatcttacaggacaggatgggatgggatccatacatccatgatccatgcatcgtctctgcaggtttctgccgtctttccgtgatctgtggaagacgttggtgtgcactgttgtggacttggactaaacgagatgcatgctagcttttctggtgcgtgtgggaatctgtggaatcacaacgacgcaactttcgttcggttcgtgtcgtgcaacagcgaaacgtctttcgaaactccctgtttgctttggaactttgcatgcaactagatcgagctagtgattcgatgtgtgctagcatagcactccgatcctccctgtgcttttatttggagcattatgtatggccaccacttggactgaatcatcatcaggtttccgatgctttttttccctcatggatgtccccgataagagaagaacgaggctgttttaggc

SEQ ID NO: 278873 - DNA, 347 bp, Zea mays
ttctgaaatgaacaaaccagctgttggatcataaacttctgatttaaaccataatttcgagagctcaaatggtaaaagtaaacatacgctttcagaagcagtatgtaccagtgcaaaggttcctggaggtcatcagtccaacagcacggtcgaaatttctgaaaatgttccagtgtctgttgacagtagtaagatgggatcaagtatgaaacatgcaaatgcaaattttggtgaagatggttcttccaccaaggacttaaatggggtgtcaccatgtaagtctcagtcttctccatcaaacataaatggtcaatagcagttttgtaaacgatgaattctgcaatcat

SEQ ID NO: 278874 - DNA, 413 bp, Zea mays
tatcgacgcagagtcgcagtcgcagcacacactgaattctctttagctagctaagagagggtagccacaccaagacaggatgcagacagcgaaggtgaaggcgaaggacatggtgagctcggcgaaggagaaggtgaaggaggggtcggcaaagatgcagggcaagacgggcgaggcgacggcggccacgcacggcgagaaggagatggccaaggaggcggcccgcgccaagaaggaccaggccaacgccgacaagcaccaggagaaggccgaccaccgagcggacgccgccactggccaccacggcacgcgcgtgcccctcaccggcccgcacggccaccacggcgctggcgcggccgtcgaccccgcgtacccgtccttcggcaacacgtacccggcgtcgggcaagtaca

SEQ ID NO: 278875 - DNA, 638 bp, Zea mays
ctgggaaccatctactacgacgtgggcaccagttacacggccatccaggcgcgcgcctagtgcggcgggttctagtcggacttcatgaccttcatgtccatcggcggcttaccgtccttcatcgaggagatgaaggtgttcaccctcgagcgccagaacggccactacggcgtcgtcgtctacatcatcttcaacttcctctcctccatgcccttcctgctcgccgcgtcctgggccagcacgtgcatcacgtattggatggtcaagttccggccgggcttcagctacttcgccttcttcgccctcaacctctacggcggcgtctccgtcatcgagagcctcatgatgatcatctccgccctcgtgccaaacttcctcatgggcctcatccttggcgccggtgtcatcgggatcatgatgttgacctctgggttcttccgactgcttccggagctcccaaagatcttctggcggtatccagtgtcctacattgtcgatgggtcatgggggttgaagggcgggtacaataacgacttgatcgggctggagttcgagccgatgatgcgaatgcagccgaaactgaccggcgagtacatcatcaccgagatgatggggctgagcctgaaccactccaagtg

SEQ ID NO: 278876 - DNA, 343 bp, Zea mays
cccacgcgtgcgacagggtccaaattcctgtgccgcttctgctcttcaccacttcctctcccatggtctcgtaggccaaacgacccggaacactcccgtctcgcctctctcgtcctcctcttggtggctctgttctcctgccttctggcctatgcccatgtttccacactattgaaccccaccgtaaatcctcaggattccagctttgagtctttggaatccgaggcgggtattgattttggggaaaagaacggcgagtgttgcagaggcattgagaatttggagctgtggggtgcagctgtgaaatggcggtctgacttcaagtttaattcctctgtggaat

SEQ ID NO: 278877 - DNA, 1302 bp, Zea mays
ttctgccacgcgtccgcccttaggtgcatttcgggcaacacatcatgcacaaggtgctcaagctgcagataatctgaatcctgtgtttgacgaggagccaagtaaggtatcattgtcatcaaagcagaaccaaagtcgggtggacaccagcatcagtattcctggtgataggcatggtcattctggtcagacgtcacgaataagcaaaacaccgaacaactccttgtccaatgatggtctcagaggtgtctctgacacggagatacataattctgtgaaaactaaagtgcaacaacctcaacccaagccaatatgtgataaagatccattcaacatcttcgctgcagattatgacactcacaatctcaacattgccgggggtatggcatccgaacttgaacttgtagtgtccagtctgaaggagcagttgaagaaaaccacattagaaaaggctgagatgacagccaagtatgaaaagttatctgcaatctgccgatcacagcgtcaggagatccaagagctgaagcgcacccttgctgaggcaacacctccctcaaacaaagtcagctcaaggacacaagactctggatctcagcgaaaggaaaagatccaaggaaccttgtgggagcttgaacaagggatgcttgctagcaatacctcatcagccagttctgacgtcaaaacatggcaggctttccctgatacacagactcaggcccgaccaaaggtcgatcatggaactaacggaagccaaaacataaccaagaacacaacatcaggtgcttcccccgacgcgtggggttttggtactgatagtttcagaacatcgtcagcaccagtaaaggctgctacacagatcaacagggctgcccaagggagctcatcccaaagatttaattctggtgtggccaagaaggtagagcaaccatctggatgggctggtttttaactccacatcgacatgcgttaaccatcattctggtcaaaatttgcaatctgcgttacgcaacagttgccgacggagttgtgatccttggccggcccctgggcgtcaaaatcggttatcttgagcgtgttcatcattttggttgaaccaacttagacattggttcatgggatcactttacccgttaataagtaaatgtgtattgacagtattgtgagtgtttctgtgtatggtgattatgaacatgaacggatgaatgtaatgtctaaatgccaagatataccgtctcataacaaagacttgagccttctgagctcaaaacagagagctagtcatatttgtcttttttggagccc

SEQ ID NO: 278878 - DNA, 565 bp, Zea mays
gacgaaatgggtcagaggctgctcgaccgcttgtcgggcttccttcttgtcgtcgtcgtcgtcggcggggtcctctatggcggaacagagcagcggatagcagaggcggcggatggagcgaacccgcacaggctgctggccaccgtctcggtgtccaagccgtcgtaccccacggttgtctccacgccgatgtcagcctacggcgccgacccggcctccaagccgtcctactccacgttcccggcgctggcgaccggcaacggcggcgccggtgccggcgccggtgcaggcggtggtggtgcagctgcaggcagtggcccgggcggcgggacgtggtgcgtggccagccagagcgccagcccgaccgcgctgcaggtcgcgctggactacgcctgcggctacggcgcggactgctccgcgatccagcagggcgggagctgctttaacccggacaccgtccacgaccacgcgttctacgccttcaacagctactaccagaagaaccccgccccgaccagctgagacttcgggggcacggtcaccatcaacaacaccgatcccagtt

SEQ ID NO: 278879 - DNA, 366 bp, Zea mays
cgcacacgttgctcccccattccttccctcccctctccccagtccccagccctgctcgctcccgcgggcgtaataatatctcacgccgctcctcctcctcggcctcagctgccgccactccccacactcgcttcccgtgggctgcgcgggtgaaggagcgcgcgcgtgcgtacgtacgtgcgggtggttggactcggatctgctgctgcgtggggcgcgggatggcgtcgttcgctgtgtccggcgcgaggctcggggtcgtgcggcccggcggctcggcgcgatctggcggggagcggaggagtgcggtggacttgccgtcggagctcttcaggaggaaggacaccttctctcgcaccgatctga

SEQ ID NO: 278880 - DNA, 926 bp, Zea mays
cggacgcgtgggcggacgcgtgggcggacgcgtgggagcgtcgtcattcatttcctcactcagcgaggctaggcaagctggccgtcaagctcaggccgtcagcgatacaactacaagcctacagtgcctacccctccgccgcctagagagagagaggccagcgatgacgaagacgacgccgccggcgttcgtgtaccggatcagcacggccgacgagtgggcggagtttcagcgcacgggcgccacccttggaggcgacctcgacagctccaccggctgcatccatctcagcgacctaaaccaggtgaagatgactttaaaaaactttttccttggaaggaatgatctgtacctactgcaaattgatactttcaagcttgcagatgggttaatttatgagctaagtgatggtgataactattttcctcatttctatggccctggtcggagctttgcacctcttcaactagatgctgttgtgaaggcagacaaaatagagtttgcagacaatgattttacctgtggtctacttgatggaagttatctcccaagctgatctgtagagtctcaccttcatcttagcaatgctcatttgagttctctgccaaaggttagtgtttaatatgtctatatatgcagaagtcggtcatatatttgagtgacagattgtaccatccagaattctccacagttattcatatactttctggtggaagataagatatgaaactgtatgtaattgacgcatcatgatggatacggatgttcattatgctatagcaaggagtacaatgggtacttggtggcatggtacatccagtgcctggttgcataaacaataagcactatatgttaccttggggaacatacttggaataatgatatgaattcaaaaggagaatgccaccttaattggttttccatct

SEQ ID NO: 278881 - DNA, 755 bp, Zea mays
tggttactcgcagaaaagatttattagctcgccgcgggggttgaaccgaggctcctagctgatcgcgcgggcacaaggcgagcggacaagaaagcttgctttgtgctcaccggcgggcggcggcacggaccccctgcgatggaagccgtcggcgtcactcctgcccccgtggcggcgccggagaagaagaagctgcttgacctcaaggaccccttccccgccgccgccaacagcggcgccaaggcgtcctcggcgagtaagtgggcgacgaagaagaagctggtgggcggcgacgccggctacgtgctcgaggaccttgccgcacctcacggattacatgccccagctcccgacatacccgaatcctctccaagacaacccggcgtattcagtcgtcaagcagtatttcgtcaacccagacgacaccgtcacgcagaagatcgttgttcacaagaccagcgccaggggcacccacttccggcgcgctgggccacggcagcgggtgtacttccagcccgacgaggtgaacgccgccatcgtcacctgcggcgggctctgccccgggttgaacaccgtcatccgtgagcttgtctgcggcctgtatgacatgtacggcgtcaccagtgtcgttggcatagagggtggatacaagggtttctattccaaaaacacggtcgcgttgacaccgagatcagtgaacggcatccacaagagaggcgggacggtcctgggaacgtcgagaggagggcatgaca

SEQ ID NO: 278882 - DNA, 642 bp, Zea mays
ctcgagcggtaaataaacgggaaccgtctatcctcccccttttgggttcggtcctcctccgtccgtcgccgtcgtcaaacctcaagcgcgacgtgtgtaaacggcggcgcagcgcgctgatagtcctgtaaataacggcccgcgccttcggcagacgccaacaacagactcagactatactcgcagcagaaaggttagttagctgagctccgcggggggtcgaaccgagactcttcgtcgcgcgcgccgcatggccagcccagcaggcggcggacgcgaaagcttgctcagctctgtgttcaccggcggcacgggccgtcccggcgatggaatccttcggtgtccctcctgcgcccgtggcggcgccggagaagaggaagaagccgctcgacctcaaggaccccgtccccgccgtcgccgccgccgccgtcaacggcggcggcgccaccaaggcgtccccagcggcgaagtgggcggagaagaagaagctggtgggcggcgacgccggctacgtgctcgaggacgtgccgcacctcacggattacctgccccagctcccgacatacccgaaccccctccatgacaacccggcgtattcagtcgtcaagcagtactttgttaacccagacgacaccgtcacgc

SEQ ID NO: 278883 - DNA, 572 bp, Zea mays
aaacaaacacacgtccgcggacggtgggcgacgcgtggcggacgcgtgggcggacgcgtgggcggacgcgtgggggcgagatactactggagcggcgaagaccgcgaagtgagagagacgtcgccatcgagccgggcgcacggcgagctcagcgatctggaggcggagctggcggggcacaagactggcccgtcgctaccggcggcaacgccggctgcggagctgatcgtgccgccagcacacgagatccaggagttcttcgccgccgccgaggcggcccaggccaagcgctttgcttccaagtacaacttcgacttcgtccgtggcgtgcccctcgacgccggcggccggttcgagtgggcgccggtggtcagcatctgaagcgagcgtgcgtccggtgcaaggcgaagctagaaagagaaaagatgccccccccaacaaacataacggagaagagaaaaaccaaacaattaagcagctttatatagcctaagcttaccaccaccattcatctcgttccaatgcatgccttgcttttctctggagctagcaggagcgtagctattatttag

SEQ ID NO: 278884 - DNA, 581 bp, Zea mays
gctgattattaaagccccgctttttcaaaagccgcaagggctatacccctagttgtaaattggcggaaaggaaattcgcctcctcttctccaattgcagctgcagttgcgtgctcgagaggggtgaagaacctagaagccctgccagcgcgcggcgccggcgccttgtttactctgcgacggcacgctgattgcattggtactgttcttctcctgatcaccacacatgacaagggtcatccatgactccggagatgacatgcagaaggaggcacttgatttggtctcatctgacgttaatttccccaagggccatttcccagactataggattggaccaaacaaccaaatcattgatccagaggagacacatgaggctgtacctctcaaggagattgttgcaaaggaaacagcgcagctgctagagcagcacaagcgtctttctgtgcggtgatctcaaggagaaatttgagaagggtctatctggcgcttccaagcttcctgaagaggcccagcggcgagaagccgcttcattagacaggcaggctcttcttaagaagctcagagatgttctagacacac

SEQ ID NO: 278885 - DNA, 767 bp, Zea mays
cccagccaagctaagaatggtaacatcattctcatcaagctaaaaagtaaccaagatccccagtcagttcttttggagaaaccaagggttctggagcaaccactggtccaacaaatgagttcggtttcatccctgtcgagcaaacaaaattcaatcaatcgtaaggtgaatgtgagatctacagctggccagcagtgggtcaatggtgactcccaagcagtacaaaaatctttggttacagaaaccctgtcaagggcaatgcagagaactgtcccccagcctgcagtgaaggtcacacgtcgggctgatccccagctatctgttaaggcgccggttggaagatctgacctacctccaaagttttcgggaagtgtgggcccttcacctgctagagtgacccgaagattttgtcctccacctgttaagacgcaacagagaattcagcatccaccttccatggtgtcacagagagttgatcctcaggcgaaggtgtcacagaaggaaatgggatctgctgtttgcctgccacaagctccacatcctcctgttttgcagaaacccaaggacttgcctgttcctaaacagcgggagcctatcaactctttgccaaaagaagagccttgtgtctctggatggactgtggaagcagatcaagggaaggaagctaagctctcccgttcagatcggtagaagatccacaaaactgagaagacaattcagatgttcagagatctgtttgttactggaatccgctatgatggagaatg

SEQ ID NO: 278886 - DNA, 483 bp, Zea mays
  unsure (1)..(483): unsure at all n locations
atttcttcaattttcaggggatatatggttatcccattgagatccaagccctattctatatggcattaagatgtgctctccaaatgctcaagccagagggcgaagggaaggatttcatagagaagatagggcaacgactacatgcactaacctaccacatgaggaattacttctggctagattttcaccagctgaataacatatacagatacaaaacagaagagtattcccacactgctgtgaacaagttcaatgtcattccggattccattcctgattgggtgtttggtttcatgccatgtcgaggaggctactttcttggcaacgtcagccctgctatgatggatttccggtggtttgcccttggcaattgcattgccattgtatcatctctagctaccccagaacagtcagntgctataatggatctgatcgaggaaaagtgggatgagctagttggtgagatgcctctgaagatatgct

SEQ ID NO: 278887 - DNA, 331 bp, Zea mays
gacatttgtggacttcccgattcatgatcttgacctgtcgaagtatattggtcacagatgccaagacgttcctcacaattatccaccgcgtgctactagcaaccactatggaagcttgggaggtggccactatacggcttatgtttatcacgatgggaaaaagggttcgtgtgacttccatgacccacatgtgggccccataaccgaggacagggtaaagacatcggctgcttatgttcttttttaccgaccgatacacgacgatagcttatatacagctacagacatagattctgatattcccaccttaggaagcagtggaagcaatttt

SEQ ID NO: 278888 - DNA, 522 bp, Zea mays
gtgctgaagagttgcgggaggaggaggagggtggcgggcagcggaagaaaatgggcggtatcccaagggagccgtcgttctcgcggtggtgcagggacccctctgccgcctccgcctccaataccgccgctgctgcggcgaccagtgacagcgacgcctcagaggagttcgagctgccgcttctgccatcctcctcgggcggcggcggctcaccgatggacattgaggtgggggcaacggcgagatctgatgatctgccgatctcgccgaggttgcttgcgaaggtcatcgggttgatagcgtgttggtacacactgagcacgtgcttgacgctgtacaacaaggagatgctgggaaagcacatgtggaagttcccggcgccattcctgatgaacacagtgcatttcacgatgcaggccgtggcgtcgagcgccatcgtgtggttccagcaacgaggtctagagggagggtcacgtaaatgtcgtggcaggattactgtttacgagttgtccaacaaccttg

SEQ ID NO: 278889 - DNA, 683 bp, Zea mays
tcctcgcgtccgggatgttgaatcagttcattcaaccaatgcaagcctatataagaatgttttcatatctagttttgcagagatcccagggtcatttctgtcggccatgatcgtggatagatttggtcggaagcgttccatggcgtcgatgctcttcactagctgcgttttcttactcccactagtgttctcccggacagatatactaaccagaatctccctgtttggtgcccggctctgtatatctgccagcttcaccatcgtatacatatatgctccagagatttacccgaccgcggtgaggacgacgggcatcggcatcgcgagctcagtgggcaggatcgggggcatcctctgcccactcgtcgctgtcgccctggtgcacagctgccagcagacgacggcgatcctcctcttcgagcttgtaatcttcctctccggcctggccgtctcgttcttccccttcgagacgaaggggtgtaggctcaacgacaccgacgtggacatgaactgatccggtggctgggtgtagtgtgactctcagagcaattttcctgtggcggttaccggaattgcatatggatctggatatttttagcaacacgtatacgtgttatactacccgtctagggtttatgttattccccttgtaatgaccgttatacccactgtgtaatgggcct

SEQ ID NO: 278890 - DNA, 1121 bp, Zea mays
gaagttgtactagctttggaatatttgcactctatgcacatagtccatagggatcgaaatgctgacaacttgttgatagcccatgatggacatattaagtggggcttcactgtatggagatgatgagcctcagatgaatgagctcgaacaaatggatcaccgagcacggagacaaaatcgttctgctgttggaactcctgattatttagcaccagaaatccttttggggacaggacatggttgcagtgcagattggtggtctgttggtgtcattctgtttgagctcattgttggcatacctccattcaatgcagaacaccccgaggcaatttttgaaaatattatgaatcgcaaaataccttggccacatgtcccagaagagatgagttttgatgcacaagatttaattgacagattattgacagaagatcctcatcaacgactaggagcaaatggtgcctcagaggttaaacaacatccatttttcaaagacattagctgggatacccttgctaggcagaaggctgcctttgttccttcctccgatagtgcatttgatactagctacttcaccagtcgctattcttggaatcaatcagatgaaaacatatatgaagcatatgagttagaggactccagtgataatggaagccttagtggaagcagtagttgtgtgagtaaccaagatgacatgggggaggacagcactggcctcaatgagtttgaatctagtgcaaatgtcaattattctttcagcaacttctcgttcaagaatctatcacaacttgcttccatcaactacgatctgctcaccaaaggattgaaggatgatccaccgccaagaacagaaatgtagcagttaatctaaatttggatggactcatttgagtactcagacagtctacaaggtgctcgcgggatgtaggtcttgtacatatcaaagtgtgaggcatggtctgttcctattgaggctgttcctacatctcgcggatacgagtacagttttgctgtttccttgttttcatgaccaattgacatgccattattagtgaaataacccttgaccaaattttggatttcaacctatgagcgctgtctttatggttcgtctttcctttttt

SEQ ID NO: 278891 - DNA, 347 bp, Zea mays
ctagctttggaatatttgcactctatgcacatagtccatagggatctaaagcctgacaacttgttgatagcccatgatggacatattaagttgacagattttgggttgtccaaggttggtttgattaacaacacatatgatctgtctgcgccctgttgttagtggggcttcactgtatggagatgatgagcctcagatgaatgagttcgagcaaatggatcaccgagcacggagacaaaatcgttctgctgttggaactcctgattatttatggccagaaatcattttggggacaggacatggttgcagtgcagattggtggtccgttgtgtcatctatttgagctc

SEQ ID NO: 278892 - DNA, 487 bp, Zea mays
gccgtcctctcccgaaagatctccaacatcgattaccacctcaagggcgccaagagcgtcggcaagaaggccaagaccctcatcactcgagaggcggtgaacggcaccagcacggacagcaagaccaccatcaccctcaagtacagcgtcatcaagggcaagctatgggattcgagcaagtccatgaagctgggggtcaccaccaccattgaagctggggttcctgtggtcttacccgcaaccattgaggtccagagcgagttcaactccacctacagctggggcgagtccatcatcgagaaagaagagtactccaacgcctacgaggtcgttgtgcctgcatactccgtcgtcacggtcagcgtactcgccacacagggcatctgccaagtccccttctcttatactcaggaggacgctttgactaccggagagaggaaggttttcaagtttgatgacggcatcttccgtggtgtcaatagctttg

SEQ ID NO: 278893 - DNA, 339 bp, Zea mays
gcgcgccactcggtcaacatcatgtttaaactcatatcaagacgtgttgagtaaatcatcctttgacatgttggcaggagtctaagaaactgcagtttgcaaggagctgttccagatttgagtgtcgtacctaaatttggctacttggatcttagctggaaccagttgaaaggatctataccgactaataggcttgcttcaaatattactacaattgatttatcacacaactttcttcaaggaactgttccatcaaacttctcagggctacctaatattcagtacttgtcagtcaatggcaacctcctaaacggttctgttccaccgacaatttggagt

SEQ ID NO: 278894 - DNA, 695 bp, Zea mays
agcgcagtatcgtgattcagtcaggcagcattatactgaacttctatctggcgttagagaaggtctaccaaccgatcttgcgcgacctctagcagttgggcagcgtgttatagcctgccatcctagaacaagggaacttcatgatgggaatgttcttactgtcgatcataatcagtgccgggttcagtttgatcggcctgaactgggtgttgagcttgtgaaggatatcgactgcatgcccctacatcctctggaaaattttcctgaatctctcagacatcaaagtgccatcaatggatactacagccacttatcggaagcaaaatatgaggatcagatgaaagagttggctagcggaggtgcagcaagatccacatcgaatttgaatggtaccgatgcaaccttctataccccttctggtcatccgatgagtaccttaatgaagcaagcaaaggccaacacggcagttaatgaggttgcagttgcgacacaacagtcaatgtacaatcaaccatgcacactttcgcagatacaggaaagagacgctgatataagagctcttggtgagctatcacgtgctcttgataaaaaggaagctttgctggtggagttgaggcacatgaatgaagaagtgtctggaaagcagaaagatggagaaattattagagacttggggcatttccgaaagcaatatg

SEQ ID NO: 278895 - DNA, 377 bp, Zea mays
gagattatttcacatggttggattctcaacctgtgaactcagttttgtatgtctcgcttgggagttttgcttcagtctcagcctctcaacttgaagagatcgcattgggcctaatagccagtgaggtcaggttcttgtggattcttcgagaacaatcccctcgggtgcaagaactcttctctggcatcaataatgggatgatactgccatggtgtgagcagcttgaggtgttgtgccatcattcagttgggggcttcatgacccattgcgggatgaactcgacacttgaaggcgtcttcgctggtgtgcctatgcttgccttaccactgttttttgatcaaccgattgatgggcgattaattgtggaagagtggaag

SEQ ID NO: 278896 - DNA, 652 bp, Zea mays
cccaattggtgatgaagaagccgctgctgaggaggaggatgaaaaggagattacacaaggggaagccatctgctggctttttatattgactatttggatttcagtactctcagggtacctggttgatgccattcagggtgcctctgaatcattaaactggccagtggcctttattagtgttattctgcttcctattgtggggaacgctgctgaacatgcaagcgccatcatgtttgccatgaaaaacaaattggacatcacattgggagttgcgatagggtcgtcaacacagatctccatgtttgtgattccattctgcgtggtaattggctggatgatgggacaagaaatggacttgaattttcaactgttcgagacagcgactctctttataactgtactagtggtggcattcatgctacaggaaggcacatcaaactattttaaaggtcttatgctcatcttatgctacctcatagttgctgcaagctttttcgtccatgtcgatcctgatgcaacaggtgagaactaggtgaaaaatctgcaatacagcatacctgtgaacagaatggaggggctacgacctaactgcagagttagcaaattgcgtagatgaggttctgcaagagtcctgaatttggatgtaacttgt

SEQ ID NO: 278897 - DNA, 746 bp, Zea mays
  unsure (1)..(746): unsure at all n locations
ccgatcaccgcctgcgggagggctgcattaagcgggtcacgtgtgtttttacgcggcccggcgcgccgncggggacgcccaacccgatctggaacgaggagttcatgttcgtcgcgtctgagcccttcgacgagccgctccttgtcaccgtcgaggaccgcgtcgcgcccggccgcgacgagagcctcggccgcattgtcctgcccctcgcagcggcaatgccgcggcacgaccacttcggcaagcccgtggagccgcggtggtacagcctcatgcgcccctccgatgaccctgacaagaaggaggtcaagttcgcaagcaagatacagattcggatgtcgcttgatttcgggtaccatgtccttgacgagtccacctactacagcagtgatctgcagccatcgtcaaagcctgcaaggaaaccatgcattgggatgcttgagctgggagttctgggtgcccggaacttggtaccgatgaagcccaaggagggacgcaccacggacgcctactgtgtggccaaatatggaccaaagtgggtgcgcaccaggactattcttgacacgctgaatctcacaatggaatgaccagtatatctgggaggtctttgatccttgctccgtgatcagagtggtggtgtttgacaatggtcaaattgggagcaagaatggcggtggcccaggtcatcggattgtggaggtcacgatacggctctcaacactggcctacggacagagtgtacacgc

SEQ ID NO: 278898 - DNA, 524 bp, Zea mays
atccaatccatgttgattatcatgttcaggttcaaactgaccatcacgccatgaggggagagtacactatgaaatactccttatcaattgcaataacatgtcctggatgatccctaactcattccacgcagtatcctacgatgcattttctccatatttgctggacctccggtggattccaatgacttttatgtgccattcaagcccaacttgaagcttctctactacaaaacaatatgttgggtccacctacgctatttagtgcacggggcgtatatagctactatgtactccctttcttctataacgaataagattcaaaggctcacagtttgtcctaaaataaataatattttacacacatatgaaagattgtctcctaatatggaagttaatcataggtgcttgcaagcaataactgtcaaatccaagagatatcctctacaaaaggaaaggagataaggatacagcttcttttgccaacgttcctaatatatctgaaaatttccaggaacttgtttatt

SEQ ID NO: 278899 - DNA, 1521 bp, Zea mays
ccatgggctaactctgaatggagatcattgaaggtccaatgggacgagccttctgctattctgcgtccagatagagtttcaccatgggaagtagaaccccttgatcgaactaatccacagccacctcaacctcctttacggaataagcgagcacggcctcctgcttcaccttcgattgctccagaacttgctccagtttttggtttttggaagtccccagctgagcctgcccaagctttctcattctcaggactgcagcgaactcaggagctataccattcaagccccagttcaatgttctcatcgtcgttgaatgtgggattcaatccaaagtacgagggtcccactccaaacaccaaccatttgtactggacaatgagagagacaagtccggaatcctactccgctagtatcaacaaagctccaactgaaaagaagcaagaatccactacttctggctgcagattgttcggtatcgagataggttcttctgcagtgtcacccgtggttactgttgcttgcgtcgggcatgatcctccgccacctgctctctcagtagacgctgaatctgaccagctgtcacagccgtcccatgccaacaaagcaacggatgccccagcggcaagcagcgatcgctctcctaacgagacagagagccggcaagccaggagctgcaccaaggtaatcatgcaaggggtggcggttggccgggcggtggacttgacgaggctagatgggtacgatgacctccgccgcaagttggaggagatgttcgatatcccgggagagctttccgccagcctcaagaaatggaaggtgatctacacagatgacgaggacgatatgatgctggtcggggacgatccatggagtgaattttgcaggatggtaaaaaggatatacatttattcctacgaggaggccaagtctttgactcccaaggcgaagctgccggccatcggtggtgacaccggcgtcaagccggacccaagcaaactgccaccagaatccgacgtgccacagagcgactccgacaacagtgctcccgttgctgctgataaggactgatggacgctagctcggccgtaccttccctttggatgttggccatgggaggcaagtgcagtgcccatgctccttgagactgctaagagttgatcatctgttccatctgcctcggcttggaccagcgaggatggccgggagggagtgcatgacgttctgtgcgtgtttcgtttgccgtgtttggtaggagccatggcttgttgccggctacttcggttctgtagactgttacactgactgctgccgtctcacctggccgtcggcgcgggccgccccctctcacctctctagtaatatatactagggcttatgtacacagctgttttggtagtggcatatgtatatcgtcggtcatgttgcttgcgacatttagcatcctccgtagctgctatttcctctcctgcattttaatcctgtcttggtatcagatgctctggcgcaatatgtgttccagcg

SEQ ID NO: 278900 - DNA, 904 bp, Zea mays
gccctccatcgtctccctcaccaccagtcaccaccgccagctccccgcctctgcctcctccaggcgaccaggcccccagctttggcgtcgacggacagatacagcggcgccatttccaaagagagacacagatcgcgctgcccaaggaaaagaagccgcgccttctcccctctcccttctttcttccctctcttttattgacgggatcgtccgccggttccattccaacactaattcctcacgggggttccatttggattcggcctggatccgcgagatcaagaaaaacgcctgcaattaaactgccaagattaacaagaaaaaaaataaccaaccttgattggctgcaatctttcttcaaaaagaaaaggagagagccttcggcggcggccgatcttggctcggatggcagcgccgccgcagccgctggcgtcgctggactactggcggtgcttcttcagcggcgcgcgggctagcatctttgacgccatcgacgccgccatccgagtagccgccgccgaccaccccgacgccctccgcgcgcgccgcgacgccatcgccgagcgcctctacaccgcgattgtgccgcttcctgcacaggaggcgccggggcagtccaccccgggccagccggcgctcctccttcccgagggcgccgccagcgtgcccagcctctgcagctcggaccgcgccgaggtcgtcaacaacgacggcggcggcgcgccgcggaccaacagcgatgacgacgtgctcgccgaggcgttccgtatcaaggcggctctctccaatgcccaagacatgtcagaggctgagttgctagagcttttggggaggctggggcagcttgtattcacggtggacgccatcaaggtgagccgtgatgagagtgaacctaccgctgcat

SEQ ID NO: 278901 - DNA, 474 bp, Zea mays
agccgtctcgactgccccagtcctttctcagatccatgtctacccagaatctgctaactggcgcgtgcacgaactccgccccggccccgtccgaggcggaagaaggggacaggacgcctttggctgacgctgcgaacgcggcggaagagctgtaccgcctccgtgacacctttttcccccgggacccttccgagaaagtcgccgcactccgcgcccgcgccgacgccgccctcgcgctcctcgacgccttcccgtccgaacaaaagaagtctcgacaactgcgtggtgtttatgaatttttgaggggaaaaatactggatgtctttcctgattatcataaggaggctgaagatcatttatccaaagcagtaaagttgaacccatctcttgtagatgcatggttatgtttgggtaactgcatttggaagaagggggatctatctgcagcaaagaattgtttttcattagcactaa

SEQ ID NO: 278902 - DNA, 1086 bp, Zea mays
atttgttcttggtggtgcaaagggtcctgaagaaaatccaattggcaaatctgttagaataggttctggcaacgctgggcaaggttatacttcagatgaggtcaaggtcctttttcttatactggttgacctatgtcgaaggacatctaccttgccgcatccattgcctgcctctcaggttggttccagtagcattatcataaggctgcactacattgacggcaactacacagtgctccctgaggtagtggaagcgtctcttggtccccatatgcagaatatgcctcgtccacgaggagctgatgctgctggacttctacttcgagaattagaactgcaacctcctgcggaagaatggcatagacgcaacatgtttggtggaccctggtcagaaccagatgattttggtccattggacaatatgcctcgtctaaaaattagtggttccatcaactctcatttgtctgacatggaagtggatgctgtcagttccattgggattgatctttggccaagaaagcgtaggttatctgaaagagatgctgcatttggtctgaaaacatctgtaggtcttggaggttatctaggtgtcatgggatctcgaagagatgttgtcacggctgtgtggagaacaggtctcgatggtgattggtacaagtgcatacgttgtttgcggcaaacttgtgcatttgcgcatcctggtgccccaaatcagacaaatgaacgtgaggcttggtggatcagtcggtggagccatgcttgcccaatgtgtgggggttcatgggtgaaagttgtttgagcgctgtatttggcaacaacttcgctgctaattgctttcctgacaaacatgtatggagttccatagttatgcatctaacgctaggctactaggatcaggttcagccgttcatgccagatggttggtctacaggcacatgcacgtggcacgaccactgtggaagtctggtagaattaggagctattctgggggtctgaatatgtaactgacatttgcattatgctgtctagtgtattattaaccagtgactttccttgctaaaaaggtgtagcatcgttacttgttcc

SEQ ID NO: 278903 - DNA, 448 bp, Zea mays
cgcgcagcctccaccgctccacgtgacctcccaaacctagacctagttgtccttccgggtcaccctgcatagcggcggcgcgtcctgccttcagagagagagagagagagagagagagagagagagcgcttgatctccgtaggcatggcatgggaggaggaggcggtagaagaggaggattacggggaggagatgtcggcttcggagtcggaggaggacgtcgtggtggggcagatgccgacggttatggtgccaaagcatatcaataagcggtccctgaagaacaaggcgctgtctgttaccctcgacaagaaagcgctcagggatttcgtgactgggttccacaagcggaagaaaaagagaagaaaggaggcgcacaagattttgctggagaaggagaggaagaagaaaatacaggaccgcaagaggaggaaagaagagaacgaga

SEQ ID NO: 278904 - DNA, 418 bp, Zea mays
ctcaggcaacccagctttggctgcccttgcttgctgctcagttctttgccccctgttcctcctcctcctcttctcgcacctcggcgcctgcttcggcatcaactgcgagcgagatggaggcgcaagacgactgcaagtggcgccaggtcccggcgttcggcgactggaacctgtgggacgacatgcccgtcacccagtactttcaggcagggaccttcttcttcgccgcgccgacggcagagaaggacgacgagaggatctcttcaaggtgccccagttccctgccacgccctacagctacaagaagtgcgtcgttagagtgaagggggagaaaggagctgccgtgcctccggccgcgaggaagggaggcaggaggccccgcgtgaacgagcagcagaggtggaagcccaagggagct

SEQ ID NO: 278905 - DNA, 782 bp, Zea mays
cgctaactgctcacagtcccagtcacaatggaagaaagggaaattgctagggagtggtacatttggtcaggtttaccttggatttaacagtgaaaatgggcagttttgtgcgattaaggaggttcaagttattatggatgatccacattcgaaggaacgactcaaacaattaaaccaggaaatagatatgcttagacaactctcccacccaaacatagtgcagtaccatggaagtgagctgagtgatgaatcactttccatttgtcttgagtatgtttcggggggttcaatccacaaattattaagagaatatggctcttttaaggaacctgtgattcgtaattacactgggcaaattcttgctggccttgcctacttacatgggcggaacactgtccacagagatatcaaaggagcaaacatactcgtgggtcctaatggtgaagtcaagctggctgactttggcatggctaagcatatatcatcttttgctgaaatacgttcttctgtctatctgcctgtgtttaacgctttcagctatcataatatttaatatttgttggacttttaaagtcaactactgtgtttttgtctgagtgctctccactttgtatgacacacggcagtcatttttgcttgtagaccctggaaattcgctgaggaatacttatatgtatctgagtactatacagtttcaaatctcagttgaagtagttcgaaaaattgcagttgaaataaatacttctcaattgtattagtatccatcggtctaatagaaaagg

SEQ ID NO: 278906 - DNA, 974 bp, Zea mays
ccacgcgtccgccacgcgtccgcccacgcgtccgccacgcgtccgggacctgggatattccagcaggagaactaccttgctaattggattcaggctctattcaattccttgccccctgaagattatgtgggtgcaaccttgtacttgggggtgatggccggtactttaacaaggaggctgctcagatcatcattaagattgcagctggaaatggagttcagaagatcatagttggcaggaatggtctactgtcaacacctgctgtatctgctgtaattcgtaaaagaaaagccaatggcggctttatcatgagtgcaagccataatccaggtggaccagacaatgactggggtattaagtttaactacagcagtggacagccagcaccggagacgattactgatcaaatttatggaaacacactatcaatttctgaaataaaaacagcagacattcctgatactagtttgtcctctgttggagttgtaagctatggtgatttcgccatagaagtgatagatcctgtttcagattaccttgaactaatggagaatgtgtttgacttccaacttatcaaggatttgctttctcggcctgatttcaggttcatattcgatgcaatgcatgcaattactggtgcgtatgccggacccatttttgttgagaaacttggagctgatccggactgcatattaaatggggtgcctcttgaagattttggaaatggccatccagatccaaatctaacttacgctaaggagcttgtttttactatgtttggagcccatgcacctgactttggtgcagcaagtgatggtgatggtgatcggaacatgattcttgggaaaaggttctttattaccccatcagactctgttgcaataattgcagccaatgcacaggcagcaattccttatttccagtttggtacataaggactcgcgagatcaatgccaaccagtggtgctcttgat

SEQ ID NO: 278907 - DNA, 554 bp, Zea mays
cacaaactgccctcgcggcctcgccgccccgtcgcccctctcgatcacttctctcccgacactctctcactcccgtgtcgtgtctagcgccgacggcgttgctaccggagccggccagcggccacgatgcctacaatgcacgcgcttcgcctatgcccgctgctctccaccatccgatccacaccaccgcgggccactgccgcagcccgccaggcgcgctcttcgtcgcccgctgctcctccgccgggacgccgtcagccgcccaggcgctcaagatcagttcaatcccgaccaagccagttgaggggcagaagactgggactagtggcctgaggaaaaaggtgaaagtattccagcaggagaactaccttgctaattggattcaggctctattcaattccttgccccctgaagattatgtgggtgcaacccttgtacttgggggtgatggccggtactttaacaaggaggctgctcagatcatcattaagattgcagctggaaatggagttcagaagatcatagttggcaggaatggtctactgtcaacacct

SEQ ID NO: 278908 - DNA, 1042 bp, Zea mays
caccacgccgtcgccgccggcgtcacccttctcgacacctccgacgtgtacggtccccacaccaacgagctcctcctcggcagggcgctccgggcggcagacggggtgcgggagaaggtgcagctggcgaccaagttcggcatacgcgtggacgccgccgacgccgcccgggagatccgcggcgacccggcgtacgtgcgtgcggcgtgcgagggcagcctccagcgcctcggcgtcggctgcatcgacctctactaccagcaccgcatcgacaacagggtgcccatcgaggtcacggtaggtgaactgaagaaactagttgcggagggcaagatcaaatacatcggcctgtccgaggcgtcggcgtcgacgatcaggagagcgcacgcagttcacccaatctccgctgtccagctggagtggtcgctctggtcaagggatgttgaagctgacataatcccgacctgcagggagcttggcattgggatagtagcctacagtccactgggcagagggttcttgtcgagtggtcctacgatggtcgacaagttgtccgatcaagatttccgcaaggagctgcccagattccagccggagaacctggagaagaacgccgtgatattcgagagagtcaacgcgatggcggcgaggaaggggtgcacgccgtcgcagctggcgttggcctgggtacaccaccagggagccgacgtgtgccccatacccgggacgacgaaggtcgagaacttcaacagcaacgtggcggcgctttcggtggagctcacgcctcaggacatggctgagctcgagtcttacgcgtcggcgggcgtccagggcgatcgctaccatgacttcctcaacacttggaaggattcagagacacctcccctgtcgtcctggaaggctgatgaataacctgcggcttaattcacacgcggtgttgtcccattgaaagatggatgaggtgaccagatggaatgaataagagccaataaaatttcttcgcacaaaaaaaaaaaaaaaagggcggcggctcgcgatctag

SEQ ID NO: 278909 - DNA, 252 bp, Zea mays
caagactgtaggatggtgcggctaggctcattgatctgtcgcgatatttcacggcacaaaacttggattgcaggggtggttctaggggcgttcgtcacccggggaaaagtgataaattctttagaaaaacacacttaaacttcaagaaaatttgtatcatgtagcaaacctgaccttgctacccgataatatcttgggttagattcgccatttattggatggtgggcagccgaatcgagagttcactttggc

SEQ ID NO: 278910 - DNA, 1174 bp, Zea mays
tcgcccacgcgtccgctccgttgggcctcgcttccgatgcgccggagctcgcacgcgatgggagcgcaacggtttcggctgctgctgcttctgctgctcgcggcggcggcggcggaggcgcgcttcgttgtggagaagaacagcctgatggtgacgtcgccgacttcgttgcggggacgacacgacagcgctatagggaacttcggaatcccacagtacggcgggagcatggcgggcgccgtcgtctaccctaaggacaacgccaaggcttgcgacgatttcgacggcaggcaccccttccgtgccaagcctggcgcgatgcccacgttcctcctcatcgaccgcggtgagtgcttatttgcgaagaaggtttggaatgcacaaaatgctggtgcctctgcagtacttgtagctgatgacaaggatgaaccattgataacaatggatttacctcgtgaagatgacgaggcttccaagtatatacaaaacataaaccattcttctgcattaatagatgaaaaatttggtgaccagttgaagaaggctgttaaagatggggaaatggttaatgttaatcttgattggagggaggctgttccacatccagatgaccgtgttgagtatgagttatggacaaacagcaatgatgaatgcgggcctaaatgtgatatgctgatgaattttcttaaggaatttaaaggagctgcccaactacttgagaaaggtggctatagccaattcacgccccattacattacttggtactgtcctcaagcatttgtgatcagtaaacaatgcaagtctcaatgcataaaccatggaaggtactgtgcacctgatccagagcaagattttagcacaggctacgaaggaaaggatgtggtggtagagaacctcagacagttatgtgtgtttaaagttgcaaacgaaaataagaaaccatgggtctggtgggattatgtgactgattttcacataaggtgtccaatgaaggagaagaagttcaataaaaaatgtgcagaaactgtcatcaaatcactaggtctggatgtgaagaaggtcgataaatgcatgggagacccaaatgctgattctgaccacccgttacttaaaatggaacaagatgctcagattgggaaaggttcaagaggagatgttactatattgcctacac

SEQ ID NO: 278911 - DNA, 398 bp, Zea mays
cttcttcctcctcctcctcttcttggtcttggagctgaaccttcctcttcccctcgttgatcgttcgcggttgccgattcgccatcccctccaaatcaagacaagattgagtgggtcttgggcccttgtccctagctgcattgcgaattgaggcgccaatttgggagacgactgcattgatgaatgccggaggccacagcactcactgatttagggattcgatgtcacgggcacccggatgtcattgccgatcgcccttgtagtcggcattgccggtggcgccaccttgctcgcggtggcggccgtgctgctcgcgctctggtgcgctgcgcggatgagggcgcggcgtaaccgcaactccgacactggctccttcgaccccttgacgctagtggagt

SEQ ID NO: 278912 - DNA, 895 bp, Zea mays
gtaatagagggtaatgttgatgttgttttgcctggatcaaagtaatttcagccatccaattgaagtctgcataatggtgtagatgatcttcaaaatccacagaattacatcgtatgggatgctaatgtgcataaacacatatatgctgaatatgctgttattgtccaagcacctctcgtgaccaatgaatgttcgggcttgaaggatagcgtgcccaacatatctgagatcataagttctggttctcgagacaatctaaccaaggaggataggttcgcgccttgtggtgtcgaacaagaagcacctaggctggggcgtgctccaagggccccctcctcaccatggatgcccttttcgatgctttttgctgctatttccacgaaagtgcctcgttcggacatggagttggtcatcagatactatgaagaattcaagaggaagaggatgagccggagcgacctggtggtacggatgaggcaaatagtcggtgataagatattggtttctacaataatgaggcttcaccaccagaagaagcccccatcgatggcagcagcagcagctgggctagcaagagcactcgcaaggggggaagagggagggggagtagccgagtaagattagtttaagccgccttgtcttttgagaaatttatggagcacatatgctttgtcgacatggccagactcaaggtgtcaaaagggagggagatgagctgagcaactgttgtagtgtagtctcaaactcaaagcgtttaggtcttgacatttgacaaactaaaactcagaaacattatcatgagtagtgttttttttcgtttctctttcctggatttaactattgttattgctatttcgtggatatctgggcactgaaggccgtgctattgttggtt

SEQ ID NO: 278913 - DNA, 575 bp, Zea mays
gacctcgccctcatctcgtctcctccggcggtccggcctgtccaataattctagtattccaccgcccctcccctcctgtcttccttcaccttcgcgctccgccgccgccgtcgattcgtgctgctctcacccctaacctgtccaacatcgccggggagggaagcagcagaagaagctccccttacctccggctatcgcctgaggataaagtggggtctgtaggggagtcttaggggggagcaaaagggataggatagggagagatgaagcaatcaatttcttcgtccgccttcgcccctgcttacgtgcccgctactaaccctaggatcattctgtcttttctcgttgcttatccgactcttcttcgctttatgcctatcagttatgaggttgaacgccttcagaagcttgtctactagattagtgtaaatagtagacttgttcgagtttagcttggctggaagaattagtctctggtgcgtgtttatatctgctagcaataatggctgctatgaacggagaggaattgggtgaatgtggaagggacataaatagtctcaagagaaagcggagag

SEQ ID NO: 278914 - DNA, 578 bp, Zea mays
cccacgcgtccgtgggtgcctccactgcagtcccagctcagagctctcagcggtggcggccggcgaccggcgacatcctccggtatcgactcccgtggagtggagcgttgaaccacgctgcggacctgcattcaccagtccgccgttttccttcgccttctccgcgtgatccggttgctctggccactgatggccggtgacattacatgcggatccttgctgcaaaaattgcagttgatatgggatgaagttggcgagagtgaggaggaccgtgacaaggtcctttatcagctggatcaggaatgccttgatgtctacaagaggaaagttgaccaagcaactaactctagggatctcctgatccaggcgctggatgactcaaagatagaacttgctaggcttctttctgctcttggagaaaaagctattgcaagaacccctgagaagacaacagggacaatcaagcagcagctagctgctatagcgccaacacttgagcagttgactaaacagaataatgaaggacatagagagttcgttaatgtacaatcacaaattgatcaaatatgtggtgaaat

SEQ ID NO: 278915 - DNA, 401 bp, Zea mays
  unsure (1)..(401): unsure at all n locations
cacacttgagccccacccgtgccgccgccccgcatcccttagcctgagtgcctggcgctggcgctgccgccgcccatgtccgccgccccgccccgccgcgtggtcatctgcggcggcggcgtggtgggcgcgtgcacggcctacttcctcgccacccacgccgcgtcccccaccgtcccgacgctcgtcgagaggtgcgccccggcgtgcgccgcctcggggaaagctgggggcttcctggcgctggactggtgcgactccaccccggcgctctccaggctcgcgcgggcctccttcgcgctgcaccgccgcctggccgacgccctcggcggcgccgacgcctacggcttgcgccccgtacacaccctctncgtgctgntgcccccggaccccggcggctt

SEQ ID NO: 278916 - DNA, 857 bp, Zea mays
cgctcccaccctccgtccgaccgtcctcgacctcccgtcccgccgcctcccacagtcgcaaccctagtcccacccgccgtcctcccgccctcccgcttcccattttcagtcgccgagccgcgtacagcgcacgcactgcacgcgcatcggcacttccagcgacgcgtcgtgagctcctcccttcgacccttcctgtggcgcgtcgtaagctctgtgcaggcgacggcggcgcgctaccagtgacggggggatacggcggcatcgtccccctcggcccctcctccatcccggtgcggcggcgccagcctacagggcaggagtaccaccaagcgagcggcgatggtgagctccgcactgaggcgctgtctcccctgcaaggcctctctctgccatgccttccctccccatccgctgctggccgctgccggcgtcttccgtcgttcattccagtccggggatggtgagactatggacgaattcgaagaacggttgtttgggggcaaggacacagacaaaggatcactctacgagaagctcgatagggctgagaacactggtaggagatacaatatgggctctgggatgggtggtttgactgggttaagtgacaagagcagatctgggttgtccaagggtggtttcacttggttaagtgacagtagcagctctggtttccctgggtttcctgcatctggcgacaggagcaattcaggatggatggatggttatgattcttttaatgatggcttaaatgatacgattgctaatgcggcacgcaacatccaaatggaggaggacgaggacgtcgacggtgactgggaagatgactttgagttcaggcctgatgtgcggtttag

SEQ ID NO: 278917 - DNA, 403 bp, Zea mays
gagagagagaggagagttgccgccggagggtggaggtcgccgcggaggggaggggctcgcggtgagggcgccgcgccggcgcctggagagctcgtggaggggacagccaccgtcaccgccaggagacaagcgccgccgccgctaggaatcaggagacaagcgagcgcgatggtgagctccgcactgaggcgctgtctcccctgccatgcctctctctgtcatgccttccctccccatccgctgctggccgctgccggcgtcttccgtcgttcattccagtccggggatggtgagactatggacgaattcgaagaacggttgtttgggggcaaggacacagacaaaggatcactctacgagaagctcgatagggctgagaacactggtaggagatacaattttg

SEQ ID NO: 278918 - DNA, 743 bp, Zea mays
gaaaacccgggccggccgacgcgtacgcgagttccggagagagtcgagtccccatgcatgcaaggtctcagcagacgttcttccgttgctgactatgaacctaaggatggtggtgagggtggcaccacgcatgatgttggtaccaagggaagtgaattggaggacaccatcaaacacgaacagcttgtctcaagcgtggtcctccctgcggatttggcaacggatcacgtcaagatcgacgcagatctttctagcagcaaggctgtagaatcaactgtcaaacagagagatgagactgccgagctttcacgtaagggtgccagtgtgttgtactgcgtgcttcctgggagaagtagcgattctgctgcaagtacatctagtacgcaagaccaggattcagtggatgtgctgccatctgaaggcaccggggagctatatcgcttattgccccccaggaatggccattcactcaggagttctggagattctaagcgttcaaatgcgagccaaagagatgatagaccagccaatccatcgcctgaaggagatggcgatctggactgccggctgccgaggagtggacgacccagtaggagttcttctgccgtatccatggaagctgaggactcgccgaaagacgctgcacgaaatgctgaaacaccctctaggtctccaatgtcactgagactgatgatagaaggaagatctgatcgcagccgccttcctagaagaattcttagaca

SEQ ID NO: 278919 - DNA, 763 bp, Zea mays
cgcaagatcctgagcccgcacctggacccgctggccgacgcgcagcgcactgcccgtgcggccgcctcccgcacacgtcggcgcaggccgaggacgccctgtcgcagggcatggagaagctacagcagaacctcgccgagatcctgacggccgaggctgaccccttcggggcccccgacccctacatgctgcagatggccactgcggtggagaagctgaaagagctcgtcaacttcgtcacccaggcggaccatctccggctgatgacgctgcaacagatgcacaagatcctgacgacgcggcaggcggccaggggcctgctggcgctcggcgactacttccagcgcctccgcacgctgagctcgctgtgggcggcgcgcccccgggaggcggcgattagctagatgcccccggtgtgggtgtggccagccaaaggccccccaaagaacacgacgacgacgaatagtagcagttcgctgtatactttcccaagctgtaaagtccagtggaggacgaaaaaagcgacctcacagtcactggggttcggttccgacgaaaggatgcaaggcttttaagtcaatggcggtgtctccgcagcagcagcagcagcagcaagcggtgtgcgtttgtcaagcgaagcgactagagaataaaacggaaatggattgaggccttctctatttgacgggcggaagacgtgtacatatattgttttgccacccggccgtggccttctagagaggcgtatgattcatgatgcagg

SEQ ID NO: 278920 - DNA, 747 bp, Zea mays
tttttatcttcttcttgttgttgttgctggtggcatgcagatcctgagcccgcagctggagccgctggcggaggcgcagcgcatgctggtgggcggcctgcagcacacgtcggcgcaggcggaggacgcgctgtcgcagggcatggagaagctgcagcagaacctcgcggagacccttacggccgaggccgacccgttcgggccccccgacccctacatgctgcagatggccaccgcggtgggcatactgaaagagctggtcaacttcgtgacccaggtaaaccggaccggtcgccaaagagccatccatcattccatctccatgtggatgcaaatgcaaggcctggcctggcctggccagctcgaacgcgcgcggcgtgtgtgtgtgtgtgtccctgttgcgctcacccgtacgtgcccggccgcctctgcttcgcgcgctggctgtgcctgtgcctgtgcaggcggaccatcttcggctgacgacgctgcagcagatgcacaagatcctgacgccgctgcaggcggccaggggcctcctggcgctcggcgactacttccagcgcctccgcacgctcagctcgatgtgggcggcgcgcccgcgggaggcggcggtcagctagattcctgtggcgtgtcttgccaaatttctctcttattggtttggctactctgttcttatgattctgcttttgatacgactaatacttaagttaggtggcatttttttattttctttttccccta

SEQ ID NO: 278921 - DNA, 1063 bp, Zea mays
  unsure (1)..(1063): unsure at all n locations
attagttcaatgaccccatatagatggacagtaatttataggtttgtgtttttgtttaactaatgctgccaccttagtaaaaatttctatggcgccttttgcattttggctctctttagccatttccttgtcaaggttcacactagccgaagttgacattacaacaaaattcagtatacacattgctttgtttgcttatttgtattccagttatgagctaattacctgataggctgaaaatctatattatttttctgagagtattaccataaacaccaaaatgtgtccttacattgcagcttcgctcctgtttcagttcattcatatgccgtggaatgttgcctctttattcacatctcgagttgccagtttaatttttatcacaattttatatcagatattagagtgctactaacacatcattaagtaatggaatttgtttcttgaaccttctgcagatcgctatcaagatctcgatccccaatttcttcttcttttcatgcaagatatgcgtcaagccctaggagcagaagcgcatcccgttctcggtctcctgtgagatccgattgaactttgagagcccttgaagcagtgagcagccccagggagaagaaaggaacttgagagtatgccgtgccatcacaatggtccgagtgattatgctgttgccactgctccctcacatttaagaggtttcctcttatttagacggagcatttaattaacattatcttgctaaagagagacttatgcgtagtctacttgtgtactcgttcgtttgtcctcatgttcttggcttcaggaactctggttttttatcattgtacccatagtaaaacctagatgtagttggggtatgccgtatgcgtctatattcggttggtcgaatgtaaatctggatgcatatatgcatctgtttggtttcatttaggcctttccttggtttcgtgattaatgacaacataagcttattgctgtgatcaaagtatattttgtagaggtaattaaagctagtcacaccgtnnagaaaagaattacattcatagaactattgatatattgg

SEQ ID NO: 278922 - DNA, 517 bp, Zea mays
  unsure (1)..(517): unsure at all n locations
ctctgagcatatcaggcatgaattgtttcagcaattgatgcttgatcacaatgatcactccgttgtggagtatctgaagaacacctacagatattcaaccctaaatggtaatgaggaccggcctccagagcaaaaacattcaacctcagcatcagggtcatcccaagatgttaaaaaatctaattcaactaaccaaaggacatcacgtggaagtggtggaaaggcctcagatgaagcctctcgggggaagaataagttcttcttggcgaaatggtttggttttggttcaaaataatccttttatcatttgtattagtttggttaacattttaatggatatgtcatggatttaagaagcataattattttgaggaagtggcacgtgagaaaacttccctctacagattctgttcatgtgaaaacccagttgtgttctttataactgtgtaaactggccatttggccagatgaattaactttccccgtttacataaaaaaaaaaaaaaaaaaaaanaaa

SEQ ID NO: 278923 - DNA, 602 bp, Zea mays
cccacgcgtccgcccacgcgtccgcccacgcgtccggatttatactaaagcaggtccagttttggtggctgtcaatcctttcaagaaagtttcactgtatggtaacgagtacatcgatgcatatagaaataaatcaatggatagtccacatgtttatgcaatagcagatgcagcactttgtgaaatgaaaagagatgaagtcaaccaatctataattataagtggtgagagtggagcaggaaaaacagaaaccgcaaaaattgctatgcagtacctggcttcccttggaggtggaagtggtattgaatacgaaattcttcagacaaatccaatactcgaggcttttggcaatgcaaagacattgagaaatgataactcaagtcgttttggaaagcttatagaaattcatttcagtaccactggaagaatatgtggtgccatgattcaaacatttttgcttgagaagtccagagttgtgcaatgtgcagttggtgagcgatcataccatatattttatcagctgtgcgctggtgcacctgcctctctaaaagagaagttgaatttgaaaaaggtggatggatacaaatatcttaagcagagct

SEQ ID NO: 278924 - DNA, 598 bp, Zea mays
atcccctcccgttccactgttgcccaagtccaaccaccagcgagatggcggggaccgtgaccgcgaccgcaaccacggccaccaccgaggtcgggaccacagtgaccgcagccacctccgagatggaggccaccgcgaccgcagccacctccgagctggaggccaccgcgaccgcagccgccatcgggccgccttcagccatccccgataaatatatgcataaaaaccggttgcagtcatttgctgaacgaacatataagaaaacgccaatctacaaggttgagtctgaaggccagtctcatcagcctaagttcacatgcacagtggaagtgggtgatcaacagttctcatcaactggtagttttagtcgtaagaaggaagcagagcaggacgctgcgagagttgcttatgagatcttgacaacagttagtgagagtgacgttcaggaggcatttgagctaattgatcaggtacgccttttgactttgctccttgatctggtcattcaccatcttttcatcttatgagcaatgacacaggtgcatttttcagtggtaatatgcatgcacttgtgcattttttagtggctacacaagtg

SEQ ID NO: 278925 - DNA, 535 bp, Zea mays
ccgctactattctactccactctacctaccgccccacgctccagtgctcgcccgccctccagaccgcacgcacgcacggcacgagctcgccgcgatgtcatggttcgctcgctccatcgctgccacactttcatctgcccactctgacgacgatgaatccgagcccgcctccggcgacaacagcccgccgcgcgcctccgaccccaccagcgccgagaccggtgagtccgatgagcagccggacaccccgagccgcggcgttaagggcgacatctcggagctgaccgagtccctcacccgccggttctggggcgttgcctccttcctcgcgccaccgccaactgaaggagagactgaagaggaggaggaggagacagccgccgccgcggaggtgcctcagtccccacggatcgacgggatccggagtgacctggcggagatcgggggcagggtgaagaccggcatctcgatgctgtcgaacgccggcgcggtggcggagatctccaggttcgcgtcatcgttcctgccattcggt

SEQ ID NO: 278926 - DNA, 696 bp, Zea mays
gtgccggcagcgactattcctgatgccacgacgacaagcgtcactgagcggacttcggtttcatctcttttagaggttgtatcggaggacttgctcagccttaacaacaatctgaaatcgcttgttggtgcagaaaatccagttttagtttctgcagctgaacaaatttttggtgctggtggaaaaagattaaggccagcattggttttcctggtgtctagagcaactgctgaattagctggtttgtcggagttaactgcagaacatcgacgcttggcagagattatcgagatgattcacactgcgagtttaatacatgatgatgtcatagatgatagtgggatgagaagagggaaggaaactattcaccaactatatggtacacgtgtggctgtacttgctggtgattttatgtttgcacaatcttcttggtttcttgcaaacctagaaaatattgaagttataaaattgatcagtcaggtcatcaaggactttgcaagcggcgagataaaacaagcttccactctttttgattgtgacatcacacttgacgactaccttctcaagagctactacaagactgcatctttgattgcagccagcacaaaatcagcttccatattcagtggcgtcagcaccactatttgtgaaaaaatgtatgcatatggcaggaatcttggtctatccttccaggtt

SEQ ID NO: 278927 - DNA, 478 bp, Zea mays
cccacgcgtccgcccacgcgtccggcctccgtggtagaagtcctggcagctccaagcgcattagctcgacctaattccttcttcaactgttgtgtacttgtgtgggtgtctctctccctctgcccgagatgttgtctctgagctgcagctgcccaggggtgtcgtccatgagcaagacggcgctcgattgggggcacctggtggcctcctgccgcagccgctggcacggcgcgcgggcgccgcccagacggcggcgcacgccatgtgtttgcttggttgcctcaccgaccaccacccagcctggccctgctgctgttgatgtgccctcacggatggttcctgctgtcacaacatcaagcgcccctgaacgcatttctgtttctgcgctgctcgaggttgtctcagacgacttgctcaaccttaacaacaatctcaaatcgcttgttggtgcagaaaatccagttttagtttctgcagc

SEQ ID NO: 278928 - DNA, 409 bp, Zea mays
  unsure (1)..(409): unsure at all n locations
aatttgttgatgaatttaaatttgacccttcctggcattcagttattgaagagtatggggggggtttgaccaattatatctgagattatagtgacagataacattgcttgagtttgggtctattgaccggaggaaaatcatttaacatccttatctctgtggatggaaattaccttattgttattcacttcaaattttttccaagaggaccttatcatcattacaccttgatgttaggaagctttgaaatgggtgacagatcagcctgcttggcaacgttcagaaggcagggatcatgtcattcctgttcatcatccatggtcatttaagtcagtccggagattcgtcaagaaagcaatatggcttctacctgatatggactccaccgngaactggtgtggtattcatt

SEQ ID NO: 278929 - DNA, 726 bp, Zea mays
cgcaaatcttttgcacaagtgaatgggttcttggcacaagagaagacctagtgaaggatattgttgctgaattacggcctgatcttggtgaggagtggtggacatatgtttgtatgggtccttctgatcctcaaccaaactggcaccttgggatgcgtggaacccagcaccgggcagtgatgtggcgagtgtggaaggaaggtgggacaggatttctttattggggttccaactgctatgagaaggctatgatcccaagtgctgagatctgtttccgacgcggccttcctcctggcgacggtgtcctgttttaccctggtgaagtgttttcttcgtcacatgaaccagttgcttccacccggctagagcgcattctcagtggcatgcaggacatcgaatacctgaagctttattcttcacggtatgggagggaggaaggcctggcccttatagagaagactggcatgtaccttggaccggatcgatatacgctggatcatggaccggtaaatgtgatgaggggtgaggtgtaccgcacctgcaggtcttagtgtagcaatgcctgccagatgctgtccttccagtctagggcgtctgttgtatttatatatggtggtgtgtgatctatgtagcgaattaatctacccttggtgatcgatcagatcatcaaacctggactaaactagtcctggtgcatcttttgaatctggctcgagagttgcatcc

SEQ ID NO: 278930 - DNA, 691 bp, Zea mays
acggcagtgttgtgaatgaacattcaggtgtactccagtgttcattctgtaagtgtgcgtgcgggggtgtatgtgcgcgtggctttcatctgcacttgaccatcgcagacgacagtgcggatgtcttggcttggtgcgttgggcaaacggctgtcgagttccttcagatatctcctgacgaatacctggagctccccgaggatgaacggcctatgtatctctacactctccagaacgaaagctttgtggtggctattgcgaataccaggaagcgagtcgatggatgtgctgtgggtgatgaagccgtcccagcttgggagatcacgagagcccagaaatgcgaatgagttcgtatagcgctcgagaaagaaatgctgatgctgaaaagttactgtaacacgtgtttcaacctccgtttttcatcaaccaattcgtcgttcagcaatgcagccatatgcatgagttgtccattgactccaaatgatgcttaagcacgatggttaggatgggttcttcgttgacaaagtccgagagtaagacgtcgacgaaggcatagcgtttaactttaagatgggttcactactgaaaaatttcggttgttcttcattcatgttgacaataggttatttgcttggcaacgtagccagccgacttcagatttatctgaaactgtgccttttacatctaggga

SEQ ID NO: 278931 - DNA, 535 bp, Zea mays
cccgacccaggcggcggtagcgctggcggctacctgttcaacgtgtcgcagcaggcggcgcacatgcaggcggcgtttggcggccagagccagttcttcttccagaggggaccccttcagtccagtaaccagccctccgagcgaggatggccggagagcgtcgaagccgacaacccgatgcagcacggcgggctcagccccgctgtgtcggccatcgggttctcgcccggcgtcggcttctccgggatccgcatccccaccaggatgcagggcgacgaggagcacaacggcggcggcaatggcgacaagccgccgccgccgtccgtgtcctcggcttctcaccactgacgacggcagagcagtggagcgcagattactccgcgcgcccaccatgccaccatccaccatcacgagcatgtcagcagcataccatgcatgaattcagcaaacacatatcaccgtcagctagctcctcaacatgcaccgccgtagttactttgctgctgcttcctacgacaacggattgctgcagcaa

SEQ ID NO: 278932 - DNA, 642 bp, Zea mays
ctgcgtggccctgctggtctcgctgtgccggcacggtggggacaaggtggtggccctgggggggaggatgccggggctgatgtcgtcgctgtacacgctggtggccgacggcagcccgcagacgtgcaagcgggccagggcgctgctcaacctgatccaccgccattacgagatggacggccagcagccggcgtcggaggtgcccggcgagcgtgtcgttcgcgtgctatagccgcagattccggacctgccgtaagtacagtaaataggtgtagatctttacggtgtgccatttgagaccatttcttgttttctgttctcagctcgtgttttagaagagctgagaacgatttttgctgcttccgttttgaagactgctgtagtcacagacacacacacagacgcgagagtatagataaatatgtttgcgagcttgagacttatagcacataatgaaagtgtgacagcctgggattactgtttgcaacgctttcgtgtgtacataccagtgaaatgttttggtttgtgttagtaatgaggggatttgagttaaaaataaaacaacagctcaccgcccggccatgcttggttcgttttcaaaaaaaccaaaaaaaaaaaaaaaaaaaaaaaaaaaaccaaaga

SEQ ID NO: 278933 - DNA, 497 bp, Zea mays
ccagggcctggaggtgaaggtgcccagcctcttccggtgccccatctcgctggacgtgatgcgctcgcccgtgagcctctgcaccggcgtcacctacgagcgcgcctccatccagcgctggctcgactccggaaacaccacgtgcccggccaccatgctctcgctcccctccaccgacctcgtccccaacctcaccctgcgccgcctcatcgcgctctgggcgtccacggccgcgccctcctctccctcctcctcctcatcgcccgccgtcggccccacgccggccgccgcggcggccgagctcctccgccgggtcgctgaccccgccgcggacccctgccccccgctccggaagctcgcggctttcctctccgacgacgacgtggacgagttcgacaagaacgcgctggctcgggccggcgggccgccgagaccgtggcggtccggtgctgcggcgagcgggcagggacccgcggagcccgccggccggtgctcgc

SEQ ID NO: 278934 - DNA, 926 bp, Zea mays
atttgatcctggagactgtaatattttgattacgtcgggcagtgatcggagtctgacactctatgacttgcgtatgtcatctccagctagaaagctaataatgaagacaaggtgcaattcagtatgctggaaccctagagagcctatgaacttcactgctgcaaatgaagacacaaactgttactcctttgatgctagaaaattagatgaagcaaaaattggtctacaaaggccatgtttcagcagtgatggatattgactactcaccaacagggcgtgaatttgtcactggttcatatgatagaacagtaaggatttttaattatcttggagaccacagcagagagatttaccacaccaagaggatgcaaagggtgttttgtgtgaagtacacctatgatgggacctatttagtctctggcagtgatgatacaaatcttcgtctgtggaagtccaaagcttcagaacaacttggagttcttcttccacgggagcgcaaaaagcaagagtaccaggatgctttgaaggagcggtacaagcatctcccagaagtcaagcggattgtaaggcatagacatctaccgaagccaatctacaaggcagccaacctacggcgtacgatgatcgaagctgaaagccgtaaagaggaaaggaggcgaaagcacagcgctcccgggagcatgcctgtgcagcccttcaggaagcggagaatcatcagagaagttgagtagacatgcggtttgcattgcatggtcgtggtgtttgtgtttctgaggcgacacatgatgtttcctttgggagttgagctccagttttgcccttcgtactacatatatgtgctgcatcaatcactttgtttgactagttattattgtgtatttgaaataccacacaaaataaaaaaaaaaaaaaaaaaaaaaaaagaa

SEQ ID NO: 278935 - DNA, 394 bp, Zea mays
gctccaattacccgcgccgcatccaccacctcgcttcgtcgctgccgtccgtggcggcgcgcccggccaggatcggctgctcgcaggggttcaccgcgctgtacgcgggtggggccaaccccaacctgctcgtcggtgccgtcgtcgggggacccgacatgcaggacaggttccccgacgagcggaacgaccacgagcactcggagccggccacctacatcaacgcgccgctcgtcggcgccctcgcctacctcgcgcactcctacggccagctctaagctccctagcgttaattgttgccgtgttgattgattgttcggaaattagagcatcgcgatttgacgaccccagtgcaagcaaaaccaaggacgcttcgcttgtgggtcttaatata

SEQ ID NO: 278936 - DNA, 586 bp, Zea mays
ggcgaattcagctcggaccaggcgatcctgtagagtcgacctgtaggcatgcaggcgtgtgtgaagatctttgtctaatatctggggagggcatcgatgtcaattttgcttatcagctgcatcatactcctgatgagagcgtgggcatagaaaaccatcgtgatagaatactgagaatggtcaagagcctctctcctaaggtggtaactcttgtagagcaggaggcaaacacaaacacagcacctttctttcttagatacatggagactcttgattattacacagcgatgtttgaggcaatagatgttgcttgccccagggatgataagaagcgcattagcacagagcaacactgtgttgcaagggatatcgtcaatttaattgcttgtgaaggtgcggaaaggatagagaggcatgagccttttggaaagtggagggcaagacttgtaatggctggttttagaccagacccgttaagtccagtggtgaacagaaccatcaaaacactgcttgacagttaccacagccattacaggcttgaggagagagatggcatcctttatcttggctgaagaacagaaagctg

SEQ ID NO: 278937 - DNA, 467 bp, Zea mays
gctcgccaacactccgatacgcagggatgcataggcgtcggcaggaggagctcatgtcgaacaccaatagcgttagccaccaccagtagccacagcagtcatggggtcggtgccgccggcagagggggacaggcgccagccccagcagcagccacacgtggtgatgatcccgtacccggcgcaggggccagggccatgtcacgccgatgctgcagctggccaagctactccacacacgcggattccacgtcaccttcgtcaacaacgagttcaaccaccgtcgccacctgcgcgcgcgggggccgggcgcgctccacggcgccccggggttccgcttcaccgccattgacgacggccttcccccctccgacgccgacgccacccaggacgtccccaagctctgctactccaccatgaccacctgcctaccccggttcagggacctaattgtcaggaccaatgccgat

SEQ ID NO: 278938 - DNA, 455 bp, Zea mays
gcgcgttggatgctttcgagtggctcgcccggagcagcgccccggcttcacgcgccgtcgccgtcgtcctcggcgtcctcggtcgcgcgcgccaggattcgatcgcagaggaggtcttcgtccgattcgccggagagggcgccactgttcaggtgttcaacgccatgatgggcgtttatgcgcgctctggccgattcgatgacgcacggcagctgcttgacacaatgcacgaccgggggatcgatcctgacctcgtcagcttcaatactctaatcaatgccaggtccaagtctgggtgtttggctgctggcgtcgcccttgacctgctatttgaagttcgacaatctgggctaaggccagatgttatcacttacaacacgctcatcagtgcttgctcacagagttctaatctcgaagatgctgtgacagtgtttgaggagatgatagcttcggag

SEQ ID NO: 278939 - DNA, 783 bp, Zea mays
aagaaaagaagaagatcgcgagaagtgttaagtgcctcagccgctgcattggtagcaccacaatggaaggtattcaccagtgaagaacttaggtcgatcacaaagaacttcagcgagggtaaccggcttcccggcaatgcaaagacaggcggaacctatagtggaatcttaccggatggatccaaggtagcaatcaagagacttaagaggtcgagtctgcaaaggaaaaaggacttctactctgagatccggagagttgcaaagctatatcaccctaatttggttgctgtaaaaggatgttgctatgatcatggtgaccggtttattgtctatgagtttgtagcgaatggtcctttggatgtgtggctgcatcatattcccagaggagggcggagcttgattgggcaatgagaatgagagctgccacaactcttgctcagggaattgcgttcttgcacgacaaggtaaagccgcagtggtgcaccgtgacatccgtgcaagcaacgtcctactcgacgaggaattcgggtcgcatctgatgggggtggggctttcgaagttcgtgccgtgggaggtgatgcacgagagaaccgtcaaggccgcgtcctacggctacctcgcccccgagttcatatacaggaacgagctgacgacgaagagcgacgtgtacagcttcggcgtgctcctcctggaaatcatcagcgggcgccgccccgcgcagtcggtcgagtccgtcgggtggcagaccatcttcgaatgggccactccgctggtgcagtccca

SEQ ID NO: 278940 - DNA, 607 bp, Zea mays
cattggcgggcgcggcggtccctgctccaaccactcgctcctcagcccttatccgccatacctgctctccggttgctgctctactcctttatttaagggacactcgtcgggaggagcactaggcaggcaggacactcctcctcctcctcacctcctcctagtcccatctgctgctccacctttctggtccggaggcgcctcgtcccgctcctccgccgccaccggatggcgctgctcacggcgccggcggtggccgcgctgctgctgctcttctggtccgcggcgtacggcggtgacgcccaggaccagggcgtgccgccgccgtaccaggacgccagcaaggacgtggaggtccgcgtcagggacctgctcgcgcggatgacgctggccgagaaggtcggccagatgacgcagatagagcggatcgtcgcgtcgccgcaggcgctcagggactactacatcggcagcctgctcagcggcggcggcagcgtgccgcggaagcaggcgacggcggcggagtgggtcaccatggtcagcgactttcagaaggcgtgcctgtccacgcgcctcggcatcccgatgatctacggcatcgacgcccgtcacg

SEQ ID NO: 278941 - DNA, 475 bp, Zea mays
gatccctgcatctctgcgtccccggctctcgccgtcgccgccgttgaccggccatgggcggcgagctcgccggccgcatcaggtcaggcgtcctcgagcccctggaggagcgcttcacggaggctctgacatggtcgctgcaatgctacgacgcgcaggtccggaggcgcctcgtcccgctcctccgccgccaccggatggcgctgctcacggcgccggcggtggccgcgctgctgctgctcttctggtccgcggcgtacggcggtgacgcccagggccagggcgtgccgccgccgtaccaggacgccagcaaggacgtggaggtccgcgtcagggacctgctcgcgcggatgacgctggccgagaaggtcggccagatgacgcagatagagcggatcgtcgcgtcgccgcaggcgctcagggactactacatcggcagcctgctcagcggcggcggcagcgtgccgcggaagca

SEQ ID NO: 278942 - DNA, 553 bp, Zea mays
ctcgagtcttaaaataaaatgtggctgtagtagccggttcacggcccctttctgccatgtccatcccccctataaatgcattcttttcagcctagtggaagcggaagcccaccatttggtttggttgtttgtttggtggacgccttgcttttcacttcaccggaaaccaaaatggcagccagcaggatccctccttgccatcttcacccttcttcttcttcctcctcctcctcctccatggccacgatctgcccaaggccaggcacaaggcagtcgtcggccttcaggttcagggcctctgctcatgggagcggttcctcaccacacctctcctccttcactgctgtgacaggcaagaaggttaaggtgttcgaggaccagctgagagggatcgtgtgctacagagacgaggacggggagatggtctgcgaggggtacgacgaaggccccaggctcggaatgcggctgccggagaaggcctccttcccatggcctgtgggggttcggatcacggacttcatccagctggcgacgctccaggtcttcgacgacg

SEQ ID NO: 278943 - DNA, 618 bp, Zea mays
  unsure (1)..(618): unsure at all n locations
gcatggaattaggagcagaccggagacttgggggcttcacctgctgtatctcattaccatctgcatctggttgcccgttgattgacaaggaggagctgagggccatggcgaccgagaagcccatcctgtacaacgcctggatcagctcctgctcccaccgtgttcgcatcgcactcaacctcaaaggtgtggattacgagtacaagtcggtaaaccctaggacagatccagattatgaaaaaatcaatccaatcaaatatattccagcattagtagatggggacatagtcgtttctgattctcttgccatctcattgtatttggaagataagtatcctgagcatccactcctgcctaaagatctcaagaggaaagctcttaatcttcagattgcaaacattgtttgttcaagcattcaacctcttcaaggctatgctgttattggtctgcacgagggtaggatgagcccagatgagggccttcatattgttcanagttatattgacaagggattcagagcaatgcaatttcgggggaaattaagctacttgttgaagattgagcactataatgcaccttcaatcccanacaagcanaaatgtcattatgtcgggttca

SEQ ID NO: 278944 - DNA, 972 bp, Zea mays
ctcgctggccctcctcctcgccaccctcgtgtccatcctggtgctgggcgcagcggcggtcttcttcgagcacatccgcaagatcggatgcatgcactcgctggagaggtccgccgtctcggacgccttcttcgaggaccccaactcattcaagaaggtgccctgcccgtcggttttggatcctcctgagaaatatatttcgttgatagttcctgcctacaatgaggagtatcgactccccgaggctcttacagaaacactcaactacttgaagcggagatcaactgctgacaagtccttttcatatgaggtattgattgtcgatgatggtagcactgatgggacctctaaagtcgctttcagttttgtaaagcaacacaagattgataatgttagagttcttctacttggaagaaatcatgggaaaggtgaagcagtccgaaaaggaatgcttcattcacgtggtgaactattactcatgcttgatgctgatggtgcaactaaagtgaccgatttggaaaagcttgaagctcagattcatgcattggctaagaaagctaagtctagcccagggacatctactagttcatctcagaatctatctgatgttgaagttgctgtttttggttcccgagctcatctagagaagcaggctcttgcgacaaggaaatggtatacaaactttcttatgaaaggtttccatttggtagttttgttgactgctggtcccgggatcaaagatacacaggtattctgtttcaaccatacatgttcttctaataaacaagtgccattgacgcttcatgtgttcattttaataacaatgttcatagtctcatttgttgttaccaattccagtgtgggtttaagatgttcacacgagcagctgcaaggaagcttttcacaaatatcagattgaagaggtggtgtttcgatgttgaacttgtatacctgtgcaagcgcctcaggatc

SEQ ID NO: 278945 - DNA, 385 bp, Zea mays
  unsure (1)..(385): unsure at all n locations
cagcctaccgatgtgttcagcatgagggagagtttgtcctaacgttccctcgggcatgggatgctggtttcaactgtggcttcaattgtgcagaagctgttaatgtggcaccaattgattggttaccaattggacaggatgcagtcgagctttatcgtaagcaagctcggaaaattactgtttcccatgataagctgttgctaggggctgctagagaagcaataagagctcattgggatattctgttccttaagagaaatactgctgataacttgaggtggaaaagcatgtgtggacttgacagcactatatgcaaatcgcttaaggcaagaatcgatttggagttggcgcanagacagaatatatgctctccatcttaatctag

SEQ ID NO: 278946 - DNA, 771 bp, Zea mays
actgaagagaacatttctaagtactgtgaccaattacggcaagatttaattccaatgaccagaaatatatatgttgcactcattgttgcatacgcaagacttggtaattttgatatggccaagcaggttctactcgataaagaaataccatgtaagttcctcagtgacatcaagagcgcacttgtaggagcgctggcattaaatgggcaagtgtcggatgcacttcgcttgcatgatgagataatgcaatccggcggctccctggaaccaaaagctgccattgccttgattgagcatattcgaacagaaggtgaactggatataatgcatcaacttctcgatgggctgaatgactcaaacagctggtttgatggctgtggcagagtacttttatactgtgtccagcacaactatcctgatgctgcaattgatctacttaagcagatcaaggagaaagatgaaatgagtacatatatggttgttgatcaggttttttgccaaatatgggacatggagaccacaaatttggattttggaatggtgtttcttgatgctgtcaaagagcttggacttaatgtttctcggacaagccttgactttcttctcagcgcatgtgtaaaagcaaaggatttgcgacgtgcccaacagatctggacagaatacgaatctgctggtcttccacacaacgtgctgagttccttgaggatgtatcaagcttttcgttcatctgcggggacgtaaggcggctaagaagttgttgaaaaagataca

SEQ ID NO: 278947 - DNA, 445 bp, Zea mays
tgttgccatttttgttccctcacccagtccgtctcaccacttcaaaaaccctctcctctctcatccgccttcctggcgattgcggcgacgaggtgacgatagagctgcccccgcaaggaaaacggacaagagaggcggaggctgatagggagaggagacggaggaccaagagcggcgtcgatctaaaagcgttggcggcggccatggccaccgcggaccggacccggactttcatgaaggacgtcaaacgcgtcatcatcaaggtgggcactgcagtcgtcacgaggggtgatgatgggcgactggctgtgggccggttggggtgtctttgtgagcaggtaaaagagctgaatgtcttaggatacgaggtgatccttgtgacctcaggtgctgttggtgtggggaaccagaggctcaagtacaggaagcttgtcaatagcaactt

SEQ ID NO: 278948 - DNA, 402 bp, Zea mays
ccagtaccccatcacaaagatcaatcagcgggtcttcaatatttacattaacaaccagactgcagtcaagggtgctgatgtgaatgcctgggcggccgtaagtggtgctaccacccttattggcactccggtgtatcaggactatgtagtgagcacatcgggtttaggggccatggatttatgggtagctctccatcccaatcccgactcgaagccacaaatatatgatgctatcctcaatgggatggaggtgttcaagctacagcttaccaatggcagccttgcagggctgaatcctgtcccaagtgttgccctggtgcctgatgggacaactaagaagaagtcaagtgttgggcctattgtcggtggagtggttggaggcttggtggttcttgcacttgg

SEQ ID NO: 278949 - DNA, 822 bp, Zea mays
ctcggtctcggatagacagcgacggataggagagcggcgggcggagagaagtggaggaagaggacgaggatggccacctatttcacgctcaacaccggggctcgcatcccctcggtagggctcggcacctacaaggccggacccggcgtcgtcgccgacgcgatcaccgccgccgtcaaggccgggtaccggcacatcgactgcgcgccgctatacaagaacgagaaggagatcggcgttgctctgaacaagctctttgatgacggcgtcgtcaagcgagaagaccttttcatcacctcaaagaggtgcagcgatctcgcacctgaagacgtgccgttggcgatcgaacatcaccctgaatgatctgcagctggatcatcttgacctgtacctgatacactggcccttccagataaagagaggcagcgagctcagtccagagaacttcgtccacctcgacatgcccaagtcctggcaggcaatggagaggctgtacggctcaggcaaggctcgcgcggtaggcgtcagcaatttctcgaccaggaagctggccgatctgcttgccgtagcccgtgtccctccagccgttgatcaggtggagtgtcaccccggctggcagcaggcgaggctcagagcgttctgctgctccagcggggttcatttctctgcgtacgcgccgctaggcaggatgaaagccgtcgccagtgacccggtggtcgcatccgtagccgagagcttggggaaaactccggcacaggttgctctgcgatggggtatccagcagggccagagcgtgctttccaaaagcgccaatgagtcgag

SEQ ID NO: 278950 - DNA, 438 bp, Zea mays
aggccatctgggagctgttggttctgttgccttctcaaagaaaacaaataacttttttgtgggtggcagcagtgatcgaaccatcaaggtatggacctgggacgatgcacttggtgatgctgaggatgaagtccctcttaaagcaaaggctgttgtagctgcacatgataaagatattaattctctggcaatttcacctaatgatggccttgtttgcagtggttctgaggaccgaactgcttgcatatggaagctccctaacctagtgttatctgttgtccttaagggacacaaaagaggaatctggtcaggtgagttttcttctgttgaacaatgtgtaatgacgtcctctggtgatagaacaatcaaaatatggtccgttgctgatggctcatgcttgaagacatttgaaggtcatacatcaagtgttctgcgagc

SEQ ID NO: 278951 - DNA, 420 bp, Zea mays
cggacgcgtgggcggacgcgtggggctggaagaaacagctggtgatagcaaaagatgctcgacgattggatgtattgtgtcatcggatttatctcagtcataggatccttgtctccacagagaagtacttggtattgcatgatattgttgatacggcattgaagaaactggaggctgaggtcggtcctttatctggagctccaaatatgggtcgtggaattgtcagtcgacttactgttggtgccgaagttcagaaactttgtgctcaagcagtagatgctgtggaatcattgttctcgggtgtatctcctgctagttcaaaaattcagcggccatgcatgatgcgaccaaactttgtaaagtttgaagctataacccaaacatccgtcatggtattttggatttgttgattgcctatgc

SEQ ID NO: 278952 - DNA, 706 bp, Zea mays
taccgattcggaattaccttccacgacccacgcataacatgactactaacacatgacggtcattatatgcatagctacccgcctttaggaatgagccggctattaacagacacggccctttaagaggtccaacatttacaaataattgtataaaaacaactcatatacttcttatattaagctccatacataccaacattatataaaatgtacttttccatgccgtctacaactttgtagttgggaagttattcgtcgaaaactctttagcttagcatatatatatatatatatatatatatatatatgctaaaataatgtcattttaagttctcagacgatatgtacaatcaacctcaaatattgacatggactacagcaaagctctgttctcaaatatagcccataaaattatagctgaaagttgttaatttagacttgtttagagtccaaaatgtgttttacgtttctagggtttgaagttttcaaagaacgtacattgaatgttcacatcatatggttaataccgaagttgtggcgtggctaacctgatctacgagcatgttattcataacttcttgtgaagttgtttagaggctcaaatattagctttaaactcatatatgaggcctagctaaatttttgtttttggttttttttgaaaaaaatcaaacattctctaatgggagatacgtcctacaccaaa

SEQ ID NO: 278953 - DNA, 356 bp, Zea mays
cagaggatattgcaactcctgagaagccactggaggaaggtgtgggaagtgtggaaccatcagaagacaattctgttcttgataaaccattggaggaagaagaggttgatgccaaaccggtgaaggacgttgtaactcccgagaagccattggaggaaggctcaacaactgcagagccattagaagacaatgctgcccatgaggaagcaaaagaagaagatgaggtgattgccaagcccctgtccagtgtggcacttgagaagtcactccagggaagtgaggcaagtgtagagccatcggaagacaatgctgctcttgagaaaccatcggagggcaacgaggcaaatgccaagtca

SEQ ID NO: 278954 - DNA, 319 bp, Zea mays
cccgccctggctcgacggctcgctcccaggtgacttcggtttcgacccgctggggctggggggggacccggcttcgtggatctgatggcggcttcttggatctcaccgcgcagctgagaggtgagccacccaccacgcagccgagaggaaccaaaggtgagccacccaccgcgccgccgagaggaaccaaaccaaactcaaagggctacgatttcgtggatctgatggcggcttcttggatctgaccgcgcagccgagatgagcgacccgacgaaccagaccacatcagtgctcgtggatctgatggcgcgtctgccgc

SEQ ID NO: 278955 - DNA, 481 bp, Zea mays
  unsure (1)..(481): unsure at all n locations
ctttgatttgccattagatttgccacctactcattcatatgctgatgcaaataacgtctgagcaaaatactggagatgtttttgttcacatgtcagacttgcttacaacaatatggccgtcaccctctcagtatttggggccaaaatgtgcactttgggactgtggtaggccagctggagggacagaagactctggagattactgcaacccttaccatgctggtttggctttgaatgatgatggtcttcttgggataagacctgtgatgcgtccaagaggtattgatttgaaagatgggccactgtttgctgctctcattgcaaaagttcaaggaaagaacgttggtattcctgtgtgtggaggcgctgctacgtctaaatccccatggaatgcacctgaacttttcgatctttctcttttgnagggtgaatctcttagagatgggtgttctttgatacttcaaagagagcatttgagagt

SEQ ID NO: 278956 - DNA, 485 bp, Zea mays
cggacgcgtgggcggtcgcgtggggtttgctggctgctgaggctcgttcgaggcggtggaggacaggcaggcaggcagctctccgttcggcttggcttggcttggacggctgccgcgtcgcgcacctgcgggcgggcagtggccagtggctgggcggtccggggccggggcagccaggggcgtcgtcgcgctcgtagccactgaggtcggcggcggtggcaccgtggcagtgcggtgccgagaaaccgtcccaccaaggaggctggggcaccgaacagcgaacaacggaagaagagcagctgaacaggcaggggagaggttccagctatgctcaccgcgcagccgccacctgaggtagcgggtgaggatgacagcagtttccaccatgtcttcgtggagtttatgaccaaagccgctcagttcgaggagctcgctgaatctggggagcgattgcttgggagattccgtgaggagcttgagtattt

SEQ ID NO: 278957 - DNA, 418 bp, Zea mays
gtccagggtccacgcacgcgtccggacttcggccccccttctcgagcccttcgcccaattccccaatcggaccaaaccctaggagccacatagatttcgattcgatcggaaatctggcatggcaatgtcagatctcacagccaccgtgatcccgaagccagacggggccgacgacgagtcggtggagatccgggaggtgtgggcggacaacctggaggaggagttcgcgctgatccgcgacatcgtcgacgagtacccgttcgtcgcgatggacacggagttcccgggcatcgtctgccgccccgtaggcgccttccgctcccccgccgactacaactacgccaccctcaaggccaacgtcgacatgctgcacctcatccagctcggccttaccttcttcgggccgcgcggcgagcta

SEQ ID NO: 278958 - DNA, 416 bp, Zea mays
atcgttcctgatcatgttactgttggagcactgatgaaaacatgtattttggcgggccaggctgatggagctcgtgaggtgtacaaaatgcttcaggagtataatataaagggtaccccagaagtttacacaatcgcattaagaagctgtagcttgactggtgatttagggtttgcactgaagatatatgaagatatgaacaggattggagtaaaacctgatgagatgtttttgagtgctctagttgatgtagctggccatgctaggagggcagatgctgcctttgaaataatgaaagatgcaagagcaaaaggtttactcgttggaacaattgcatacagttcgttaatgggggcttgctgtaatgcggacgactggaagaagcactgcagctatacgaggagatcaagtctatc

SEQ ID NO: 278959 - DNA, 718 bp, Zea mays
tgaacttgatgggtgtctcaggagcgaagggaaaaggagtcaaaagacaaggcggcggcgggggagaattcagaagccccggagagtgagaagaaggagagctcagaaaccaaagaagctccgaagagcacgcagagtccagaaggcggcggcaaaggcgacaagggtccagacagcaaggcggatggctcagaggcgaaggctgagggcgagaaggaagcggcctttattgaccttaggccactgacgatggaagacctgaggcaggcaaagaaccaggttgcagcgagcttcgccgccgagggtgccgtgatgaacgagctcaggcagtggaacgaccctgtacggcgaaggggggtccaggaagaaacagcagctgacctacttcttgtagaggtgaagcatttgccgtgatgaacagagcatggtttcttcaagacgtgacgtgggcatagacgcatagtactagtctttgaggttccaggatccatgagatgagatgaggtcgatggtcaatttgtaggatcatgaactattattcttttacatgcatttgtacatgagcgctagactggttatgtatatctggattgattgaacagctcttgtgtttgagggtcattttagcttctcgtagactgctgtaattatatcatatatagtgagtatatatattcatagcgcaaaaaaagcaaaaaaataaaaaaggggcgccccc

SEQ ID NO: 278960 - DNA, 432 bp, Zea mays
gcgagcaagaaggtgttgtcagtagcagtttataatcactataaaaggatctattagtgaatcactcatcaacaggtctgctgcggattgcagtcagagtgattcttgcacgagtgacaccgacatggtagagcttgagaaaagcaatattcttgtcatgggaccaacgggctcggtcagggaaagcattgctggcaaaaacactggcaagatttgtgaacgtgcccttcgttatagctgatgcgacaagcctcactcagtgtaccagacgatatttcgttcctgctacaatttttttatatagaacgcgcaggagaactgcgcatcttatacattagagaggaaaagaaaccttacaaaagaggagatgttgctgagcaaatctcccaaagacccacataaacccgaaggctggatatgttggtgaggatg

SEQ ID NO: 278961 - DNA, 387 bp, Zea mays
cttcgcctcgccaaactttaccctcggcctccgcccgcacttccaccaccgcaccgcacctcgcagatgccccagtaggctccaaaaatccaaagccatccctccccaggcctcccatccagcgccgggagatggcggccggcaccgtgacggcccgatccaacggcgagggccacggccacggcggcgcggggtcctggtacccgcagcgccgcccgcactacgggtacggcggggggtccgcctccttccgcggctgctgctgctgcctcttcctgctgctcaccttcctggcgctcctcgccctggccatcgcgctcgtcgtcgtgctcgtggtgaagccccgcaagccgcagttcgacctcgaccaggtgtccgtgcagtacc

SEQ ID NO: 278962 - DNA, 441 bp, Zea mays
gtgaggcggcgctcggcttctcagcgtgaggcttctccccagcagcgctcgtctacagcgcgaggcttccagcagtggcgctcggactcctgtctccaccgccggtgctcgctgtccaccgaatgcagtaggcctccgtcccttgcctccggttcacgccaccatcgcaaaagatccagtgaggacgccatctagacatgaaagaaggaatctttttcttttgcgctgatggaaaatatgcatttgatgcttggttatctacttctatcttccgtcctggtcgatgaagctctgtgcttttgcgtaccttgcaacattgtataggacatgttcgcctgtcctcaacggttatgcttgtcttgtgttgctggagcatcttgttgatctccatggaccttggatctttggttgtaccctaggtcccgtgtaacatatggatag

SEQ ID NO: 278963 - DNA, 392 bp, Zea mays
gacattcatcatgggagcgctgatcgatatataggcccccagatggacggggctctcgggcgcactgggggcgcttgtaattatgacggtgctgtctactggactaggcaggattgttccgaatttgataccgtcgaagcacactaacagcgcgccgacagtcctctatgcattttttgggctacggctcctgtacatcgcttggaggtcagattccaaggcatcacagaagaaggaaatagacgaggtagaggaaaagctggaagcaggccaagggaagtcaacatttagacgtgttttctcgagattctgcactcctattttcctggagtcatttgtgttgaccttcttggcggagtggggcgaccgaagtcagatagctacaatagcgc

SEQ ID NO: 278964 - DNA, 776 bp, Zea mays
tttcactggcgcccagctcgtctcgaagggggcctgggccaagaaggtcctccatctgcgcctcctctacacccacatccccaactgcaccgtccagaggaccgagtggaggaacgctccggcggcgtctcagaaggggagcttcctgacgacgatcagcacgacactgagctcccctttcacgcagcgtgctgacacccaccaggcgaaacatgagccggcggtgcagctgaactcaggtgtctaccccgacggaccgccggtcccgctccggtccaggaagctcctcaagttcgtcgacatctcggaggtggtaaaagggccacacgacgtcccgggccactggctgggtgatcgcggcgaagcttgtgaaggagggagggcaagatcgggatccatgtgaagtttgcactgctgggctatgaagggcagtcgcagggtaacagtttcatgagctgaagtctctgtacataacaacggctggctctgatctttgtagatttcaggattttggaagaagcacatgattaggatttttaatactggattttttttgtgtgtggagtcgacaggaactgtgtggagggcagtcggaaaatagaccaatcacctctttgttaggaatgcctgtggaattcccgtggcagtataattagagcacgtagttgtaaattgctcctttacaaggtgtgttttatttcagtaggaaacccctcagttaagaattactgtaccgatattttcatttatatttatatgatgcaaaattacgcccc

SEQ ID NO: 278965 - DNA, 506 bp, Zea mays
  unsure (1)..(506): unsure at all n locations
accacgaggagtacgtgcggactcgagatgcgtgcagctattcacctgcggctggctgcccgctgccgcatcgcccaaggcgctcgtcttcctctgccacggctacggcatggagtgcagtggcttcatgagagaatgcggcgtgcggctggcggcggccgggtacggcgtgttcgggatggactacgagggccacggcaagtcgatgggcgcgcgctgctacatccgcagtttccgccgcctcgtcgacgactgcggccatttcttcaagtccgtctgcgagcttgaggagtaccggggcaagagccgggtcctgtacggcgagtccatgggtggcgcggtggcgctgctgctgcacaccgaggaccccgccttctgggacggcgccgtcctcgtggcgcccatgtgcaagatatcggagaaggtgaagccgcaccctctggtgatcacgctcctgacgcangtggaggacgtgatccccaggtggaagatcgtgcccaccaagc

SEQ ID NO: 278966 - DNA, 799 bp, Zea mays
caggtatcaagatccattggcgatttttatctgaagaaaccggagtacagcttggaccccttgtttcggcaagttgggccccctattgcgttgaagaggccagctcttagtgccgaaccatcggttcaagtacgcaagctgaaaccaaacgacctgtttctgatatttgcttcagacggcctttgggagcacctcagcgatgacgcagcggtgcagattgtcttcaagaatccgagaactgggatcgccagcagactggtgaaggctgccttgaaggaggcagccaggaagagggaggtcaggtaccgtgacctgaggacgatcgacaggggggtgaggcggcatttccacgacgacatcagcgtcgtcgtggtctacctcgatggccaccgcgagcgccgccacaccagggtcgttgactcgagcagcaactgcaccagtgcgcccgtcgacatccactcctccaactcccgctagtttccggagccccttgcaacgcgagctgaactctgggtgggaggtgaggtgggtgcagccgtagccatcggaatcggaacaagtcgatatgtacataggtaggactgggtgcgtggcattttgatgccggagaagatcatttggtctcgaaactacttagcacaagtggttaatgactgcatttttcttgtttctttttgtctgaaaccagcagcaagcccgtccattggatcggacttatttttaaggtaagaaatagttgatgacgaactggaggttggttgcgtccgaccaaagaatatatgctctgctcagtgctcag

SEQ ID NO: 278967 - DNA, 366 bp, Zea mays
ccacgcacgcgttgatacatgactgcgggagcataatatgatacacatacacgaatggtacatgggctgaccacgtctaggaagccatttaagaagaaaggaagaccttcccaccccacctgataggagagctaagaacaagcttgccaggatcttcttggaattggacgtccaggatgagaagtggaggtagctggaccccaagcggtgtctacgagggggttacctttagatcagctgctcgtggcccgagcccaaagtgaagttcacaaattttggttacagtcaaggttgtctgcgtggccattagctcaatcaaagaatctactgatacgaaagtttcttaagatttgaagcaaataaaaa

SEQ ID NO: 278968 - DNA, 370 bp, Zea mays
gccaaagctgacggaccacggcttccacccgctgctcccgcaccacgcgcaccggctggcggcggccgggtgccccgagttcgcgcgccgcggcggcaggcggctgtcgtcccgcgccgacgtgtactgcctcgggttggtgctgctggagctggtgacggggaaggtgcccgtggaggaagacggcgacctggcggagtgggcgcgggtggcgctcagccacgagtggtccacggacatcctcgacgtggagatcctgggcgaccgggggcggcacggggacatgctccggctcacggaggtcgctctcctctgcgccgccgtcgagcccgacaggcggtccaagctgcaggacgtcatcatgatgatc

SEQ ID NO: 278969 - DNA, 438 bp, Zea mays
  unsure (1)..(438): unsure at all n locations
gaanggaaggnccgggccgagcgacgcgtccgatcacacctgagctgacacgtcggcataaacatacagcaagctaccatcaaatcggggatgggccacctccatgaatgccaagggctgacacgaatgccaaattaggccttgagcctcctatctcggcgaagtcctctctactgaatgctcgaagcagcacaccacataccgctcgacataaagttgttgcaagccatgtgcttctaaaagctagcactacctcctgattcattgcagggtgttccttccacagataataactcgtccacactttctctactgacaggagcaggaatcacacaattaggcatcagaagtctgaaatctgacatggccctagagaaagaatcagtacaagtgagtgggacaaagtgttccccggtaacaacatccagaatccttgac

SEQ ID NO: 278970 - DNA, 462 bp, Zea mays
cccacgcgtccgtgcaactattgctgctgtcggtgaaaataaaaatagtggtcctgagtcagttgtcatgagacctacaaagtcacaattgggtgatgaaaacatgaacagcgaacacaatggttttgttggtgttagaaaagatgcagtgcaaactggcattgtatcacacaatttagatggttcaattaggagggatgggaatactgaccaggcaggcaattcacatggcccacttgtgcagggaggcaaagatcacaaggcttcagatgcatctactgatcgtgagaaaggacgaccgtttcagcaggcatcactgcaaaatgcaggggcaccgggctcttatgtgcccccaggtgtggtaccacaacatccatctggaccagataaaatgcttcctcagcatattatgaatcctggtcataagcatggttcctctgaaaatatccgtcctccgttgca

SEQ ID NO: 278971 - DNA, 549 bp, Zea mays
  unsure (1)..(549): unsure at all n locations
ctacatagaaatgagaatgaaaaaaacaatgtagaagatggcagttctatggcaaataatacagtgcctttacctgagaggcgaagtatggaatcattagatactgctgagaaatggtccgagaaagtagcagaacttgacaatgtaaaggattccccaagtgcaatttccgatgaaaattttcctgagattatgccaataaggaaaggtgaaaatcgatttgttgttagtaagaaaaaagatcgctcattgacatcacagcagtacaaaaggcgcagtattctcgagcaggcagacagttctgattttgtcccatttgttccttttcctcctggctactttggcaagaaagatacgccaatagagagtactacagacacaggaattatgtcaggaggcagtcagccaaaaggtaacctgaataatgagaactggaacaggaattactatcaatatcaatcacaatctcaagaatttaggcctagtggtaatgcatatactggctctcggaacacaagcaactcttangggaacattaatgggagtagg

SEQ ID NO: 278972 - DNA, 1332 bp, Zea mays
cgccccgctccattctcccggccggaatctgaaccgaatgaagtctagtgcagtggtggtggtgatgcaatctcgccgttgccgtccgtagcaaccgcacgcttcctcgctcgccgcgaaccctagagagcaggtgtcggtgtcatggccttctggtggccgctgctggtgctcgccgccgcatacgcgctctgtcgcctgctcctcttcctcatcccgcccaccgtcccatccatcgacgtcgacgcctccgacgtgttggccaaggaggacagcttcatctacataccgagaaggggtcaatcaactcagactgacaaggtccaatgctatgaaccagcgaccatgaaatacttggggtacttcccagtggtgactcctgatgaggtcaaggaacatgttgcacaatccaggaaagctcaaaggatatgggcaaaaagcagcttcaagcaaaggcgccagtttcttcgaatcgttctcaagtatatacttgaacatcaggatctcatatgcgaggtatcatctcgggacactggaaagactatggttggggcgtcattaggagagataatgaccacctgtgagaagattacctggcttttggatgagggcgagaagtggctgaaacctgaatacagatctactgggagatcaatgctgcataagagagcaaaagttgagttttaccctcttggagtgattggtgcgattgtatcttggaattatcccttccataatgtttttaatccagtgctagcagcagtattctccggtaatgcagcagttataaaggtctcagaacatgcgacttggtcgggctgcttttattttcgtattatacaagcagctctttcagctgttggtgcacctgagaatctggtgcacataataactggttttgcggaaacaggccaagctcttgtatcatcagtagacaaaataatatttgtgggatcaccaggtgttggaaaaatgatcatgaaaagggcgtcggagactctaatacctgtaactctggagcttggtggcaaagattcatttattgtgtgtgaagatgtagatttacccagtgttgttcaagttgctactagagctgctctgcaatctagtgggcagaattgcgctggtgctgaaagattttatgttcacgatgacatctattctgcctttgtttcacagatagtgaagacagctaaatctataagtgttggccccccattatcaggcagatatgacatgggtgcaatctgtatgattgagcactctgagaaactccagaatcttgttaatgatgctctagacaaaggtgccgaaattgccgtcagggggagt

SEQ ID NO: 278973 - DNA, 885 bp, Zea mays
  unsure (1)..(885): unsure at all n locations
tccacgcgtccgggagggagtacacaacacacgatttgattttgcaccatcctcgacgctaaagtacccaggtcaggtagctgggtcgcacttcttcccaatccatcaatcgtgttctcgcgagccagaggccagagccatggagaagagccgggtgctggtggtgggcggcaccgggtacatcgggcggcggctcgtgcgggcgagcctggcgcaagggcacccgacgctggtcctgctgcggccggagatcggcctggacatcgacaagctccagatgttgctctccttcaaggcccagggcgcgcggctggtggaggcgtcgctggaggaccacgcgggcctcgtcgctgccgtggcgcaggccgacgtggtggtctcggccatgtccggggcccacatccgcagccacaatcactccctgcagcataagctcctcaaggctatcaaggaggctgggttcgtcaagtttgttaagggtttgtttggttagaaggggattgaagaaagcttcctttttaatccattttgttgattgagtcgcattcccgaatccatacttgaacatcaggatctcatatgcgaggtatcatctcgggacactggaaagactatggttgatgcttcattaggagagataatgaccacatgttagaagattacctagcaaaatgaagactggtacttaattattgttgtcacatgatgtttttactcgggagatctggaggttggcgaacgcccggngagaaactattcaaggaactattatttagtcaattcgtttcctttggagaaacttcagtgcacagttgagggatataacttagtttttcaagcctgttcatcttcagcagatgggttagttgggaaagaatcttatgc

SEQ ID NO: 278974 - DNA, 573 bp, Zea mays
cacgttttcccaatccatcaatcgtcctctcgcgagccagaggccagagccatggagaagagccgggtgctggtggtgggcggcaccgggtacatcgggcggcggctcgtgcgggcgagcctggcgcaagggcacccgacgctggtcctgctgcggccggagatcggcctggacatcgacaagctccagatgttgctctccttcaaggcccagggcgcgcggctggtggaggcgtcgctggaggaccacgcgggcctcgtcgccgccgtggcgcaggccgatgtggtggtctcggccatgtccggggcccacatccgcagccacaatctttccctgcagcataagctcgtcgaggctatcaaggaggctgggaacatcaagcgttttataccatcggaattcggcatggatccatccaagatggggcatgctcttgaaccaggaagggttacatttgatgaaaagatggacctaaggcgtgcaatagaagatgccaacattcctcacacctatgtttctgccaattgcctttgtgcttacttttgccccaacctatttaagatgctcaccctt

SEQ ID NO: 278975 - DNA, 277 bp, Zea mays
ggccggaatctgaaccgaatgaagtctagtgcagtggtggtggtggtagtgtagagagccctgcccttccgatccggtccggtccggctggattcctcactttagttttttttttcgcttcttctctgatcagatgcaatctcgccgttgccgtccgtagcaaccgcacgcttcctcgctcgccgcgaaccctagagagcaggtgtcggtgtcgcggctcgaccatggccttctggtggccgctgctggtgctcgccgccgcatacgcgctctgtcg

SEQ ID NO: 278976 - DNA, 891 bp, Zea mays
gtttcgtaacgccgccgccgccgaaagcgccggcctcggcccggcggagccctccctggcggccttggaggctgcggcccggcggacgtcggaggaggtgtggaaggagatctccgccgctggagggctccccgcgcccgtcctccctatccctcccgccgccagctccggcgccggggccagaggcggcggcggcgccgcggagatgacgctggaggatttccttgccagggattcctgcgccagggcggcggtgatggagggggacatggcgctggggttccctgacggcgacggagacgcggcagggagcgtggcggggggagcgggcggcgggaggggaggcgggaagcgggcgcttctggatcccgcggaccgcgccgtcatgcagcggcagaagcgcatgatcaagaaccgagagtccgcagcgaggtccagggacaggaaacaggcatacgtcgcggagctggaatcgcaggttatgcagctcgaggaggagcaggcggaactgttaacggagcaggaggaccgacgccaaaagagacttaaggagctaaccgaaagggcagttccagtcatcaggaaaaaatcaccacaagatcttagaagaaccaactccatggaatggtagaaatgaccctgagccctgatgttcttctcttagaagttacagggtttgtttttctttgacttctgtttcttctagttttctttgatagctatttaggaatagtggaacgtgcgtgatcaagaagtcacgccatttagaattgatctgttgtcagattgacggttttcttgtgaatgtggccgggtgttgtataaataagaacaataaggttagcttgaagagtggaccaaaatatcctaattacaggcatctattttgac

SEQ ID NO: 278977 - DNA, 440 bp, Zea mays
ggaggagggtgttgttctacagtacataatgaaaaatagtttccaattatggtagcatagcggttaaaggttcaacactgattagacatggtgattttctccatgtctgcactatcacgattttctcaaatctattgccatggttagttgagtactctgcaaattcaaacatgcaacagttgcttttttttgtcagtcgttaaagaagttaacctgtttgtgcagctagttgaaagggtagttccagtcatcaggaaaaaatcaccacaagatcttagaagaaacaactccatggaatggtaaaaatgacactgagccctgatgttcttctcttagaatttacagggtttctttttcttttaagatttctggtctcctagctttctttggcagctatttaaaataatggaaaacatttaagggaatgggcgtgataaaaa

SEQ ID NO: 278978 - DNA, 1120 bp, Zea mays
gtgtatagtagggttcccaccgggacacaggccgcctccatcccatggcgcgcgccgccgcctccaggctcgccgccgtggcgaactcttcctctacgcgcgagttgttcgcccgccacctcgccgccgctgccgcctcggcgtggaccgcaccgccgcgtctgcctgaaccagggagggagcggcggagcccgggctggtggtgtccgagcaggtcgtttcatgccacaaggcaggtgtatacaagggattactatgatgtgcttggagtaagcaaggatgcttctgcaccggatataaagaaggcatattatgcgctcgcaaagaagttccatcctgatactaataaagatgctgatgcagaaaaaacatttcaagaagttaaccgtgcctatgaggttttgaaggacaatgacaagcgtgaaatatatgatcagcttggaccagaagcatacgagcgtcaagcgtcaggtggtgaccctggagggccgggttttcctcggggtaacccatttggtgacatctttggtgatatctttgataatgcatacagaggtggccaagatgttaaggtttctgttgaactatcattcatggaagctgtccaaggttgcagaaaaaccattacgtacgaagctgatactttttgtggaacttgcaatggaagtggcgtcccccctggaactgtgcctaaaacatgtaaaacatgtcgaggctctggcgtgatatacatgcagaagggtatatttactgtcgaatgtacttgctccctgtgcaatgggagcgggaaaattgtcaagagtttttgcaagacttgcaaaggagaacaggtagtgaaggggaaaacgtcagtcaagctagacatagccgcaggaagtgacgataatgacatcatgaaggtttttggtaacggtggtgcagatgttgaccgaactaagcctggtgacctttatgttactatcaaggtcagagaggaccctacttttcgaagagaaggcatccatgtgcatgttgattctgttttaagcattgctcaggctgtcctaggtggaactgtcacggtaccaaccctcactggaaatgttacagtcaaggttcgtcaaggtacccagcctggaga

SEQ ID NO: 278979 - DNA, 439 bp, Zea mays
gcaggctatacgtcatgaagcttttacacacatggatggccagaagcaatgtgttcacattgatcagaatgacttgtttcccttccttcttgttaatgtcggatctggtgttagtataatcaaggttgatgggcatgggaaatttcagcgagtaagtgggacaaatgttggtggtggtacgtactggggattggggaggctaatgacgaagtgcaaaagttttgatgagttgctagagttgagccagcgtggagacaatagcaccatggacatgcttgtaggagacatatatggtggtctggactactccaagattggcctttcagcatctacaattgcctctagttttggaaaagataatttcagaaaacaaggagctatcagattatagacctgaagatatatcgctctctctgttacggatgatttcatataatat

SEQ ID NO: 278980 - DNA, 456 bp, Zea mays
ctggcagaagatggatctgttgacgagggtgtggcttattttgttgagtgggctatcttgattgtttcagccgttatgatcctccagagttctctggactatctctttgcatttacaactctagtattatgtggaatcatcaaagtgattgcaagaattgagggaaagtcaaaagttttacgctatatattcgggggactttctgatggtacctctcgtaattcatcccgttatggagattttgatgaagactattctagcatgaatgaagatcgccaagatggatttggcaatcttcatggtggataccagagacatgcaccgagaagaaactcacctcttgcaggctcagcaaagacattatcgcaaggtgttgctatggatagcttctattctacatttcacactaccccagagaggatggaattcacaaaagaggaatatgaagcattcacc

SEQ ID NO: 278981 - DNA, 539 bp, Zea mays
gaaattttgttgcaatctgagactaacgaaggcaaaaatggagccatacacttgctggcacttgatttgtcgtctctctcaggcggtgcgcctggacgaacaaggggccttaagataggctcagttaactccttttgacaagggcttatattggcgttttagatgacccaaagcattcttcaaaatgatacagcagaagcactgacttgaattttggatcaattcccatgagctgatatcttcaaaaacatcttagttaggaaaaagaaggaaacgaaaatggaatttgtttccatttgttatttgtttgggtgccacaaggaggcaaaatcatagcaaggaattgtaccttattttttagggatcgtgtacttttctgctgttgagagctatttggtggttggataatgtaatggagcctatctaaatgttctttcaaaggggtctgaaaaacattgagctcattgctggtttaaaaaaacccaaaaaaaaaaaaaaaaaaaaaaaaaaaaaaaaaaaaaaaaaaaaaaaaaaaagaa

SEQ ID NO: 278982 - DNA, 449 bp, Zea mays
  unsure (1)..(449): unsure at all n locations
cggacgcgtggggccatgaagaggaccagctcattccaaacttgtatcgtgacatccagccgtgggagagtgagtttattgattcacagcgtgtttgggctgagtatgctttgaagaggcaggaagcacaatcacagaacagacgattaactcttgaggatcttgaagattcatgggatagaggtatacctcgtatcaacactcttttccaaaaagaccgccatacactagcctatgacaaaggatggagagtgagaacggattttaagcaatatcaagtgctgaaacagaacccattctggtggacacatcagcggcatgatgggaagctttggaatctaaataactacagaactgatgtcattcaagcacttggtggtgtagaaggcatcctggagcatacattatttaaagggactttacttcctacttgngagggtctgttttgg

SEQ ID NO: 278983 - DNA, 398 bp, Zea mays
gggtgcctcggcgtcgtcggctacgggtctcttcaaccttggctacatcgcaaacagtgcaaacagctcaggtacttccagccatggccatgcaagccagggacacctgacaagtgatcagttcagcgaaggaggtggcggcggcggctctgagtcatcggccgcgatgcttttcagcggcggcgggaacttcgccggtggtgaccaccaagttgctcctggcgggatgtacaacaatgatccggccgtgatgctgccgcagatgtccgcgacggcgcttctgcagaaggcgtcccagatgggctccagcgcgagcgcgcacggcggcgtgtcgtccgtgtttggggggctcgtgggctcgtcggcgcccttcgctaagcacgcccgggcacccatgc

SEQ ID NO: 278984 - DNA, 505 bp, Zea mays
atcccatccgcgccctccttcggtcctctcccatccgctccgctcgcagcccctccccctggccccccgcgatgtcgtcgtcgtcaccgccgccgcggcccgacgacgacgacggtgcgcaggaggtgggcgccggcgatgggaggtcgctgggctacggcgaggcggagtactgggacgcgcggtacgtggaggagggcggcgcgccgtacgactggtatcaacgctacgacgcgctccgccccttcgtccgctgcttcgcgccgccggcgtcccggatcctcatggttggctgcggctccgcactcatgtcggaggatatggtcactgacggctatgtggagatagtgaacattgacatttcgtcggttgtgattgagatgatgagaaagaaatacttcgatgttccgcagctgcaatgtatcctttgactgtttttatcatttcccccaatctattgtccattgatacccttatgaactgcagacttgccatggatgttaga

SEQ ID NO: 278985 - DNA, 384 bp, Zea mays
ccggaagttacgacacaacagcaatgatgtgttcaaagagttcaacaacgctgcaggtgggacctgcaactgcatcaccgggctggccgcgtcggacccggccactttcctcgccaccgccaacgaatacttcgccgccgacaacgacttcaccaacaatcatccatcgtcgccggccgccgacctcttcacctttggtggcagcggcctcctcaccattggcacgctaggcatcgccgccgtcgcggggtctgcagatgctgatgaagttgattaccacgtcgacgccgatgctgactccgactttgacgacaacgacgacaccgccggtgatgacgaagaccaggtcgacagcgccgtcacgcccacgttcacatatgcagc

SEQ ID NO: 278986 - DNA, 498 bp, Zea mays
cacaagtcttactggagaaatccatcatataccgcaactaggatcttcttcacaacagttattgctctcatcttcggaactatcttcttaaacttgggaaagaaaattggcactaggcaggaccttttcaattctttggggtccatgtatgcagcagttcttttcattggaattcagaatggtcgaactgtgcagccaattgtggatgtcgagcgaacagttttctaccgagaaaaggcagctgggatgtactctgctctaccctatgcttttgcacaggttcttattgagatcccacacatcttccttcagacagttgtgtatggtctcattgtctacagcctgattggctttgattggacaggtgcaaagttcttctggtatatgttcttcatgttcttcaccttcatgtacttcacattttatggaatgatggcagtcgccatgacaccaaacagcgacattgcggctataagtctcactgcattctacgcaata

SEQ ID NO: 278987 - DNA, 311 bp, Zea mays
gaaagaaaacacgaagttaaatcaggaaagaagtaagtctgaattctttggtaaagaagatgaggctaatgacactgtccagaatgctctatgccacaagagtaataggtatcctccacgaccattattatctgactcatctaggcatcaaggcgaaagtgacttccagaagccatttgttggagggtttgcgatattgccagatgatgaagaaccatgtgagaaacgctatggtggcgctaatataaattgcagaactgtgcagcctactcataatactaataatttgctctgtccagttcacgatgatt

SEQ ID NO: 278988 - DNA, 691 bp, Zea mays
  unsure (1)..(691): unsure at all n locations
gcagcagtcacgtacagccaagcagccaggtaccagctgcctgagggttgggtagatgggcaagctgtgctgcagcaacgaggcggaggaggaggccgggttcaacctcctggggctgctggtcgccgccatcatcgcgctggtgttcatgctcctctgcgcgccgcccaggaggcgctgcgtcgccgtctacccgtgctgctgacccctcagtcagcgctcgcgcctcctcgctgtgccgctgccgctgcctggccctcctcgtgcgggacaggagcttctggatccaaccaacaggtttcggatcagcttcagcatgtgtgcaggggagcttcaagttcttggggggaggggagcagagcaggacaggcattggttcatcacatcatctttcgatccaccaataatttctactcaactgtaatatccatcctgctccaactcatgtaatccttttgttctggcgaaccagggcgttccttccttcgtctatagcctgaattcgtttcctttggtagcctgaaaaaaaaggtgttttggctgcattgcctgctactatctcttacgacctcccttctacttgcctgatcctaaaaacgttttcgtctgatctgaatagagtaagcaatgagccggatctgtcggttcacgctcacgccgattaatgtggttctcttgctatcttttnnaa

SEQ ID NO: 278989 - DNA, 1619 bp, Zea mays
cccactcgtccgcatcaatccaccgcccttctcccatctcttggctcttgcttgcgcactcgtccaaacggtaaaacagcaagcgctaactgatccaaaacatcaaaagcgccgcgcaggcagaagcagcaggtaaagaaccggaagcccaccaggagcgcattcccactcatcagccagcagagctcagatataagctcaccagcactaccccttcccatcctctcccaccccctcctccctccccctcgtccagtccactcccattgggcgagaagccgagaaggacagggagggagcgggagctagccaggccgtcccgtccagagccgctatgtccggcggcgcgcccctcctggccctgctgctgctggcggcggcggccatgatcgccccgtcgccggccaatgccgccgtgtcgtacgaccacagggccgtggtcatcaacgggcagcgccgcatcctcatctcggggtccatccactacccgcgcagcacgccggagatgtggccgggcctgctgcagaaggccaaggacggcgggctggacgtggtccagacgtacgtgttctggaacgggcacgagccggtgcgtgggcagtactacttcggcgaccgctacgacctcgtccgcttcgtcaagctcgccaagcaggccggcctctacgtccacctccgcatcgggccctacgtctgcgccgagtggaacttcggcggcttccccgtgtggctcaagtacgtccccggcatcagcttccgcaccgacaacggccccttcaaggcggcgatgcaggcgttcgtggagaagatcgtgtccatgatgaagtcggaggggctcttcgagtggcagggcgggcccatcatcctggcgcaggtggagaacgagtacgggcccatggagtccgtcatgggcgccggcgccaagccctacgccaactgggcagccaagatggccgtcgccaccggcgccggcgtgccctgggtcatgtgcaagcaggacgacgccccggaccccgtgatcaacacctgcaacggcttctactgcgactacttcagccccaactccaacagcaagccgaccatgtggaccgaggcctggacgggctggttcacggcgttcggtggcgcggtgccgcaccggccggtggaggacatggccttcgccgtggcgcgcttcatccagaagggcggctccttcgtcaattactacatgtaccatggaggcaccaacttcgaccgcacctccggcgggccgttcatcgccaccagctacgactacgacgcgccgatcgacgaatacggtctgctgaggcagccgaaatgggggcacctgagggacctgcacaaggccatcaagcaagccgagccggcgctggtctcaggcgacccgactatccagtccctcgggaactacgagaaggcgtacgtgttcaagtcgagcggcggcgcctgcgcggcgttcctgtccaactaccacaccagcgccgcggcgcgggtggtgttcaacgggcggcgctacgacctcccggcctggtccatcagcgtgctgcccgactgcaaggccgccgtgttcaacacggcgacggtgagcgagccgtcggcgccggcgcggatgagcc

SEQ ID NO: 278990 - DNA, 606 bp, Zea mays
ctcttcgtgcacatcgtcatggagctctgcgccggcggcgagctcttcgaccgcatcgtcgccaagggccactacagtgagcgcgcggctgcgaagctcatcaagaccattgtcggggtcgtggagggatgtcactcgctcggcgtcatgcaccgggacctcaagccggagaatattctctttgccagcaccgccgaggaagccccactcaaggccactgacttcgggctttccatgttctacaagcccggtgataaattctctgatgtcgttggaagtccatactatgttgcaccagaggtgcttcagaaatgctatggtccagaagctgatgtgtggagcgcaggagtaattctgtacattttgctttgtggtgtgcccccattctgggcagaaactgaggctggaatcttcaggcagattctgcgaggcaaacttgattttgaatctgaaccctggcccagtatttctgatagcgctaaggatctggtccgcaatatgcttactcgggatcctaaaaagagatttagtgctcatgaggttctctgccacccatggattgttgatgatgccgtggcgcctgataagcctattgattctgctgtt

SEQ ID NO: 278991 - DNA, 815 bp, Zea mays
gccattgggagaagaagctgagatcaaaggtactgcacggtgggggatcggtgagctcagacaggttgatggtgcctgagtatgtgtttgcactgtccgagaagcccgtgataacctttgcagggcattcagaggatgtgcttgatctcagctggtccaaatctcagtatttgctttcatcatcaatggataaaaccgtacggttgtggcacatgtcaagcacttattgtttgagaaccttctcacacactgactatgtgacttgcatccagttcaatcctgttgatgatagatacttcattagtggttccctggatgagaaggttcgcatttggagtattccaaagcgtgaggttgttgtttgggtcgacctgcgtgaaatggttactgctgcctgctatactccagatggaaagggcgctctggttgggtcccacaagggcagctgccatctgtatgatacatctgatgacatgctttgctacaaaacacagatcgacctacaaaacaagagaaggaaatctagccagaagaaaataacaggatttcagattcacggatcagagttcttgatggttttgagctagcgcataggtttaaaggattccgaaacacaagcagccaaatctcagcttgtttagctggaaatgggcggtatattatctcggcaagtgaggattccctggttcatatctggagaaacaatgatggtccgaaaccaagtagatagaagggctttgtttctgtcacagatagccatgaatacttccactgccagagtgtgacagttgctgttacctggccttttgccagca

SEQ ID NO: 278992 - DNA, 1313 bp, Zea mays
ctcaggaagtggctccaagaccatccccggttcgtgatgaatcctctttatattgctggagattcatacagtggtctcatcattcctactcttgcattagaaattgacagaagcatagaactcggtgaaaagatattttctggtctcaaggggtacattgctggcaacccgttgactggcggacagtttgatacagacagccaaattccatactttcatgccatgggacttgtatccgatgaactttacaagaatgctagggagaactgtggtggaaagtatagtgctccactgaatgctgtatgtgcagaggctgtccaagctatcaacaattgcacacgggatatcaataagcaatacatcttggatcctgcttgcccggatgatgatctgttgagccccaagactgtagcagagacagatggaacgagcaggttgatgctagagtctgcagattttctacttggttccaaatgtgcagaagctttatacattctatcctacgcttgggggaatgatgatacagttcaggagagcctcggtatccgcaaggggacaattggagcatggaaacgatacagccatgcattgccttacaattatgatatccagagtgtagtggattaccattcaaggctagccacaaaaggatacagggcgctgatatacagagcggcgaccacgatgctgttgtaccccatgttggcacacaagcatggattagatacctcaacttgacaatcgttgatgattggcgaccatggtacgttggaggccaagttgctggattcacaaggagttatccgaccggcctaacatttgccaccgtgaagggtgctggacatgttccccccttgtataagaccttggaatgccaaaaaatgtttataacatggatttcagggaatcctctttgatgcaagtctgatagaatgacccatcggttatctgagtgggcgtcagccgtcaggaatcctctttgaagggtcagttgcttgggtttctttggtgtcaactggttcaaatccttgatcgatatggttgatcgtaatatttttggaacttatttcaagatttaacggtattgttctcttaagacctgcctgttgattctgttcatataggtgaacgtgcatatgttgtatgctatatgcatacatggggacatggggtgtatgggtgcttgtgcgttcgtacaaaaaataaagtgccaatttggattacttgtttggtccccatgcaggtgtatatgcagttgcgtgtaaaaattctttgcataaaacaattatcacttgcttcctaaatcttcatct

SEQ ID NO: 278993 - DNA, 630 bp, Zea mays
  unsure (1)..(630): unsure at all n locations
gcactccaaactgtgaaagtgaggcattagctgttgctgcagccatggagaaaggaacaacccatcctattggaagggctgttttagcccgcgctgttggaaaggagcttccagttgtcgctgtagaaagttttgaatgcctacctggtaggggagttgttgctaccctgagtggtgtaaaggtaagggccaatgaaaatgagctatccgaggcatctatcggttctgtggattatatttcttcactatatacatccaatggtgaatcagagcaaataagagcagcagcaaaaagttctgcatatgggcctgaatttgttcaagctgctctatctgttgacaaaaaagttactcttttccactttgaggatgaaccccgctctggtgtttgtgaagttatatccaccttaagagagaaagctagacttcgcattatgatgctaactggagaccatgaatcaagtgcccagagagttgctanagctgtttgtattgaagaagtccacttctctttagagccagaggatagattagatagagtgaaagcagttcacggaangnnagtgaggttaataatgtcggtgatggatanatgatgcacagccttgcagcgcaacagtgaatggtcta

SEQ ID NO: 278994 - DNA, 554 bp, Zea mays
gctcaatgtgatgactcttgacgaaagggaacgaccagagcttcttgctgaatcacgcgagacaaggaaacgagtggccaaggactctggaaagactgaacagcaggtgagccaattggtcgcgcaactcttccaaatgcgtgcaaaaatgcagaaaatgatgggcgctatgcaaggaaaagagtcaccagacatggacgagctcatggcatcgatgaaagctgaggagcaggctgctgccggtactggacggcgtagaaggaagtatggcaacctgaggcagaggcaactggatgccatgcgtggtttccgcagacggtgagatgctcattgccggctagtactggcggtgcctgcacgaacgatggcatttagggacttgggctcggatatagaagtggaagaagatgaagtgcttttgggtgcaatggcaatcatctgggtacattgagttgagtttgcatattcatgtgcagtgtcctattttgtcatattagctgcattattatctttcttcggagcaagaactcgcaaaattgcgtcatctgaaccct

SEQ ID NO: 278995 - DNA, 376 bp, Zea mays
tcgctctctcgttcctctccatcttttccttcttctccgcctccgccacgccacctcccctcgcctcccgccgtgcgccccgatccctcgccgccccacgccggcctcatctcgccgtggactggatcgccggggggacatcctgggtgtccttcacacacatgcggcgttaggtgatgacgagcttgcctgagaggggagaagcacctgtgccgccactcgattctctgcgccaggactctgccgtgaccgtcctagcggctgccgccgttgcctcttcctccgctggctccgatcgctacgaagacagcggctccaggcaacccaaggccttcatcctttccgtcgtcttttatcaccctttttgcatattcta

SEQ ID NO: 278996 - DNA, 614 bp, Zea mays
gggacgccaagctctccggcaccctcgacgtcgtcgccaccatgaccggcctccaggagctctggctccacggcaacgacttctcgggcccggtccccgacgccatcgccagctgcaaggaactctacaccgtcaggctcaacaacaaccagctcctcggcctcctgccgcccggcctcgccgcgctccccgcgctccgggagctcaagctcgacaacaacaacctactgggccccgtcccggcgctcaaggcccccactttcaccttctccgggaacgagttctgcgccgccaaacccggggaagcctgcgccccggaggtcatggcgctgctgcacttcctcgccgaggtgcagtacccgaacaggctggtcgggacctggtccgggaacgacccctgcgcgggctggctcggcgtcacctgcgtccagggcaaggtcactatgctcaacctgccggggtacggcctcaacggcaccgtcagccagagcctcgccaacgtcaccacgctctccgaagtgaacctcgccgggaacaacctcaccggccgagtgccggacagcctcaccaggctggcctcgctccagaagctggacctgtccatgaacgacctg

SEQ ID NO: 278997 - DNA, 356 bp, Zea mays
gttcgtctgactttggctgggcggctagcgctgccggcggaaaaggcctgtcgggcgaaacggccgcccagaactcgtcgtcttgctccagcagcgtcatgtgctccgacgtcagcacaagctccgcggcgatgcttccggctccctcccggccggggtacagcgacgccttcccgtcggacttgttggccctgccgctgcgcgcgccaggggcggcccccagccgaagtcgcagccgccgtacatgtcgaaccgcggcgagctgcccatcatgatgccgttggggtcaaagaacctgaggttgtacaggacagggttggccattcacgcggtcacgcgcgcccggatggcgtcgt

SEQ ID NO: 278998 - DNA, 530 bp, Zea mays
cccatgcgtccgcggacgcgtgggatcgcgcccaggtccctcgctgggagtttcgccgagggccctcccgcctcccctagattcacgacggagatggcgtccgagctcacctaccgcggcggcgggacgtccacggccgccggcgccggcgccgggggatactcaccgaagccgtccaagccgctcgcgtggctgccccgcgcggcccgctacgccgtcgccgagcatcgcccgctcttcgcgctcgccgggatgctgatcgccgccgccgtcatctccatcgcctccccgtccgcctcctcctcttcctccacctacacctccaccggcggcgccgtctcgtcctactccaacaacaacaatccgctcgcccgcttccccgtcgagcccgcccaccaccgcgacgtggccacgcggcacttcgtcggcggcaaggtgccgctgggcctcaagcggaaggcgctccgcgtcctcgtcaccggcggcgccggctttgtcggcagccacctggtggaccgccttcttgagcg

SEQ ID NO: 278999 - DNA, 713 bp, Zea mays
cggtttcgtggggttctgtcgtatgagatactgtgtcatgaagaatccatttgggccccatttccaacagagtgatctgttcatggaaacatctgatcgaaatcaaggggcgaaatcagccgaggaagcggatctgcatgattcaggcgcaaaggatcatgatacttctagtctagggtattcttgtgctgataatgaaaacagtgtcattgatgaagatagcaccagaactgacgtgtcatgtatggacagcatcctcccatcatgtgtgcttgaggattcaccaaataaccatgacactgtcgtgcctcgtggtgcggttgttgctgatcaaaatggagaagaaaagaaggttgagaattatcagtcggtgtatgctgaggaaggaacaacttcaggtgtaatcacaaaaaaggctgaaggatcaagcatttcaagatctgctaaggaagtccatgaagaggtcctcgacatagaaaaagtgatggtccttgccaaagacaaattgatcctttcactagaagacgaggtgaaatgtcttaaagctaaactagatcagcttgaacaacataatcatctagtgactgaaaacaccagtggtgctgagtatcatgaagggcaaaattataatcatgccttgaaactctgcaaacttttcgtggcacaagaaagtacaaaccagtcctactcaccgcaaatcaaatacacgaaac

SEQ ID NO: 279000 - DNA, 607 bp, Zea mays
gccgctgcctgcaagggtgaccttgcttgagcccgtcttccttcttcctcagctaggcacccgtgcccatcttcagtccaccgcgccatgcctacgacgatggcggcggcggcggccagcgtctgctccaagctcgctccgcgtttcgcgccaggggacgatcgggggaggccatgtcctctacagcaggtctcagagggctgccactgtctccgccagagcttccatgaacataacgtgctgcgcgaaccagacgcagacggcgcagcgcaagtggtatggggggacgacctctccgccgtcaggttcagtgaaagagaaggtgaagccgatgctcgaccacgggggcgtcggcttcccgccgttccggatcgggggaggccgatgaggaggatgcggcggcggcagcagctcgtccggcgggttcatcctcttcgaggacgagctgctcctggattacctcaaggagttcgagaggaacctgcagaacgggccacggatgaccgtcagtggctacgacgacaggctggcgccacagtagattgctctctctctctatctcacacacactctctgtatgtggtttgaagagaacgtgtactacctc

SEQ ID NO: 279001 - DNA, 484 bp, Zea mays
gactactcgagtgatctccgctcttatctcaaatactgcaaggaagttgtttttgctggaattacatcttcagatgaacagactcatctaatagagatcttttgggatatgtacaaagccagggaggtcatgatgcaatgcaagtgctcaagtcagagatgcaagatcatggatttcattatttgccacctaggaaaccaaggaaatcagatggttatcttcgttataggcggcggcggctaagtggtggctttatttttgttgcacatgctgattattacttgttgctacgtgcttttgcaaagcttgcagaaattgatattcgtatcatgcatattagtgtgttgaaactgattggaggctcgcatgtattgaggagcgaattgaaagaagcttgaacaccttacataacttttctactggaacagtagatgagctaagatctgtatctgactgaagttcctagtgtagtctcatactctgc

SEQ ID NO: 279002 - DNA, 856 bp, Zea mays
  unsure (1)..(856): unsure at all n locations
cggtcgtttgggcggacgcgtgggcgcaccaccggcgggtcacacacacagccgccgggcgtgcgcacgcgctgctcctgtccccgccgctcgcactcgccgccgtctcgcgggcgccccacctcccggcatcgcagctcctgctcttcctccgccgcctgcgatgcctccccgaggcccggatgcgggacgagatgccgcgcctagcgctgcgcttgccactcccgccgggcgacgacgcgcgcgaggcgaacgaggtcgccgccgcggaggcccacgcggaggaggaggccgcgcggagggacgctgacctagccgcgcggaccacgcccaagagggaccgagcctcgcaccgggggcgggccggacccagctggacgtggaggcggcagctctggatggtcatccttgcggatctcctnctcctcacaatcctcttcgccgcctggctcgcagtctgccggggattcagctgcattggtcggtaaatagcgacacaaacctccaaggctgctgctcaatttttaagcaagaaatctggagtgcagtttgtttctcagacgaaaaagtgggtcataccaaccataactcggttgtaaggtgccaatattcgcaaggaaaggtgctttgccccccgcgcgcgcatactgttacgtctttattgtatgaatcgtatttaaaagtgaatgccaacagtcctggtagactacataagtttgaatttgatgttttttgtatggtgatctgtaaacccggtagtgcaatttttttgttcattttcctatagaaagcaaatgtcaaaattttgaccatggcagactcgggtatatgtgaatcttattgtcatgtaatattt

SEQ ID NO: 279003 - DNA, 529 bp, Zea mays
ccccctttcgtttggaggccggcagtcctgttgatcctaataatcgaagaaactagcttgggtaccttttgttaggtagtgtgttagcaggcagagttaggaaggcagtagcagcgttagcatcattgttaggtctgttcgtttcggatctggtgatacattcgttttatttttggtgtggacggaaagctgggggaggttgacgagcagtgaagaaaacccataatgtcgtccggtggtttgggggaagtgtaacaaataataagtggttagagagagagaggtcttagctgatgcaagaagagcctgcatagcaagtgttggatgattttctttctgagatgaaaagcaaataagaggtcatttccctcccatgcgcccaatcagtggctggctttgcttgctttgggcgctaccagcacggacccctctctcctgttttgcaacttttcttttttacttggaaaagaagcttgccgtgggctccatgaataagggcgtttgcttttagcctagagtgtattatgaa

SEQ ID NO: 279004 - DNA, 421 bp, Zea mays
caagaatgatacaggtttcttcttcagaggccagcgtatctgggaagcagtcatggccgaacttctgtctaaggggctagccagagcgaaacaggcttttttgactggatgctcggctggtggcctttctacatacattcattgtgatgatttccgggcacttctaccaaacacacctactgtcaagtgcctcgcggatggtggattctttcttgatgtagaagacatttctggaagaaggtatatgcggggcttttataacgatgttgctcggctgcaggatgtgcgcaaaatattccctcattgcagctcagatatggaaccggggcagtgcttcttcccacaagaagttgcaaaaagcatcaccaccccgatgtttatactcaatccagcatatgatgtttggcaagtagagcatgtg

SEQ ID NO: 279005 - DNA, 1433 bp, Zea mays
caggtacaggggtgaaggaggttgatccagatgatgagtatgatgatggcatcgatacgcaggatgatttggaggatgctcatctgcattcatctgatggtgggaggaagcttggtggtggcagccatgagagtgttgaggagaaggacgaggtcactactgagaggcgcacagaagcaggtggagggatcgctgataatcatgatattactagtccagacaaaaagaaggtttcaggtactggagataagaagcatgtgtccaagaagaaaccaaaacgtaagaagtctggttcaacttgtgaaatgaagtttctcaactcaaccgctcagcttgtggagcctgggagaaatgagagattctctagttttaagttggagtatgtagaagttgaagaaagacctattggatcagaatattgggaaccgagatttgccggccaccaaagtctgcaagaaagagaggagtcatacaaagcccatgaccaacagttgacatgtgcttttgttaagggtccaaatggtacaagtactggttttgatatatctgatgatgaccgaaagtacatgagtaaatgccacattgctgtatcatcctgcatctttggaaattctgatcgactgaggactccatttggcaaaacgattacaagcctctcaaagaagacagtttgctttgctatgtttttggatgaagtcacattgcacactttagaatctgaaggccagaaaatggacggcatgggtttcattggcatatggaagatcatattgattaagaacatgccgtataatgacatgcgtagagtggggaaaataccaaagtttttggcacacaggctattcccatcatcgaggttctcaatctggttagacagcaaactgagactacaaactgatcctatccttatcctagagtattttctctggcggcatggttatgaatatgctatttccaatcactatgatcgccattgtgtttgggaggaagtagcacaaaataaaaagctgaacaagttcaaccacacaataattgaccagcaatttgagttttaccaagcagacggactgacaaggttcaacccgtcggatcccaacaagcttctaccaagctatgtccccgaaggctcttttatcgtgagagaacacacaccaatgtccaacttattctcttgcctgtggtacaatgaggttgatcgtttcacgcctcgtgaccagctcagctttgcatatacgtacctaaaactaagaaggataaaccctgacagaccgttccgactcaatatgtttaaggattgtgagaggcgatcgtttgcgaagctattccatcatcgatcagaagagagtcacagtggtgcacaactaccaagttgccacatcctccttgggatggggggcagaagagggagagatcagggatgtatttttatacag

SEQ ID NO: 279006 - DNA, 362 bp, Zea mays
tcgcggacgcatgggctcagctatggccacctgaggcatgcatggtggcgacgtgcatccaaggcgtgtgcgggggttctcccacggagcgccaccactatggatctgagaggtgcgcacacgacggtggatcccagaaacgtgcgcgcgaggttggctctttgaaggcgcacgccctgaagtggcacacgttggcatctcacctcccgcgacgacgccgacttttcctatgcgcgggctacgacgacagccttctctaggcgcaagcgatggcggatcaacaaccctgtttttatgatattttgtatacatattgatgtcaacttcaatagatttttatgatataatgtcagttcatagtc

SEQ ID NO: 279007 - DNA, 432 bp, Zea mays
cgtcctccacctcctccgtcccccaccgcgcctccgctccccagatcccccgatcccttaccctagcgccacccacggcgtgctccgcctcgccctcctcctcctcctcctcctcctccgcgtccggcatgcgggacgcgggggaggacgacgactccgactccccgccgtcgcagatgtcggaggacgaccccggcgccggcgccggcgacaggtgggagccggatctgaggggcgggggcggcaggcgggcgccgccggaccaggtgctggggaacgtgctcgagaccgtgctccagttcctcaccgccgcgcgcgaccgcaacgccgcctcgctcgtctgccgctcctggtaccacgccgaggcgcagacccgccgcgagctcttcatcggcaactgctacgccgtctcgccgcgccgcgccgtccagc

SEQ ID NO: 279008 - DNA, 495 bp, Zea mays
cggacgcgtgggctgcttctgctcctgctacttgccccctcttatcagagagagtggtgtggccgcgcctccccaccatcaccaccagccagcaccacccctcctgcccctctgcgctggcgggccgagcgccgcgagcgagctgggccgcgggcggaggaggagtcgaggctgaccgaccccgcggccggcggcgacgagcggacgcagattcggcagccgtgcgcggaatgcccgtggaaggaggggagggagggagggcgcaggcgcagctgagctgagcccgcgaggttcgcggtctgcggtgcggcggcggaggtctcgccagcgcgatggccagcggcggctcctccaggtacagctcgtacaaggcgccggggctgcgcggcgcgctgctggaggcggcgcacgtgtcgtgcctcgaggaccggtacgcgctgggcccgcagcgggggtgggggccagtcgggggtgatcccggtcctgctccgacct

SEQ ID NO: 279009 - DNA, 365 bp, Zea mays
cggacgcgtgggcgcagcggcagccgatggtgtcgatgagctcgacgccgcaccctctggatcgcgtccgtcccggccgtcgtggggggcggcaaggaggaggaggaggcggtggagtcttgtgccgccgccgcgcccttgccgccggttgggatcgacgacgacgaggagggcccccggagagtgcgcaagccctacaccatcaccaagtcgcgcgagagctggaccgaccccgagcacgtcaagttcctcgaggcactgcagctctttgaccgtgactggaaaaagattgaagcatatgttggctccaagacagtaatacagctcttttaacagattaggagtcacgcacagaagtatttttt

SEQ ID NO: 279010 - DNA, 300 bp, Zea mays
atagggtccaagacgcccggccctggctccaccgactgagcggccagagtattgcctctgaagcctttttgtatgaagagtaatcagagggaacaaactggtagcactgtgctgtgtttcatccagtgttgctaattactctgtgttgttattcggtcaattgaatatatatgtgcttaatgtgctacaatgcttgttcctttcgtgcttttgtaatcgcccatataatgttaatcttttctactagaaataagatgaatgggttagtatacgcctgttgctaggtttgcacggctcgag

SEQ ID NO: 279011 - DNA, 530 bp, Zea mays
  unsure (1)..(530): unsure at all n locations
cccacgcgtccgcccacgcgtccgcggacgcgtggngttctaccccccaggaagcagatcgtgaagagcatgctaaggaaaaatccagaacataggcctactgctggggagctgctgaggcatccacatctgcaaccatatctttctgaatcgtccaactgttcaccgatctatcttccggtgaagcccaccaaaggtaacctggtagacaagcagtcaaagaagccaagcagtggcagaaagcgagctgtcaaagccaatggatccaatggaacattagaaactgcagcagagcacgctgtggaagcaagagacagctccacaaacttctcagatgtatcaactataggtacccaggaagccttgatattgcaaatgccggtggatcctgatgccggaagcaaagaagagcagaacgttgatgttgtaccgtttcagcatgcggcagagaatctgatggcgacaaccgatagacaggtcgatgcgaccatacgtcttaaagccataagaaccagtaacgcaaaagaggc

SEQ ID NO: 279012 - DNA, 1022 bp, Zea mays
ctctagcatacattcatcagtagtccattctctatagaggtttttcggcagacattcttatgctcgacagatcaggacatctgcagctggtgcagttcaggtttgcaaagatgccggaaggtcaaaggacattgacaatatgtgggatcgatgactcacaaaacacaaagattgttcttggtaggggtcatggatttcctgctgactggtgggcacttggagttttgatctatttcatgcttcagtcagacatgccattcgggtcctggagggagagccagctggaacctattacaaaaattgccaaaggccaccttgttatgccagtgtctttcagtgcagaagttgttgaccttataaccaagctactcgtggtcgacgaaaacgcgcgccttggaaccagtggtgctgaagctgtgaagaaacacccctggtttgatggcactgattgggagcgaatagcatctgggacttgtgcagcacctgaagaaatcactgagcgcatcaactactgtatagaaactcttaatgaggacttgtccgcatctccttccgtgccgattgaagacccagatgatctcactgctccagagtggatccaggattggtgatctcaatagttgcatgactgtccaatgatgaattgttctagttgaggaaaacgtctctagtttttcaccgagcattctcatatcaaatggaagaaggtatacataagagttgatcgaactgacaagttgtacataccaaagattattccttctgtgatcatagatcagaatttgagatgccaagcaacagagactttggtctatgtttgctgcatagttcctggtaagaaggatctggatagtttgttggtgatccatgtaattatatatccaatttgtgcactcccttgctgtttcggaaatggatactggtcgggaggaaggtcaataattatcgttgtgaatacggacatttctttcatctgccactgtcaatcgatttgtacaagatcaagttttccagatataatt

SEQ ID NO: 279013 - DNA, 623 bp, Zea mays
gcaacccgggcggcggcggcggcgacccgggcgccttcttcgccgggatgccgcggttcagcggcggcggggtgccaggcggcggcgggttcttcggcgggtggggcgagggcgggctcgggtaccggcgcggcgctgtggtgccgccctccacggtgtgcccgcaggacgggccctgccgcgggaagcgcctcacctggcccgccgcgctgcttccggaccttcagctacggcggcaagaacgggggcggcggcggaggcggcggatgctgcagcttcgactgcaccgagcgctgcgccgccacgtgctgagtgaatctgggatgtattagaggagggcgtggccgtagctatagctaaagctcgtgtactccgtcctctactggcatgcggtgcactgctttctcttcctgctcgtccactgatacgaattatcgctactactaatagtatcgaggtggtttggtttggtttagctgttggtttgttgcgagttgtgatcggtcgtgatcacgtacgtgatgactgatgagatcatttatgcatgtgtgtctgtaaatttggtgtctgccagtgccagtgccagactgatcaataatagcagaggcgaggagatgattaaa

SEQ ID NO: 279014 - DNA, 1124 bp, Zea mays
gtattcttgaaagtggttagacaggaggggttcggtagactatggagaggaacaaatgcaggcttagcattagctgtacccactgttgggatatacttgccttgttatgatatattccgcaacggcattgaggatttcacaagaagtaatgctcctggcttgacaccatatgccccgctagtagcaggatctgttgcacgctcgttagcatgcattgcttgttctccaattgagctcgcaaggacgcgtatgcaggcatataaagagtttcgtcctggcgtaaagcctcctggaatgtggaaaaccttggttggtgttctcccaccacttccaggttcgagtcagaatgtacaaaattaccgtgttctgtggactggggtgggtgcacaacttgctcgagatgttcctttctctgctatatgctggtcaactcttgagcctatgcgaagaaaactacttggttttgttggagaagaaggcaatgcaggtagtgtattgggagtgaattttgctgctggttttgtagcaggcagtcttgctgctggtgctacatgccctctggatgttgcaaaaacaaggagacagatagagaaggatactgagaaggcaatgaggatgactacaaggcaaacattagctgagatatggaggtctggaggcttgaaagggctgttcaccggcgtcggcccacgtgttgcacgtgctggtccatcagttggtatcgtcgtttccttctacgaggttgtcaagtatgctattcatcaaaggcacacctcatgatccagtttttagttgaaaaagggatggaagccctttcactttgtaaaaacaacaccgaccccggtttccgaaagtaggcctcgttactctgaccttttggacggtcagggctaggtgtaacatcagagtgctcaacagtcgactcaacagcctttttcgtcgacaatgtccatctcggtggaggataacatatcagttttgcctggcaggttttggatcattgcctaatcttatgtttgggcggatctgaagctgctttgtttaacttgttaggtagtctctgtaattgaaggtgtagtagcgcataccctgatcaaataataataccctcggaacttcagaag

SEQ ID NO: 279015 - DNA, 846 bp, Zea mays
  unsure (1)..(846): unsure at all n locations
cccactcntttcgcccacgcgtacgaaagtcttctccctgtccctcccgcggttccgcccgccactcctcctctattccaggagtcttctagaggcgaagagggaccacaggtccacagccgcggcagcaccgccacctacgccggcagaatccttgatcgagacaggagcggacgtggcctagggtttctgagccaggccggcgccatggtgggctgctctaggggctccctccccacctggatgaccgccgccgccgcgcgggtcgacctctctggcggcgtaacgccttcgcaccagggctcgccctcttcacctcactcctcctcgggtcccgctccggccgcgggggcggaccaggagctcgggatgtacgagcgcgcgttctccgctgccggcgccgccttcgtctcagctatcatcgtcaaccctctagatgtcgccaagactagattgcaggcgcaggcggcaggggtgctgtacaaccagcctgcccagatggcggcgctcggccctgatgcgatcctgtctgaattccgatgctctccttcgtgcacacgtggtcttgtattaggaagtgagccagtttgtcctcctgactgcttccagtacaaggggacacttgatgtattcttgaaagtggttagacaggaggggttcgttagactatggagaggaacaaatgcaggcttagcattagctgtacccactgtaagttctttgctacatccttttttgtggtcattgcctttttagatgttctatgctgctctggagcctggctgacatctanttatagttttaatctggcctatttgggaatatcatatatttttacttagcttt

SEQ ID NO: 279016 - DNA, 1128 bp, Zea mays
tttagacatgttttctgatagcaatgctatcaataacaccagccagaaccctaccatactttctatatctaactcaaatcctaatacatcagtacaagcctatcctgttccacagcaacctgttccaccacaccatccttcaccatatgctaatggcttaaattcagatacaatgacaccctttgatcaaggctctaagttaacctcagcaagttcatggaatgaacagattgcccatggaatgattccaccacagcagtttgcccatggtcaaggtgaacaaagcaacgaccttccactaccaccctgggaagctctgcctgcagaaactgagcaattagaagctgcccatcctggtgcgttgtcagctctgccaccattcggagtctagtcaaccccagccagtccacattacgcattctgggcagcaagtgttaccatcgcaattaatgccaactggacaaccgggagggcagttccagcctagatttggggctcaacaaccatatgctacagaaaatacgcagtatggaggaatgtatccgccagtgcaaggcaaccaaccaacgggtatttatccccagcaaatggctggagatgtctaccagcaacagatgtttggtggccagatgataggttatggctatggtccgcagcctggaggctactacgtgccgaacgccgcatatgcatatgccggtgcaaatgatctttctcagaggatgaatggcctctcgatgcaaggcaacagtctgtatggcacacccgcgtcgtcttccctccagcagcgtaacaggccaagcagacctgaagattcgctctttagtgatcttgttagcatcgccaaaacaaagccttgtaaaactgcttccaacaaggctggtaacttgtaaacatgagtttctgctcatagtatataaaattcttgaaatttttttcctattggaaagtagtgggcgagatttgtatatcctgatattgataaagatgtttacatcttttcaagaaattatattttgtttacaagtattctgtaccattaatgtcttatgtatatacataggagcaaaaaaaaaaaagactccagtatgctgattcctctttgaaattttggcatacgacttcagc

SEQ ID NO: 279017 - DNA, 569 bp, Zea mays
tggtcgcgtgggcgccgccgcaggcacaccatctaccactgtcaccgtcgtgcctcgccgcaccggcccacagtccgcggcggtctcttcactgatctccgcttcccctccactatacaccgcccttcctcctccccctccaccgtcaccgccttccgcctccgtgactgggatccacactcgccctcttcctcgtcgtctgctcgctctccgtcacctccttccgcctcctcctcctcctccacatccgcctccgctcgccgcctctccccgctcgcgcgcttcctcctcgacgcgctccgccgccaccagcgctggggaccgcccgttgtcgccgatctctccaagctccgccgcgtccctccatccctcgtcgctgaggtccttaccgggccgccctccccgccgccttcggtcgcgctcccgttcttcctctgggcgggccgccagaagggcttccgtcactgcttcccagctttccatgccctcgcctcgctactgtccgcggcgggcctcccagccgcggctgaccagctccccgacctcatgcgcgcgcacggcagaccgat

SEQ ID NO: 279018 - DNA, 640 bp, Zea mays
ctccaacttgtttccgcttctaaacaggtcatctatgtcagaccaggagacgaagtcgatctcgactcggtaatccaagagaccgtacgattaactgcgtccacgaagagttcatgttcggagaccgccgggaagtctacagttgtatggcaatatggtggtagccagaagaagaagacttccagccaaaggtggtcaaaacttcttgatctaaagaaaaccctggataaagcgcctaagtgaattacttagtatgcatcagtcaactgccaatgctgcatgcagagcaagagaatagtgctgtatcatgatgctggaatggaagtggcgacaacttgaacttgttcaaccaagatggaaggttggtggtttgtaactcattggctgttggctatccttttcttttgaacagaagagagaggattgaccatcttatctgaatggtatatacaatgcgactccatgcccagggactggtcatgttgagaacctagatacaggatcatacattataagcacatcatcagagaataaatgtgtgtgtgaacataactactatttgactgtttgtataaagcatttcatctttttttaaagttttaccacacaacatttcttgttggcaaaaaaaattatttaa

SEQ ID NO: 279019 - DNA, 475 bp, Zea mays
ggcaaagcgcctgatgctcataccacctcatctttggtcaagaacacacacagcaacctggagcatgttgttcagaagggtatctcacagtcgcataatatcagtatggtaaaggctaagcaaggctacaggaaaagacaggttgtttcagaggagaaaatttctggcgagaaggcaagtgcttcaataaccactgattccagtgtgcagaaaaatgttgatgttcccgtcgacacagtaacggctgttgttgcaccacatgatgatcccccaactcagaacaagaagggaacccggcatttgaggagtaagaaaaaggtagatgatgcttcagttacttctaaacatccacctgtggtgtttaatgaacagaatacagtgaaaatctctaccgagccaaaaacacatactggtcggtgttattatcagtagctctattgttcccattgaaggtactattgtaactgttggaagt

SEQ ID NO: 279020 - DNA, 478 bp, Zea mays
cagtgtttgtttctgaccaagttccacaagcactaattggcgatcctggcagaataaggcaagatcattacaaatcttgtcgggaactctataaaattcacagagaagggtcatatctacttgacggttcatgtcgttgaagagattatgcattgtctggaggttgagacgggaactcagtccgccaataccttaagtggctacccagtggcgaacaggaagcgcagttgggaaaactttcgactctttagcagggaactgaactcatccgagatgccttttgcacccatcgcatcagactcaataagcttgataatatcagttgaagatacggggttggaatcccgttcgatgctcagtcccgtgtcttcacccctttcatgcaagtaggtccatccattgctcgcatccatgggggcactggcattggattaagcatcagcaaatgcttggttggactcatgaggggagagattgg

SEQ ID NO: 279021 - DNA, 688 bp, Zea mays
gtcccggtggcgctagagaggcctccggatgtaggacattctgccggggcgttgctttcgcgtgacgagatcgagaggcggtctccatcaagaagggacgggatcgattccgcgcttgaggccaggctgcgtgcgtcctactgcgcctacctgcattgcctcggcaaccggctcgggttgccgcagacaacaattgcgacggctgtggtgttctgccatcggttcttcttccacagatctcatgcctgccatgatagatttttggttgcgactgcagccttgttcctggcagcaaaggcagaagaaacagcatgccttttgaatactgttcttagggcttcatgtgaggtttctcaaaatcaggaattcaatcttcttccttacatgctatgtggtcaggactggtttgaacagtacagagagagtgtaatacaagcggagcaaatgatacttacaacacttgattttgaactcgaagtagcccacccatatgcttccctatcctctgctttgggcaaactaggactcacacatactgttctgtgtaatgtggcttggaatctgatccatgaagggctacgaagttcacttttgcttcagttcaagccccatcatatcgctgctggagctgcattccttgctgcaaagttcttcactatgacatcacattccattcaaattttggcat

SEQ ID NO: 279022 - DNA, 468 bp, Zea mays
cacggagtctggggagggtttcacccggggggaataatcatcaatatgccgggggccagggcgaggggggggaactatatttcgtcccatgcaagtagaaacgcttaaaaggattcccttgcaagcaggttgctactggtctaagttttactgtgattcttacaagggatggacaagtatatacttgtggaagcaatacacatggccaacttggtcacggtgacaccatagacagggccactccaaagcttatagaattgtttgaaggccccactcaggtggtgcagattgcagccggcgcaagctacacttttgctgtaacagatgatgggactgttcattcgtttgggtcttgcactaatttctgccttggacatggggatcagcatgacgaacttcttcctcgtgcaatccaatcatttaagaggaggaacattcatgtagtccgtgtttctgctggagatgagc

SEQ ID NO: 279023 - DNA, 667 bp, Zea mays
cagattcatcgggcgagcaaagacaccagaaatgagatggccattcccattttcagaggggaagatgtttgttctcactatccaagctggagtcgaaggataccatatcaatgtgggaggccgccacgttgcctcatttcctcataggatgggattcgccctcgaagacgcaacaggtttagccgtgacagggggcatagatgttcactctgtgtacgcaacagcgcttccaaaggcacatcctagcttttctctccagcaagtcttggaaatgtctgaaaggtggaaggctcgccctgtgccagacgaaccaatccatcttttcatcggcatcctctccgccacaaaccatttcgccgagcgcatggctattaggaaagcttggatgcagggtccggctatccaatcggggaatgcggttgctcggttctttgttgcgctgagccacagaaaggagataaatgcagcactgaagaaggaagcagagtattttggagacatagtcattctgccgttcatcgaccggtatgagctagtggttctgaaaacggttgcgatatgtcaatacggggtgcacaatgtcactgcagattacatcatgaagtgcgacgatgacacctttgtgcggctggatatagtactgcaccaaatcagtacctacaacaaa

SEQ ID NO: 279024 - DNA, 810 bp, Zea mays
ggcaaaatttacacaaggtgtcaaggttgaagtctgcagcgacgatgaaggttttcgtggagcctggttcgaggcgactgttgttaaagctgtcggcagcaagttcctcgtggagtatgctacgctgaaggccgatgacgggaccaagcctctgaaagaatctgtagaagcacggcacatcagaccttgccctccagatatccctgccactgatggattcaaactacttgacgaggtcgatgccttctgcaacgacgcgtggtgggtcggtgtggtatccaaggtcctcggcgagaagaggtgcacggtctacttcaggccttggaaggaagagatggagttcgagcatgcgcagctgaggttgcactgtgactggatgggcgggaggtggatgcgggcttccccggcactggagatgtgaaggctgaagagccacgcgatggcgttagacagtagcttggtgattgtatggggtaatacccatagttaaaagtgtgtcgtcactaaggtaccatgttatgttgtcttcctgcatgaagttgccctgtgccatctgcagcaagttggatgatgatccttgtgcagttgctgcaagttgccacaccaccatcaggtctgaatctgaacgcttgccaatggttgatcccattgtgttgtactaggaactagtaagcgcattcagccagtgttaaggccttaagggtgaagaaccgggagctgtggtgctaaatgttaggggtgtcgagtgaacccttattgatcgccggcgacttgtttgctttgcactagacagcttcccctagcttccct

SEQ ID NO: 279025 - DNA, 385 bp, Zea mays
cgccttcaactcctccacgctcccgtcctctccacctctcgctcccacctcccccgccgtcaccaccaccaccacagcctctcccccgcaacgcgttccttcccggtgcatgaaaccctaaacctataccccactcccctccccgagccatcctctccccccgcggcgatggccaaggcgctgctctactcctccctcctccccgggctgccccgcgctgtcgggagcagcccggagcgctgccgcgaggctgctgctgctcccgcctctccggctgcgccgcggccggcgcgccgcctccgcgtgcgcggtgagggcgggcctgcacgggctcgactccgtcggcgggccccacctccaggccgtgctggagcgcgcccaggtg

SEQ ID NO: 279026 - DNA, 636 bp, Zea mays
cggacgcgtgggtttttttgaactccagcaaaagataaaacaatgaaccatcaaacatggtggcagcttaccagggtttatgcaaattaaaaagagcacatacttaatctgtgtaactatttctttgccccgtgagtattgatgcgcagtccaatcaagctcaacaaatggcgggaatggctcacgatacacatggcgcacgctacaacagttggagcttccactgaactgaacaataaccagcctggtgcatcaatctcgctcactgttggggggagggggggcatgttgccttttttttcctttctttttttgcctcacattgaaccagatagcctaactaacgattgcaaggccagagtgagctaccatccggatcttgtcagcctactcgtcctcctccgacaacacactccagatcatccagaacaaggacaggaacaggagaactatgaggctgactatcttaaaaaggcgccgcttcttctcacggccaagttgattaaatatctccgtcacatctaccagatgttgtcgccgctggtatagcgtataattgtagtacaccattgggagagaaagtaacagcatcgcccaatggccagataagaggaacagcacgctgagaagtgcttg

SEQ ID NO: 279027 - DNA, 418 bp, Zea mays
  unsure (1)..(418): unsure at all n locations
gttgctggccgccaacgcgctcgacttcggcgccccaggggcggcgcacgcgcatcctgcccatgggcctcttcgtgcgcgtgcccacccgctgctcctgcgccgacggcgtccgcaagtccgtctccgtccgctacgccgngcgcccggccgacacgctcgccaccgtctccgacgtcgctttgggggggttggcttcttcgaacagaatcggaacgaggaccggctcacctccgccgaccccggcgcgccgctcgacgccggccagaagctcgccatcccgctgccatgcgtctgcttcaactcgtccgacaacaacctccccgcggtgtacctctcctacgtcgtgcaggtcggggacaccgtgcccgccatcgctgcaagctacgagaccaccgtcacggatgtcatgaatgtc

SEQ ID NO: 279028 - DNA, 548 bp, Zea mays
aaggacctgaacctgccagcagccctgccgtagccgaccaggacgccaccgcagcagcagaggggctccccgggactgctgcggtacaggtcagcgccgagcacgctgctcggcgaggtgatgtgtggtggtgatcaggacttccccgcggctggcggcgcagggcacggaccaccggaccacgccgccgcggacaacgtcctcgcgcgctttctcgccgggcaccactccgagacccgcgactgcaagcctccccgccccgccgccgccgctcacttcatggacgaagctgccgtcgcgtccatggccgcctcacagcagcagcagctcatgtaccagtcgcagcaggagcagcagatggccgccatggaggggctgtaccgcaacgtcagctccggcggcacggagcacggtgcagccgttggcgctggtaacaacagcctgatccgccagatcagctcccccgctggcttcctcaaccacttgaacatggacaacgggtacggtatcatgctccgggtgggcatggtcggcggcgggttcaggaa

SEQ ID NO: 279029 - DNA, 676 bp, Zea mays
cttttgtggcaccatctctcaggacccttactgcgaaacttgcccttggatggcgaattcgcatgaccaatcatatgcttcgatattatttgaaaaggaatgcattctacaaggtattcaacatgtcaggtaaaagcattgatgcagaccaaagattaacacttgatgtagacaagttgaccactgaccttgctggcctagttactggaatggtaaaaccgctagttgacattctttggtttacatggagaatgaagcttttatctggacgaagaggagttgctatactgtatgcctacatgctactgggtttgggctttcttagagctatatcccctgacttcggtcatctctcaggccaagaacaagaacttgaaggaacattcaggttcatgcactcgagactgcggacacatgctgaatcaattgctttctttggtggtggttcaagagaaaaagcgatggttgaggctaaattcgtcaagttaattaaccactcaaagattcttttgaggaaacagtggctttatggtattgttgatgattttgtaacaaagcaacttccacacaatgtaacgtggggtctgagtctgttgtatgctttggagcacaagggagatagagccttaacctcaactcaaggagagttggcacatgctctgcggttcttggcttc

SEQ ID NO: 279030 - DNA, 900 bp, Zea mays
tttacgcgtccggccacacgttccgcgcctgcacacctctctcgatctcgcgcgtctggatttttccgacccgatcttttccccccgcatcagctgtcttctccttgcgccgggccaggccgcctctccctcctcccttcgcttgcgtctcactactcatcactgctactgctacttcgttcgagagggatacggataccccattgccggcccactggcgagagagattttggtgcgactacagagtcccaatcctataccccggccccaaaactcttctctgctaccagtaaccgttccttccgccggaatcgattttgtgaggggcgagttccgccaccgtgggcgtatcaatatcggcgaacgctcgagttctcgcggcgaaaaacaacgcgttctgcgaggattccgtggtgaaagaccgggggccttttttctgcggattccagctgccaaacagagatgtcggctctcctcgacctactgatggggatcttccgccagcagaccctcggcggcgccgccctggagctggccgcgctggcggcgcccctctggctcgccgctctcgtcggcctcctcatcgggtgggcgtggcgcccgaggtgggccggggtcgtcgtcggcgaccacaacgcccagcaggcggcgcagctccctccgccgcccgccgctgccgcggtgggctctcgcaatgaggcgcccgccgtcgtaccgagaactgtggtggctcctgcggcgcccgaggacgagcagctggcggtgaccacccgtgacttgatgcacctctggcggctcgtccaggagaaggacggtggcccgtcgtggatccacatgatggaccgcgccttgccgaccatgaggtaccaagcctggcggagagacccaccgaatgggcca

SEQ ID NO: 279031 - DNA, 415 bp, Zea mays
ccggccttctccacggtgacaatccagagggacttgttctatggttatgatacgttgatggagaacgtctctgatccgtcccatatagaatttgctcaccacaaggttactggacgaagagatagagccaggcctttgacattcaggatggaatcaagtggtgcctggggttactcaggagcaaattctggtaatcctcgcattactgcaacttttgaggccccttgttatgcattgaacaaaatagagatagacacaaagttacccatttttggcgaccagaaatgggtcatatggatttgctctttcaacattccaatggccccagggaagactcgttctattgtctgtagcgctcgaaactttttccagttcacaatgccaggaaaagcatggtggcagcttgttcctcgat

SEQ ID NO: 279032 - DNA, 421 bp, Zea mays
ggtaatcgctggagaaattctgaggatttaatggaccaagttcgtgggccgagggcaaataaattgaacaatgcttcagtatcctccacggtgaaagatatcacaagtccattgatccgtagaaatcagtataatagatcagatttttcagttcaatataatcaggccaagttttttatgataaagtcatatagtgaagatgacattcataaaggtatcaaatacaacgtttgggcaagtacaccaaatgggaacaataagctggatgctgcataccatgaagctcaaaatttaatggacagtggggaaagatgccctgtcttcctattcttctcggttaacaccagtggacagttcgtaggtttggctgaaatgttaggtcctgttgatttcaagaagaccatggatttttgggaagaaa

SEQ ID NO: 279033 - DNA, 506 bp, Zea mays
gtccacccacccgtccgcggacgcatgggcggacgcgtgggtaagcggacagcctagtagtgtctgtgtcaaagatttcgagggtttatggccacattgttcatttgtctttgatggtggagtacttccttctgggcgtgctggttcaacaatcgttgatctaataacaccaggagtttacaagatattgagggatggaagctcaaggaaggaaacagcagcagtgctcggcaagttcggctttgttgaagcgttgtaactactcggcactttaagaaagtaagcacgatcaaagagtggctgtcttatccacattatatcttgtttaattagtgatacattagagcttttgttgctgtttgtgcttttcttttacatcttcaaacttattgtattattgcgaatgtgatgttgagtagaataacagagttcacattatttaagctgtgtaaagtgtgtaacatgggcttgttttgaacaaaataaaaaaaaacacctgtgaattt

SEQ ID NO: 279034 - DNA, 649 bp, Zea mays
cgttcgcgtgggtcctgacgtacgtatctcagttgcgttcgagcgttgtggacttgtggtggtttccttcctgcgccggagaaggtagacgatgggaaggggaagcgatgcagtgccggacgcccgtcgagctgcgctgctcttgatcgtctgcttggcggctcgagcggcttctgcgatccaggatggcctgttgccgaacggcaacttcgaggaggcgccgcccaagtcgcagctcaacggcacgagggtgatggggcgcaacgcgataccgcactgggagatctccgggtacgtggagtacatcgggtcgggccagaagcagggcgacatgctgctgccggtgccggagggcgcctacgccgtgcggctcgggaacgaggcatccatccagcagcgcctcgccgtgacgccgggcgcgcgctactccatcaccttcagcgcggcgcgcacctgcgcccaggccgagcagctcaacgtgacggtcgcccccgagtcggacgtactcccgatccagacggtctacaccagcagcggctgggactcctactcctgggccttcctggccgcgggcagcgtcgtcaccctgatcgtccacaaccccggcgtcgccgaggacgcagcctgcggccccctcatcgatctgttt

SEQ ID NO: 279035 - DNA, 444 bp, Zea mays
tcgtccacgcgtgcggaagaagttccgtacccttcactccactattccggtcaacccatccctttcctccgcctccgcttccgcgtccgcccgccgctatgccgccagccagtagcctcaccgccgaccagctcagcttcttcgaggccaatgggtacctcgtgatggactcgttctcgagcgcggaggaggtgcgggagatgcgggaccgcatggccgaccttgtcgctgggttcgatggcgccaactccgcggtgttctccaccaaggatcatcggcagttaaaggacgactacttctttaagagtgctgagaatatctcattcttctttgaggaaaaggcatatggagatgatggatgcttgaaacagccgaaagaactttcaattaataaagttgggcatgcattacatgaacttgatccggtgtgtaaaaaggtttctt

SEQ ID NO: 279036 - DNA, 451 bp, Zea mays
  unsure (1)..(451): unsure at all n locations
acccacgcgnncgaagacgaggatccttgtattcgtttactctcgtactgcaaaaagcatagacagccttctgctgctgaacgtccatctttggaaagtgatcctcctgaacccattcaggtagttcagacagatatggcttcatcatctggttgtgcaaggaccgaaccctataatttacacaggagaaggggccaaaagcagccacaagttgtcgctactgcttctctgaaacgtttatatgtggagaatagacctcatattgtcagtggctactgccaaaacagagtaggcaatacatgcggagaatcaattcaaccgtttggtttgtcagatgctgtgcagcaagaagctattggcaatgtgtcttctatggttgaaaaatatacaatcgtgaaggctacatttaggaagagactaacttttggaaaatcaaaaattcatggatatg

SEQ ID NO: 279037 - DNA, 499 bp, Zea mays
ctacatcgttagtggccagagagtaaacgcggactagatagagtaccagatcctgtgctgccgagcacactcatctggacagtggcttcggctgctgctccacccgaaatggaagtacggcagggacagggacgaggagctgcaaggcttcgccgtggaccgccccgagccgctggtgcacttcgcactgtcctccggtagctactcggatccagtggtgcggctctacagccccaagagcctgttccagcagctggaggcggcgaaggaggagtacgtccgcgccaacgtgggcgtccgcgggcgggggcagcacaagatcatcctccccaaggccctggagctgtacgcgagggacgccgggctgggcgcgcaggaggtggtggccgcggtcgagtgccacctgcccgagggcctacgggacgccgtgcgccggagccagcagcaggccggccgggcgcgcgccgtggagtggaagccccacaacctggcgttccgg

SEQ ID NO: 279038 - DNA, 1446 bp, Zea mays
tcgcgatctagaagcactgtctccgtctatactcgtcaggcatcatcaccgccttctcccgaggctttcgagatggcggcggcggaagcgtcgaggacttcggaggcccgccgtgacgccgtgttcgggcggtgggtcgtcttctcgccggcgcgctcgcgccgccccaccgacctcaagtcccacaaccccaccaaccctagcccgggcccaggggccgacgcgccgcccaagccgtcctgccccttctgcgccggccgcgagtccgagtgcgcgccccagatcttccgcgtgccgcccgacggctcgctgccgtggcggatccgcgtcatccagaacctctaccccgcgctgcgccgcgacgtggacccgccgccgcgccgcgacgtggacccgccgcctgtgccagaggcagagggggatgtctcctcggacgagcctggggagcgcgccgtccccggcttcggcttccacgatgtggtcatcgagacaccgcgccacgacgtgcgcctctgggacctggacgccgagggggtccgcgacgtgctgctcgcctacgcggagcgcgtgcggcagctcggggagcaccctgcggtgcagtatgttcaggtgtttaagaaccatggggcatctgctggagcttcgatggcgcattcacacagccaaatgttgggaaccccctttgtccctccctctgttacaactcggcttaactgcatgaaggagatttttgacagatcagggaactgcagcctttgtgagagtaggcccaaagatatcctgatcagtgaaacacctaatttttctgccattgttccttttgcagcatcatatccatttgagatatggattattcctcgacaacatatttcttattttcatgaaatagatcaagataaggcactggaccttgggtctctgttaaagactatgctgcaaaagttgtctaagcagcttaatgacccaccattcaattttatggtccacagcgcaccatttaagatttcatcatcctgcctgccttatacacactggttcctccagattgtgccccagttaagtgtagtaggcggatttgagcttggaagtgggtgctacatcaacccagttttccctgaggatgctgcaaagattctcagggaactcgactgctcagtctagtggtggtcgacgtctaaccttttaactagataggaacgagggatgtgttcctctgtacttttctgggaagcaaaaataccgtgctaataattcaagcagacagctaacttgattatgtaacatcaggccctgctttggcgagggtgatctgctggggtatctttcttgcccttgcttcaaacaggaagcatgccaagttgggctttcttttttggccctgagattgatgttgcctgtctgtacagactagagagtggttataaacagagttttcgtttgacgatt

SEQ ID NO: 279039 - DNA, 1126 bp, Zea mays
gaagcaaagcctgtgttctgcttctgcattctggaaaaacagggtccacctccgtaaaaaaaaaaagaaagcctcgcgccgccgccgccgccgaggaaggttgaggaagaggatggccgacggcggggaagaagcccgccgccgtgctgcgatcggcgagtaccgcaagaagctcctcacctgccgggagctcgaggcgcgggtcaaaactgggagggagaatctaaaaaatgcaaagaaaaatttggaaaaaactgaagaggatctaaaatcactgcaaagtgttggtcaaattatcggtgaagtgcttcgacctttggacaaggaacgatttattgtcaaggctagcagcggaccacgttatgttgttgcctgccgaagtaaagttgacaaagaaaagttgattgctggtacacgagttgttcttgacatgacaacacttaccattatgcgcattctgccacgtgaggtcgaccctgtggtttacaacatgctacatgaagatcctggcaatgtaagttactcagctgtaggtgggttgtcagatcaaataagggaactcagagaatccattgaattacctcttatgaacccagaattgtttctccgtgtcgggattaaaccgccgaagggcgtgctgctctacggtccacctggaactgggaagacgctcctagctagagccattgctagcaacattgatgctaattttttgaaggtggtgtcaagtgctatcattgataaatacattggtgaaagtgcacgcttaattcgtgaaatgtttaactatgcacgtgagcatcagccatgcatcattttcatggatgaaattgatgccattggtggccgaagatttagtgagggcacaagtgcagatcgtgagattcagaggacattgatggagcttctaaatcagttagatggattcgatgagcttgggaaggtgaaaatgatcatggcaaccaaccggcctgatgttttggatcctgcactccttcgacctggtcggatggacaggaagatcgagatcccactgccgaatgaacaagggaggctggaggtcctcaagattcatgcagctggcatcgcatagcatggggagattgactatgaagctgtagtcaaa

SEQ ID NO: 279040 - DNA, 398 bp, Zea mays
ttcaccatcaccggcagcgcccacttcctgcaggtgctcatcaccaacgtggcggcggacggcgaggtggcggccgtgaaggtgaaggggtcgaggacggggtggatcccgatggggcggaactggggccagaactggcagtgcgacgccgacctccgcgcccagccgctgtcgttcgaggtcaccggcgggcggggcaggacggtcaccgcctacagcgtggcgccggcggactggatgttcgcgcagacgttcgagggcaagcagttcgccgagtagagatcgacgccgaaaaccaagtctccggcggtggtgatgtaagtagaattatacgggtggcttcttgctcgcgagtcgtgaccggtgactcgacaaaacgagacgtattgaatggcgaa

SEQ ID NO: 279041 - DNA, 783 bp, Zea mays
tttctagttcaagccatgcaaatgcggctatgatatctgtgtttggtgctggcaccacatcatagacatggctgagaaggaggaaacagtgggccgctgccctgcatgccgcacatgctatgacaaggacaggatcgtcaagatggctgccacttgtgacaggacggtggcagataaaaatgtagagaagaagcacaagacccaaaaggttaagccaaaggcagcacccacagcagcagcaacatcaaccgtagaatcaaagaagcatctggctagtgtcagggttatccagagaaatctggtgtatataattgggctacctgcacatttatgcaacgagagtgtgcttgagtgtagggagtactttggtcaatatgggaaagttttgaaggtttcagtttcccgtccgactgggcctccctctcagcaggcatcagcaaccagcagtattagtgtgtatattacttatgccaaagaagaagaagccatccagtgtattcaagctgtacacaattttgtcttggaagggaaagtgttaagggcatgctttggtactacgaagtattgccatgcatggctgagaaacatgacatgtgggaatccagattgtctctatttgcatgatgtaggcagtcaggaggatagttttactaaagatgagataatctcagcatatacgaggaccagagtcccccagatggcatctagtgtttcgcaaagacgtacaggcaacatgttgcctcctccaggagatgatttctcttacagtgcagtggtttcagc

SEQ ID NO: 279042 - DNA, 585 bp, Zea mays
gcatggtgctagttcacgagggatgcccccacttgcagccagtaccatgtatggctatcaagggcagagtcatcaggccggccttcggcagggccaactaccttcacaatttggctctgcgcttgggcagtcacagccaggcctgggccctgaacaccgaaaccctagcgatagtaacctaagtggcgctgctcaggctaaccaaatgtggccaaatacctactgatccatcccccttgtcgacttctgtggaaggcggtcctgttgtgtgtgcaacgccggtgaggccatgcagtgcttgtgttctgatccaggcacgcggataccagctgtgcctgtgcgcatgagtcgctgtcgtgacattttgaggcacaagagacatatgttcgagcatgctctacctgtagggtttctaggatatggcaaaagaaaatgtagctcgatctatttattcaaattctgatagagaaaggacttcctcttttctattttgttctcttttgtcattcacatatcatgtgacaaataaaaccgaaatatctaacagcagcccctttagttaccgacccagtgaaaatttccatc

SEQ ID NO: 279043 - DNA, 367 bp, Zea mays
acccacgcgtgcggccctctcctctcgctctcgctctcccgcgcctgcaccgtatcagttgccatatattccgccaccctcccgatctcaagcacctaccccgggccttgcctggccatcgagttgccaccagacaactcggctcggctcgtcgcccaccgatcctcctcctcgctccaagcttccctctcccctcccctccccctccgtcagctggggagggcgccggcggctgatcgaccggacagacagctgaacggccggaaatggcggcggggcgcgcgccgtggcttcgccgccggcctcgtggccgtgctgatggtggtggccgcgcccgtgcccccgcgcgcgcggttcgtggtggaga

SEQ ID NO: 279044 - DNA, 719 bp, Zea mays
cggacgcgtggcggacgcgtgggcggacgcgtgggcggacgcgtgggcggacgcgtgggcggacgcgtaggcagtcacctgacaaagattactcacggaaaagttggtccctgagctgaccagatcaccaagcaaagctgcaaggatgttttcaggaacacaagacaagtgtgcgacttgtggtaaaactgcgtatcctcttgagaaggtaacagtcgaagagaagtcctaccataagtcatgcttcaaatgctcccacgggggctgcgcgattacaccttccaactatgcagccttggagggcatcctctactgcaaacaccatttctcccaacttttcaaggagaagggaagctacaaccacttgatcaagtgcgcgtccgtcaagcgcgctgctgaagcacagccagaacaaccggcctctgattcctcctcctgaccacgccatttaaacagtgggggtttggaggcgagagagttgggaagcctcctgtttctacttaaaaccgcgtgatgtatgttattccatctatgccccgaggatactagactactctatttcggtatcctctgctgtgctagctggatcatatcagctaaccatggaattgctgtcattttcaatgaaactgttgtgcatcaagtagtgaaatcttcactgaaatcgggtatcttgcctttattgatcaatatattatctatgttgttttgtcgtcttt

SEQ ID NO: 279045 - DNA, 458 bp, Zea mays
ttcctcatattgatactgaggaagagagggatagcttcatgagcatgctccggaagccattacctgcgcactgttaggattaatgcgagctgtcaattttttcaagatatctgctcgccattggaaaacgacttcaggaaatcattagagactgaggtgaccgatgatcatgaagaagatgctattcggcctttgccttggtacccgggtaatcttgcatggcatttgaacttttctcgaatgcagctgaggagaaatcaggcacttgagagttttcatgaattcttgaagcgagagaacgaagttggcaacataactaggcaagaggctgctagtatggtcccaccactgtttctgaatgtgcaacctgatcatcatattcttgatatgcgtgccgctccaggatctaaaactttccagttacttgagatgattcaccagtcaacgtagcctggact

SEQ ID NO: 279046 - DNA, 804 bp, Zea mays
  unsure (1)..(804): unsure at all n locations
ngcaatnggntcagaaactgcaggatccatagcatacccagccgctagatgtggagtaacggcattgcgcccaacatttggaacagttgcacgaaccgatgtcatgagcatttctgagagtttggataagcttggtcctttctgtagaagcgcagtagattgtgctgttgtattagacacaattcgcggaacggatgccggtgatccatcatcgcgtgaggttgctttgggtgatccatttcatgttgacatcaccaaactcactgtaggctacctcgatgacgctgagatggaggttgtcgatgttctttcctctaaaggtgtcaagctggtccccttcaagctgaactacactgtggaatcagtccagtccatcctgaacataacgatggacactgatatgcttgcgcacttcgataactggcagcgggaaggacatgatgatgactatgaggcgcaagaccagtggccggtagagcttcgtcgtgcacggttaatcccagcggtagattatatacaggcgcagcgagcacggggcaagttgatcagagaaatcaaagatagcttcactgttgatgcgtttgttggcaacgtgactgactgggagcgtgtctgtctcgggaaccttgttgggatgcctgtggtcgtggtgccgacaggcttgaagagcatcgagaacccgcctaaaggcggtacgaagagaagaacaacagtgacgacaggcatctacgctcctcctgaccacgaccatattgctctggcgctggcaatggcgtaccagtccgtcactgatcacaacaaaca

SEQ ID NO: 279047 - DNA, 482 bp, Zea mays
acgcgttgagtttattcattctcttatttggaacgttatgacaacaagaagccactagaaagaataaaggaacagaatgcagtgacaccaccgctccatcatgtaggtgttattacacatgttagtactaaccttttatgtttatatttgatcaaacctaaaatggctgactcattaaagaatgagaaatgacaaacttttgtgttagagggagtagataatggtgatctgtgcaagctaatctgcagtagtagtcaccagccgatgatcatgtgtttctctgaattctgaaacctaatcctgcttcaaaatggcatatataattcctggtcctctcgaaaaggcaatagaacctgagcttgtgatcttgttttaggagtagataatggtatataattcaagatgttaagtatatataaacatgaatcgtatatgaacccagtttctgtgcattctgaaacctaatcctgagatgatgtgat

SEQ ID NO: 279048 - DNA, 672 bp, Zea mays
atcacatgatcaatctgctattgatgattcggatgatgttattattcttcaagagtcgccggatttgacaacaagggatgaaaaagacaagggtagctgctccaacacttctgcacagcccagcacttcttctagaattcacatagcagcacgagatgataggacaacaagtgatgcacttgatagttcaaagcgggaatgtggtgcttgcacacttctgaaccagcctctggcaccaatctgtgaagtttgtggtacaacaaaacctaaaattgcaaaggcgaagtacacaacttggtcttgtaaattttgtactctagagaacagcactaaacttgacaaatgctcagcatgtgatcaatggagatactcatatgggccacctgtagccacatatggcccaagctatgattgagataacagtgaaggccacaatagcgcagacgacactatctgggcaggcatctgctgcattgtcgatataagttgtgttatctgcaacagttcttgctctattactactcatgtcatatcaggttcaatagggtctggaaaaatctgatacctgttaagttggtagtactgtttaagcgaccctcttttgtggaaaaaaaaaaaataaaaaaaaaaaaaaaaaaaaaaaaaaaacccacgcgtcacgccacgcgtccg

SEQ ID NO: 279049 - DNA, 962 bp, Zea mays
cccatgcttccgcccacgcgtccgcggacgcgtgggtaaatgatcctaccgaccaagttccagcagcaaacagtgaacttgtggtgatttttcttaagtttcttcttgataaggatccaatcaaacaactacttgaagcagatgagagaattgagtgtgatatggatactgcaagacatgtagaacagctagtagtttttggaggatttacagacacccaatttttggaaaagagtttggtaaatcaattcaatgaattggaagatagcttgaaggaggctttcttgatgccatttactgctatctcttcgcagatacaatgtcaaggattgcttcctttatatcctgttacatcatcagctaccttgtcatcatcctgctcgccaacatcaatatcattttataaggatgaagattcatcgcatgaggaatcctcctatagcttgactgactatgtatgcttgaagatacctgatggatcattaaataaagtaaattgcatcggtgtgataaagggctctggtaactgttgtactaccctcagcatgatgtcactttcaggttttctgttgcatatacctgacggatatgagtgtgttgacctgtcactttataaggacaaccaggtagttttactactgagtgaaacgtcttgttctgatagccctggaaaatcttggatggtgatgctgcaaatagagaacttgtcctgtatgccactctcaggaacattccctgcaaatatttacagtttgcaagaactggtggcactcgatctgcaattggacacagattatgggaaagttcgtagcatacctcacaccgtatctactccatttgcagttagtgcatcgagaggagtagcctgtgtcttttcatcccggaggcatgccttggtttatatccttgatgaggatgaggaagcggagggggatgaaacttccgatatggagtgattatta

SEQ ID NO: 279050 - DNA, 506 bp, Zea mays
cacatgctagcgtgcgtgtgcaacggctaccacctgcgcgacccaccgcgagcgcccgcagctaagctagctctcgctcgcgcgctctgggagaggagagatcaatggcgtcccgtggcagcatgacctgtagtcttcagctcgccgtcctcgtttccgccgccatcgcgctcgggttcggcgtccgggccggcgaggcgcagctgtccagcgagtactacggccagacgtgccccgtcgtgcaccgggtcgcgcggcgggtgctgaagaaggcgcacgaggccgacgtccgcatctacgccagcctcacccgcctccatttccacgactgcttcgtgcaaggctgcgacggctccatcctgctggacaacagctcgagcatcgtgtcggagaagttcgccacgcccaacaacaactcggcgcgcgggtaccccgtggtcgacgccgtcaaggggcgctggaggaggcctgcccaggcgttgtctcctgcgctgacatactggcca

SEQ ID NO: 279051 - DNA, 597 bp, Zea mays
gcaagagcgaaaagttccctcccccacatcaagatggtgcggttggtgtccctttggacacttcaaatcatatggacccactatatgagcctccagacccgtcttccttcagcactgtgttcacgcacgagaaaggcgctgtgcctacttggtccggaccattggttgatcctgctgcagtggtgaaccaaaagcggaagcacaagtttgggcgctcatcgaaacaaccggccactgcccgtgctcggtaagatcctaaggatcaatatttacaggtaaaaaaaaggagacttcaacatgggggaaatgctccatgcagctgttttgcaaacgaaaaatgcaatgataatgtattttgttggttacctgttgtcatgtgagtgattttttttctagacatcatgtataggctggggagggagttgaagtagttagctctgtatattaggttttctttcctgctctttaagcagctgcgtttgatgttagatttatttgaatggaagcttagatctctagcgtttcactacccccctttccgttgaaacaggctgttgcctgcataaacagtcacccattcaacgcaaattttcaaaa

SEQ ID NO: 279052 - DNA, 297 bp, Zea mays
tcggtaagatcctagaggatcgatatttacaggtaaaaaataaggagacttcaacatggtgggaaaatactccatggcggcacctgcacgctgttttgcaaacgaggcatgcaatgataaagtagtttgttggttactgttgtcatgtgagtgatttttttttctagacttcgtgtataggctggggagggagttgaagtagttacttctgtacattaggttttctttcctgctctttaagcagctggtgatgttagattcccttgaatggaagaatagacccctagtgttcccgcc

SEQ ID NO: 279053 - DNA, 415 bp, Zea mays
tgctcatcgtcatcgggttgctttgttaggtctccctctcgtaccgttccccgctctgcgcgcgctcgtgcgtcatatctggcctgcgattcatttcacggcgccgtgtgcctctaatatggctggcgtctgtgcctctttggtgaggttttcgactccgtggctttgccttccctctggagacagcgggtggtgtcttcagccctgatggcaccatgtcatgtgcgcgattggatcatggggattccgatggttcacagcgcttcttcaccttctccgtcaagggttctgtatgttgcaaaccacggtgtggttctctttgacatgtccattgacgactgccatactgtgcatttctgatagctttgcgcagcttacctgtcttattgcaaaataaccagtagtaccattggcg

SEQ ID NO: 279054 - DNA, 757 bp, Zea mays
cccattcgtccgctcatctagggtttaatcctctgaggcacgctttcagaaacaattggttgattgctattcgatagatcgtactaaaggaagcacatggatctagtatgatttatatctaattcagcgcaactgatcgtggggattcgattctccatcgtgaattgtggtgcctttccgatcagccatggtgaagaggctcaggcgtaagggcgacgtctcctccgcgccgccgcccaaggcctccgcccctgggtctaccaagtccgtcaagttaaagaagggggtcaaaaccgttccgaagaagttgaaggggctctgcactgaatccgtgggcatcgctgaggcgtctgcttcggcgcagacaccggccccaaaatcaatcaagacgagtccggcagcggccaccgccgcagagaccgcagatgatcgggtcgcccagaacaaaacggaggacagaaatttgagtaggaaggagacaatgaaggggagagaggcggagaagggagagatgaccagtgatggggtcgcccagaccaagacggaggacaggaaggccagtaggaaggaaacgatgaaggggatagagaagaaggcggagggggaagagaagaggacgagtaggaaggagatgatgaaggggagggaagaggagcgtgtgaagagggaagagaagagaaggaagttgacagggaaggaaaaggagaaagagagtgcctctggattcatattcatgtgcagtgcgaggacaaagcca

SEQ ID NO: 279055 - DNA, 697 bp, Zea mays
ctcgcgggtcgacacaagcctctaaacagacttctattatgaacgaaacaagtactgtctgagctccaagataccccttggagtagttttggcaatcccgccgttcaactatcctgtcaacttagcagtttctaagattggcccagcactaattgcaggcaatgctcttgtgctaaagcctccaactcagggcgctgtggctgcacttcatatggtacactgcttccacctggctggtttcccgaaaggtttgatcagttgtgtgactgggaagggttctgaaataggagattttcttacaatgcatcctggagtcaactgcataagttttactggtggcgatactggtatagccatttcaaagaaggctggaatggtccctcttcagatggagcttgggggaaaagatgcttgcattgtgctagaggatgcagatctggatttggtttccgcaaatatagtaaagggtggcttctcatacagtggccagaggtgcactgctgtcaaagtagtgctgatcatggaatcgattgctgatgctgtggtacagaaggttaatgccaagttggcgaaactgaaagttggcccacctgaggacgactctgatatcaccccggttgtaacagaatcctcagccaacttcatcgagggtctggtgatggatgcaaaggagaaaggagcaactttctgccaggag

SEQ ID NO: 279056 - DNA, 439 bp, Zea mays
aaaaagaaaccatatgaagggacttcttgttgctgcaactgactgtgaaccccagtagatcacgcgccttcttcagtcaaagatgaggattgggctagcagagaaaactgtccaaatggcgctagggcaagctgccgtatatgctgacaaaaatcctttgccaccaaaagttcaatcacctttcgaagaggctgcaaaaataattaaacaagcatattcggttcttccgatatatgataaaattgtcccagcgatactcgaagtaggagtttggaagcttccagagacatgcaaactttccataggtgtccctgttggccctatgttagcaaaagcaacaaaatctgtctcagagatcatcgacaagtttcagggtcttgaatacacttgcgagtacaagtatgatggtgaaagggctcagatacattgcatggaggat

SEQ ID NO: 279057 - DNA, 792 bp, Zea mays
cccacatctcgttccttgtcctccccatttcgagctcaagctcaatcacttcggattggcggcgggcacgcgccggacgaaatggaagcggcaccatccgcccgcgccttctccccgtcctcgtctccctccgcgggggctagacccagccttcccctcgcgggcctggcctcgcgctcgcggcgcgcccgggtgctcgcggcgccgcccccgccccgcgccgtcgcctcctcccgcgcgccgctggtggtctccagcccgccaccgccggaggactccggcacgcacaaccccgcgcacgccaaggtcgaccgctccggccgcttctgcagcccccgcgccgcacgggaactcgcgctgatgatttcctacgccgcgtgtctggagggaaccgatgtcgtccggctcttcgatcgcaggatcagcgcaaggcgagaacccgggtttgttttcaacaaggcatgcctactgagttacaaccatatgagctttggcgggggaccgctcgaggttggaacggaggaggaggctgagaagctgaccagtcagaacgagaaggattcagccaacgaagcagatgtactttcagctcctccaaaactggtttacaacaactttgtcttacggttgtccagggaacttttagtggctgttgccagtggatgggataagcatgtagagatcatcgacaaaataatcccccaggcttggaaggatgagcctgtggcaaggatactcgagctctgcattctacatattgctatggcagagatgacatcaaaaggaacacct

SEQ ID NO: 279058 - DNA, 811 bp, Zea mays
ataactgaagaagtaaaggagttgacaggtggaacctattatcaagggataaggagtcgattgtattctacagagggaaagatttcctccccccagctgtctctctggcaatagaaaaacgcagaaagctgggcagttctacaatctacaaggccaagcctggcattgaagaaagcatgcctactcaaaatgactctgtactgaaggtatcaagtgatgtctcggtacacgttcgtgaagagggaacttctgtcacagagaatagagctgaatctcttaatactgttgcgaaggatgttgaaaccagattatctcaggccatagcagagaaagcaaaagctgaaaaacttattgaagaactagaaaaggcatctccgctttcaaaggctgaagttagagagactatatcagaagatgagaggtacatgttgaggaaagttggattggagatgaaacaatttctgctgctaggtcggaggggagtttttgacggaactattgaaaatatgcatcttcattggaagtatcgagaacttgtgaagattatatgcaaagaacaccgccttgaagatgtggaatacgctgctcgaactctaaaggcagagagtggcggtattttggtggcagtggaaaaagtgagcaaagggcatgctataatagtatataggggaaagaactacaagagaccatcaaaactcaggccaaaaactttgttgagtaaaagggatgctttgaagcgttccctggaaaaccaacgttgtaagtcccttaaggttcatgtacttaagctgtcaaagaacattgactactt

SEQ ID NO: 279059 - DNA, 659 bp, Zea mays
cctttgcgtccggtcctggctcatagcaggcgccaggcggcagtgactcatcactactagtgatcagaccagtgagctagcgactgtaccatgcagcagctgtaggagagcctggtggtaggtaggataggagtagcgccagccgccaagtgcgcgtgcgggctggctgcttcgacgagcaggagggagccgcaccgccgggctcccgcaatgtcgcctcctccgcccccgccgctgctgcgcaacgagctgtcgcgcaggacggcggtgctgggcctgcgcctgtgggtgctggtgggcatcgccgtcggggccgccttcgtgctgctcctcgtgctcatctccctccacctcgccgcggcgcggcggaggcggcccaggaagggcgtcgcgcacgcgcccgcgcgcgcgccggcgggggcgccgccgctgtccccgtccaccatcccgcccgtgtccaaggagatccaggaggtggccgtccacgtcggctcgctccgccactacctcgagacggggcacgcgttcctcaaggacggcggcggcggcgacggtgagtccgtggcgtacgggtcgcagcgcgtccacatcgaggccggcaagggccagcgcatggtcgcggcggcgtccgacgcgctgtcggccgccgtgggccccga

SEQ ID NO: 279060 - DNA, 893 bp, Zea mays
ggatactccacctggttttaattaagctcaaccagtccattcaactgaattcacagaggtgcactgttcaaagccaactgaatcagcagctgtagatgtcccaaatggaaacacatccattaccagcagctttgtggaaaagcttgttggtattcgtcctggttctgcaaacctcaatagctcaggggcaaatcaatcagcagccagaatacctgatccaattcatagtcatacagatgggcactcagatttttcgtcatcctttgagcacaataacatgactggcaaacatacttcaataagcgaacttctagaatttgaggggagtgctgatactggcaccaaaatatactcaactgacatgagaaataacgctgtgtctgcatcaagcttttcaagcattgcacaaaggtttcttgctaatacacttcagagaagaacttccaaatatactgatcttcctatgtcttctgagagggcaaatgctgatacaagtgcaaaatctgaatctactctaaagccggttgtagaaccaagtgaagcggtttttgcagaggaaactaagtttgtgaacaaaacagaaaatggaatggatggattgtccaaaacatcaatattttctagccgccattactctgagaaatcgctctccgccacttgagtacatggaaatatcttttcaccctatgagccgcatttgagatgtcaaagctgaacctagatttccgtgatggaaatattcatgaaatctctgatgatatgatgttaccgacatttcagttactttcagagtcttccattccacagccaggcagtggttctgagtatgaagatgacacctttggtaggtcacaaagatattcattatatgatgaactgagtccccggctata

SEQ ID NO: 279061 - DNA, 403 bp, Zea mays
gcagatggcaggtggcatcttgtcactgtaactttagatgccgacctaggtgaagcgactgctttcattgatggagttgatgatggatatcagaatgggttgccgttgccaacagataacggtatttgggaacctggaactgatatttgggttggtgctaggccacccatggacttagatgcctttggtaggtcagatagcgaaggttctgactcaaagatgcagatcatggatgcttttctatggggaagatgtctcagtgaagatgaggttactgttttacatactgccatgtctcctgctgagtatggattttttgacctttgcacccggcgatgcttggcatggaagttattctgcaagggtggatgactgggaaagcgaagaagcttatgagctttat

SEQ ID NO: 279062 - DNA, 389 bp, Zea mays
  unsure (1)..(389): unsure at all n locations
cgcgtacggtcggcgatgacaccgcgtgcccctcangttttgcatcacccgccgcacctcctcctcgccgatgctttcgccgcctggcaccccttccacaagaagccctgtctcacggaccgctccacggctcccccctcctcggcccgcctccccgatgcggagactccgacgcctgccccctcggggggcggtagcggcggatccttccggtggttcgggctccgcaagcggcgccgccgcggtccgggctcgcggtccgtgtccggccgcagcagcgaccgccggagatccggcacgtgctccgacttccatttcacgtgcggcgccggtggtggtggcggctgcggcgccactgactccagcggtgagatgtgggcgtctgatgt

SEQ ID NO: 279063 - DNA, 919 bp, Zea mays
ccacaatccaaggacaccgagcagcaggcggcggaagcaacgcgtatcggctggagtccagttttgctcggatcgccgctgggatccgccggccggcgaacggggaagggaagaggggcggagattggagagtacaagcaggggaagatgtcagacgcgctgatcaacggcctcgccggcgccggcggcgggatcatcgcccagctccttacctacccgctccagaccgtgaacgcgcggcaacagacggagcgcgacccctccaagccggcgttcaaggacggcgccgctcgccagttgtatctggttgtgaagaacgaggggtgggagcgcctgtatggcgggcttatgccctctctcgtcggcaccgctgcctcccagggtgtctactactacttctaccaaatattccggaacagggccgaggcaagggcccttgagcgatccaggagagggcttggcgatgggtctgtcgggatgctccagtctctcactgtcgctgccctgtctggctgtgtcaatgtactgctcacaaacccgatttgggttgttgttacacggatgcaaactcacagaaaggcaaacaaacagcaaagacctcagggtttgaattgtgctcttgataagccccttgaagctgctacagctgaaaacgctccatacaaaacaattgatgtttttcaggaactctacaaagaatctggagttcttggcttctggaaaggggtaattccggctcttatcatggttagcaatcccgcaattcagttcatgctatatgagactcttctgaagaaattgaagaagagacgagcctctaattttaagggagctgatggattgactgctcttgaaatttttcgcccggctcctcttcaatttcttcagaagagtctcatatagcatgaactgaattgca

SEQ ID NO: 279064 - DNA, 458 bp, Zea mays
  unsure (1)..(458): unsure at all n locations
gctcgtcctccaatccttnaagtctctcttcttgctgaggctgccccaagcccaggcgtaatccgctggacgaggagacggcattgctcgcatcgcctgccctgccctgccccccatgcgtgttgtgcgcatgaacagaggctaggctaccaacaacgcatagcatagccatggatcccgagttcggcgtcggcacggcgccacaaaaggggcggcgggcgtggcggacgacgctgctgctggcgtaccagagcctcggggtggtgtacggcgacctcagcatctcgccgctgtacgtgtacaagagcaccttcgccgaggacatcccgcactcggagaccaaccaggagatcttcggcgcgctctccttcgtcttctggacgctcaccctcgtcccgctcctcaagtacgtctccgttgtcctgcgagctgacgacaatggcgagggaggaacgttt

SEQ ID NO: 279065 - DNA, 652 bp, Zea mays
aattaacaaattatactgctttaatggggcgatcgccatgctgtgagaagattggactgaagaaaggcccgtggacaccggaggaggatcagaagctgcttgcctacattcaggagcacggacatgggagttggcgagcattgcctgtgaaggcgggcttgcagaggtgtgggaagagctgcagactgaggtggacaaactacctgagaccggacatcaagaggggcaagttcagcttgcaagaagagcagaccatcatccagcttcatgctcttttaggcaacaggtggtcggccattgcaacccatctaccaaatcgcacggacaatgagatcaagaactactggaacacgcacctcaagaaaaggctggccaagatggggatcgatcctgtcacccacaaatctatcagtggcactcgcattggcaccacaaacgacaaatcaaccaaggccgccgcaagcctcagccacatggcacaatgggagagcgcccgcctcgaggctgaggcacggctggctcgagaatcgaagatacggacagcaacgccaacaccaactgctctccatgcgcagccaacgatactacctgcctctgctgcttctccatgccttgacgtgcttcatgcatggcaaggtgcaaagatagacct

SEQ ID NO: 279066 - DNA, 411 bp, Zea mays
cgtgcaaggtagcttgcaccatcgtgaagccgccgaagccgagggagcggcgacacattggtacctgctctgctgcagtgctctcgtcctgctcggagatggacgctgaggccggcgaggcgggggtgcagcagccggccggggcggcgtccacgagcaccgcggcggtgccgttcgacaggtcgtcgtcgcggctaggacgcgccgggcgccgagagcttcgacggcgcgctcagggagctcaaggatctgcggtctcagctgcacgaagcggcggactgctgcgccaaggcgttcctcagcaccgacaagaagaagatgattctggagggtacaaagggttacatatgcgatgcggtggtagctgtgatcgatcacctggggacagtttcgtccaagcttgagcacaag

SEQ ID NO: 279067 - DNA, 1084 bp, Zea mays
  unsure (1)..(1084): unsure at all n locations
ggtcnctgctgaaaagtgtacaatggcgtcaggagccaccttaagctgggttaaaaccccatttgacacccgaagatttcatgacctatctagtctaagtttccgctgccgaaacccttttggatcaattcagccctggtggctgcaaactgatcaagactcatccctaatcaaggttcgtgtggctgctgattattcagactcaatgccagattcaaagtacacgagagatcggggttatcaccctcttgaagaagttaaagagcgtccaaagaagaaggacctgttgctgacagatattgaaacagctagaacagtagtagaggcaaatagcaaggggttgcttgtatttcctgctagggtacacaatgaacctcatggacatgtttcttggtcggagtttcaatatgttgttgatgaatatggagacattttctttgaagtacctgacagtgagaacatcctggaagatgatactgcaaacaatcctgtgacagttttgattggaatggatggacccattattggagaaagtagtgtggcgattagtgatttcagtgattacatggatggtgaaaattttatggacgttcctgatgagcaccacaccaagattgatacagaaataactgatattctcatagagtgggggatgccggcaacaatgcgtgcagtacatccgatttactttgccaaatgtttgacaaaggccattcataataataatggggagaagatggatagtccatcaaacggtctctctattgtaggatatctgagacctgctttcatagaggaagagtcttacttgaggagcatgtttcatggtgacaatggtggttattcatctgactggaaagtagatgagaccgatgaatacaacagagtaactcggccagtttctggaaccaatcgcctcattggtaattgagttggttgaaatcttgcacgtcagctatccactttactccagtttttattttactagtactaagcaaatattcagatgatgataaatcaagatttgacttcaatcatgctgaaactagaactgattcaatgatctacaagctagagataatga

SEQ ID NO: 279068 - DNA, 888 bp, Zea mays
cgttccctggctactcgctagtcgccacttctcccgttgccccccgcgtctctcttctcgttgcgacgactgggcgatccctgccgccccccgtctcccgctccccgccgccaggtgcccaggttgtcgccgggcccttcgccggcgatgagcacccaacaggaggttaccgagaactacgcaaatcctaagacatgcttcttccatgttctcttcaaggcatcggcattggcgttctacatactgtccacactgttcgtgaacaacttcgtcatcatctttgtcatcactgtgctcctcgcagcacttgacttctgggtcgtgaagaatgtcagcggaaggatactggttgggctgcggtggtggaatgagattaacgatgagggagagagtgtctggaagtttgagtgccttgatggagagtccctggctaggatgaataagaaggactcatggctgttctggtggactctatatttgactgcggctgcatggattatacttgggatattctcgctcatcagacttcaagctgattaccttctcgttgttggagtttgcttgagcctcagcattgcaaatattattgggttcaccaaatgcaataaagatgcgaagaagaacatccaggattggccaaggagtgcacttctatcaggtagtgtcagatcgcatctgcagtcagcatttggtgtctgaacaataacctacgaccttgttatacgtgtagtgctgtataatttacagataacatgattggttactagagcgcgtctgttttttttttgttggctatgtgcatcttgctaggcagagtcggaagaacattttcagagccgtgtatcaactcgatgtataatgcagcttgaataaaatccttctttaccc

SEQ ID NO: 279069 - DNA, 363 bp, Zea mays
gggggctgtagctcaagcaagcgtaccagtatactgcattattatctccatggtgaatgaaataatgaatgaatcgatcaatgtatacctcccaaaaagaaagaaagaaagaatagctaaaacggcttgtgatttgagacggtgtcgtgtcgcacgttgcacgcgacggcctgtgcccacatcctgagcgggtccttcatctccgctgccgactgcaccctcactagcgctggccgctgccacgcctccgacaggtaaggacgccggggactggtcgtctgcttcttgctgcgccgcggctcatttccactactgccgccgccgggcgtcctctgctcaagcctcggcctgcacgtaatggaa

SEQ ID NO: 279070 - DNA, 515 bp, Zea mays
cgactggagcagtcagtccactccagtacctctgccgcacgctgctcccgccgcgccaccagctcaccaccgctgctagccacgatgcggtcgccgcgaatccccggccgccgcgacgcggcgtcgccgcagacgccaaaggggttcaacccgggcgaccccgtggaggtggtccccgacgaggcaggcctgcacggggcccacttcgctgccgtcgtcgtggggcccagcgccaagccccgcggctacaccgtcgaatacgactccctcctcgagtccgagggctccgaccgcccgctccgggaggcactgccggcgcggagccttcgccctcgcccaccgccgccgaccgcgcccgcatcggaggccccgcccgcggagcacgccgccgtcgacgcgctcatcgatgacgcctggtggcttggggtcgacttcggccgcgccggcgcgcccagcaaggtcagggtatgctttccggagaccagtgaggtcatggagttcgacgccgccgacgt

SEQ ID NO: 279071 - DNA, 927 bp, Zea mays
  unsure (1)..(927): unsure at all n locations
caagctgtgaaaacacgtctgataacttttgtgagatcgttatcaactgtcctggctgttgcatatattctcacaagcttgattcagcaggtacaaaagtttcttatggacatgcgcaatcccaatgatacaagaaatatggggtttgattttaccatgaaagctctttatactggtgtttggattgcttctgtttctctctttatggagttgctgggtttcaatacccagaagtggataactgctggagggtttgggacagtgttgcttacacttgctggtcgagagatttttactaacttcctctcgagtgtcatgatcaatgcaacacgcccatttgtagtcaatgaatggatcgatgcaaagatagatggtgttgatgtctctggcattgttgagcatgttggtttgtggtctccaacactcattagaggtgttgatcgagaagcgatatacattcctaaccataagtttacagtttctatattaaggaataacactcagaggacccattggcgtattaagacctatcttgctattagccacatggatgctggaaaaattgggactatagttgctgacatgaggaaagttttggcaaaaaatccgcatatagaacaacaaaagctgcacaggagagtattctttgagaaaattgatccaaaaaatcaagcacttatgattttcatatcctgctttgtaaagacatcacattttgaggagtatctcaatgtccaggtaatgtgcctttacattgatagatatttgttgtgcaagaaagccttggaacatattatgctggcattcgcctatggtgtctgctgaaaatatatggtctgtcactttggaccctagttntctagcttgtgttcttcaaataaattactcangaaagctgtatgttggaccttcttagaatagtgggca

SEQ ID NO: 279072 - DNA, 719 bp, Zea mays
tcacataatcgtctggctattcacttgcagcaccttggctcattaccaaagatattccggcctcattgggactcccatattaccattggacctccaaaatggcaaggccctgaagaacaagacagccgatggttcgagccaatcaagtggaagaactttgctcatgttagcacagcacccatagagtacactgaaacaaatattacggacctatctggtgtttatattgttacaggtgcacagttgggagtgtgggattttggtgcaaagagtggtctccacctcaaacttttgttctccagggttcctgggtgcacaattagaagatcagtgtgggaccacagcccatcaagttcttcaattcataaagcagatgaatcttcatcgtcctcgagtgataatgctaaacttctgaagattattgacatgacagaaacattgaagggcccacaagatgcacctggccactggctgatcacaggtgctaagttgggtgtcgagaaaggcaggattgtagtgcgtgcgaagtactccttattgaattattaaccaaatgtttaaagcattcattcactcactctgatattgagcactgtgttttaaggtagcatttgttcttttgtttttcatgtatgactttccttcccccttgtaacttgatgtggatccatgcttcttgttgatgcggtgagtgaagtagcatgaacatgtttatgctc

SEQ ID NO: 279073 - DNA, 390 bp, Zea mays
cgcccccactcctatccgcagagtactacatcaccagagggaggttgcgagttgcgaccgggggccggccgaccgagccaaagtacgctaccactcttgctgcaccgaccgcgagggtgcaacaacgacttacatatatatataaatataaatatccgcgccgcagctagctagctagcagagcagcccggccgaagccgtgtagcctagcctcctcacatatagcagcaccaggacgagatcgtccatcgatcgatggtgtctctgcagccctcatcagcggcgccgctcctgccggaggccgccaccgcgaacaagctcccgccgtggctctcactcgtcggcagcgtcgtcgcctcctccacgggtacggcggccaccagcaagaag

SEQ ID NO: 279074 - DNA, 518 bp, Zea mays
gcgttcttgcgtccgcccacgcgtccggtcgatattattgggagggtgggtctcccgtcccgtttcgatgaggccggaggagagagatgctgccgtggggagagtcagggaccagttccccgtcggcatgagggtcctcgccgtggacgacgaccccgtgtgcctcaaggtgcttgagaacctcctgcgccgctgccagtatcatgtgacaacgacgaatcaggctgttgtcgccttgagtatgctgaggcaaaacagggacctgcttgatcttgttattagtgatgttcacatgccagacatggatggctttaagcttctagagcttgtggggcttgaaatggacctccctgtcattatgttatcggtgaatggagagacaaaaactgtaatgaaggggataactcatggtgcctgtgactatctcttaaaaccggttcggctggaagagcttaggaatatctggcagcatgttgttaggaggaaattcaatgactgtgatcgtgctaacattgatg

SEQ ID NO: 279075 - DNA, 1119 bp, Zea mays
cggtcgcgtggggttgcagtggagtctgttaacccttgtcgacctcatgtttcaccacatatagaacatttggatatggcgacgtgtaacatgccgcagagctctgcactagcaccattacctggacgggaatgcctagtggatgaagatgggtgctctgatcctcaaaatcacctcttgtttggtgttcacatagactcacattcacttctgatgcaagggggcattccagcccttcagaatgataacagttcaggcactattccatactcaacctccaatttcctgagcccttctgataacgatttccccttgaatcaaccgctacgcagcgctggctgcttagatgagtcggattatcttccatgtgcagagaatgccgaacaggcaaatcaacagtttgcaacctttgtgaaggtttacaaatccgggaccgtcggaaggttgctcgacatcactagattcagcagctacgacgagctccgtagcgaggtggggcgtctgtttggcctcgagggccagctggaagaccctttgagatcaggctggcagcttgtatttgttgacagggaggacgatgtccttctggttggcgatgacccatggcaggaattcgtgaacagtgtgtcctgtataaagatactttcaccggaggaggtccagcggatgggaaagccgggcatccagctcctgagctcggctccttcaagaaggctgggcaatggctgcgacagctacgcgagcatgcaggagccgagaggcctggacgctgggatggcgccggtgggttcggtcgagttctgaagacggcggagggaagcccaccatggccctcgggtcgaggattactctccctcctgtatgtttctgcagcacttgctagctctgcgacttggaacaaagcacgtagatcaaatggagctctgtgctgctccccgtctgatgatgtcttatggtatagactcgtagcagtaactactacatgttgtatacatgccggcacttcagttcttatcgagtagcaataccgctagtttagtccatccaatcaactacgttcttgttcctatgatcctgttgttgcgatgcagtaaaactttttttttcataataacctgt

SEQ ID NO: 279076 - DNA, 524 bp, Zea mays
ccggaccgaacgggggcagatcgatgctttgggtttgaagcggagctcctatcattccaatgaagggtcgtaccgaagggccggttccgctgctcgttcatggttcccactatcctatctcatcatgtgtatatatgtatgtattccatgggggagggtttctctcgtctttgagataggcttgtggtttgcatgaccgaggagctgcaccgcccccttgctggccgctctttggattgaagggagctctgcatcctgatccacccctccatttttttttgcttgttgcgtccttcctgggacctgagatccgaggcgcgtggtggctcactggagcctcgctacactgttttcttctcctctcctctcctgtgctatttgctgcttctcctaagattctttaggccgtgcttatccgtgctggagtttaacgaagcagcacgttgctgctgctggtgctgccctcatgccctggtggtggactggtatcggtacccgtacttgcgtcgctttattatacccta

SEQ ID NO: 279077 - DNA, 626 bp, Zea mays
gctgggagacacttgtctgcggccaagttccattcggtgctccagaatgttgctgggactaattatgctgtggcatctgcggagaagaaggaagtggttgtcttggatgcaaggaatgtatatgagactcggatcggcaagttcaatgtgccaaatgcgaagaccttagatcctgaaattaggcaatacagtgacctgccttcttggatagacaagcatgctgagcagctgcatgggaaatcaattcttatgtactgcacaggaggtatacgctgtgaaatggcatcagcttatattcgctcaaaaggtgaaggatttgagaacgtttttcagctatatggaggcattcagcggtatctggagcaattcccagatggtggctattttgaaggaaagaattttgtatttgaccacagaatatcagtgggaagccttaaggaaaacatactcggtgcatgtttgatatgtggttcttcttttgatgactattcgtcacgctgtcggtgtagccattgcagaatgttggtcttagtgtgcccaacatgtcaggattctactgaggaatatgcatgcgagctgtgccaaaagaatggaaaagaaccgtgccaactatcaacaggacaaga

SEQ ID NO: 279078 - DNA, 471 bp, Zea mays
ccctcacgctctcggtctctccctctctctccccaaaacctaaaccctagagccgccagacgccactgtccgtggagcagagcaggctgcagcaccgccgcgccggtgtgcggcgtgccggcgtgtgccctccgtcgtctgcccgtctgcccgtctgttcttcgctgtctgctcaagacacggtgaacagtctgttcttcgccgtctgctcgtcttccccgacggcgccctagccctgttcggctgtccggcctccggcgcccacttgcccatcgccggtcggcggctcgcctccatggaagcccaagaaccggatgggcacgaaggtcattcacgtccgccaataccatgaatttctggatcaatgatcaagcgcacgagcacgaggaagaagcttgtgccagcagctaagaagatttcagcggctgctagcactgcaccttcatcatccacatcttgttgtggtgctgc

SEQ ID NO: 279079 - DNA, 489 bp, Zea mays
ggcccggataattccccgggtgaaggggtttctaatcggggggcgccccttttttttttttttttcgctttcttgctaagcacaaatgcaagaacgaattataaaattgttattacattgccaacacacacacacaccacacaccccatgaccggttacttccttgtataaaaaagaagcaacgaattgcattgcatgtcctgcataattaaccttaattactatgcatgctagcagctctctacgctagagcccctctactcgatcataccaaacaataacatctcaaaactgcagttgcaagctttacggagccttcaaacgagtacttgattactactacaccaagctttattgttctacgtaccttcttggagcagtagagatcagtgacctaatatcatccctggttgccggggtgaaggaagcttctagctgagctcagtgagagctggccttgcgagtgatcgaggctatctacagggaact

SEQ ID NO: 279080 - DNA, 415 bp, Zea mays
agagtcgtaaacttgatgaaaaaagacaagctgaaaaggagaaagcattacgtcttgcacgagcactggaagaacaggataatatcttggcagaaaatggcgatgacgatgatgacgataaagaggaagatacacaagtgggagatcacttatctggtgtcaaggtgcttcatggccttgataaggttttggaaggtggtgcagttgtcatgactctcaaagatcagagtgttcttgccaatggggatatcaatgaacacgctgacatgcttgagaacattgagattggtgagcagaaacaaagagatgaagcttataaggcttcaaagaagaaaggaacttatgatgacaagttcaacaatgattcatcgtcaaaaaagtcgatactgtcacattatgatgaccaaatggaaga

SEQ ID NO: 279081 - DNA, 339 bp, Zea mays
ctcccaccaatctttcaggatggtccacaacttacaggcattgctgacaacctgaattacaggcacagaaatgcccagatggcaagcagagcatcagttgaactccacacccacatatatttcaagacaaggccaactgacactgaagctaggatagtaaagatcaaggcaaatggtttcatagtatttgtcccaaagtttggcatagaagggcccatctaccttactccgaagggcgacaaaggcggtgattgggttgttgacgaggtgcaccagagagtaaccaagccccgaacaaacatcagctatgctatcctccagactgtcaggattcatatg

SEQ ID NO: 279082 - DNA, 452 bp, Zea mays
cgcaactaccctctactctctactgcacgcttctactatctaagaaacaacgcacacgggccgaaactaaatttctccaagcgcgcaatcctgtcgccaaccccggccacggatcggggatgtcgtctgctgcgggccgcgcgccggcgccgacgccgatgggctccgccgatcgctgtaagatcgacgggatcgtggcggcggagaaagccaccaggagctgcgtcgaatgccgcgccaccaccacgcccatgtggcgcagcggcccgaccgggcccaggtcactttgcaacgcctgtgggatccggtaccgaaaaaagaggaggcaagagcttggcctagaccgcaagctgcagcaacaacaaaataatggcgaggcgaagacggatgaagcaaaagacagctctagcaacagcagcagcgggagcagcaacttgcaagtggtgcagaaa

SEQ ID NO: 279083 - DNA, 480 bp, Zea mays
cttagaatagatgagcttccatcttcaagtcgcactgtgcagagtctaggttatagagttgggaacccaggaacctcgcatgctccctttgttcattttcatgctggaagttctggtagccatgtaccagaccctgctgtgaattatccacataggtctgaggaaggcttcgctccagtgggttcccatatggacaacagaagggctgcaatgaagcgaaaagggcccagtgtacaccctgcagggatcagtgctactggttattatgttggaagttcttccagtactcagccatctaactctgtgcagccaaatgcaactccacttgctgagccctttcttcgtcaaatacctttaagcattgaccaaagtggttgggatgtccaacacttaattcaccaagaaggatttcagaggaatgtgagagcacgccacattcatagtattccattagtacccagatcagcttcaacataccca

SEQ ID NO: 279084 - DNA, 541 bp, Zea mays
gcgacgggggagttcttcgcaaatatatcccgcactggatacacgcggcgcggccaagcaagtaagcaacccaaaccctccctcccctcccattcgattcttgcctcccacgccgccgccggatcccgcgatggccgaccctcggctgtaccccacggagtccgggtccgacgaccggcgcgatgccgcctatcccggctccgagcgccgcctctacaacccgtaccaggacctcaacctcccctatcggcagctctacgaccttcccacctccccggagttcctcttccaggaggaggccgtcgcgcagcgccggtcctggggcgagaacctcacctactacaccggcgtgggatacctcggcggcgccggggccggggccgcgctggggctccgtgacgccgcccgaggcgccgagcctggggagcccgccaagatccgggccaaccgtgtacctaactcctgcggcagctccggacgccgcgtcggttacacgctcggagtcatcggcctcatgtacgccgggatcgagagcgccatg

SEQ ID NO: 279085 - DNA, 470 bp, Zea mays
cggccctccccttgaagtagataaggtccattgcgggcacgatctctagagggaagcctagaatatattagcatttctgagttctgactgctacaagacgtatatgatcaatactttgatctgatgtcaaaaatggatgcttgtcctcagtgcgtcactagccatgtcctggtggccccttctgcacttctggtgcatccaacagtagtaaaatacaatgatagttgatctgcaccaacgggattctcagctgattaaggcaccgattgctcctctcatacatcgtgcagctcagtcccaggacgttacaggcaatgcatcccaaaggtcgttagatgtcccgggtatatacatcctatgtgtctggatcttctcattattcgagcccaagttccccattatgtaccagcaatgagaatatgattcccctttgcatcggttcatggccgttcagaagaaaccccggaaac

SEQ ID NO: 279086 - DNA, 577 bp, Zea mays
  unsure (1)..(577): unsure at all n locations
gaacaaagcctagctcattgcaaaagtcatacaagatgtttacgtacatcaaccccagtgtgtgtgttgtaactcaccagcccaccacctaacagaccaaaaacgtcagccaaatagagcttgtctacaaccatttctctagaggaagccaagaatatattagcatttctgagttctgactgctacaagacgtaaataatcaatactttgatctgatgccaaaaatggatgcttgtcctcagtgcgccactagccatgtcctggtggtcccttctggacttctggtacatccaacaaaaaaatacaatgatagtttatctgcaccaacgggattctaagctaattaaaacaccaattgctcctctcatatatcgggcagctcaatcccaggacgttacagacaatgcaacccaaaggtcattagatgtcccagatatatacgtcctatgtgtctggatctgctcattgttggtacataatgggggttgggctcgaataatgaccgttgcttattctcccctggactgagaatatgatttccctttgcatcggttcatggccgttcagaagatttcnc

SEQ ID NO: 279087 - DNA, 717 bp, Zea mays
cggtcaccaagtcctctccggatggcaaggccttgtgaccttccgccggtgcggcaagcagcggctcttctcctgtcatgcgcgcttgctctgctcgcggtgcagctgcggccgtgcagagcccagcagcagcagcagcctccgtcgccgggatactaccccagcggcatgttcaggccgctgggcttctccgaggcctaccgcaccctgtggggcgcgcagcaccagacgctgtcgccggacggcaagtccctgacgctctggatggacagcagctcgggcagcgggttcaagtctgcgcgggcgtaccggaacggctacttcgccgcgtccgtcagggtgcagccggggtacaccgccggcgtcaacaccgccttctacctgtcgaacagcgaggagtacccggggcaccacgacgagatcgacatggagctgctggggacggtgccgggggagccgtacacgctgcagaccaacgtgtacgtgcgcggcagcggcgacggcaccatcgtcggccgggagatgaggttccacctctggttcgaccccaccgccgacttccaccactacgccatcatctggaaccccgaccagatcctgttcctggtggacgacgtgcccgtcaggcggtacgagaggaaggcggaggccacgttccctgaccgggagatgtgggcgtacggctccatctgggacgcctccgactgggccaccgac

SEQ ID NO: 279088 - DNA, 1154 bp, Zea mays
tccacgcgtccgcagtgattgaaacagttatcattccttgcgctaggggcaggacaactatctgtgtttcaagccaagttggttgtgccatgaactgccagttttgtttcactggaaggatgggtttgagaaaacatctctcgacagctgaaattgtcgagcaggctgtgtttgctcgtaggttattctcagatgaattgggatcaattaacaatgttgtatttatgggcatgggtgaaccatttcacaatattgacaatgtaataaaagcctcagcaataatggttgatgagcaaggtcttcattttagccctcgcaaggttactgtctccacaagtggtcttgtccctcagttaaaacgcttcctccaggaatccaattgctccctggctgtcagtcttaatgcgacaacagatgaggttaggaactggataatgcccataaacagaaagtacaatcttaacttgcttcttggcacttttagggaggaacttaacctcagacaaaaacaaatagtgctatttgaatatgtcatgctttctggagtgaacgacagtatggatgatgccaagaggcttatagagctagtccaagggatcccatgcaagataaacctcatctctttcaatccccacggcggttcccaattcaagcccacaccagacgataagataattgagttccgcaacgttttagttcagggtggccccactgtttttgttcggctcagcagaggggatgatcagatggctgcctgcgggcagctaggagagcctggaggctatcagctacctttgctccgtgtgcccgagaaatttcaggtcgccttgtgatgctaaacagtgcatacagtaaaaatggtcctgagcagcttgacgaacacacggagtaattggcttggaacgacgattcgatcgtgcaaatcttgcaagttctaccgccttcggaagcttgtgtggacttctgcaataacgtgcaaatctgaacctgggtacttgtgcgacaacacatttagacatggtgttgcttctgctagtacgtggtgtacccaaaccaaattcgataagattattattattataaattggtattttctggcaaatcgttgctgtataagacattaacagtgtaacatgcttacacttcccacttcg

SEQ ID NO: 279089 - DNA, 502 bp, Zea mays
ccgcaaacaaacagaatccacaagggaggcagaggcagacccgacccgaatcaccgccgtcgtcgtcgttgagaagagacaaagtggaggagtaggccatgtccaacgtgcccacctccctccgcgattcctccctcaccgtcttccgcctcgccatctccagctccgacccctggcccttctcttcctgcctgtaaccaccatcagcccccggccggccggcttcttcgtcctccttcctgatcgagcaaccaccacaagcaagcaaaaagaacaccgagctccttcctggtgaccatcatgcccggcaggcatcatcatcatcagcagcagcagcagctggcggcggtggcgcccaaggggtgcgtgacggtgcgcgtgggcctggagggcgaggagcagcgcccgttcgcggtcccgctgggccacctcaagcacccgctcttcggcgcgctgctggaggaggccgagcgcgagtacggcttccggcaccagggcgccc

SEQ ID NO: 279090 - DNA, 327 bp, Zea mays
cagttagctctcctcacaattcacaaacagcaaaccgaccgactccacacagggcaaggcagacccgaatcgtcttcgtcgtcgttgttgcgaagagacatactagtggaggactagtaggcggccatgtccaacgtgcccacctccctacgcgactcccccctcaccgtcttccgcctcgccatctccagctccgacccgtggcccttctcttcctgcctctaaccaccaccagcccctgatcaagctaagtccgtcccttccccttgttcttcttgcaaccgagcaagcgatcagccaagcaagggacaccgtaccgatcgagag

SEQ ID NO: 279091 - DNA, 472 bp, Zea mays
cggacgcgtgggcacagaggttgttcacaatgttatatatgacataattcagaaaggtggagatgctgggaaaaggacaaagggtgccaaaaagttgaaactggaaaaagggatccttttggataattatgttcagaggggttctagattagtggattcccaagcaagatctttgttgattcattcaaagcgatcaaaaaggcacatgtctctgaaacaacataagaaatgtggttcatttgatttagatggtacattccacaagtacgacctctataagccaatgcatgagatgtggaaggactatatcagagagcttatggatctgagcccgaaaaagaaatttactgagaaccttctttcagcagatcttcatggggccctcctaatagtggcagaatgccaagctgcttcatataaaggtgtaaacggcatcatgattcgggatactgcagagacgtttggaattata

SEQ ID NO: 279092 - DNA, 440 bp, Zea mays
gcggcttccagttctctctctctcttgcccatcccccacctcggctggctcagctcagctcctaaacccgcacctacctctctgcctgctgccccggcccctgatcctgatttccccaatcgagagtccgagacccgagaggaggcacaggcacctgcgctagctgcagctgcaaatcgtcttccccagatccggcgccgcctagttcgctcctgctcgcgacagcgcccagagccgtccgcgtgcgcccgcagagatcgtttcggggacagccgagcagagcagagcatagcagagctgactctgccgcttgttgcccgttcttggctgctgttgctggcgagagcgcgcaggaggagcggctgatttttgattctctctgtccctccctccctcgcttcgctcgctcggggttcgtgcacgtatcatgataagatgat

SEQ ID NO: 279093 - DNA, 313 bp, Zea mays
cggctcgagctcagttctctctctctcttgcacatcccccacctcggctggctcagctcagctcctaaacccgcacctacctctctgcctgctgccccggcccctgatcctgatttccccaatcgagagtccgagacccgagaggaggcacaggcacctgcgctagctgcagctgcaaatcgtcttccccagatccggcgccgcctagttcgctcctgctcgcgacacgcccagagccgtccgcttgttgcccgttcttggctgctgttgctggcgagagcgcgcaggaggagcggctgatttttgattctct

SEQ ID NO: 279094 - DNA, 464 bp, Zea mays
cggctcgaggggagttgtatgttggcattccaccaggtgtcgagtctcggctggcagcgctgacagttgacaccgaggagctccagaagctatcaggaatcagggcaggtgcagatgtgccagcagctctgctgaacaacatcgcgcagatggcgtccggtgtgcccgctattttcaacacgctaaacgtccgtcgggccatcatccctgccgccaacggccactgctctgcccgcgcgctcgctcgatactacgcggcgctagcggccggcggttctgttcccccgccgcactcttcgggcgccatgccggccctcggcagccacgtgcacaccctcaagttcccgaccgcgccgctcaagaagaagaagaagggcgccggaaagaagaagggcgccggcggcggctccatgggagacctcaggtccaggatataatcggcggcagcagcgacaggaacgggt

SEQ ID NO: 279095 - DNA, 1333 bp, Zea mays
gcaacattggtgcattctgtcgggaagatgatgagctatttcttcactcacatattcagactggttatgggggttcttttcttcctggcataaagcaacggttgttgtcatatattttttgcaagacgtggaatgaggttccagatcagactttgagggtccaacatctaaagaagaagttctattttcacttccaagattatgttgatcttatcatatggaaggtacagtttttggatcgccatcacctatttgtcaagtttggtagtgtggatggaggggtttctcggagtactgaccaaaacctagcattctttgccgtgtacaacatggagacaacagatatcgtttcacttcatcagaattcttcggaggatatctatgccttgtttgaacaattttatgaccattttcatgcaaacccacaagcttcatcacatggaaaatttatctcctctcattccaatgatattcatgctttggatcaacttcgggttataaaaaacaaagcaagtagctcctcacagtttgtgaaaaagatgatgacgtcattaccttacacttgccaatcacagagtccttcaccgtacttcgacctgtccctttttaggtatgatgagaagctgatttcagcaattgatcggcatcggcattgcacagagcatccaataaaatttatgtcagtgaggcaaaatgttgtcaaatttaagatcaagccaggttcagattctggtgcttctgacagcacagcaaaaagaatctcgtccttcttgtttcacccatttttcccgcttgcactttcgattcagcagacttatatgcagccaactgttgtcaacatccatttcaggagatagaaaaggtataacggttgccttagttgtatttgtgtcattagtgaacttgcagcattgctggtggcaaagttttggccatatgtgctctagtagatatgctggaacaagatccattgtctggcggtgaggatggctagtttgatttctcttccaaaacaaagtacaaaatgcaaatgggctcatcattcatctattgatgtggcttcatgggctcatcagtcatcattgcgcgtgggcagtgttgatctatgctttcatatgcctagctcggagtgtcagatgtgcttgttattggatttgaggcataaggacacgtatattggatggcatggagttggtatattggatgcttcatgcttgaggcgagggtgatctaagctgcgaatttgttttcgaggatatataggaaatatagcattacaaatagttttgagttgtcatattatgatgaagtaactactatttactgaaactgt

SEQ ID NO: 279096 - DNA, 572 bp, Zea mays
gcacagagcatccaataaaatttatatcagtgaggcaaaatgttctcatatttaagatcgagccaggttcagattctggtgcttctgacagcagaatagaaagaatctcgtctttcatggttcacccatttttaccgcttgcactttcgattcagcagccttatatgcagccacctgttctcaacatccatttcaggagatagtaaaggtatcccggttgccctaggtgtatctatgtcattagtgaacttgcagcattgctcgcggcaaaattttggccatatgtcctctctagtagataagctggcagatgttacagtagggcctaagatccattgtctggcggtgagaatggctaggttgatttctcttccaaaacaacccccaaaatgcaaatgggctcaatattcatctattgatgtggcttcatgggctcatcagtcatcattgcggcttcacagtgttgatctatgctttcatatgcctagctcggagtgtcagatgtgcttgttatttggattgaggcataaggacacgtatattggatggcatggagttggtatattggatgc

SEQ ID NO: 279097 - DNA, 453 bp, Zea mays
ctcagaaataaattcggtttcaggcgtcttccaacataccacttggagaatgaagataaaggtgacaggcagaagtttcctggagaagcaaggacggtgttgaacaagttacttggaatgggcattgttgctggagtggatattcggcaatgtcatggtccaggaggcaaaaatgtgttgaaggatgcggacataactgcgagtggcattcaatgccagtgctgtggtaccacattcacaatgtccaagtttaagtgtcatgcaggtctcaggcaagaagtcccatctctgaatcttttcttggatacaggcaaatcttacagtctttgtcagcttcaagcatggtctatagagcaaaaagtgaggaaagagcatgcaaaggatacaatgtcccttcaagcaaaacaaaacgatgatacctgtggatcatgtggcgattggggtgaactgata

SEQ ID NO: 279098 - DNA, 1022 bp, Zea mays
cacataaaaaaaataaacaaagtgaaacatccagtcaaaatggagaggatgcgtcagctggccagcaagatgaaatggatgttgtttgtgaaaaggagctgaataaagctgaagatcaaattgatgatctgtcgaaagaagcaacagaaccttcttggaaagtaaccagagagcttaagccaccacttgttcttgaggctttggctgctactgggttgcggtctctccggtatgcccgtgaagttgagggcttcggaaaggtagttgctctggacaatgataaagcttctattgaagattgcaaacgaaacataaagttcaatggtgcttccgctactagtaaggtggaagcttacttggttgatgctcgaattcacatgctgacgcatccaaaagaatttgatgtggttgatcttgacccttatggatcaccatctatatttctcgactcagctgtacaggctgttgctgatggtggtctattgatgtgcactgccactgatttggcagttctttgtggtaccaatggagaagtttgttacgcgaagtatggttcattcccaaccaagggcaagtattgccatgaaatggctcccagaatcctccttgccagtattgagagccatgcgaatcggtacaagcgatatattgtgcctgttctctctgtgttcatggatttttatatccgtgtttttgttcgagtattcacttctgcaagtgaaataaagaatacacctctaaaactttcttacatatatcagtgtgttggctgcgactcttttcatcttcaatgtcttgcgaggactgttccggggaagaataatggtgtgaagcatgcacctgctattggacctgttgttccccatgagtgcagtgactgtggaaagaaatttaatgtaggtggaccaatatggtcagctcctattcatgaccaagactgggtactttctactttgacatgtgttaagtcagtgcaggatagataccctgcatatgataaaataacttcagttctagatact

SEQ ID NO: 279099 - DNA, 431 bp, Zea mays
attgcttttacatgcatggtgtatccagcattgatccttgcatacatgggacaagctgcttatctgtgtaagcatcataccatggaaagtgactataggattggattctatgtgtctgtgccagagaaaattaggtggcccgttatggcaattgctattcttgcaacagttgtgggaagccaagctgtcatcactggtacattctcaatgatcaagcagtgcacttctctgggctgctttcctcgggtgaagataattcatacatctgccaaagtacacgggcaaatatacatccctgagatcaattggattctgatgatactgtgcttagctgtaaccattgggttcaggaacacaaaacacttggggaatgcatcaggattggctgttataaccgtcatgctggtgacaacgtgtctgatgtccctggt

SEQ ID NO: 279100 - DNA, 555 bp, Zea mays
agcagttcagctgatgcttcatgcctagcatcagcacggcgttatcctaattgagcttttcagccaccatctttatccttcctcatattctccatatcgtgatgcttgtggtttcgcaagaccaggtcttcttgaccttgcaagaccggttcttgaccttgtaagacccaactttacgatacatctcctctttgacctaatcttctctatctcacacctttctctccgttcttacttctcttctatgtctatcccttctgagctgtgttgagctacgctgataaagctaggtactatatataggttaagtgtttttaggaggtgtttctcatatgtgtaatgttgtgagcttgccgtgtgggaaaagaaaatccatatatttgatgttgatggtagctatagagtgaggcacgtgacaaacaaaagtatgttcctgatgcgccatgagcacatgatgctcggccatgtgaagtaggcgcctacatgcaagctaagctatagctagctccatatgtatcgcctcaatggaataagctggctatgtactgctgctcg

SEQ ID NO: 279101 - DNA, 1158 bp, Zea mays
gcaggctcaggccctggcgcaggaggttgctcgcgtccatggcgctctcgtggccctcggccgtccgcctcgccgtcgccgccgtcctgctcgccgccgtcgtcgtcgcgctcttcacgctccccgtcgagaagattttaaaggactttctgctttggatcaaggagaacttgggtgcatggggtcctttggtgctggccctagcttacattcctctgacagtcttagctgttccagcatcaattcttacacttggagggggctatttatttggactgccagtagggttcgttgctgattccattggagcaacaattggtgcaactgctgcatttctgcttggcaggacgattgggaggccttatgttctttcgaaatgcaaagattaccctaagtttcaagcagtagctattgccatccaaagatctggcttcaagatcgtgttgctactaaggcttgtacctttacttccgttcaacatgttgaactacctgttatctgtcactcctgttggtgttggagaatacatgctggcttcttggtttggaatgatgccaatcactcttgctttggtgtacgttggaacaacactgaaagatctatcagatgtgacacatgggtggagtgagatctcgactactcgatggattctgataatatctggctttgtattatctgtggtcttgatcatctgcgtcacaaaaattgcaaaatcatctctggagaaagcattggccgagaatggagagctggatgtaggaacatcgcagcttcctgtggtagcctctccctccgatctgcaacaacctcttgtaatcaagattgacacgtcaaatgaagatcacgagaagtaaaagtgttgtgttcacaatctcggatgtacattctttgtctgttgagtctgtagactatatatacccatagctcttgtgaggccggtaaaagggtaaaaaagcgcaaaaagagagaaaaatgacggtggagtttgactgataggtaatatctttggtgaaaatgcaattgtagtatttcagttgggcctagccgctagggatgaaacgagcggaaaaataactcctgtttgtgtttttttttggtgaaaatggcgccagattcggaaaaaaaaaatgatccttacgaagagtagatctaaggtga

SEQ ID NO: 279102 - DNA, 500 bp, Zea mays
aatcgcagtatcggcaccgttcttccccgcttctccagtccagctcaccagccgccccccctccgctgctgacactgcgaagtgcgaatcaaagccaccaccgcgcacaaaccatggcaccggtggaggcggacagcaccggcggagggcgttggcgctcgcggcgcacgacgcctccggcgccgtctcccccatccgcatctcgcgaagggacactggagatgacgatgttgccatacagatactgtactgcgggatatgccactctgacctgcacaccatcaagaacgagtggaagaacgccaactaccctgttgtccctgggcacgagatcgccgggctgatcaccgaggttggcaagaacgtgaagaggttcaacgtcggagacaaggttggcgtcgggtgcatggtcaacacatgccagtcctgcgagagctgcgagggagggcacgagaactactgctccaagatcatcttcacctacaactcccacgacaggg

SEQ ID NO: 279103 - DNA, 398 bp, Zea mays
gccagacatgtcagaatgcgataaatgaagctgcccagaaaatctcgtccaaggatgcaggtttgacgagctacaccgggagtcccaagactgacagctgtaggaatgttgttctgagatggttgtcaagcaggcttgacccacggtccgcgaaggaaatgctgaggcagatttccaactgcaatgtcaatggagtttgtcctctaagctttccagacacaagtaaggtggcaaaagagtgtggtggaacaatgacgaacagtactgcatgttgcaaggcaatgttaacttatgtagcccatttgcaaaagcaaagcttcataacaaacttgcaagctttaaattgtgcctctatccttgggcaaagttgaaaagatgaatgtatcatgaatgctata

SEQ ID NO: 279104 - DNA, 677 bp, Zea mays
caagctcgcctcgcaccagaaacccgcgaatcaatcccgaatcccgatcgaccggcggcgcgggaggcgatgccggacaaggcggtggacgacgtcatggaggccgcggtgggggcccacttcagcggcctccgcctcgaggcgctgcgcctctccacctctgcgccctcttccccttcctcctcccccgccgccgcggcgcacacgcactccaacggagccgtctacgccaacggcaccaccgagcttccctctcctgccgctgcccggcagccattcgtcatcggggtttctggagggacggcgtcggggaagacgacggtgtgcgacatgatcatccagcagctgcacgaccaccgtgtcgtgctcgttaaccaggattcgttttaccgtggccttacttgctgagagtctgcacatgcacaagactataattttgatcaccctgatgcatttgatacagagcaacttctagaatgcatggggcagctgaaatgtgctcaacctgtaaatgttcctatatatgatttcaagaagcatcgacggtgttctgaaagctttagaaaggtcaatgcatcagatgtcattattttggaaggcattttagtgttccattgacagagagttcgcaatccgatggacatgaaaatttttgtagacacagatgctgacattag

SEQ ID NO: 279105 - DNA, 332 bp, Zea mays
agaggccaccgagcaagcagagagagagagagagaggtgggaggcctggagccctggagggagcgcatgagctgacagaagagagcacagaggcacttggagttggcacgcggtgctctgcttgcccccgcctcctccctgttctatactctcgcaggcccaggccaagcccctcccccgccctcagacgcaccgcggcaagaaatcctccactccatcccggcttccccggaagagattatgtgggattaggtagatgagggcggcgctgttcggtgccgagcggaacggggctgcggacctcgtcggagacaggaagacgctgttctggc

SEQ ID NO: 279106 - DNA, 588 bp, Zea mays
  unsure (1)..(588): unsure at all n locations
cccacccgccgctagcactgtaccagcgctagggggcaacgttgtagtgggaagcggaggcctgtagccgccaaatacaggggagggggacgcgttgaagagagtctgaggcgaacaagggcgacggttcgtctcgctgcgtgcactctctgtcactccccctctctctcctcatcagatccggccacttcctgctcgcctcgccgccggtcccgcgccccggagccctagagctctccccgcgacggggccgccggagtccccgggcgcgcggagagaatggaggcggcgctggaggcggcgcgcgccaaggacaccaaggagcgtctggccggggtcgagcggctgcacgaggcgcttgacgccgcggcgcggcgcgggctgacggcggccgaggtcaccgcgctggtggacacctgcatggatctgacgcgggacgccaacttccgcatcgcccagggcggtctccaggcgctctccgcgntcgccggcgtcgccgacgaccacttcaagatccacctcaacgccctcgtccccgtcggcgtcgagcgccttgacgacggcaagcaaccccgtcgcgacgccgcg

SEQ ID NO: 279107 - DNA, 326 bp, Zea mays
gctagcccttgagagctctctctctttttttttttttgagagcagagagatgggtgattccactagtacgggcttcgcggcggccctggagctgtggcaagagcaccagctgagcatcctcgtcgtcgcgagcctcgccatccagtggttcctcttcgtcttcgccccgcttcgacagcatcggatcccaggtctgctcaggctctccatctggctggcctacctgggcagcgacgccgtggccatctacgccctcgccaccctcttcaactcccaccggtgcgacaccgacaccggccacccctgccgggagctgctgtgggcgc

SEQ ID NO: 279108 - DNA, 373 bp, Zea mays
atcagttgcagtcaagctctcggcttgtcaataggtggatatgggataagaggagttctgatccccgatatgtatcttctgctagcattcaatgggaggatgtatataaaagtatccaaaatctgaatgttggtgaacagaagctcagtgttggactcctgaattttaacaggactgagttcgacgcttggacacacatgctcccagaaagtgatttttcaatcataaggctggagcatgccaatgaaagcattacctggcaaactctctatcctgaatggatagatgaggaggaagaaactgagataccatcttgcccttcgcttccagatccaagtggtcccaggaccacgcttttggaggtaatggctgt

SEQ ID NO: 279109 - DNA, 463 bp, Zea mays
  unsure (1)..(463): unsure at all n locations
caccccgcagccgccctagcacccgcgacgagcaggatctgcccaggtaaatcgacttcaagccggatgcatgccggcagctagtttcttctctgtccctaattccccactccaagtgtttgtctggtcagtaggtaagattatggatggggatccagcacctaccgcacctgggctggttttctagtctggaaggagagcaacatgacacgctcgtgctggaatatagtgcgattttatgttcctgctacgttgcgactgctcatagaatatatgccaattttcatcttcctgctatgtccgtgtatcatgttttttgaaaaataatatctccatatccgcatcctcctgataccgcccatatccatgcatacatatggtttgcttgctatatgcaagcgcctcgaacccggattgctataatntgatgaattcgtgtctctcacttgatcttttttaaaaa

SEQ ID NO: 279110 - DNA, 458 bp, Zea mays
acccacgagccaccaccattacccgcgcgcccgccacaggccacattgtttccggacctgctcggctatatatccgcgagcatctgcatatcgccatatccccgccccgcgcaccgcgagctagctagctactgacacccggcgccggcgccgagtacaatacaaggaaagcagcatggtgttcgagcagcaacaggaggaggcggtgttgccgggcgcggtgcacgggcaccggctctccacggtggtgccgagctccgtgacgggggaggtggactacgcgctggcggactcggacctggccttcaagctgcactacctgcgcggggagtactactaccggtccggggacggcctcgccaccaaggtgctcaaggaccccatgttcccgtggctggacgaccacttacacgtggccggccgcgttcgtcgtgccaaggcggagggggacgccgtgc

SEQ ID NO: 279111 - DNA, 482 bp, Zea mays
gtccgtgcattggatgcaggtccagtgattgcgtgtgaaaggttttctgttgatgaatgtgttaaggcaccacagctactttctatgctgtttcatttaggatccaagctattgattaatgaacttccatccattcttgatggttcggctaaagataaggcacaaccacaggatgactccaaagctacactggcaccaaagttaaattctgaggagtcatggctatcgtttgacgaagaagctaaagtgctgcataacaaggtgagtatctgattctcaatgtgtccaacaaagcttttgccaaccaactctggtaggtgcgggcatttgcaggatggcctgggacgcgcgcaaagctgcaactcataaaccaaaacagtgtacccgatgtactagagattaaggttatcagcacgaaggtttcaacatcatgtgtcaaagttggagatgaaaacgagatactattctctgggagctcgttg

SEQ ID NO: 279112 - DNA, 303 bp, Zea mays
ggatgacattattccagacttcacttcttttgagaaagttgaacaagggcctgaactgtcccttgctggattatccttgaatgcaccccccttgtatgggacaacttccagtcgcttctcaagagaatatcacgaattatcttctccagttaccaagggcctggaactggaactagaacatactaatatgctatatgaagataaaagcaactgggagcaaaattatattggtgatcttcatattgctaatggaaaccacgaccttcattatgattctgaatctggtgtaagctattctgatag

SEQ ID NO: 279113 - DNA, 612 bp, Zea mays
accactacggcaaggcagtagagatacggcgtctcctcttctgacttggccagcgcaacggcagctagttcaattgaaccagagcgctttatagatagaacaaaaatatatactgtagaaatccatcgagaaacaaccgagaagacctgcggctgcggtgaagagagaactcagtggtgaagaagagggaaaaatcaccatgctggaccatctcgtcggactgctgaagctgcgcgtggtgaggggggtgaacctcgccgtccgcgacctccgatccagcgatccctacgtcgtcgttcgcatcggcaaacagaaattgaagacacgggtggtaaagaagagtgtcaatccggaatgggacgacgaactcaccctctctatcgaagaccctgctgttcctattagactggaagtttttgacaaggacactttcgtcgatgatacaatgggtaatgcagaggtggacatccgcccattagtcgagattgtgaagatgaaactccaggacgttgccgacagaaccgtggttaagaaactggtgcccaacagacagaacttgctagccgaggagagctcgatatatatatcggaagggaaggggaaacaagacat

SEQ ID NO: 279114 - DNA, 663 bp, Zea mays
agatccagctaggagttaacatgcctgcaagggcagagcagacccctaaggaagatgaaagcaaaccgttccgtgaggtgtacgatgtggtcctctacctgggcatcattgacatactgcaagagtacaacatgacaaagaaaatcgagcacgctgtcaagtccatgcagtatgactcggtctcgatctcggctgtggacccccagttctactcggagcgtttcttgaacttcatccagaccgtcttccctgagaattcgtagctccatccaccaatacttttcttggaagatgcccgcccactaccacttgctgagaacttcatccagacgacagtccatgtcttcgaatttggagcttgcgagcatcataagaacattgcactctcttcagtgcgtgcctgttccttcctggatgaactggcaggaagagtccccaacaaaatgagattcgttagtgaaattgtgcagaagcaaatcgatcttctctaggctattttgccccgatccctgtggtcaccggatcagccgtctggcttcctggagtaggcttggcgtattgggactcgagcaggaagtagatgtgagttgcgaggattctagtgacagcggcgccatagagctctgggattcactgttatgtctcggcagttgcagaaagctg

SEQ ID NO: 279115 - DNA, 712 bp, Zea mays
cggacgcgtgggcggacgcgtgggcggacgcgtgggccggggttgataatccaaacatgactccattggggcactgcgtgctcaacctgatcacacacctacagtgcaagatcaatgagaaatcgaggctgtatgaggatgaagcgttgcagaacatatttttgatgaataatctgctgtatattgtgcagaaggtgaaagattcagagctcaagacattgcttggtgataactggattcgcaagcgtcgtggtcagattaggcaatactctacagggtatcttcgatcatcatggactagggtgttagcttgcctgagagatgatgggcttccgcacacgatgggttcatcaagcacactcaaagccgcattgaaggatagattcaaaaactttaacttggccttcgaggagctgcacaggactcagacatcatggaggggttggcgatccccagttaagagaagagctgaagatctccatctccgagaagggtcttccagcatacccgtcatttggtggaagatttccgggccaactagagggaggcaggggttctgcaaggtatataaagtacaaccctgatgatttggagaaccaggtcttggagttttttgaagggagaaagccaaatgcttgatggtcaagggatgttcatatcaactatgcaacctcaagacatgcaaatttgatgatgctagttccagtttcct

SEQ ID NO: 279116 - DNA, 540 bp, Zea mays
ggcagacagtgtgatgaagaagacaagggtgattgaggaccagtgggtgccgatgtgggatgaggagttcacgttccttctgacggttccggagctggccctcctgagggtagaggtccaggagtacgacatgtcggagaagcacgacttcggggggcagacagtcttgccggtatgggagctgaagcagggcatccgtgctgtgcccctgcacgatcgcaagggtgtcaggtacaagtccgtcaggctcctcatgcgatttgattttgtgtagccgagccgagccgccattcagattcagcttctgcttttttttcccttcttgtgtgaattgaatgtattactcccttccttccattttcaacgtatatgtgtatgtatggacttatttttgtcggaataaaagttgtatggaatggaatggaaggaaggagtagaactgttttcaaaccccagcttttagatctgtacgggtgattcagttttccttgctggcacattgtttgtttgtttactttactggagatagatttgtccctt

SEQ ID NO: 279117 - DNA, 450 bp, Zea mays
ccgccaacggctccgcctcgtctcccgcgtcgtctaatgccacggactactcccccgccggcacgcatgtcgcgtacgacagcaacggccgcgccatctactacaccagcatgctcccccagtacccgtcggctgtcaatggcatgtcctcggcgggcgccgttctcgggacagagcccgtgaatccggtggccgtgaagccgaccgtgtcgtgaccaccccagcttacacctcgcctcgtcaccatcaccaatggatcaattttttctttcatcctcaccagtgtgcaatggactgtctagagttgctttttttgtgcctgctggcggttctgggttcatgttatgatggcgatgcaagtatgagtagttgtttggtgtgcttagctgtacatacagagcctgtggacataatgtataagtatttatatatattggcctgccatgttgt

SEQ ID NO: 279118 - DNA, 451 bp, Zea mays
cacgagaaaggtcataaaccatgaggagaggggacgggtcttgcgtgccatggatggatgcagctacaaggctgcagctggaggctccctgtccaactcgctcgttgcgctggcaaggcttggtagtagccagtctgctggctaccctgagcttaatattgtgatgggcggcagtgtgggcagtgacccactaggtagtttctacagggcaaagttgcgccgtgctaatgtgcacttcctgtctaagccggttaaagatggaacaactggaactgtcattgttctaacaacgccggatgcacagcgtactatgcttgcgtatcagggtacttcgtcaactctgagttacgattcagacttggccagtttagtgtctaaatcaaatgtactaattgtggaaggttatctatttgagctgcctcacacaattgaagctatcaagcaagcgtgt

SEQ ID NO: 279119 - DNA, 472 bp, Zea mays
cagacatccatatcagagagaattgatggttcaggtggagcggaatagaatggaatggaatagtatacatacacatggttgctgcctctgctctgggccatgcatcatgcatctggacaggacggctatcctggcttgcagttgccctatgcagttttgagtgcaatggtcaccatctgtgaagcacggataccacagagatcctggccccaaccactcttttcacgaatggagctgaggacctttggagttctaccaaaagtgatcttaaatctttgttctttgactttccgctttgtgaacggaaggccccactctgctagtatggtgtgttgatctctgtttctctggtgctgactgaactggtcatacaaaactcgttcaacaggcagaaatgctgactggcggccttctagattgcttctttgacgccgcagagagcacatcaaaaattgtgtttgtttcgaacgat

SEQ ID NO: 279120 - DNA, 815 bp, Zea mays
cggactcgttggagatgtttctgttaaaaactcacatgggaaagataatacagacttgaaacctctgaagcagccagcagtacttccagcggggtcattgaaggggagggaagctggttatcgagctgctcgggaacgaattttcttgggggatggtgccaagggaaatgatagatcatatgtgaaatgtagacaggttcctgtcgttgctcaacggatgattgcccatgcactcggtcaaaaggttcaaaataccacagagacagccgcctccaaagaaagcaaagggaaacataaacagctgccaaatgggaaaagtattccgacacatagcaggaacaacttctgcccagttacaccagataacatagaagcggttctaatggggaggccaagctcagctggtagtaactcgtatcaaactccaccaagccaaaggtgccacgcaactaatactagagctgttactgctgaaagcttgaagaaagagcagactggagcagctaagagaatgtttgcgcatgcactggggctgtctgcagctcgaggaagttgtggtacgctgcccaaaccgaagtaaagatctggagtcgagaacgtggataagtgaagaaggttggctgttgccgatgcaaggtccgactgagcttcatgtcctatcatatgtgagccatgggaatggaatgagcctgccatgggtgggtgccatctactgatctacctctgcgaaacacgttttttgtgatgtgctagtagatgaaagggtttgttggttggatgttaattgttgggacccagagaggatctggtagccc

SEQ ID NO: 279121 - DNA, 1126 bp, Zea mays
ccacgcgtccggccatctatccagtggattgcagcttcggatcttgaagatgcaactgcaatatctgcaccagatgcccatgctgaagcctgggaaactcttaaaggttcatcatgcattttgatacctggaggatttggggatcgtggaatttcagggatgatattggctgcaaaatatgctcgtgagaatagagttccatatcttggtatttgcttgggcatgcagatatcagtgattgagatttccagacatgtcctgggcctggaagatgcagacagtgaggagtttaacaaggatacaccgaatcatgtttgtatgtacatgcctgaggtttcaggagcacatatgggaaacacgatgaggttgggctgcaggagaacattcttcagcaaacctgattgtcttacatcaaaattgtacggaagtcctccacatgtagatgagcgtcatcgtcatagatacgaggtttgtcatcaatctttgtttctaaacgtcctattagctattattttttatgtacattgtaatcatatgcttggaaccgattacttgtttcttttacctatttattataggtcaatccctcttttgttcccatgcttgaaagtgctggtcttcattttgttggttgtgacgaaagtcgaaaccggatggagattgtggagctacaagatcatcccttctatgtaggtgttcagttccacccggagttcaaatcaaggcctcgaagaccttcacctccttttacaggtctaataatggcggccactaaacaactgggagcaatttcgagtagctcgaatggcttcgctggagcttctgactaatgtaagatggggatctcccttgttgctgcagacacccaagttatttcttgtgcacattagatgtacaggaaaacaatctaagcctgaagcagagtgtttctctctctcgaccacctgagtggcgtaagctaacggtcttacagtgtattggggccgaaccgtcatggttttgttgactgtcatttcaattgagcttaacagcagtcagtgctcccatccttgtgattccaattgagattaacagtagtaagtgattatgatctctcttgccgtttgagtggaagtgaaagacacta

SEQ ID NO: 279122 - DNA, 504 bp, Zea mays
gatgacagatgccgagaacacgctgtgcgtggtgtggagcagaccattcttcaagaaacctgattgtcttacatcaaaatagtacggacgtactacacatgtagatgagccgctcatgaatggcaacgacgtcatatagatctttcgtgcccatgctcagaaagcgctggtcttcattttgttggttgtgacgaaagtcgaaaccggatggagattgtggagctacaagatcatcccttctatgtgggtgttcagttccacccggagttcaaatcaaggcctcgaagaccttcacctccttttacaggtctaataatggcggccactaaacaactgggagcaatttcgaatagctcgaatggctacgttggagcttctgactaatatggggatctccctctgggtgagaagcatgtcgcccgttgctgctgacacccaagttatttcttgtgcacatttgatgtacaggaaaacaatctaggcctgaagcagagtgtctctctc

SEQ ID NO: 279123 - DNA, 404 bp, Zea mays
cagtgaggagtttaacaaggatacaccgaatcatgttgttatgtacatgcctgaggtttcaaaaacacatatgggaaacacgatgaggttgggctgcaggagaacattcttcagcaaacctgattgtcttacatcaaaattgtacggaagtcctccacatgtagatgagcgtcatcgtcatagatacgaggtcaatccctcttttgttcccatgcttgaaagtgctggtcttcattttgttggttgtgacgaaagtcgaaaccggatggagattgtggagctacaagatcatcccttctatgtaggtgttcagttccacccggagttcaaatcaaggcctcgaagaccttcacctcctgtttccaggtctaataatggcgcactaacacaactgggagcaaatt

SEQ ID NO: 279124 - DNA, 310 bp, Zea mays
ggatgaaatgggggttcatgagcacgcacgacgccgagacggcggagtacttccgcggcggcggcgtgcactgcgtgctctgcccccgcaaccccgacgccggcagcagcgccgtcatgggcgcgcagatcgcctacatgatcacgcaccaccagaagatcgtcgtggtcgaccacgaaatgccggcgaagcgcagcgaccgccgccgcatcctcagcttcgtcggcggccttgacctctgcgacggccgctacgacacgcagttccactccctgttccggactctggatacagcgcaccacaaggattt

SEQ ID NO: 279125 - DNA, 512 bp, Zea mays
tttttctggctgcggctatatacccccctctggggggctctttatctccttctgtgcttagacgtttctccatagcctgagccaaatctagggggcttgcttcatctgctgtccgatcgtggtttggtttctcggggctggcgcggtcaagagcgcacctgaattccaccgaaatccgccacggtagttcttgcctaggtgtgtcgttggtcgttgccttgtgacccttgcggattttcttgtttctttttgagttgcgatctttgcaggttagtctcccccccaatccgtaatcatccggcgtctaggaaactgcagtccagttttcttatttgttcgtctcgtgccttctccccatcctggttagaaagaatatccgaagggggatttttttttttgcctgttcgtcgaggaagcagtgaagacatactcgttgcctctgataaagctcgggcgaatacacgcacaacctcggaattggcatccctttgctcgctctttctgaatcaaga

SEQ ID NO: 279126 - DNA, 361 bp, Zea mays
gtccgacacaaaggtacagctggagagccctgtcgcactcgcactcgcacccgcacgcagcggcggcagcgcagctggcagatcgccatctcaattctcgacccaacccccacgctggccgctgcactgagcagcaaccaccagtccttctgtccgcagcctaccacacacgccacgcctcgcctccggtctacatggccggcgaactgcgccaccgccgcgcgccgtcggaggacgagggcgtcgcctcctctcaaagactcgactccgcccccgctggcaacggcaaggctggcacttcgtccggcggcggcgagggggcggaccgcggggcgggaagaggacccccctaggttgcttg

SEQ ID NO: 279127 - DNA, 1052 bp, Zea mays
tttaggttaaacccgaaacccctctcttcttgctccttccattggggtcgcgtccaacaagaggctggccagccatcccgcgcgagccacttcctctctcctccccatcggatccagcgccacgcggatccgcaaggcaatccatggcctctacccaggcggaagcggaggcgggggcaccggccccgcccgaggcggcggaggcgaaggagaagggcaagcagggcggggtgctggggagggtgtggcgggcgctcttcggtggccgcgaggacttcgagaagcggctgcagtacctgtccaaggaggaggcagccgtgcacgcgcggatgcgccggcggacgcagttctcgcgccgcgccgtgcggaacctcatcgtactctccgtcctcgccgaggtgttagctgttgtttatgccatcatgacgacaagaaatgaggatctaacttggcaaatgagggcaatacgagtgctacctatgttcattcttcctgctgtatcctctgtcatatattcaacagttgttaacttcacaaggatgtttgagcagaaagaccagaagacccttgaaaaattgagggctgagaggaaagccaagattgatgagcttaaagagagaacaaattattatctaacacagcagcttattcagaaatatgatcttgatccagccgcaaaggctgcagcagcttcagttttggcatctaagcttggggaggacactggcttaaaagttcatgttggagaagaaccaaagctggatgctgcagtggccagaagcaatgatgttgagatagtaccttcagatggtttgagaaacaggaagcaacccagtgcaagaggaagcaggactgggagccccacttctcataccccagcacagggaactgaatccagtctaactgctggtgcagacctggaaactgctccagctcctttggtggtagaacatcatcaaggcttatgggctaatgatggtggcggatggattgcaaagattgctgccttacttgtggcagaggacccatcacagtcatatgctttgatatgt

SEQ ID NO: 279128 - DNA, 1197 bp, Zea mays
gggaagaaccgaggtggaacaactacacaagatttttaagctatgcggttcacctgctgatgattattggaagaagtcgaagttgcctcatgcaacagtatttaaaccgcatcatccatatcccagtacccttcgagatgtttttaaagaggtaccagaaaatgccttgagtttactagaaactctcctatcggtggagccctacaagcgtggtactgcatctagtgctctttcttctgagtttttcaggacaaaaccttatgcttgtgaaccatcgagcttgcctaagtacgcacccaacaaggagatggacgcaaagttacgagatgatgcactcagaaggaaagctagtagcagagggcatggggcagaagcatcgaagaagtcttcaaggatcagcagagcagcaagagaacacactgcagtccctaagcagataaataaagcagaggaacccaaaaacaacgtgaacgcaaccagagatggcacaatactacaggatcgcacgaaactgtcactgaacggcgacgctaggctattagcggacatacagccagtgccagcagcggctcaagtgaaaggaagcgctcgtcacgctaagaacgagtcacgagaggaaatgcccttctcagggccactgagtgtcccttcctctagtggcttcgcatgggcggcggcccaaagaccgcaggaggaccgtgctctcgctaggtcacggaccagatccagctcaagaggccagtttcctgcagaggccgaccgggactgtactaggacccaagccaccacagagagtgctgctgccggcctcagagacataccacgcgtcggctccaaggtccgggtcggctccaaggtccgggagcgagagcctcacgacgcggcgaagcgcgcggtcctgaggaagtggtcgcagctagagcgcccagactcgtttgactcctgcgacacttaccactcccagaacttctccaacgccatgctcgttgcgggcggtgctctctcgtcgaagaacagcttcgagggcggtcatggtcatggtcatggtcaggaggagaaggccgagtactcggggcctttgctgccccagtcgcacaaggtcgacgagctgttgcagaagaacgagcgccatatccggcaggctgttcgaacgtcatggttcaagagaggaggaagaaaggtggacaagtgaggaaa

SEQ ID NO: 279129 - DNA, 460 bp, Zea mays
gctattcgcggacatacagccagtgccagcagcggctcaagtgaaaggaagctctcgtcacgctaagaacgagtcacgagaggaaatgcccttctcagggccactgagtgtcccttcctctagtggcttcgcatgggcggcggcccaaagaccgcaggaggaccgtgctctcgctaggtcacggaccagatccagctcatgaggccagtttcctgcagaggccgaccgggactgtactaggacccaagccaccacagagagtgctgctgccggcctcagagacataccacgcgtcggctccaaggtccgggagcgggagcctcacgacgcggcgaagcgcgcggtcctgaggaagtggtcgcagctagagcgcccggactcgtttgactcctgcgacacttaccactcccagaacttctcccacgccatgctcgttggggttgggggcggtgctctctcg

SEQ ID NO: 279130 - DNA, 309 bp, Zea mays
ggcaaactcagcggccggctgtcccccaaacaaggtcaacaccgccgccggctgcttctgctccacgatctactccaccaccaccggtttctcctcaaacactgtcaacaccgctgcctgccgctcccgctcccgctccacggtctacaccaccacctgttgttccccaaacaccgtcaagtacgctgcggccgactactccccaaacgccggtggctgcaactgtcccagcagcgaagtctggtgcggcaccttcatcaacgttctggacagtgtgctcggctgctgcacatcaccagtcactgcata

SEQ ID NO: 279131 - DNA, 981 bp, Zea mays
tcgtaaaatgcttgctccaccaccaggacagacctttgatggttctgaagaggatggaatcccaatcaaggcatctggagagaatacagtgccccaagtaggaaaatatcctatgaacactaacagtagtactgtaccagagaatgaacctttgttatctgctggggaagttcaaaaggagcgtgccacttctgtaggaacaaagataatgggctatgttaaatgtgtggttaagtttctgaaagacaagcagcttctccagccaccaattattgcatctgcttttgcaattgcaatcggtgttatcccattcttgaagaattttgtacttacggatgatgctcctctgttctttttcacagacagctgcctcattcttggagaagctatgatcccatgcattttacttgctgttgggggcaatcttgtcgatggccctggtgaaggaagtaagaggcttggcgtgcgtaccactgttgctataatttttgcacggttggtcttggtccctcttgctggggttggcattaccatgttagttgataaacttggtttcattcccgaacgtgatagaatgttcaagtttgtcctgctactgcagcattctatgcccacatcagtgttgtcaggtgctgttgcaaatctgagaggttgtggaaaagaatcagctgcaattttgttctgggttcacatttttgctgtgttctccatggcgggatggattatattctatctgagtttgctcttctaagtatgtcacgccctgctaccacaacaatctgcaatttgtgcccgcattccagcctgtcagatgtaactgcattttcttgctagataatgttacttgatctgatttcagtcagctggttcagatgccttactgcgcaggaatatctttgagatcaaatatggtccaaaacgttgaggaagaaaccagtatcatgaactgtacagatatatcgttgcagaggtacaagtgta

SEQ ID NO: 279132 - DNA, 503 bp, Zea mays
tgaagttatcattccttgcaattatataggctttgtctgtggaaacaatggcagtgaaatgggagagatagagaagatgtcaggtgcttcaattacagttcatgatcctaaagctggcgacgcaaactcaaaagttgttatatgcggggatcccgaagaaacaaagaaggcacagagcctgattcatgccttcatattctgtggtctgtatcaaacataattgatgacttgatcactgtgcagtaccatcgtcgtttatgttcttgaatctagagcagttcccatgggcagatttcagcccttgattgcatgtacatgtaccgtcgcctcccgggtggatgtaggtagggctgatgcatgccttgttcaagcatcgccgatgtacatttctgtaggcccgtgttttagtttgggggaatgacaccatggaatgtgatgggttggctgcagggaccccggtgtaatgcttaaaacccccccatcattggttttcatgatttaaa

SEQ ID NO: 279133 - DNA, 575 bp, Zea mays
gacgaccagaggcacgattccttggtgactccggtggccaatatctacgggacagtgagatctcacaaaaagagttggaggatgctcagaaggctgtaggagagtttggaggtgacaaccgtgcaggaattgaaggtactttacataggatatctgctataaggagtaggaaaggaatggttgttggtttgacctgtcgagtcggccgagctgttactgggcatgttgacatggtccgtgatctcctaaattacaaagaaagtatcctatttttgggaaggcctggggtcggcaagactactgttatgcgtgagattgcgcgtgttttagcagatgaatttcagaaaagagtgggcaggtaattgtggacacaagtaatgagattggtggggatggggatgttcctcatgctgcgattggtggagcaagaaggatgcaagtacctgaaccatcaatgcagcatagggtgatgattgaagcagttgaaaaccatatgcctgaggtggttattgtagatgagatcggaactgaagcagaagcacaagcttgtcgatcaattgcagaaaggggtgtta

SEQ ID NO: 279134 - DNA, 821 bp, Zea mays
  unsure (1)..(821): unsure at all n locations
gaccacgcgtncggataaaggtatggctcttatctctgtttttgttttattactacagaacttgaagaatgggcgaggctgatgcaataacgctagcaatccattgaggccttgcattccctgttaaggacttcactgaactagaagagttgttggtgaaagaaaaggcccagtctctagagttctgtggacaaggccactgatcaaaatggggtaccaacctcttctgtgcatgaactgttgaatataaattggtactatcaggaccttctacttgagctttacatttgggaccgcccgctacatcaattattctattgtaaatctgtagaaagtgtttctaattacaagaatcctgctggtactgttgatgggatctgtggtgataacttcgagtgtctgataagagaattcagtggaatttacatctgatgaaactacggcagctttgggggtagccagtaccacggagcctgcaagtaacaaacttgaccatcaatcaggggacgccgcagcacccttacttcatgaaagccaggaagctgggcactcggaatttccttgcaatggaggtagtaaagctgaagaatcttctattgctcatggtcaaataaaggtagatggcacaacagaaaccacaaatgatccttgttttgaaatatccaatgatatggaggtccaggccaatcttacagtagcagatccaatacccatggaacaggagcgttgtagcactccccaacaattcaaatatccttattgggatgacagggagaggtggatttggaattcattttctgagtctcaaatggcttacaggg

SEQ ID NO: 279135 - DNA, 410 bp, Zea mays
atttcagtgtgtgccaagaagttctcaagctcaaactgagcaatggcagctcactttgcagcggcaacgggagtcttcctgagctgccttcttgctcttgcagcacttgcaagctgcaacactgaaggtgacatcctgtacaagcaaagggcgacatggaaggacccaaacgatgtgctcgtgagctgggatccgactcttgccaatccctgcacctggctccatatcacttgcaacaacgacaacagtgttatccgtgtagatttggggaacgcaggcctatcaggcactctgattccagatttgggaggactgcagaacctccagtacctgatgttgtatgggaacaatctgacagggcccatacctgaatctctgggcaatttgacgagccttgagaggctggagct

SEQ ID NO: 279136 - DNA, 1104 bp, Zea mays
  unsure (1)..(1104): unsure at all n locations
cctttgttcgcatggataattggatatacacttggctgcattgctagtcttcctcttatttattggcggtatgttcatcgaaacagacatttggatcaagaacctcagcagccacctacaacatatcctactttgactccttctcagtcatcagaaggacgcaaccatcgtaccagtggtattgttttgcatcttggatgtatctcaatttcttgcccaaggcttagtgtgctggcttatcacttcaagacaggtgttgactgtttctttgctgtatggtttgttgttggcaatgtgtggatttttggtgggcgcagtatttcatcagatgctcaggacgctcccaatatgtacaggttgtgtttggcattccttgcgcttagttgtgttggatatgccattccttttataatgtgtgcagcaatatgctgctgctttccatgcttgatttctgttttgcgtcttcaagaagacttgcgtcaaaatagaggagctactcaagagctaatagatgcattgccaacctacaaattcaaaccaaaacgtgtcaaaaactgggggattgaccatgcttcaagctcagagcatcttgatgagggtggcattcttggcccaggaactaagaaggaaagagttgtttcagctgaagatgctgtgtgctgcatctgtcttacgaagtatggagatgatgatgagcttcgtgagcttccttgcacacacttctttcatgttcaatgtgtagataaatggcttaagataaatgcggtgtgcccactctgcaaaacagagattgggggtgtggttcgatctttctttggcttgccatttggccgccgccgtgtcgataggatagcggcaagaggtgtagctagctcaagattcagtgtatagaacaatgctgtttttccgcataaagagctctgctctgttgcaatggtttgattgattgtcaaggaaagccctgtgtgcatgacttgaagacaatggcccctggtgggagaccctaaggcttgtaggggcaaatttctaaaaaatgtaacggactgaaggtgctgctatnctggaaaaaaccggttttttcccccaaagtaacacacggccccg

SEQ ID NO: 279137 - DNA, 370 bp, Zea mays
gagctactcaagagctaatagatgcattgccaacctacaaattcaaaccaaaacgtgtcaaaaactgggggattgaccatgcttcaagctcagagcatcttgatgagggtggcattcttggcccaggaactaagaaggaaagagttgtttcagctgaagatgctcagttccagctccatgtaccaacttgcgttttggtggaatccagtttatcacaaactgtgaatcagttcatgaattctggtgacagtgtgctgcatctgtcttacgaatatggagatgatgatgagcttcgtgagcttccttgcacacacttctttcatgttcaatgtgtagataaatggcttaagataaatgcggtgtgcccact

SEQ ID NO: 279138 - DNA, 498 bp, Zea mays
cgggcgctggcgggacgcgtggggcgcacacggcacagacccgtttcgcctcttcgaccgcgactccctccgaccgagctgcagtgcgcgtgctgcctgccttccactgttcctgcttccagacatggcggcgaggccggtcgctctggctctgccgctgctggccctcgtctgcgccctggcagcgtcggccgacgcgacgcagttcagcggtgggcgggcagagtgggtggagcgtgccgggcgccggctccgagccctacaacacctgggcggggcgactccggttccagatcggcgaccagctgctgttcgtgtaccccaaggagacggactccgtgctcctggtggacgccgccgcctacaacgcctgcaacacctcgtcctacgtctccaggttcgacgacggcagcactgtgttcacgttcgaccgctcttgggccttcttcttcgtcagctagaacgatgccagctgccgtgtcatcgagaagctcatcg

SEQ ID NO: 279139 - DNA, 834 bp, Zea mays
attcgtccaggaaagtaaaaaaactcccccattcgcgagggacaggagggaggagtcaccgcgtgagctcaggaggaagagggagaaggagaggccgccggcggcggcgcggcagaccgggaaccgccgtgtagcactggggtggtggacccgcgcgcccatgcgtcggtgaggtggtggggcccgcttggcgctcgagttggaatggcggcggcagggaggtggtgggcggtggtccttgcggtcgcggtgctgctcggtgccgggccgggtcgtcgccaacaccgagggcgatgctctatacagcctgcggcagagcttgatagatacgaacaatgtcttgcagagttgggattccactctttttaatccatgtacatggttgcgcggtcccgggggcagcgataacagtgctatcagagttgaccttggaaatgcacaattatctggcgtcctagtgccacagcttggccagctgaaacatctccaatatttggagctttacagcaacaacataagtgggacaataccccctgaactggggaacctgactaacctggtcagtttggatctgtatatgaacaacttctctggcaatatccctgacagcctggggaatctagtgaagctgcgtttcctacgtcttaacaacaatagcttggttggtccgattcccgtatccttgaccaatatctccactctccaagtactggatctctcgaacaacaacctctcaggacaagtcccatcgactggctccttttcactcttcacccctataagttttgccaacaatccaaatctttgtggccctggtacttcgaagccctgccc

SEQ ID NO: 279140 - DNA, 619 bp, Zea mays
cctcgcgtccgtccacgcgtccgcccacgcgggggcgcacttgtccgacttcggcatcgccaagtgcgtgccggccgccgagtcccacgcctccacctacgtgctgggcaccatcgggtacatcgacccggagtacgcccgcacgtccaggctcaacgagaagtccgacgtctacagcttcggcgtcggcctgctggaagctgctcacggggaggaaggccgtggacaacgagtccgacctgcaccagctgatactctcgaaggccgacgacgacacggtgatggaggccgtggacccggaggtgtcggtgacgtgcacggacatgaacctggtgcggaaggccttccagctcgcgctgctgtgcaccaagcgccaccccgcggaccggccgaccatgcacgaggtcgcgagggtgctgctctccctcctgccgcccgtcgccaagcctcccgcgtccaacgcggcggcggccggcgtctacacgcgcttcctcgcgacggcggccgacctgaggcgcggcggcgtggccgacgacgacaccggcgacaacagctcctccgacgagcagtggttcgtgcggttcggcgaggtcatatccaagcacacgctgtcatgatc

SEQ ID NO: 279141 - DNA, 344 bp, Zea mays
ccacgcgttcggcggagcgcctgcttctgctactgtcccaatggaagcactcggggagctaaaagcctctgcctgaagttctaaagtttgacagagagtatgcatgcttccgtccatagcgtatactggtgactgttacagaccctcacccccaccagaaaatattgtctcaagctgctgattttgctttgaataacctaagttattcctgtatgctacggagtatagaatacgacatgtagaagcctatacgttactagtcccaaagttgataaatcatttttgggtgaaatttttttgggttcgtactccattgtgtccctccaatataaattgtgttcctc

SEQ ID NO: 279142 - DNA, 397 bp, Zea mays
gaggtctccggtccgggttcatttcagtaaatctatccatcaagttgtagaaggagacacaggtcaggctgtaaaatatgcagttttgcatctccgttttgataaggatatggctgcacattctgcctgtgactttggaggtggcagagctgaacagctagctcttgctaagtacaggcaagttatatggcaaggaagggtattaaattcacagctaactgatgaggagcttcggaacacaggacgctgcccattgaccccagaagagattgggctgttactggtagcccttggctttgacaacagaactcgactctatcttgcttctcacaaggtatatggtggagaagccaggatctctagcttgcgcaaactatttccgttgatggaggacaag

SEQ ID NO: 279143 - DNA, 407 bp, Zea mays
acgattttatcaagactgctcccaacaatcatagacattatgatgcaaataattaatatgaagcacaagcacaagtccccacatccatctcgtcatccccaacatatccatgctcagagcttcatgaaccagacgtggggacgggcccaagtgcggtaccagtctcctgactcgccatcctcatcttcctccgtgggctcgaacagtggtgatgactcttgaagctgtgcatagaacatagaacttccatgtggatgtcccagtacttagataggtagccttcaggttccggggtttcttggtaactaggaaccattgtcgtgtcatcgtgtgcttcaaactttgatgtgtaaatgtataatgtaagattaaaaccataacttttacgtaccccagttacgaatttg

SEQ ID NO: 279144 - DNA, 313 bp, Zea mays
cagatctcccgtccccggccctccgtcccctcctcctgcgaaggctcctccagcaccactagctagagctaaccccgtgctgctgctgctgctactacctgctgccgcgcgccgttcgttgccgtgcgggcgtgttgtggtccgctgatctcgttcgcgggacgccggggggtggtggtggtggcagcggtggttggtggtgcgcggcgtgaaagaaagaaagaaaaaaaaaaggcccgccgctttgcgctgctctgcttccgtaggtgtcacgagatttggccctagcctttcgctttcctttttcatctcg

SEQ ID NO: 279145 - DNA, 620 bp, Zea mays
cgccagccgcctcctggctccggctccttcatcgcctgctccagcgtgcctgcgtgacataagcgtcgattgattggcgagaaaggggacgaatgcagccgccgttgcgggcgcagggagcaatggctaacgtcgccgctatcctcaccgtcccctgctccgcgggccgccgcccgaagcggagcagccagccccgcggatgcggctccgtctccgtctccgtccgtgcgtcctctggcgcaaacacggtgactctgctggactacggcgccgggaacgtacgcagcgtgcgcaacgcaattcgctacctcggcttcgacatccgcgacgtgcagagcccggaggacatcgtcgccgcggaacggctcgtttttcccggtgtcggcgccttcggctccgccatggacgtcctcaacaggacgggcatggccgacgcactccgtgagtacatccaaggtgaccgccccttcctaggcatctgcctcggtctccagctgctcttcgattccagcgaggagaacggcccggtgagcggcctcggtgtgataccaggcgtggtcaggcgattcgactcctcaaatggcctcatagttccacatattggctggaacgctctcaga

SEQ ID NO: 279146 - DNA, 661 bp, Zea mays
ctactaccctgtaggttcttttacgaatgcttccaaactattatgatcatgtccgtacctgtgagaacaccctcataactaagttttttggcctccacagggtgaaaccttctagtggtcaaaagtttcggtttgttgtaatgggaaacatgttttgcactgaattgagaatccaccggaggtttgatttgaaaggatcatctttaggccgttctactgataaaattgaaattgacgagaacacaactctgaaggatttggatcttaactattccttttatcttgaaccttcctggcgtgaggctcttcttaaacagattgaaacagacagtgattttttgagaacacagcggataatggattacagcctactgcttggtgtccattatagagctccacagcacttgcggacacgtgcatcttatcaccggagcatggcagcagatagattgactgttgtctcagaagatgatgctcaggaagatgatgcccttagacatccagaaggactagtcttggttcaaagcagtggtgagaacagtgttattgtaggccctcacataagatgcagacgcttgcgtgcatcggctgctagatttggcgcagtagacctactgctagctggaacagccaggcttcagatccagctaggagttacatg

SEQ ID NO: 279147 - DNA, 452 bp, Zea mays
cggacgcgtgggcggacgcgtgggcgcccccactcccgagtggccgaagccccgaccggcgaccccgcagatctgtcccattgttctccgtcctccccgtcgtgtcctccttgatccttcttcgagtggcaagtgctgacctcgcctcctattcctccggtagccctactggagcgccgggcgcacagatctgcccacccctggacgctaggcgctgcccagctcttccctgccagccggtcgcggcggctgccagccagcacggcagggctgctgttgcctgctcttgtcctccggcacagcgcagggtgtcggggtcgctcccagctggccatcctctcggcccccttgttgcacagcgagtcagtgagtaactgagaattgattactgattgtcgtcgcatcacattttcgtttgatgaatgcctgtggctagtttttagtgctggcat

SEQ ID NO: 279148 - DNA, 711 bp, Zea mays
acagggaaagattgcgcttgcgcttgcttgggcgccggccgcgccggtggcggtggtcttcgagagccgcggtcgcggcgcgcggtgaagagaaaaaaaggtgtgtgtgtgtgagagagagaggaggctccctgccctctcgcggtgacttggcgaggagggggagggactgggaaagcgaatggttttcgggaaggcgctgtgatttggcctggaaaggaggaacctttccttcctcttcccgtcctttgccggctcttgtaccgccctcagatcggcgacccggttgtttcttcggcaacgggcggaaatgaggctctcgtcgtcgtccggcagcgtcctgccggctcagccgggctcgccggaagctgtggaggagcacaagtgcctgtactcggagttgtggcatgcttgtgccggcccgcttgtttccttgcccgcggtgggtagccgagttgtgtacttccctcagggccacagcgagcaggtagcagcatcaacaaacaaggaaatagagtctcagatccccaactatcctaatctgccgccacagcttatatgccaacttcataatgtgacgatgcatgctgatgcagagacagatgaggtatatgcacagatgacactacaaccactcaacccgcaagaactgaaggacccatatttacctgcagaattaggttcggccaataaacagccaacaaactattt

SEQ ID NO: 279149 - DNA, 570 bp, Zea mays
cgatttttcgtgttcagccaaaaaggcatctactgtcgactggctggagtgtttttgtaagggcgggaagactagtagcaggggattctactcatatctatctggaatgataataaccagcttctcttgggaattcgccgtgcaagtcgtccacagactgtaatgccctcttctgtgctatcaagcgatagcatgcacattggtcttcttgctgcagcagctcatgctgcagccacaaacagtcgtttcactattttctacaaccctcgggctagcccttctgagtttgtcattccactggctaagtatgtgaaagctgtttaccacacgcgcgtatctgttggaatgcggtttcggatgctttttgagacagaggaatcaagcgtcagacgatacatgggtacgatcacatgcataagtgatctggactcagagcgttggccaaattcacactggcgttctgtgaaggttggttgggatgagtctacagctggtgataaacagccaagagtttcactctgggagattgaaccactgatggcctttccgatgtacccaactgcctttcca

SEQ ID NO: 279150 - DNA, 578 bp, Zea mays
ccacgcgtccgccacgcgtccgcggcgagtttgagctgagctcacgctcgtcatctaactctccccccatgcgcaatccaaaaagcttgcgcgctactccactggtccattacttacgcagtcagttcagcgagtgagcactgagcagccatgtagcaatttcaattgcaagttgcaacgcgacgaatacggagccatggacgacggcgccgcaaccacaatcgtccaaggcggcgacgcgcacgtcctgctcctgccgttccctgggatgcagggccacgcgaacccgatgctccagcttggccggcggctggccttccacggcctgcgccccaccttggtggtctcccgccacgtcctctccaccacctccacctccaggtcgtgccccatccccgtggccgccatctcggacggcttcgacgacggcgggatctcctcatgcccggacaccgcggagtacgtgcgccggatggaggccgcggtgtcggagacgctggcggggctcctggaccccgaggcccgcgcggggcggcccgtccgcgtgctggtgtacgactcgcacctgccatgggcgc

SEQ ID NO: 279151 - DNA, 869 bp, Zea mays
caacctttatctgtttcagcaaggatggtatcagatgaagattagtgcaatgtgggaggaaggtggcaacaaaacaccggcttcacctgccagggtcgtgcaatatgaagcttctgatgttggtgcggatgatgcattaggcatttggaaaatagatgacgtcgacaatagcttccacacacagccgtttcggatcaagtatgccagacaagatatctatctgtcggttatggtgtcgttcaacatattcaacattgaagaggagggtccagcagcctcggcggtgatgttgaagtttgagctgatgtatgccccaacactagagaacgggtctgagcttcaagcttctagtgtcacatcttcagcagctgtgcacgaatttaggatcccacacagagcactcctgggtctacactcctactgtcctgttcactttgatgcgttccactctgtgcttggtgatctgacattgcacatagtgtacctgaaagctggtgcagctaaatcatcactgaacgtgcacgggtaccacaccaacgtttacgtcctacatcatatcacattcttaaggcattattaacttctagaaaaatgttccttgaagaactgaacaaaatcactggtgctattggtaagacagtacaggatttagatgttgctgacttgaatcttgctaaatatgagtcatttaatccatcaacatcttggctaccgacttctagtaaacgtgttcccccaaactggcaaaaggtctggggacactctggctggtactttacatgacttcttggagagacccaacgatactggtaatggtacagatgattctttattgtatactcttccccatgaagagctgtttgaactgt

SEQ ID NO: 279152 - DNA, 665 bp, Zea mays
ccgagccgaatcggctcgaggggggatcgcgtgggcggcggagtaggggttgggggaggccagcagttcgtggaccgcagcaaggtgaggattcttctctgcgacggcgacgccaccagctcccgggaggtgctgcggctcctctgcaactgctcgtaccatgtgacctgcgccaagtctccgcggcaggtgatcaatatcctcaactacgagggccgcgagatcgacatcatcctggctgaggttgatctgccggtctccaagtgcttcaagatgctcaagtacattgccaggaacaaggacctgcgccacatccccatcatcatgatgtccaacagagacgaggtgtctgttgttgtcaagtgcttgaggcttggtgcggccgagtacctggtgaagccgctgcgcacgaatgagctgctgaacctttggacccatgtgtggcggcggagacggatgcttggtttgcccgagaaaaacttcttcaatgacaacttcgagttggtgctctctagaacctagcgatgccaataccaatagcgccaccctcctctcagatgagacagacgacaggcctaaagaaaacacaaatcaagaaacgggcacctcaaatcagcttgaatacgagtttaattcttctcttgctgagcgcgaccagagagaca

SEQ ID NO: 279153 - DNA, 415 bp, Zea mays
  unsure (1)..(415): unsure at all n locations
ggagaaggaaggaggaggcgatggcggtggcgaggagaagaagaaggaagggggcaaggaggaagagaagaaggacggcgagaagcaggaggaggagaaggagggcggcggtggcggcgagaaggtggaggaaaaggagggagataaagacgctgccgctgccgccgccgccagcatgtacatgcactacccgaggttcccgttcccgggaggctactacgcgccgcctccggggtacgtctaccagccggtgtacccagcgccggcgtacgcggcgtacgcgccagccgcaccaccagcccatggcgccgcagatcttcagcgacgagaaccccaacgccttgctcgtcatgtaactaaaaaacagaangaccctgccagaagcanaagaggggaaaaagggggaaaaaggatt

SEQ ID NO: 279154 - DNA, 426 bp, Zea mays
ctctcatttcctcacgcacgtctcgcaactgccgcggcacaccgcgccgcttctcctcctcctcctcagcatccgccttccgagccgagagaaaggctgctgccagagggacgagggcgagcgaggatccttccgagcgatggcgcagtacgaggtggtggagcagatcggccggggcgcctacggctccgcctacctcgtcctccacaaggccgagcgcaagaggtgacgatttccccccctttttcgctggtcgtcgccgactccctcctgctctgctccggttcctcatccttccctgtctgttgctttgcttgccgccgccacggcgccggcgcaggtacgtcatgaagaagatccgcctctccaagcagaacgacaagttccagcggaccgcttaccaggagatgtccctgatggcaagcc

SEQ ID NO: 279155 - DNA, 832 bp, Zea mays
gccgtttatttctgcaaatgatgccctgcttaaagaaccatttagcgatgtgattgcttgagaggattccatgaagtacttggctgctgagttcttcaatgattcaaaactacgtgagatggatgatggtgcaaaggaattcaatgtacccgcattcagagaaaatcggaaattggttgcgatggagaatggtgggttgcacaacccttctgttttactcttcaaatcatcatggagtagtggcagtatgacaagtgagactagaagtttcgagtaccctcgtgcgtcttctgtacatcgtccaactaatgatgaagatattgcatttatgtcggtaatcgagcttggagagcttattaggacaaagcaaataacatcacgtgaacttacagatatatttctgaggagattaaagaggtacaatcctgttctagaagctgttattacatatactgaagatttagcatacaaacaagccaaggaggcagatgacttgctggcacaaggaaaatatcttggtcctttgcatggcattccatatggcctcaaagatataattgcggtaccacactataagaccacttggggctcaaggacgtttaaaaaccaagtccttgatagtgaagcttatgtgtacagaagattgaagtccgctggagcagtcctggtagcaaagcttgtcacgggctcacttgcctatgatgacatatggtttgggggaaggacacgaaacccctggaacatcgaggaattctctactggctcatcggcaggtccagcggctagcacctctgcaggaatggttccatttgcaattggttcagaaactgca

SEQ ID NO: 279156 - DNA, 452 bp, Zea mays
ctttgaggtcagggccacagctggtgctgctcaccttggaggacgaggacttcgacaacaggatggtaaaccactttgtcgaggaattcaagagaaagaagaagaaggacattagcggcaaccctagggctctaaggaggctaaggacagcctgcgagagagcgtcgaggaccctctcctcctatttagaggcgagcattgagattgattgcttgtatgaggacatcgacttctacgtcagccatcacccgtgccaggtttgaggagctcaacatggatctcttcagaaagtgtatggcgattgtggaggactgcctcagtgatgcgcgttatgtacgttcagttcatgatgtcgtccttgtcggtggttcctctagaattccaaagatccagcagcttcttcaggagctctgtgacgggaaggagctttgcaacagcatcaaaccccaatg

SEQ ID NO: 279157 - DNA, 592 bp, Zea mays
agaccctatccaaaaccagaggcaagccaagacgcaagctgcaagcacgcgctcgtgcccgcgccatgaagtgctggtgcgtgcacgcgccaaggggagcaatggcgacgccgctctccagccccttggctcccaccgccctccgctcccctctccggcaccgcgccctgctgctgctgctgccgttccctccccgtgcggcctcctccggcgaggacaccgccgcagcagccgaccaggagccggccccggcggccaccaagacggccaccgcggacgacgacttcgaggagcgcgtgctacggatcaagtcccgcgtcgggcccaagaagcgcggcgcgcgcaagaagaaggccgcggcgtccgcgtcagccagcgccgtgacgctcccgcccgtgccgctgcgggagccccggtcggcgctcggcgcgcccgtcgagctcggcttcaccgcgtacagcgagcggctcaacggcgcgctggccgcgctggggctcgccgcggtgctgctcgtggagctgggctccgggcaggccctggtgaagtaccaccagccggccacgctgttcctgcaggcgtacaccgtcgcgct

SEQ ID NO: 279158 - DNA, 377 bp, Zea mays
aaagattctcaagaaaagtttcctgcaggggaacaagcggtaaagaagaagaaaaagagggggccacgtgttcctggaaatgctgaagagcaatggaaaaattttcaagattttggagctgaaaatttttcggggatgcccttgggtccaactggagcattcaacccttactggggcggaggagtgccattgccaatggattacatgagtgcaccgtttcctggtcccatgccttacatgggttatccaccaggtccatttgacccttttggtgggggtgttctcccacaagatccatttatgcccccaggatacatgatgccaggagttcctagggatctttctgaattggcagttaacgctatgggaataaacat

SEQ ID NO: 279159 - DNA, 599 bp, Zea mays
  unsure (1)..(599): unsure at all n locations
cgccaagcttcgctcacacctcacagtcacagcagcatgactctgtagtccatctccctttgcagccgccgccgccgccgcctcgagtggctcccagatccgagccgacgccggagcagggacaagccgctgccagcggcaatggcggacgccgtgggggcgctacctcctcctcctctgccgccgccgccggagtgcgagtccgggaggtcctcgccgtcccacgccgcgtcgccggagttcgagttctggatggtgggcaggaacccgtccccggcgctgctcaccgccgacgagctcttctccggcggcgtcgtgctcccgctccacaccctccaggcgccaggcgctccggacggcgacggcgcgcctcagccccaagccgacgcggacgcggacgccgcggcgctcccgctgcctgacgcgcangcgcaggtggaaggggaggccgcgcagccgctcgcggagtccgccatcgcgccgacgccggacctccccgcggtcacgttcaagtggaaggacatcttcaaggcgggctccggcgccggcgccgatggtcaaggatcgcaagaaggtggaacggcgcgtgagcagcgtca

SEQ ID NO: 279160 - DNA, 547 bp, Zea mays
acggaggccattgtcgctgccgcccttccgcctcatcctttccacgcccactactctgggcccctcccacgacctcaactctgccatggcacctcttcgcgaagtattcctcctccacgacgcccttgccctccagtggtcgacgcctccacctcgagcacacctgcctcatgcccgcggcctaatctgctcaactgagggagagcgaggtggtggtagcacatcgacaattcggtcgggagtcgacactcgggctcggggtatcgtctcgcttgcccgcagcccctttgtttctttccatccggcttctcggcggcggagaggagggggatggcgcaccgactgttgtgggacgtgcaggcgaacgggtgggagcgatcaaatttcaccatcgtctgcgagtcatgcctcggcgacaaaccctacgtccagatgtaacacatcaaaccctagcccttcctgaatgatttgtgtgtttctctttggcgttgtaatgtgattgaaggcgtgccagttctcttgatttggttttcgtctatgatttctt

SEQ ID NO: 279161 - DNA, 503 bp, Zea mays
ttttcttacctgctggcggaggcggcccccaaaagccaaattccccagcccacaccacctccacactccaggttagggtttgctgtcggcgatgtcggatcggcagccgtcggaggagccggaggagcaggtggacctggagggggacgacgacggcatggacgacgacgacgccgggtaccgtcgccgcggaagccgggacgactcggaggagcccgaggaggatgacgacaatgacgagcgccacggcgacgccgacgacgacgccgggatggagccggagccggccggaagtaaaggcggggatgacacgggcaaggggcccgacgtcgccggtggcgggcccgaggacgaggaggagaggagcaagtgggatgacatgctcgccctgccggcccatggctctgaggtcttcattggtggcctgccccgcgacatcacggaggaggaccttcgtgagctgtgcgagccgttgggagaaatatatgaggtgaggttgacca

SEQ ID NO: 279162 - DNA, 569 bp, Zea mays
  unsure (1)..(569): unsure at all n locations
aggaccgtccggaatccttttcgtccacgcgcccgccctcngctggcggaggcggcccccaaaagccaaagggcccattttcaccacctccacactccagtaagcaccccgcctcccccctagatctccctcctccaattccttctgctgctgcgactgaatcgaattgctccactgctactaatctctattctactactgcttgctcctgtttcaatcgggcaatcatgccgcgcgtaggttttttccggcgcaaagggctagggcttgctgtcggcgatgtcggatcggcagccgccggaggagccggaggagcaggtggacctggagggggacgacgacggcatggacgacgacgacgccgggtaccgccgccgcggaagccgggacgactcggaggagcccgaggaggatgacgacaatgacgagcgccacggcgacgccgaccaccacccccggatggagcccgagcccgcccgaagtcaaagcggggatgacacgggcaaagggcccgacgtcgcccgtggcgggccccaagacgaagaagaaaagaacaagtgggatgacat

SEQ ID NO: 279163 - DNA, 779 bp, Zea mays
ccctgcaggaccttaccggggcgacataggttgaagggacggtttgctaccatgccgcaggacgaggacgaggcgccgatgctggaggtgggcctggacatgggctccgacgggcacgacatgatgggcttcggcccgctcatgcccaccgactcggagcgctcgctcatggagagggtcaggcaggagctcaagatggagctcaagcagggtttcaagtcgagaatagaggatgtgcgggaggagatcctgaggaaaaggagggccgggaagctgcctggggacaccaccagcatcctcaagcaatggtggcaggagcactccaagtggccataccccacggaagacgataaggctaagctcgtcgaagagaccggcctgcagctgaagcaaatcaacaactggttcatcaaccagcggaagaggaactggcacaacaactcccagacgtcaaccctcaaatcgaagcgtaaaaggtgatggaggagagctagctgcaccgtatataccgtgtatgtaacgcacacctgctgacacacatgtacacatgtataccataccaacacgctaatcaaacggagctctgcatggcgactgtactcacggaaataaagaggaccatatcgaccggttcaactgtatatctagccattagtctgacccctggcatatttgtttgctgcggctgatactttgagctgatgatgtgtggctcccagcatactttattcttgttcttattgtgttgacatagtttgtcccccataatcttgaggatt

SEQ ID NO: 279164 - DNA, 516 bp, Zea mays
agatctgacgctaccttccgttcgattcccttcgcgtctttcttcctctgctggacgcaagtactcccatggcggtgttgttgcttaattcactgcaaattagagcagaaaattctgtgtctagatcaagatgaagagctcatgtctacttggatcagtttagcctagtcagtgtagaactgtttgacttccgagttcagatatttagctagcatagcctagtgaattttgttcctccagtgggtcatcaaggtgtgcatgtgtcctgggagagagagaagaagatccagtctgcaggatggatgcaatggcacctgaagaatatgcctcgcaatccaagctactgcaagaattcaccaacgtcccaagcatcgacagtgcttccatcctcaaaaccaacgatgaggacagatccagagcgatgttctccattagccagccagacttactggcgaacaccaacaggatatacgttttgtattctcatattacgacgagagccggcaccggcaccac

SEQ ID NO: 279165 - DNA, 845 bp, Zea mays
agatagcttgggccactacctgcgtgggattagcatggacacactgctgttaaggatgcctgtggtcacgagcatgtcgtagctgcagttagtgctggggagacctatactggaggtgaccttgtttgatacgcttggggaaataacaaccatggtcagttgggtctaggtgacagggaaagtagaactcgtcctgtgcttatttcagcattcagtgaaggatcttgctgggaggtgtatgaaattgcatgcggagcttcccatactgcagccctcgccaataagaagtccactgaccagatagaatctcggtgctggacattaggccttggtgacaaggggcaggattgccatggaaccacagccaccatttgcgtgcaccacaacctgtccatggattaccaaccggatccttccttatttctcttgactgtggattgttccacacaaccgtagtctcctctgatggagaggtgtggtgctggggaatggagagaggtctcggattgtgcccacatgctagctttacgggagttgatcaaggggatgctttatatccaataagagttcagtctcctgagaccaatgggttcaagtttcttggtccagcgcagatcgcctgtggagctgcccgcactgttcttgttgctggtgatgggtataggatgtgggcatggggcagaggccgcagtggtgtgcttgggagaggccagactgctgacagttacataccatgccttgtgatgtggccccctcttggtgagtacttccatgaggaccaaatgggaggatcaatatcaagagtgaatgatcgcactagcactgagttggaacagaagctatct

SEQ ID NO: 279166 - DNA, 446 bp, Zea mays
cggacgcctgttgaactcacgaagtaagcattactactgctatagaaagcagtagcagggtctagtcggctgtgtctaggcgcctagctatatgcctatatagtaaacggtatccagcatggacgagtacatctaccagtcgctcttcctctccgtccttgctgtggcactgctgcagctggtgaagatggccctcaagccgaggccacggctgccgccagggccttggaagctgcccgtcatcggcagcatgcaccacctcgtgaacgtgctgccgcaccgggcgctgcgggacctggcggacgtccacggcccgctcatgatgctgcagctcggccagacgccgctcgtcgtcgcctcttccaaggagacggcgcgcgccgtgctcaggacgcacgacaccaacttcgccacacgccccaagctcctcgccggcgagatcgtcg

SEQ ID NO: 279167 - DNA, 607 bp, Zea mays
  unsure (1)..(607): unsure at all n locations
tccgggttcattccaccccgaatggaccaagctggccaggaggagcaatggcccagccatttgaggaattgatccaagtcgagtacttcaaataatgctgtactgtatggttggcaggtgaagaccattggggagcttcagttttactgtgatgtaggtacacccggttttgactctcttatttttggtatgcaactgctatgatgcctctcaaaccccaatgttgtgtcttttaaagagttatctgaaatgtgttgaaactgctaccaagagtactaagtttttcatcatttgtctgaaacatgttgaaattgctactaagagtagtgaggtgttgcatcatagcctctcaaantcaatggtgtctttaaagaatggtatgacatgtgtagaaattgctactacaattgaggtcctagtgcaccagattgatggtaactttgtcaaattgattgagcnngggcgttttgtgttagcatggtgccatggtttgctcatgaaaggttttgcagtctaagtaagttaccttgtgttaaatctgaaattaacagtcacagtactaaattatcatgtaaactgcttgagccttgaccatttctattatatt

SEQ ID NO: 279168 - DNA, 738 bp, Zea mays
  unsure (1)..(738): unsure at all n locations
tcggcgtccgcagccgcggctttccatccatggtcgccgctagcttccatcaatncgacagtcgcgccgctccacaatacccatcctgagctcgccaatttgattgttgacagagagtttgcaagggagatggtgcagcggcagaacgcgtggaggtgggttgtggcacgcgcggtggaggctggcattagcacgccaggaatgactgctagcctttcgtacttcgatacctacagatcaagtcgattgcctgcaaatctgatccaagcgcagagggatctgtttggtgcacacacctatgagcgcattgactgtccgggttcattccacaccgaatggaccaagctggcgaggaggagcaatggcgcagccatttgaggaattggttggtatgagaagggatgttttctgctttgtgtgatttctctctgtgggttatcttttgttttactattgttatctttatgcttctagatccaagtcgagtacttcaaataatgctgtactgtatggttggcaagtgaagaacattgtgtagcttcagttttactgtgatgtaggtacacacagtttgattctcttaattttggtatgcaattgctatgatgcctctcaaaccccaatgttgtgtgtttaaagatttatctgaaatgtgttgaaactgctactaaaacaaaaaaaaaaaaaaaacaaaaaaaaaaaaaaaaaaaaaaacaaaaaaaacaaaaaacaacaagc

SEQ ID NO: 279169 - DNA, 807 bp, Zea mays
ctgtttgtccgtgagtccgtgaaggtggagctgcagcaggctcatgctgaggcgcagagccttgtggccatgaggcagggcgggcgcgcgggcgtgcagaagctgagcaaggacctgcagaggaacctcggtgaggcacaccagctcccggcgctcttggctgaacgggatgttgcaaggcaagaaaatcagcatctcaggagtacttatgattacgaaaggaaactcagggtggatcactccgaatctttgcagacgatgaagaggaattatgactccatggttacggagcttgaaaaacttcgtgctgagttgagggacacatctaatcttgacaaaagtggttttttctacaatagcaccacccaaaaggccgatggtatatctagccatctttctgttggacaaattgcttatgatactggctatggaagtacacaggcaagggcaactcctaccggtctggcagacttaagtggagtccctggaggcgctggccttcgttctggatttgacccatcaagaggcaatgcatatgatggttctcatgttgccaatctcagctcttcaaaaactgggacccatgatgcatcaaggggtgccactggctttgactctctgaagggttctgggtatgatgcttcaaaggcgcatgtaactggacaggcgtcagcgacagcggctcatgggggcattgctggttactacgggtccaatcaggcagcacatgcgtggggacaatgcgcatcgccctacggatctgtacaggtgccaccatcctatgcatctgggtcaaacacatcctat

SEQ ID NO: 279170 - DNA, 462 bp, Zea mays
agacggcacaacccttgctgccgtcctggtcgccacacggccacaccaacccaacacctcttcttcctccgctctcagcttaccccaccacaggcgagggaggcgactccttcctcgcggctgcccgctccggccccgatcgcatctcctttgcacgccacggcccgcggcccgcgcgcagtgtccaccggcacggccgtcctccgtgtgtgggggcgcatctggtgctagcttgccgggctagggtttggcttggcctcgtctaccgccccgtctcgtctgataggcacaggttccgtgcacgcgatcgtcgtctctccatccgttgtgactgcttgccgtcccccgcttgcttcgtcctgctacgggagggccactgctgccatcgcgttcaccgacgaatttccccacagagcattagagcaattatctgggagttgcagatctgcacctgaagattca

SEQ ID NO: 279171 - DNA, 810 bp, Zea mays
aaagggaacacttaattcctgcaagattgggtactagacaatttataaggcggcaaccatcagataggggtttccccagaattatatcttcatcaacgatggatacacggagtgatctctctgccattgagaatcaggttcggaagctgattgatgatttgaaaagtgattccatagatgttcagagatcagcagcatcagatcttcgttctctagctaagcacaacatggagaataggattgtcattgcaaactgtggggctgtaaacgtgctggttggtcttcttcattcaccagatgccaaaacccaagaacatgctgtgacagctcttttgaatttgtcgatcaatgacaacaataaaattgctattgcaaatgctgatgctgtcgaccctctcattcatgtccttgagactgggaaccctgaagctaaagagaattcagcagctactctattcagtctctcggttgttgaagaaaataaagtgaggattggacgatctggtgccatcaagcctctagtagacttgctaggaaatggcacccctcgaggaaagaaagacgcagctacagcattgtttaacctgtcgattcttcatgagaataaagctcgcatcgtgcaagctgatgctgtacagcatctggttgagcttatggatcctgctgctggaatggtcgacaaagctgtggctgtgttggcaaaccttgctacgataccagaaggaaggaacgcgattgggcaggcacgtggcatctccagcccttgttgaagctgttgagttgggctctgcaagaggaaaggagaatgct

SEQ ID NO: 279172 - DNA, 449 bp, Zea mays
gaaaaaccgggcggacggacgcgtccgcccacatgctttcagtgcggaactgctttattaggggctcggtggtgcggtacgtgcttgtcccgctatgacggccgggacctggtcgcatcctccacgacgccaccaggagggaggcgcgcggaggctgatcctgatgcgcacccgctccctcacctgctggctgctgcttcatccccgattgtacgaagcatgcatgtacggtgtgtggtagacagatgccccagtttagttctttggtgcttgccttgacatagatattccaggttggatgatgacctgaatcacctgatatattattgtcatatcatatgcaatgttcttgcatggggttgctatattattaccatatcgtattatcaaaaaaaaaaaaaaaaaaaaaaaaaaaaaaaaaaaaaaaaaaaaaaaattcaaaaaaataa

SEQ ID NO: 279173 - DNA, 494 bp, Zea mays
cggacgcgtgggcgaaaaaggaacggagaaggcgtcctcgacgactgcccatggccggcggccggacctagccagggattgttgtctcctgagtcccgacctaccaaggcggaaagggagagggggcgctgtggcgtcaggaaataactggaagccgagggctgagggcgagcgcagagtcgggtggttatcgctttctttttcgttttctttttccggaggggagagtattagggatgccggttgctaggccggagccgcaggagccccgggtgatcgcccatgtcgacatggactgcttctatgttcaagtcgagcagcggaggaacccggcgctcaggggacagccgaccgccgtggtgcagtacaacggctggaaaggcggcggcttgattgccgtcagctacgaggctcgtggatttggtgtgaagaggtccatgcgcggagatgaggccaagagggtttgtcctggtattaatcttgttcaggtccca

SEQ ID NO: 279174 - DNA, 534 bp, Zea mays
cggacgcgtgttggcgcctagtgtgtgtttgtgcgtcttgtgccttctgaaggcacgcaccattctgccctcctgctctctcccctcctccttcccactcctgtctctccccgtcctcctctgcttgagccattcaggtccaccttctgtggttccagtcagcttcattcattcgcaaggtcggtgtctggagagaagaagagaaaatggcggcgctagagaggagaggaggccaccacactgccgctttcatcagagcagcgaaggcctccagtcctcctcctccagcgaggcagaggcagagccagaggtgctccaagagcggcagcggtttggacgacgacgacgacgacagagatgccagggccgcgccgcgttctccgcagaaggcgtccagccagaccaagctgcaagagcagaaacgcgaggccgagacggaagttcagcggcggaggagcgaggcacacaactcccctgggaaagagattcagcagctggagacgcgccctcaggatcagcaggtggtgcgcggcg

SEQ ID NO: 279175 - DNA, 744 bp, Zea mays
tcggtggttttggtggatttttttaggaatcaacaacctgggggttattcttttgtccattccaccgggagagattcactctcagggccatttacaccaacagtgatgcagcatgtggcaacaccttcagattaccgtgccaatctgcctcatcagtcatatggtgtgtactctggaagctcaacagttcgacctcttaactctgcaagttttacatgcacaaaccagatagtacaagcagttgacagtagggctactgcaaaccttccgtgcagaagtgcaacaactggaacgacaagaactcatcacaactccaatacttcatctagcagccgcttggttctgagatcaggccctgtaaagctcagggccggggcgaagcatatcctgataccaaatgagaatacggaggacgacaattctgcaccaatgtactcttgtgtgtcctttggcagcagtggtgggaatgtttcggcagcttatcagaataaaggagcaggttcccataggcatcagaataaaggagcaggttcccgtaggttctgatccaaaagctggattatcttgctcgttcgttttctggacagctgctgggcaagaggctgcatgttttgaaggaactgaagctgatgacctaggcgatgctgagatgaagatgcaatgcgcagttcggaggatacctgagaccgtgttaattaaaggagggtacttggttttgttttgtggcctgcaagactttgacag

SEQ ID NO: 279176 - DNA, 418 bp, Zea mays
cttctgtgatttcccccggcggcgttgggcgctggtttaggagaagaaaaggcggcgcgcggcggaaaaccctagcttagctcctctccggcgtcaagtgctctccggtttgagggcgcgatgagggtgaaggtgatttcgcgttccaccgacgactacacgcgcgagcgcagccaggacctgcagaaagtattccgcaactatgatccagcgcttcgtagtcaagagaaagctgttgagtatactcgggcactcaatgctgccaagttagagaagatatttgctaagccatttatcggagctatggatgggcatattgacgcggtatcgtgcatggcccaaaaccccaatcatttgaaagcaatattttctgcttcaatggatggagatgttcgcctttgggatattgctgcgagga

SEQ ID NO: 279177 - DNA, 1363 bp, Zea mays
gactgactttgtgtctcgaggtgacattttcaaagagttagttgacgatcttgccatgcaaattgctgcttgccctcaagtgcagtacatctctattgacgacgtccctgaggaggttgtgaagaaggagaccgagctggagatgcagagggaggaccttttgtcgaagcctgagcagatccgggctaagattgtcgaagggcgtgtaaagaagaggcttggagaattcgcgttgttcgaacagccattcatcaagaacgacaaggtcacaataagtgagtggctgaagcaaactatagctacaactggagagaatatgaaggtcaggagatttgcccggtacaacctaggtgaagggctggagaagaaaagccaggattttgctgctgaagttgcagcccagacagcagcgaagccgccaccagctcctcccaaggatgacaagcctgctgaaacaacagaatccgcggagaagaagccggctgttgcagtttcagcctcgttggtgaagcaactccgagacgaaaccggcgctggcatgatggactgcaagaaagctctggccgagtctgacggcgaccttcagaaggctcaggagttcctgaggaagaagggcctctcatccgcagacaagaaatcctctcggctagccgccgaaggactggtcggctcctacatccacgacagccgcatcgggtgcatgatcgaggtcaactccgagaccgacttcgtggcccgcaacgacaagttcagggagctggtgaacgacctcgcgatgcaggtggtagcgtgtccgcaggtcgactacgtctcggtggacgacatcccggagagcgtcgtcggcaaggagaaggagatcgagatgcagagggaggacatcaaggacgacagcaagacggtgaaggatctcgtgaaggagacggtcgcctcactcggggagaacattaaggtgcggaggtttgtccggtacaccctgggcgagaactgatcggtgtgaggccgggcggcgatccgatccctccgtcgcaacgcagccctggcatgagaagtcgggcacgtttttggttcaaggaggcggggcgcgtagctgttgttttatttagtctgtgactcggttccatctgtaattccgtatcacctgttactgctgttcgtggttcatgaagagtaagaggggttggttagtatgtccatcaaagcatatatatatatacacaacatcaaggcaaattgaattttgtatcttttatgtgtgcttcgtttcaaaacatgatcgaattgtagcatagacgtacgtatggtcttggccaatgccccgtaatgtttggtttcagaatatagtagaatggacccgctttattct

SEQ ID NO: 279178 - DNA, 341 bp, Zea mays
agttcagggagctggtgaacgacctcgcgatgcaggtggtagcgtgtccgcaggtcgactacgtctcggtggacgacatcccggagagcgtcgtcggcaaggagaaggagatcgagatgcagagggaggacctgcagtcgaagcccgagaccatcacggagaagatcgtgcaagggcggatcgcgaagaggctcggcgtgatggccctcctggagcagccctacatcaaggacgacagcacgacggtgaacgatctcgtgaaggacaccgtcgcctcacgccggcagaccattacggtgccgaggtttgtccggtacaccctgggcgagaactgatcggtg

SEQ ID NO: 279179 - DNA, 863 bp, Zea mays
ttttgttattctagctgccaacaagtacgaacgagcccgggggtgttttctaagcaccaagagcatgttcgtctttgctagcccagccaaatcagcagcgactctattcagatacatcgcaccggaacaagttcctgtccaatttggaggcctcttcaaggaggatgatcctgagttcaccacctctgacactgtctccgagctcactatcaaaccatcctcaaaagaaaccgttgagatccctgtcaccgagaactccacaattgtatgggaactccgggtgctgagttgggaagtgagctatggcgccgagttcacccccgacgcggagggtgggtacaccgtcattgtacagaagacaaggaaggtgcctgctaacgaggaaccgatcatgaagggaagcttcaaggcaggcgagcctggcaaacttgtgctaactgtgaacaaccctgcatccaagaagaagacgctcctttacagatcgaaggtgaagagcaccagcgagtgagtgtgaggtcacgccgctagctgcctgggccctacagttaaaacgatctacagcatgatagaagagagaaggaaccttttggtttggttcgttaatttactgggatttgctgggtttttttttggggttcgcattctacattttgtttggttgaaaccaaagtgagcttgtttttgtgacagtagatgggagaagtataatggcattgtgtgatggatggttgttgatgagggcagggaggacgaaaatgtgggggaatgaaaggctggagaatgtctgtccctctgtagatgtgttctgtacattgcatctcttggattctcattgatatgttaaaatttaggagtacttggtc

SEQ ID NO: 279180 - DNA, 406 bp, Zea mays
ttggtcacgcgtccgggttcatcttgtacaggggtgcatcaatgagccgtggtggtatctcgctgccaacaagatgatgagcccgttcttcacgcagcgcaccaagagcaagttcgttgttgctagcccagccaagtcagcagagactctattcagatacatcgcaccggaacaagttccggtccaatttggaggccttttcaaggaggatgaccctgagttcacaaccttggacactgtcactgagctcactatcaaaccatcgtcgaaagaaaccattgagatccccgtcaccgagaactccgcgattgtatgggaactccgggtgctcggttgggaggtgagctacagcgccgagtttcacccctgacaccgagggtgggtacactgtcattatacagaaaac

SEQ ID NO: 279181 - DNA, 540 bp, Zea mays
  unsure (1)..(540): unsure at all n locations
cgctgcatatctttcctttgccgcttgctgtctccctcgcctctctccagtcttcttgaggaccctgcttcctccctcttcctcttttgtttcatcagagagaaaaaaaactagatttagcgagggcggaccgacgacgcagtagaagcaaccgagacatggagcggcggaggaaggcaatgtggctgtaccccaaggtcgtcggcttcaacccgccggagaggtggggccactccgcctgcttcttcgaaggcttcgtctacgtcttcgggggatgctgcggcggactgcacttcggcgacgtgctgaagctgaacgtggagaccatggcgtggagccttgtggccacgacggggcagtgcccgggcacgcgggacagccacggcgccgcgctggtgggccaccggatgctcgtcttcgggggcaccaacggcggcaggaaggtgaacgacctgcacgtgctggacctgcgcaccggngaggggacgcgcccgtagtgcaagggcgcgccgacgtcgtcgccgcgggagagccacaccg

SEQ ID NO: 279182 - DNA, 458 bp, Zea mays
aaaaaattatactactctcttctgtccagtccagccgcggacaccaaggcacaggcgcaggcaggcggacagggtaggcaagaggcgagctcggcgaaggcgcggagaggggagacagccagccgctgcattgcgctacattgggcaggagggctcgccgccgggggaggctcggatcttgcgtctctggccgtggctgccgcgtgcttgcttcgtttggtggcgctgcgcccattggcgggcggcctcggtccagcgcggcgtgatctggcgcgcgccgccgactccactcgcgtggggaggcctggatcttgacgctctgctgtcgctgccgcgagaccctgggggggccacgctgtgctcagtcgcccgcagtccgctgagctcccgagtgcgtccggcgggcgggaagatctggccgacggcgcggcgctgcaaatcccctgcctgcgcgggca

SEQ ID NO: 279183 - DNA, 345 bp, Zea mays
cggacgcgtgggtccgcgctcgcatcccacctcaagtccctaccggcgacttggcaacgcatgacattggcccttgatcaaaagcgatggaagaaagcttttgagaacaagcggcagcaaccttaagctcattgttctttccaacttcttgggccagttggatgagcactgtgtctggtcatcaattgtggcgcatgaagcttcaaagttctctctatatacacatgatgtattgactgaggttctacttttggttttcttgtttagcgttacaactttctcagcttgtgtatttgctccatctcagatcatcagatgacattcagaatgatttggctattcttt

SEQ ID NO: 279184 - DNA, 363 bp, Zea mays
cccacgcgtccgggcgaccaccaccaccaccactccacttatcgtctccttctcgcgcactgcagctgcccctatccacaccgccacttccccggcaagcccaagctgcccgcacccacctcctgctccctctcccgccgcctcctcgctgccccccttgccgtcctgccgcggcgcccgcgtgacgtgtcggcggcgtacggcgacggcgacatggacgacgacttcggcgacttcgaccccgacgacgcggacggcgtcggcgaggacgacgacgtcgacaacgagcaggactacgacgtcgactacgaccgccttctagctcccgtcgtcaagccgccgtcgccgtcgggcgcgtcggcg

SEQ ID NO: 279185 - DNA, 362 bp, Zea mays
taaattgcagtagctagtagagagaaaaaagaggtgtcagctggagctaaatctcttcgtacaacagaaactgctagtgtaaaggaaaccaacggtaacatctcaaggatgaacagcagcgacgataatgtggtggttgagaagaccgttgtgatgctcgaagatgaggcggtcattctacattctggaagaaatgcagcaaaggaaacttgtagtgatgacaggacagagaagcccagcccagaatcggagtacacagctatcagggctccgctgtctccagttattcttcctgaggctgagagatctgatgacccggggagctcatatgaggtggtgactgagtgtctaaaggatgaacc

SEQ ID NO: 279186 - DNA, 646 bp, Zea mays
ctaggtttgtgccagaatttggctgctgctttctggagatgtatggctagttcagaagctgatgatgaagctgatgattctggtgctttggcagctgttggttgcttaccagcaattagcacaattcttgagtccataagcagcctcccacatctttttctgcaaatagaacctacattgttacctataatgcgcaggatgttgacgtctgatggccaagatgtttatgaagaagttcttgaaattgtttcctatatgacatttttctcacctacaatttcactggacatgtggagcttgtggccactgatgatggaagcgcttaatgactgggctatagatttctttgagaatattcttgttccactggacaactacatttctcggggaactgatttctttcttgcaagcaaagatccagattaccagcaaagcctgtgggatgcactacaatctataatgatggacgaaaacatggaagattctgatattgaacctgctcccaagctcattgaagttgtttttcaaaattgcaaaggcaacgtggatcagtgggttgagcactacctcaggattacaattgcacggttacgtagagcacagaaaccatacttgaaatgccttcttgtacaagtgatcgctaatg

SEQ ID NO: 279187 - DNA, 220 bp, Zea mays
ggcgtacaccgcgacgcgctctcctgtccgtgcccacctccacgactccaccttcgcagcgcccgcggtaacctccccacgccacgccacatcgcgtgcgagccccaaccgtcgccggcctcccaattaagccgcccccgcggcgcgatccggtgtccaccgctgctccgccggaggagggggaaggggaagaaaagggagggggggagcacagggggat

SEQ ID NO: 279188 - DNA, 471 bp, Zea mays
gcctctgctcgcaactatcctgagaacactgtcgctgctgtcacctcggatctaccaactccgcctccacagacacctaccaactgttttggagcttgctggtatggatcattgcgaaacttgctacaaagtaccaactgtttgcatactcaagattagtgtgcattttgagaaggataaggctttggctcgcagattccagccagtattggtgaatgagcctagccaggaggacgctgtcaagatattacttggtctgcgtgagaaatatgagacttaccataaatgcaaatacactttagaagggatcaatgcagcagtttacttgtcagcaagatacatccctgacaggtatcttcctgataaggctattgatctgatagatgaagcatgcagttgtgctcagatggaatcatttaaatggtagaatgtagtactttgctctttttttcctattacctttcttttttt

SEQ ID NO: 279189 - DNA, 506 bp, Zea mays
tgatgttaccaattttgaattggaggactactatgtacttggcagaatgatttattattagttgaccttttgccaagcacaatggattaatttccatgttcccaaacagggtatatgcgaggataggactctggaattttaccttgtcacctatgatgacattggtggagtaacttgtcgacgatttagggagacacagagccaaaactctggctactctcctgttttttggacaacagatactacatttcttgaaccaccattctctgagcaagagctgggtaattatgccagccgcgatcatatccaaggggttacttccaatcatgcaggcgctgagaacagggttgtctcaaggatattacgcatcaattccagttatgatgtggttgatactcatctctcaactcccttggatgatgggaggagcgtggagggaaggatttggctatatgaggatggaaccttcggttttggatttgttggcagtaattcaattatagatc

SEQ ID NO: 279190 - DNA, 973 bp, Zea mays
atctggtacgccagtggttactctgtgtggttctccaagtaaaccgcagattgagacaaccaatcctaatcaaggtgatgtgggagaagaaagtagagctggaaggtctccagccttgtcgcagccagcttttactgatccgttgggatctgaaaaagggtcacattcaccttctgtagtacatgatcgtaatgagcatcagaaaacacaaggagatgatactcttaaagatgagatattacttcataagagaaaagcacttgcctttaagaagaagggaagatggcagaagctagagaagaattgaaactggcaaaacaattagaaaagcaccttgaaggtgctcaacaagacaccatggatggtgtgggtgactccattactcctgctgtggaacagaacagtttggtccaacaacctgctagctccagcaatcacactgacgacataacttctccccctcctgcacaagcgagcaagcggactcaacctcagaaagcaatgtccagccgggaccgtctcaaaatccagcgtgaatccctggctcacaagcgcaacgccctcaagttgcggagagaaggaaagactgcagaagcagatgcagaatttgaactggccaaggagctagagagccaactggaagagtcagacaaccaaagctcgagctccgggggaaagtcaagtgaaccaaatgacgcaagcgtcgagaatctccttgatcctcagatcatgtctgccctaagatccattggttggagtgacatggatttatccatgcaatcctctagcgcacaacctctgaaacctgtgcagtcctcaagttctcaacctccgcaaaaagtggaagccaagtcatctgttgccgcgaccagcaaacctcagagcgagagaagtcaacttgaagaacagatcatggcggagaaactgaaagcgcttaacttgaagcgggaagggaaacaagcagaggccctgg

SEQ ID NO: 279191 - DNA, 571 bp, Zea mays
cggacgcgtggggcagcgcggaggatagctaccactcgcccgccgctcgctccaccacgatctccctcccctccgcacgccgcacggggcgttgcagacccagccaaaggcaagccgcgaaccggagcacgcccgccggccggtcgcgggcgtcgtcgtcgccgcctcccgcgccgccgccctgctgctcgctcccgcattggatcgcgctgcggttggcgactcggtgtggtctgctgctggtgactgcgcggctgcgcctagccggcccacgcggagacggcatcaagtttctaacaatttgaagtatcccgaaatgggcgcaagagataacggggaggggagagatgagaagagggggactggatcagattatgtacctgctagagactccttttcatcacaaggtgagtctcgggttccaaagaggctctggtaaaaaggagtcaaaagataatagcccccgaacgaccaaaagcagcgccagccgtcaagctcaaaacaagctgcaacataaaggattaaacaatgtacagaacaagcctcagaaacaaaagaaaacagttagtgc

SEQ ID NO: 279192 - DNA, 788 bp, Zea mays
ctacttggaagcggtcccttgggtcggggaagaagaggagaatgtggtctcgtctgtccggaacctgcagagcgagagctatggcgtcagtcctgtgctgaagagggtagcaccatctgatcgaacaaccccaccaaacgatacgttttcacatatcatcgaactggtcttgagaagcagcgaggacagggggcggcgcgagatgaaatctctggtgcagaagcttctgaaggagagtagcactggctgcatgagtgggtcttccgacctgtgttctgcggtcctctacagatcatgccggaactgcctggattccttactaatcctgtttcagcaagcaaccgacagtgatttcgctgagcaggctcttaataccaaagaaccagttttccgacaagttgctctagaagcagataacctgctctggttagctgagatcttggctgacaggaatgccgctgacgagttcgcggtcatatgggctagccaacgtgagctggctgggctgcactctaggttgccagtcaagtcgcgccaccttgtcagctgtgtcacggcgaggctgttcgtgggcatcgggaaaggggagatgcttccttcgaaggacacgaggcggcttctcttggacgtctggttgcagcctctcatggatgactacaactggttgcagcacggctgcaggtcgttcgaccggaaagtggtggaggaaggtgttgggcggaccatcctgacgctccctttggaggatcagcagacgatcctgctctcgtggcttgggagcttcctga

SEQ ID NO: 279193 - DNA, 392 bp, Zea mays
tttagcttcactgcacacataccttggcgtggttgacgatactcggggtagagttactcttttagatggtggcacaatcctcaacttgccaatgttttatcttcaaggcgttgttctatttcctggagctaccctgcctctcagagtaattcaggatagattagtagtaactattgacaaagctttgagactggtcgatgctccatgcacaattggggtggttctcatgcgacgactcccaaatcatcgacattatgctactgcttcagttggaacaaccgcagagatacgtcaatttggaaggttggaagatggttcattaaatgttgttgcccgtgggcagcatagatttcgtttaaggaggcattggattgatgtcgatcgggtggtgt

SEQ ID NO: 279194 - DNA, 677 bp, Zea mays
ggtacgtacgtgcagtgcattgcatggctcttctgatccatccatcggtcaatacgaattaaaccgcctctgtggtcttccattccatctgatcgatgctgcagcccgccgaggttgctggtcgacggcccctacggcgcccccgcgcaggacttcaggaactacgacgtgctgctcctcgtcggcctcggcatcggcgccacgcccttcatcagcatcctcagagacctcctcaacaacatcaagctggccgacgaactgatggacctggccgtcgcgtccggccgggccgaggacagcgccagcaacctgagcgcgtcgacggcgagcggcggcggcaacaagaggagggcgtaccgaacgacctgcgcccacttctactgggtcacgagggagcctgggtcgttcgagtggttcaagggggtgatgaacgaggtcgccgagatggacaagaagggtgtcattgagctgcacaactacctgacaagcgtgtacgaggagcgagacgcgaggacgactctgctgtccatggtgcaggccctcaaccacgccaagcatggcgtcgacattgtgtcagggacaagggtcaggacacattttgcaaggcctaattggaaagaagtatttacgaggatagcgtccaagcacccaaattctacagtcggggtattttactg

SEQ ID NO: 279195 - DNA, 799 bp, Zea mays
tgacaactgtcacataagtggagatgataacaaggacggttcctcaggccacatggataaacccatcgggaaagtgaggattcggctttcgacacttgacacggcgcgtgtgtacacgcactcatatccattgctcttcctcagcccatcaggagttaaaaagatgggtgagctccaccttgccatccggttcacagtcacatcccttatcaatgtgctcttcacatactctaggcctctcttgcccaagatgcactacgcacagcctctgtcaatagttcagcaggaaatgctccgccaccaagctgtgctgcttgttgcgcagcgcctgggacgcatggagccaccagtccgcagggaagttgttgagtttatgtcagatgctcgctctcacctgtggagcatgcgacggagcaaagctaacttcttccgccttatgcaagtcttctcaggggtcattgctgcagggaaatggtttgctgatgtttgtcagtggaaaaacccggtcaccacagtgctggtccatgtgctctttatcatgcttgtgctctatccagaccttatcctgccaacaattttcctctacatgttcttgatagggctgtggaattaccggttccggccacgcttcccaccacacatgaacacaagaatatcttacgctgatgttgcactcccagatgagcttgatgaggaatttgacacattcccaacctcaaagagcccacatctcatccggatgaggtacgataggttacgacactttgctgggaggatacagactgttgttgttgacatt

SEQ ID NO: 279196 - DNA, 491 bp, Zea mays
tggtaatgcgtccgttcccaccaccgcgaacacctggcaatggcggcccccgccccgtcggccacctcccagatgtcctcaagcggcctcctttcttactgagctcacccaccacccgccacgcccccgactcccacgaactcctccgcctacccacccctaccctacttctctcgcccgccggacgcatctcggggctctgctccccggttctcggggccggtggatgcgaccgcgtccccgcccccgaaatcagctgcccggcgtcctcatagcgttcccgggatctaggccctgagcaatggcagcggcggtggcgccgccgctctgcacctggctcgtcgccgcctgtctctccgcggcctgcggcgatggcgagaaggagaatgaacgcatgcaccgcggtggcggcgtagggggtttcttcggctcgcgccgccgcctcggctcagggcgccgcggcgtggggcgctctggaatggccatgtctg

SEQ ID NO: 279197 - DNA, 731 bp, Zea mays
gcgagatactgtccatcaacatcatgaggattttaattctatgttctacaattcaaatgatcatagcaacatgcaaaacaacatggattccactgatgataattcactttcttcgaccatgagtaatgacaggattggcaaagattgtggttcaactagaagcattcagtcaaaagctgaggatctccctttctctccaagtaggtctgtagacaatggaagcccaaaggatatattgtgcgagagggacacagactgcaaggtggagccttctgtaggtggtccagttagcccacggtctccagctttagaggacaaacttgttgacccattgtgtgcccaagaaaaatgtaacgacgaggatgatcaaggcacggcttacagatcgaacctaacatgcaaaggagaatatgaggctaacgacgagtatgatggggacgttagtacaagaagcaatgtaaatgacaaagataccactgaaggcgaaacctcatgcagaaattacaaggaagacaactgttgcaacattgaagatagtagcaaaacatacgagcagaatagtggagaagatgacaccagtagtctagtagatggaaatgagaagtatgagtctatgaatactaaagacgatgatagcagccctggaggtgaggacacatgcaatagatatgagccaaaggttgaaggcgatgaaaattgtgttctttgagctgagtgcattatcaacaatt

SEQ ID NO: 279198 - DNA, 443 bp, Zea mays
agacaaacttgttgacccattgtgtgcccaagaaaaatgtaacgacgaggatgatcaaggcatggccatggcttacaaatcagacctaacttgcaaaggagaatatgatgttaatgatcagtatgatgggggcattagtacaagaagcaaacaggagagcaatgaagatgacaaagatgccactgaagatgaaatctcatgcacaagttatgaacagaagagcaaggtagataactcatgcaacattgaagatagtagcaaaacatatgagcagaatagtggagaagatgacactagtagtctagtaaatggaagtgaaaagtaccagtgtatgaatattaaagatgaagatagcagccccggaggcgaggacacatgcaataaatatgagtcagaggtaaaaagagatgaaatttatgttcttggagctgagagcattagaa

SEQ ID NO: 279199 - DNA, 789 bp, Zea mays
gaccaccacccctctcttccccgccacctactcttcttctccctgtcctttctctctctactagtactaggtctagggtcgcctcgccgccagccaaccacgcgcgcacacgccccgtccggccgtacccgctcttcattccccactgcacacaaatactactgtgactccgtgagggagcaacaggaggaagaagcaggggggagaggggaggggaggggaggcattcgtgctccttttttccttcctactgtacgagtacaggactgcgctgcctgtctctcctcgcctgctgccgacttcgcggcctcgtcgccctgccatgtccaccatggacgaaggctacgggcctacttgggacagcgacgacgaatacgacaacttcatacgcaagatgaacccgccaaggatcgtcatcgacaacgagtcctcggcggaggccacaattgtaagggtagatagcgcgaatgaatacgggatactgctggaagtgatccaggtcatgattgatctcaaccttgtcataggcaaggcgtatataacctcggatggtggatggttcatggatgtcttcaatgtgaccgataaggaagggaagaagatcaaagatgaggcaaccctcagacagatcgaagactacatcagaaagtccttgggcgcagattcaagatacattccttcccgccggagatcggtagacgtcgccgccgcagctgaccacaacatcatcgaactgactgggacagacaggccaggcctgctctccgtggtctgtgccgtgctcaccag

SEQ ID NO: 279200 - DNA, 516 bp, Zea mays
  unsure (1)..(516): unsure at all n locations
ttgggcggatagaattctagatgttaattttgaagaggaacttcgtgtcatatttggctgtctaccaaagaagcggcaaacctttttgttttcagcaacaatgtcagacaatctgagatctttgcttgaactttcggggaacaaatcatacttttttgaagcatacgaaggtttcaagacagtggagaccttaaagcaacaatacatccatgttcctccacagggaaaagagcttcatctttggcatcttttgtcagttatgaagggaaaaacggaagaccctattcgttcagccattgtatttgtctctacttgcaaagactgccaatatttagatctgctgctggaagaacttcgttatcctgcggttgctttgaactctcacaagtctcaggcacagcggctctcagcacttaaccggtttaaatccggtcaggttcctgtattgcttgccactgatgtgggcagtcgtgggttagatatccagacagtngatcttgttatcaactacgacat

SEQ ID NO: 279201 - DNA, 619 bp, Zea mays
ggcgtgcaacgcgttcctcggctcctgcaggcggcgacctcggaaaggcgggggcgtctcgtcgcgaggcatttgaggccaggattttttggtgctctcattgttagctgactggtgagggtctggatctagcaatggcggaaaacacccacggtagtggtcgccacgtgcttggggacttgacaaatgttatttgcaagcgagcagccacatcagatctggagaagagtacaggtgggataaagatcagacggattgaaaagactgggactaggaaagagtacgatgcaaatgcaaaagctagcagtattgggaaaggaattgtatttggccatttgtttgatgatgttgccagagagaaatttcaaagccattctatctttcagaatagtagggttcaacacatggctgccaaagcagctggactcttatccaaggaagccaatgactcgaagaaccactatgcatcaatcggtccatttgatctcagtgataaggagcaggattcttcacttgaatctgaagatgactatgatgatgaagataatgatgagacgaatggtgaattgctgcaccattttttcagctcagagctagctaataaaacatcaacaaatga

SEQ ID NO: 279202 - DNA, 448 bp, Zea mays
attttgaaaaaatggaagcagatggtcattctattgaagacaatgccaacctagtcgatgacaacacaaaagcaaataatgatgctgattggctacttggtattgaaggaggtgataccactgttgagcagattcttttaagcattcaagctgctcaagacagggtattcagtctgagatcaaatctcaagcaagcaatggctaggaagaataagggaataacccttgaaattaacacatccgtcattggtacacacagctcaaattgctcaccaggaaagggcaaagttgctggactgcatgagagatctccccaggacacatcagaatgtgatatggatgattctggcatgcctgatagtgctctctcaagctatggagaagctagcaacatggatatttttgagagcaccatgagcctattgtctgaaggcccacatcagatggg

SEQ ID NO: 279203 - DNA, 869 bp, Zea mays
ggccgccgagcgggtcgcacatgcggacctctccctcgacgccgccttcttcgacggcctctcgctgcagggaggcggcggcggcgggggggtaagagggggcgtggcggggcacaagaggagcggctccatggacggggacacctcgccgttcgagggcgagtcggcgccgccgtccgtgctgccggactacgccaagaaggccgtgcccgacgacaagctcgccgagctcgcgctcctcgatcccaagcgcgccaagaggatcctggcgaaccggcagtccgcggcgaggtccaaggagaggaagatcaagtacaccagtgagctggagaggaaggtgcagacgctgcagacagaggccaccacactttcggcacagctcacgcttcttcagagggacacctctggtttaaccactgagaacagggagctgaagctccggctgcaggccatggaagaacaagctaaactccgagatgctctaaatgacgccctgagagaagaagtccagcggcttaagatagccacagggcaggtccctaacataaacgggaatcccttcaatggaggactatcacagcagcagcagatgccaagctatttctcacaaccacagcagatgcaatacttcagcggccaccagggccagcatcaccatccgaagcatgacccccagaattcttcaaacggcggtggccagcccttgagtgactccatggatttcatgtgaggattcaggggagacagctcaggagtgttgcctaagatcacataccaacttcaactaaagtgctgtaaatgtagctgatgtaaaccatattcagtgttatgatatgaaccattgtagtttagcagtgttccttgtccat

SEQ ID NO: 279204 - DNA, 688 bp, Zea mays
gcggagctctccctcgacgccgccttcttcgacggcctctcgctacagggaggcgggggcgtggcggggcacaagaggagcggctctatggacggggccacctcgccgttcgagggcgagtccgcgccgacgtccgtgctgccggactacgccaagaaggccgtgcccgacgacaggctcgccgagctcgcgctcctcgaccccaagcgcgccaagaggatcctggcgaaccggcagtctgcggcgaggtccaaggagaggaagatcaagtacaccagtgagctggagaggaaggtgcagacgctgcagacagaggccaccacgctttcggcacagctcacgcttcttcagagggacacctctggtttaaccactgagaacagggagctgaaactccggttgcaggccatggaagaacaagctaaacttcgagatggtatgtccttgtctttctttggaaggtctaaagccactgtcatataaggcccagaaagagactccacttttcctgtttcaagaacattacgaggcaaatgctctaaatgatgccttgagggaagaagtccagcggcttaagatagccgcagggcaggtccccaacatgaacgggaatcccttcaatggaggactatcacagcagcagcaggtgccaagctattttttacatacacagcagatgcaatacttt

SEQ ID NO: 279205 - DNA, 576 bp, Zea mays
  unsure (1)..(576): unsure at all n locations
ggctgtaccaaggtgtaagcggtttaccactgaagggctggccattaactggaattgaccagttaaggccgaatttgggtgctcaaatgcagaagccatttctttcaacacagtcacagttccaacttatgtccccacagcagcaacaacatatacttagcacaggcccaagcacaagggaaccttggaaactcaactaattatggggatattgatccccgcagacttacagcattgaccaggggtagtttgaatggtaaagatagtcagcctgcaggaacggatggttgtattagttcccctatgcaatccacttcacccaaagtcagaccagaccaagagtatctcatgaagatgcagcagacatcttcccagcaaccccaggaacagcttcagcagcagcagcagaaccaacagcagcaacagagccaacaacaaatgcaacagaacaatagaaaaagaaagcagcctacttcttcaggaccagcaaatagtaccggtacaggaaacactgtgggtcctgcaaactccncaccatctacaccatccacacatacttctggggatggacttgga

SEQ ID NO: 279206 - DNA, 484 bp, Zea mays
cccacgcgtccggccttttttgagctcccaagtcccaaactgcccgtctgccctccagccgtgcagggcttcaggccatccgggctccggcttccggcatccatcaggcgtcctcataagatggtgtagggcagcgagcgccgagcagagcagcaaggcagagcagcgagcagccgagcagcgaggcagcgggcgtcctcagaatccgggctgccgagccgccgagcagagcagccgagagcagcgaggcagcgagaacggcccacgagaaggcccgtgcgggtgcggtcgccctgggccgaacaaccccggaccgcccgtcggtgcttcctactctttaccgcttcaccccccgtgcgcgctttctctgttgctctgctacaactgcggagccgccgccggcgccgccctacgccaggtgccgagccctacattgctcttttcgccggcgacgagcacccaccacaacaagtttttacccaca

SEQ ID NO: 279207 - DNA, 624 bp, Zea mays
cacacacgtccgcacacgcgtccgggtggagctctttgagtacttggaggagagagagattccagtgctggtattttctgcaggacttgcagacataattgaagaggtcttccggcagaaactacacaaaacattcaagaacatcaaggttgtctccaacaggatggtgtttaatgaagaaggccgtctcatagcatttaaagggaaaacaattcacgttctaaacaaaaatgagcatgccttggacatggctgctccagtgcatggcaatccgggggatccaaacggatttatggatgactattcattggtgaagaaaaggaccaatgtgctgctacttggcgatcacattggggacttggggatgtctgatggtttaaactatgacaacaggatcgctgttggattcctgaacgccaacatcgagaaatctttgaaggattactctagcgcgtttgacattgtatatctgaacgatgctccgatgcatggagttgtgcaacttgtgtctgaattatgtccataatccagtgatcttcgaatcgcccctcagaaaaaagtagatcttcccatcaactttgcagctaccgaagttcgctcacctggaaatctaaggattccact

SEQ ID NO: 279208 - DNA, 533 bp, Zea mays
aaatgttaggagatctcccagaatacgcacattctggagaaaaccaccaaggctggccccacgcctccctccaaatgaaatctacaaaaataattctctgcttcagcagtctccatctgagtggacatcgaggcagaagaaagttaaagaagcatttgaacatgcatggtctggttatcaaaagtatgcaatgggttacgatgagcttatgcctctgagccacagaggcacagatgggttaggtggtctaggagctactattgtggattctctggatactgcgataataatgggtgctgatgacgttgtttctgaagcatcaaaatggattgaagacaacctaatgaaaagaattagtgagaaagggcaggttaacttatttgagactaccatccgtgtcttgggagggcttcttagtgcataccatctgagcggtggtgatcatccaggggcaggtgactccggagtaactgtaacatataaaaaggctaatccagagcgacttttggcaagttcaaaggatttagccgaca

SEQ ID NO: 279209 - DNA, 583 bp, Zea mays
cccacgcgtccttccacgcgtccgcccacgcgtccgtctcgctctacctccccgtcgtcacgcgctcgcctgtgcccctagcgtttcgccaccgcctgcgcccgcaccgcctccggctccggctccggctccgcctcgcctccgccgtctccccatcccgggcgcggcccctcggcctcggcgcccgcccgccccgcccccacgccgcacccctcggctacggagggagaaggccgagtggtggactggaccacagagccatgtcaagttccacaaattcaacagtggccacggagttgtcggtgtctgagaatagcagggaaattgagccgctaccttttgtgaatgacaaacatggaggcgtcatcattgagatgaagactccaatggatcctggagtgttttcagcttacttgaaagcagcgctggcaaaatggagggagcaggtgacccccccccccttctctcagcatcaatgttaccatttaccctatcatgccaagtaaatatcccaatatttaagtttggaactgtggacgatatacgcgaaagatccatcattccatgcaagcatctttatatg

SEQ ID NO: 279210 - DNA, 390 bp, Zea mays
caacttcccaacaatctcggtccctccctccctcctccctggactccccagcaacccgcggccgagccccggagtccgtgcaccagttgtctcgcgtcgtcgtcgtcgccggggctgcagcctgcaggcagcgacctagctaggaacgggtgacatggcgcgtgcggcggcgtcggtggccgcggcgctgctcgtcgtgctcggcgtggcagcgtcggtggcgacggcgcagatggagacctgcagcggcgacctcccacccgtgctcgccgccaactactccggcctggcctgccagccggtctggaacaacttcgtgctccggtaccaccagtacaaggacaacgagctgcgggtggtgctgtccacgatgtacagcacgtggtgggt

SEQ ID NO: 279211 - DNA, 762 bp, Zea mays
atagaatccatactccgcttaacatccctttcattgcatggcctcctagactatactgccaaggatatagaggagtcagtatttgagctttctttgtttgctgagtcattcagtgaaatgcttcaacacagaatgggttgtgttatcctgtcttttcttgagaaactgcacaggcgatatgttgtgaagaggaatcagcgtaaacgccagagagaggaagatctaaagaaagaagagaagaaatctctcagagaagcggtccaagaccatgcatgagactataattgaaagtgttgataacctaggaggcagtgttgaagtgacaaaagaggatgaagaaaagatgagcaaagatcaatcagcaaatgttcatgctgaactgccaaaagagggtcagataaaacttggcacagatcatccaattgttaaccatggcgaaccagcaaaagagggtgatgaaaatatgaacactgatcattcagaagctgttctcgataaacctgcagctgatgcaaatatggcagaggaagatcctgaatacgaggaagatcctgaagaaatagaaatatatgaagatgatgaggacatggatgatgctcatgctggagcacagaatggagaacagaatgagaacacatatgacagagatgttaagccagaagtagcgacagcagatggtggaaataacagaagttcaacacaacctggagtaggaaatattactaatatccatgaaagagctgcttcaatggaggacaaact

SEQ ID NO: 279212 - DNA, 634 bp, Zea mays
  unsure (1)..(634): unsure at all n locations
aataatccgactcccactgctgggtgccctgtcccctacctcgggttccgcgcagaggaaggtgagacaccaattccactcccaaaccccacgaaaaccctcgccgtcttcctccaaactaggcctcactcgcttgatctctcctctccgaacccggcaaccccttgaactagggttccagcgacccaatgacggacggcggcgacgagtacaagcgcgaggagtcggtggccctgctggtcatcgtcttcctcgccgcgctctcgctcctttccgtcatcgctgccttcgcctactactgctacattactcgcaaggtctcccgtcgcctccaggcgttccatatccccaagcgttccagctcccatcatacgcttcctccccgggccctgccgccgcagcagcaggggacggacaacccgtccagtaactccaccagagatggtgtcggagcggcggcgatgtcggtggtggctgctggggagaggggcgtgcaggtgttcagctaccggcagcttcacgcggccacgggtggngtttgaccgggcgcacatggttgggcagggcagcttcgggaccgtgtaccgcggggtgctccccgacgggaggaaggccgcggtcaagctcatggacc

SEQ ID NO: 279213 - DNA, 411 bp, Zea mays
ctcccgaaaaccctcgtcgtcttcctcccaaatcactcactcgcttgatctctcctctccgaacccggcaacccctagaactagggttccagcgacccaatgacggacggcagcgacgagtacaagcgcgacgagtcggtgatcctgctggtcatcgtctccctcgccgcgctctcgctcctatccctcatcgccgccttcgcctactactgctacattacgcgcaaggtctcccgccgccttcagtcactccatctccccaagcgttccagctctcctcctcctcctcctcctcctccccgggccctgccgccgccgcaacagcaggggaaggacagcccgttcagcagctccgccagcgatggggccgctgcggcggcggcggcgatgtcggttgtggttgctggggag

SEQ ID NO: 279214 - DNA, 394 bp, Zea mays
gggaccagttctacggcgccaagcccggccggaccgtgtggtccgccaaggtggcgtcggcggcggagttcagcctctcccagatctgggtcatctccggctccctcggccacgacctcaacaccgtcgaggccggatggcaggtgagccctgaactgtacggagatagcagccccagggttcttcacatattggacgaccgacgcataccaggagaccgggtgctacaacctgcactgctccggcttcgtccagacgaacaaccggatcgccattggagccgctatctcgccgacctcggtctacaacggccggcagttcgacatcagcctgctcatatggaaggacccacacccggggaactggtggctgcagctggggtcgacggggcagc

SEQ ID NO: 279215 - DNA, 1300 bp, Zea mays
  unsure (1)..(1300): unsure at all n locations
agcggtgacgcctgtgcgtgccccgccgcggttttcccggggcgaccccacgcgtctttgtagctgaccgtggacccatccttgaggtcattgtatcaagaatgcgatacatatcatcacaaacagaacgttcaattcggtttgttgggttatcaacggcattagcaaatgctcgtgatttagctgattggttgggcgttacagatgacggtctattcaatttcaagcctagtgtgagacctgtacctcttgaagtgcatatccagggatatcctgggaaattctattgtccaagaatgaatagcatgaacaaaccagcttatgcagccatatgcactcattcacccagtaaaccaggtctcatttttgtgtcatcacgtcgacagacaagacttacagctcttgatatcattcagcttgcagcatcagatgaaaaaccaaggcagttcctgagcattgaagacaactccctagacatggttctttcacaggtttctgacagtaatttgaggcatactctgcaatttggcataggtctgcatcatgctggtttaaatgacagagacagatccttggttgaggagcttttttcaaacaataagattcaggtgctggtatgtaccagcacattggcgtggggtgtcaatcttccagctcacctggtcataatcaagggcactgaatactatgatgggaaaacaaaaagatacatagattatgatatcacagatattctgcagatgatgggtcgtgcaggtcggccgcaatacgaccaacatggcaaagctgttattcttgtccatgaaccaaaaaagagcttttacaagaagttcctctacgaaccgtttcctgtggaaagtaatctgagggagcacttgcatgaccacataaatgcagaaattgtttctggcaccatcagcaacaaggaggaggcgattatttatctcacctggacttacctatatcgcagattggttgttaatccggcctattatggatgggaggatactgaaacaaacacattgaattcttatctatcaaggctagtcgaaactacatttgaagatcttgaggacagcggatgcataaaagtggatgaccactctgtgaagtacttgattttggggaaaatagcttcacagtattacctgagctacctcactgtttcaatgtttgggtcaaatattggccccaacacaacgttggaagtctttctacacatactgtcagctgcatcagaatttgatgagcttnctgtacggcacaatgaggacaatnntgatcgatactcagcggaaat

SEQ ID NO: 279216 - DNA, 717 bp, Zea mays
  unsure (1)..(717): unsure at all n locations
atggctagaggaacacctgcaaanatatcttttaatgtaccaatatttgaacctcatccgccacagtactatatacatgccatctcagactcatggctacatgctgaaacactcttcactgtttcttttcataattagacattgccacagacacaaataacacacacagaactcttggacttgaagcctcttccactgagtgctcttggcaacaaaacgtatgaggatctgtacagatttttccatttcaacccgatacaaactcaggcttttcatgttctttatcacactgataacaatgtactcttgggagctccaactgggagtggcaaaacaatttcggcagaacttgcaatgctccatcttttcagtacacaaccagacatgaaggtagtttacattgctcctctaaaggcaatagtacgagaaagaatgaatgattggagaaaacgccttgtaactcagcttgggaagaagatggttgagatgactggtgacttcacttccagatctgatggccctattgtcagctgtcatcatcatttctacccctgaaaaatgggatgggattagtcgaaattggcatagcagaagttacgttatgaaggtcgggctcatgatattggatgagatacatcttctgggagctgaccgtggacccatccttgaggtcattgtatcaagaatgcgatacatatcatcacaaacagaacgttc

SEQ ID NO: 279217 - DNA, 513 bp, Zea mays
ccgggcgacaccgcggatcgctcgccagtcgccacgcggctccaccgtcgccaaacgtccccgaccgacggacgcggcgacgcacgttctcacacaccttccgccgcgggccttcttctcctttccgctcgcctcttctccacctgtctgtccgctctactgtatagaggaaggccgaaggccgtttccatttctcgaagccgcggcagcacgcgtcctgcttgcctcccggtcccggatcttgcccaccccgcaacgcgccgccacctccgccaagcaagggcagcttgatcatattcaagatggggaaggacaaagaagctgccaatctgaaggagggggagacagagatcaaggccaagtttgttgagaaggaagaggccaaagactcgggtggtggcgcagggtctgtgggaggaaagagtaaagaggggaagatagacagagagggaaaggaggagaagtcggtggagcatgaatatggcgaaggcgatgagaaggcgatcaagaaga

SEQ ID NO: 279218 - DNA, 867 bp, Zea mays
ggccatgtttgtgtgactgagccggccagctccgccaatcccgttggcttggctgcaactaacgaattggctataaatatcagcagctgcgggcttcagtgctcaacccgacccagctactttgttgctgtttttattcgtttgtcacataagcagtggtggtcggtcggccggcgacaatgagcggccgtgtgttcgtcctggccgctgccttcggcgtgctgctcgccgcagccgccgtgtcctcgaggcccgtcctgactccgctgggtactagccgccctgctgccggcgacctgtccgtgtacttccacgcggactcgtgcccgcagctggagacgatcgtgcggtccagcgtggacgcggcgctccagcagaacgtccgtctgacggcgggtctcctccgcctcttgttccacgactgcttcccgcagggctgcgacgcgtccatcctcctggacaacggcgagcgcggcctcccgcccaacgtggggctgcagcaggaggccgtgcagctggtggaggacatccgcgggaaggtgcacgcggcgtgcgggcccaccgtgtcgtgcgccgacatcacggtgctggccacccgcgacgccgtgagcctgtccggcgggccttccttcacggtgccgctggggcggctggacagcgcggcgccggcgtccagcaacgacgtgttcacgctgccgccgccgacggcgacggtggacgagctgctgacggcgttcgggagcaagaacctgtcggacccggcggacctggtggcgctgtcgggcgcgcacacggtggggaaggcgcggtgcagctcgtttggcgacgtggcgggcccggccaccgacgacgtgacgcggtgcgtga

SEQ ID NO: 279219 - DNA, 665 bp, Zea mays
  unsure (1)..(665): unsure at all n locations
gcggcattcttcttctcttcttcttccccaataacatatcgagctgcaactgctctgcttcttttctagcatgggcatgagggtcttgttggtggtcgtgctcatctcgttcgccccccttattaccactaatgcagcagcaggtgtcaacgccacgagatctgctggtaggcagcagaagcagaagcagaagccgctggcgcctgccctcatcgtgttcggcgactccatcgtggaccccggcaacaacaacgacatccacaccatcatcaaggccgacttcccgccctacggcaccgacttccagaaccacagagccacgggaaggttctgcaacggcaggatacccaccgacttcatcgcctcccgcctcggcatcaaggagcttctgccgccctacctctcctccgagccgctcgacaagcacgacctcgtcaccggcgtcagcttcgcgtccggcggcacgggcttcgacccgctcaccccgcagctcgcctccgtgatctcgctcccggaccagctcaccattgttccacgactacctgggcaaaggtgcccgaacgccgccggggacgccagggtgtcggatatcctgtcccggggcgtcttcgccatctgcgcccgcagcgacgacgtggncaacacctacttcaccctgcgagcgc

SEQ ID NO: 279220 - DNA, 469 bp, Zea mays
  unsure (1)..(469): unsure at all n locations
agaacaaacgaaaaatcagttaaaacgttttcaaacactgcctacttgttttcgttccgaaaccgaaaaataactgaagtgaacgggaaaaaacagtattcggaccaggacaggactttccggtcctgtttcaaccctaaatatagtgataatttttacaatttcatacataaggatacaagaagttaacaggatagcttgtagctcgcctatggagcataagcctcctttgcaagggaacgaaggaacctcataagtggtttctttgctccagaaagcttcgcattagattcttccccatctttattttgtgtgctttcttggaacatgtgggctctcttcacaagcttccgcagctcctgacgatcaaattcaacactatggacagagtaaacttcattagtaactgaaatgtctttgcagaggaggccgtcaaaccatctatctgcaattntcatatactcttgat

SEQ ID NO: 279221 - DNA, 649 bp, Zea mays
cggacgcgtgggctcggaaaaaggaaagaaacgaaagaaaagaaaatcgaggtggaagaaggctatgtgatgtgaggggaaattacgtgggatataagccaaatccatttaattctatcgttagctggctgcttgagctgagttctttgattggcctccgtgctatactaatttctgaagacctcttggaggaattctctgcttcatttctcgagcggcccctagctcgcttcgccggttgccagatttgctgcgaagcagaagaggtgcagcctccagtcaaggaaatcgctgaagagagagctgcagattgccagattcgtagctccgcttctgcttcggcgcacctgttcggtgtggaatgatggaggtgagcccgtctccggagcaaggagtgatggcgggaagggagccgttcgggctgccgaagaccccggcaacgccgccgtcctccgggggcacgcagggcctgcgcatggcgtacacgacggacggcaccgccatcttcaccccggtgagctccgtgccgtccgcgacggcgacataccagcccgtgggcggcagcgccgcgtctgcttcaagcttggctggcgtaggaggcaatggtggcgcgcccgtgcactcgggtggcgcgggtgagccggggacc

SEQ ID NO: 279222 - DNA, 763 bp, Zea mays
tgggcctcctatccaggccttcctgtatcaaataccaatcattggttggattctgcagtacccattccagctgcttggtcagttgaggcgtaaacgcacctgaaatgttctgcaactgccaagatactctttgactcttcatggttaaagtaccgtgttgttgtgatgtttatacatgattctcacttgtacccttcaatccttacacgttgcgtcttcaactcttgtgcatattcgtactctgagtcattctggcattgtccctttttgcgagcaggctatggtttattgttcatatttagacaataagagttcataagttgatggatgctccgactcttgaagcaggacctcagtgccttttggtcatcacaacaacaatggggccagagtgatcacacctgatttatttctgattctggaatctggacacaatttgacaaattattttgcaagttgcacggacggaacccttgaagaaaactagagaaaacaaaatcttacagtggagcttgatagcccacctgatgaataccacgcgtgatctgcttcatttttttgtcagatgcaatgttcatatggtgagacgcctttggtatttgaatttcgttgcagatagtgacatatggttctatcagctgaagagtgatgcctttttccattgttttgattggaaatgtgatgctgttaatgtttggaacaatgatttattactgtgttccctgtcttcagattaggataaaaggctatcaacctcgggtac

SEQ ID NO: 279223 - DNA, 1158 bp, Zea mays
tgccgtgtcttcctcttccgaggtagcaacgtggtgagtgaggcagccgctgctgtgctgcactgctgctgcggaggcccaagccgaccggcggagagcacccgtccttgggcggcggagggtggaagaataaggccgggcttgcggatgccggggtgcggagtagcggggagaggtggtgtgggggtatcgtcggccgcgcgccgcactccgccacaagggaagagccgcccctgcctctggatgactatcgctcgcggctacgggaggcaacatgagctcaaatattgcacatcgccacaaagcaaatctctgttactagaagcaagatttggtcgacatgttactaggagcactgcttatctgctccaaaattcccggagcactgcaatgaccagactacagaagtctgggaagtttctgcaacctgtcttggactcctcaagaaattatttgactagtacattctacaatgcaagcttgaagaggagagttctgtcgagggttgagtgctttgtgtcttcagatccaataaacaatggttggttgaaaccaaggaggtcagagaacttcactagtttggagagcgcatgtgttcagccagaatacaaactaccagtcaggacacgtgctgactgtaaagcagagcagtatgaaataacaggctcacctttgagcccttctgatgttcctgctgatgccgttatgattggagatacaaacgagatttctccctggtggcaggagtttccaaagcgctggacggtcgttctcctctgcttctttgcgtttcttctttgcaatatggaccgcgtcaatatgagcattgcaatccttccaatgtcgtcagagttcagctggaatccagcaaccgttggtctaatccaatcatctttcttttggggttaccttctcacacagattcttggaggtatttgggctgacaggtttggtggtaaggtcgtactaggacttcgggttgtatggtggtcatttgctacagttcttacaccccttgctgccaagattggtcttccatgcttactcaccatgcgtgccttcatggggataggcgagggcgttgccatgcctgctatgagcaacatccttttcaaatggatcccagtctcagagagaaacatatctattggcttggtg

SEQ ID NO: 279224 - DNA, 703 bp, Zea mays
  unsure (1)..(703): unsure at all n locations
attggtttgaatttgagtggtcaaagcgagctatccatgtaagcgtccggaaacaagcaaagtggtggtatgctaaaagattcttgcaccctgnnnncgtggcagcctatgagtacatatttatctgggatgaggaccttggagctgatcattttaatggagaggagtacattaaacttgtgaagaaatatagactagaaatcttacancctggtctagagccagataggggattgacatggcagatgaccaagagaagaggtgatcgtcaagttcacatggttacagaggagagagaaggctggtgctctgatcctcatgtccccccgtgcgctggggttggtgaaataatggctccagttttctccagagatgcgtggagatgtgtctggcatatgattcaggtataacacagcttcagtgtctgcacttggcttggtttggttgatatcttggcgttcttgcagaatgacttacttcatggatggggtctcgatttcgctctccgggaatgtgtggagcctgctcacgagaaaatcggtgtcgttgattcccaatggattgtacaccaagtgattccttctctcgggaaccaggtaaggaagaaaaaaaagaaacaaatgtgtacaatcagattctactgtagcgccttaatagcatcttcaaaatgcacaggggcagtcggagaatgggagggcgccat

SEQ ID NO: 279225 - DNA, 561 bp, Zea mays
cggacgcgtgggcggacgcgtgggcggacgcgtgggcggacgcgtgggttcggcgcctctgctgcatctgatcactgtcgtttgctgacaagaaatggatcagttcaccatgaactgattagacgacaccatggcagaccaagaagtgcgatcaggtgctgcagcagcacggcaaggggaaggaccagggactattactaccaggtgctgggtatcgcaattcattccacacctcagcagatcaaggaggcttacaggaaactccagaagcaacaccatccagacatcgccggctacaagggccacgactacacgctgctgctgaacgaggcgtacaaggttctgatgcgggatgtttccagttccaggcacgccgatggaaggggcaggagtagggtggggtcaggagccggttacaccggggacggatacagttcttgggaagggcccgtgagaagccaagctctcttcgtggacgagaacaagtgcataggatgccgggagtgcgtgcaccatgccgctaggacgttcgccatggacgacgttctcggagcgcgcacg

SEQ ID NO: 279226 - DNA, 430 bp, Zea mays
cctgcttccacctgcatctctctcctcggtcctcgctcgctcggcttcccgctctccgccgagaccgagaggaggcatcccggacctacggacggcggccatggggacgcaggcgccggagaactaccccgccgagaaggtacaggacgcgaggagcgcgcgggagaaggccatcgacgactggctcccgatcacctcgtcgcggaacgccaagtggtggtactccgccttccacaatgtcaccgccatggtcggcgccggcgtgctcagcctgccctacgccatgtccgagcttggcttggggccctggcatcgcggtgctggtggtgtcgtgggtgatcacgctgtacacgctgtggcagatggtggagatgcacgagatggtgccggggaagcggttcgaccggtaccacgagctggggcagcacgc

SEQ ID NO: 279227 - DNA, 317 bp, Zea mays
gctgcatctctctcctcggtcctcgctcgctcggcttccctcctgcatctctctccgccgagaccgagaggaggaggaggcaagggaggcatccctgacgtacggacggcggccatggggacgcaggcgccggagaactaccccgccgagaaggacgcgaggagcgcgcgggagaaggccatcgacgactggctcccgatcacctcgtcgcggaacgctaagtggtggtactctgccttccacaatgtcaccgccatggtcggcgccggcgtgctcagcctgccctacgccatgtccgagctcggctggggccctgg

SEQ ID NO: 279228 - DNA, 649 bp, Zea mays
tttctcttggggaggctacacattcattatcaatcttatcccaatgcatgtcctcttgtgcattgtaactggtcgttattcttcgcgtctctacattgcatatgctccccttgttgtacttggaacgcttctggcggcattagtacctgtggttggttttaatgcagtaatgacctctgagcacttcgcatcatttctggtgttcataatccttcacgtggttgctcttgtgtattatatcaaagggcttttgactcctaggctgttcaaagttgctatgactcttgtcatatctgttggcttagctgtttgttttgcagtagtagccatacttgtcgcattggtggcatctagtccaacgaaaggctggagtggccgcagtttgagtctgcttgacccaacttatgcaagcaagtacatccccatcattgctagtgtcagtgaacaccaacctcctacctggccctcgtattttatggacattaatgtgttggccttcctgattcctgctgggattatttcatgcttcttgcctctgtctgatgcaagctccttcatggtcttgtacttagtcactgcagtgtatttttctggagttatggtacggcttatgcttgtccttgctcctgctgcgtgtattttatctggg

SEQ ID NO: 279229 - DNA, 495 bp, Zea mays
ccacgagtccacaaccccagtatagtatccatccctaccctcgaccgcctcgacgaccacctgccacccggccaggcggccaccacgaccacggtcctgcgcccggcggtccttcactccccatgcgttccagcttgcgtacggccagtgcggcggtgccactgccgttccctgcaggtgagctggtcgtagctcagatctgtgcggtcgtgcaccgccgccggcttcatagttcgcacacaccactggcgatcgactgtcctcgtgcatctccattctccgccagctactcgcgacctctccacgtcaagcactgcgcatgaggatcagtcttctccacgtgaccatgttgagcactacgtcggacattgccagctcgcccaacaggtctaattttatattgctcgctgtatgccttaatgcatgtgttagatttgatttgttggacaaattttgtatggttgtatgtttttatcatatttaaatttggtggac

SEQ ID NO: 279230 - DNA, 459 bp, Zea mays
ctcctttcctgttactcctggccgcatgttcgtgcgcctctacttctatcccaccatctatggcggtaaccatgctcctgcagatgcttacttcggcgtcacagcagccaacctgacccttttacagagctttaacgcctcccaaacctctctatcacttggtgttgccttctttgtccgtgagtactccgtaaacgtcactgaaggcagcctagacctcactttctctccatccacacaccacaatggctcgtacgcgttcatcaacgggatcgagatcgtgcccacgcctgacctcttcacgacaccgacaccaacactatccaatgggggcaacccggatccgttccctattcttgctggaacggggttcgaaacaatgtaccggcttaacgttggaggcccaggccatctcaccaggaaggagatactggctttcaatcgttcatggggttaatg

SEQ ID NO: 279231 - DNA, 537 bp, Zea mays
gctcatcaccgacgatggtgccacggctaacacaagcaagcaagcaagtcactgagtagctagcagtatataccaccataaaaacaacacacacacacacgtgcgctaataagctaagcttaaggcggtagcgtagctcctctcgatctccggctcggacggacgacgttgccatggctgctcaactgcatcacgcactatacgagctgctgcacgaagcagcagcagcgcaacgagctctgctgctcgcgatccccttctccctgctgctcctgccgctcctgctccgctacctcgcggcgtcggcgtcggcgtcggcgtcggcgacaaagaacgacggagcggcggcggtggcggccagcgaccccgacaagctcttgagcctgctgccgtcgccgcccatgaagctccccatcatcgggcacctgcacctgatggggggacatcccctacgtgtccctcggccgcgctcgccaccaggtcaggccagagtgcctgatgctgctccgcctcggcgccgtgccgaccgtggtggtc

SEQ ID NO: 279232 - DNA, 1272 bp, Zea mays
ttcacgctatcgggcggagtgagcaacgggacccccacatggcgccaccgccgctgcccctgttctccccgtccctgaaggccccgccgccgccgccatggctccacgggtcctctacccaaagccgcgactccgcacccccggtgcctccactccccgccgaggcaactccttccaagttccgcatcgacagccccaaaccggcaccggcaaggaaaaacaccaaaacagcagccaagcccctcactgccggagtccccgggggccgcacccaccgagcggtcctcggcatcatccggcgcgtccgctccctcgagctctccgatgctccgagtccgaattccgtccacaccagcaacagcggtgccgccgccgccgcattccaccttacgatcgagctgtccccgccgcgggaaccaggccaatatgtggttgagaaggagaagtcacgggctgttccgtgggcggctgctagggacgagggcctcaaggttgcgctgcggcgggagaagaagccgcgggagccgacgcgcgcggagaccgagctggagacccacgagctgcatcgcctgcggcggatgacgcgtgggataggcaggtgggcgcgggccaagaaggccggtgtcaccgacgaggtagtcaaggaggtgcgtggggaatgggccagtggtgaggagctcgccgccgtgcgcatagtctagccactccgccggtccatggatcgcgccagggaaatgctcgagattaaaacaggaggcttagtcgtgtgtactaaaggtgtcatgcattttgtctacagaggaagcaaatatcagcaaaacgcatagcatagtcacactttgctcactaacgtgcataaaggcgatctagttgatcattatgttcatacaaccttacttaagtatgggagcattggtccagtgttaatcaacaattatggtgaagcagatgatgcttttcaagaaaatgatcaaagcatttgtggccagaaggatgaagaacctgtcaagggtacactatatgagagagaagtcaatagactattggacactttgggccctcgatttgttgattggtggtgggacacaccattacctgttgatgctgatctcctcccagagtttgttccaggctttaagactccatataggatgtgccctcctggggtgagaccaacactagctgatgaggagctgacatacttgcgcaagcttgcacgccttttgccaacacattttgcccttggtagaaacacaagattgcagggtttgg

SEQ ID NO: 279233 - DNA, 1348 bp, Zea mays
cctactcgtccggaacactcctagctgaagatctcgagtgcaacgcaacgttggcgcttggcggccagtagtagcagctaatttagcgtcgctccttcctactagacgagagatcgagaaaccatggccaagctccaagtcactcctggcgccgcgttcaccgagtgcaatgaactcaacttccagggcctgtacatgtaccacacgcccctgggtcccaaggccaaccaagctgcgatcctagagagcaaggccaagatcggcatcggtgccaccgtggttaacaactgggcagtgtatgacgggccagggccaggcgctaagctggtcggccgtgcgcagggcttgcacatcctagccggaaactgggtcaactcattcaccctggtgttcgaggatgaaaggttcagtgggtccacgcttgaagtgaggggcataacggtcgaaactggcgagtgggctgttgttgggggcaccggccagtttgctatggcgaacggcatcatctccaagaagttacacgagcagagaagcgacgggaacgtcatagagcttagtgtccatgctttctgcccgctgctcaaagggaaaaggggcggtgctgtgacaaaggttgggccatggggcggaagcggagggtctccaatggagctgacagagacggagacgcccatgcgtctggagagcatcaccgtcagcagcggcgtggccgtcaactccatctcattctcctacgtcgactctgccggccacaagcgctctgctggtccctggggtggttccggtggacagcctgatcaggtccagctcgccgagtctgaggtggtcacacaagtgtccggaacatacggcaccatcgacgacgacgaccgcaccgtgataacctccattaagttcgtcacgaaccttgacaagacctacgggcctttcggagcgtacggggacggcgacgacacctccttcaccgtccccgtgcagccggggagtggcgccatcgtgggcttcttcgcccgcgttggcggggccggggactacctggacgccattggcgtctacgtgcgccccctctaaaaaagctttgtttctgatgtgaatcaagcagctgcatgcatgctgctctactccacacagagtccatcaccacctgctgcttgaaatgcgtgcgtgcgtgcggcttccagttgctttatttcgtacctgagtgttgtgttgtggtgtgtttgctcatgtacttcggtacgttaattgcttggtaaactctggtcagtgatgtgtgtttgcctttgtcatggatttcgacggaataataaagacctcgagtagaagaggtcagggttttttcactcac

SEQ ID NO: 279234 - DNA, 511 bp, Zea mays
cagagctcggctcgctgtccacattcccgaagatctcatatgagaataactctggtctttggggcttcccactgctgccatgcgggcacaatgctggctcaagttcttccgatggccaccgatcccaccggaaccaggcttcactcgcgggtagtgttgctatgggactcttgttctcgctgtcctgtaataggtggaattgtcatcatagccgttgagtgcaagaagcggaagcagatcaatgaagaagcaagtacctctcgtgacatatacattgatagtcggtcacattctgggactatgaattccaattggagactctctggtactaacgccctcagcgtcaaccttgctgcatttgagaagcgactgcagaaactcacctttaatgatcttattgtggccaccaatggcttccacaatgatagcctagttgggtctggtggttttggtgatgtctataacgcccagctcaaggatggaaaggttgttgaatcaagaagcttataca

SEQ ID NO: 279235 - DNA, 966 bp, Zea mays
ccttcacgcacggtacgagcacgacagatcgggcgactggagtcatcgccgccgggccggtcgcggtcggatccccccgctccgcctcctctccttcgattcgttgcttcccgcttcaaatccaagccaccaccctttccttcccatggcttccgacgccccggcggagcaaccggcgacgcagcagaagcccaccagggtctcgctgtcctatgaggagatctccaagctcttctccctccccatcgctgaggcggcctccatcctcggagtctgcaccagtgtcttgaagaggatctgccgcacccacgggattgttaggtggccatatcgtaagcttgtttctgggaaagctggggatgacacaaaaggtcctgatagcgacaaagccaacgaactccttgaggtatcaaaaatcgcgaaacaaaaggctcccagtgcatcaggcccatcagtagtgtcatcaagcacttcccaaggagcggcaaagtctcaacagggcaattctaaggcaggacagttttcagtttcgccaccaacaggtaaacataacgcatcactaagtttgacccatagccaagccaaggccatcccttgctatatggatgatttcaagtacggattcccgtcatctggcttgtcttgtgaaactatgaaatggtggggcacaagcagcgacacatactatgtgcctaccaaagatggaagccatgaaccccatgaatcaacaacacatgagccatcaaagggcatgactgatgatgacgagttggactggggagcagatgaagcggaagctgaagctgatggcactgttacggcagaggcatcggcacagctgtgctcgctgagaaggaaagcagtagatgacgggcgcaaactattgaatggtcacaaccgcaggggccaagaattctctaggctgaacaaaaggcagaagacagcgctagcccaggtatttggggc

SEQ ID NO: 279236 - DNA, 1515 bp, Zea mays
cttcaacctccaatacatggtcatgcctcagtggctatagaatccctctcctttaggatgctgtgtccacaagacaaggttggcagtataataggcaagggtggaaatattgttaaaaccattcaaaatgatacaggctgtgaaattaaagttcttgacactgttccaaaaacagatgatcgcatcataagtatatctggacctgcgcatccgagtgatggaatctcccctgcacagaatgccattctgcatgtgcagcgtaaaattatgttacctagctctgataagaaggaaggtcctgcaacgtgtaggctgatcgtttctggaaaccaagttggttgtgttctcggcaagggtggtagtatcatagctgaaatgaggaagctgtcaggagcatttatagtagtgttgagcaaagacaagattccaaggggtgtcccagagcatgatgaagttatccagataaacggaagttgtgaagctattcaagaagctctaatgcaggttacagctaggcttcgtaaccatcttttccgggacagaatgcctgcagtggggcctaatatgcggccaccttttggtttgttagatccccagtttggtccattttcgggaaaccatgaatcatcatccctgtttcataaagatttcatgggacgaccattggatgggattgctgctccttggacagtgaagggcatgcgggatctcagcgatccagtgtcaatatccgatatccctggagcagggcatagagaagctggtggatttccaggtcctggtcagccatctatgatgccaaacttgactgcagaggtcttggttccaagattagttatccctgttctctgcggtgaggatggaagttgtttggacaggatccgtgagttttctgaagctaagataactgtcgctgagcctacagccgatgcgatggacactgctgttttgatatctggcacaccagagcagatgcatgcagcccgaagtctcgttgaagcattcgttatgagcgaatcttttggcccatgacatgtccagaggcagtgaagctagcgatcatatgtgggttcatgtttgtgaatatgcgtcccagtctgtctgcagagtgacatatgctccaagtggctaattaggctgaatattcgactggagtcctctttctgtctgcagagtggcaaatgctccaggttgctagttatatataatcttccaaagtcgtcactttgactctgagatacggagcacattttgagtagccgcagaactatgttgcttatgcaaggaagtattgtttggacccggaaaggctctaactttatttttgttgtactgatgttgtgagatgtaccaccattgtctgtatttcagtccggctttatatctgtattttatggtattgctaccatagttaatatgacggtaaggcagcgaaaaggcgtaagccggggaatattaaatagtagaaatctttatctttatatatgcccatataatgaagcagatgcccccccc

SEQ ID NO: 279237 - DNA, 639 bp, Zea mays
cccacgcgtccggccgaagtgaaaagtcgatcgggattgggccgttgggggtgcgatacccctcgcctcgaatgcgagctccgtaggtccgcccccccggcggatggccgagctgggccgccgccgccgcccgctgggatgaggcagcgtgaggagtcgcgctcgcggcttccctgcccccaggcctccgctctgaatatccccgacgcgacggttaccgaacaagcctcagctcagttagaaaggctaagatcagagcatctccgtgtctccacaacacatcctggattcgcaattattgaggtgcctccactataaaaggccaaccatcctcaaggaatgaacacagccagccagcaagcaagcagagaacaaggataacacagcaactgaaaaccttattaccaagaacaaacaactacaagaggctttgcaagttcacagaggcagctgttcactgcgaatgaacaaccagaggaagcctggagactggaactgcaagaactgccagcatctcaactcagccgacgtgactactgccagcgttgccgtgatccacgccctgacttgcagctcggcgacggctatagcacggctggtgtgctgacctccctggacatccgcccaggtgactggtac

SEQ ID NO: 279238 - DNA, 922 bp, Zea mays
cgcagaactccaacgactcctccatcagcagctccaactccagctgggagcccaaggtgccgctgctctacggcggcaccttcagcccctggggcgacgtcatggtgtctcgggagatgaggcaggaggacgatgacaaggtcagtgaccatgacgtcgaacgaggcgaggaggacttggactgcagtgagccggggagcctgcgtaggtgcacgctggacgcacgcagccggctgttcgagcttctgtcgctgtcagggatgctgatcgaccacaactggacggagatactgaagcggcgggacatgtacagggaggcgttcgccgacttcgaccccagcgcggtggcgcggatggaggaggaggacgtggcggagatcagcggcgacagggagctgaggatcgccgagtgcagggtccggtgcatcgtggagaacgccaggtgcatccagagggtggccagggagttcggctccttcagcggctacatgtggggccacgtgaaccaccggccggtggtgggcaagtaccgccaccacaagtacatcccgttccggacgcccaagtcggaggcggtgagcaaggacctcgtccgccggggcttccgcctcgtcggccccgtcatcgtctactctttcatgcaggccgccggcatggccatcgaccacctcgtcgactgcttccgcttccacgactgcgtccgcctcgccgagcgctcctggggcatcaccaacgtcgccgcgtaggcgtagccagccggcccctcaatatctgtgcatgcatgcctctccaagtttttcacaccttcttcttggtgttgttattgtttttttgtttggagatcggaattgtgtgtgaaattacgtagagtatgtactctactaagttatgatgtaacacttctattaactctttgcccatg

SEQ ID NO: 279239 - DNA, 962 bp, Zea mays
ttttatatggcgctctctaccttcctgacgagagaaaatatgggccacctccctacaaaacactggttaatgtttatggtggccccagtgtccagcttgttagtgattcatggatgtgtacagttgacatgagagctcaatatctacggagcaagggtatattagtttggaagatggataatcgaggatcggcaaggcgagggctgcattttgagggacaactgaagtacgacattggtcgtgttgatgctgaagatcaattagaaggggctgagtggttaataaaggagggccttgcaatacctggccatattggtatctgtggctggagctacggaggatttctctcagcaatgtgcctcgcaaggtttccagacacattctgttgtgcggtgtctggtgctccggtaacagcatgggatggttacgacaccttttacacagagaagtacttgggtctgcccgcggagcatccggatgcttacgagtaccggtcaataatgtaccacgccaagaacctgaaagggaagctgctcctcatccatgggatgattgacgagaacgtgcatttcatgcacacggcaaggctcatcagctcgctaatggcagagggcaagccctatgagatcctccttttccctgtcgagaggcacatggccccgacgccttggtgatcggatctacatggaggacaggatctttggttttttcgagaggagcctttgagagggcgtttgtataaatttgttgcccacatctgggctgtgattgggatgtttttggcatatggattcaggttttctcattcacacctgtatttatcactagcgcagttatctttgattcttttgccagtcttggatggttatcagctgtttggctgcgtttacaggtttcagaataagcaaaaacttcatatcactgtggttgggaaaaaaaaaaaaaaaaaaaaaaaaaagaga

SEQ ID NO: 279240 - DNA, 518 bp, Zea mays
gcccacgcgcggcctcacttacgtcagcccatccgattcctcgccgccgccggcatgcttctcctttcctccgccatgttcaccaccgcacgcctcccactcgccgtctccgctcgcctcccaaaccctaccaacaccacccgcctcatcttcgccggcctacctgcctcctccccggtccgcgccttctgccccagggcgcgcccctccccctccacttgcgccgccttctcctccaccatggccgcctccgacaaccccctcctcgtcgccgacttcgacttcccgcccttcgaccgcgtcgagcccagccacgtccgccccggcatccacgaactgctaacacgactcgagggcgagcttgaagagctcgagaagggcatcgagcccacgtgggcgaagctggtcgagccgctagaacgcatcaccgacaggctcgaggtgatctggggcatggtcgatcaccttaagtccggcaaggactccgctgatctccgcgccgccgtagaggaagtgca

SEQ ID NO: 279241 - DNA, 400 bp, Zea mays
ttcgagacaagcagtctacatgatgttccacaggtagcactcgagccagagaggagtacggatcaggaaacgagcaggccgccagagagggtccatgagaaggctcgcgcagaacagggaggctgctcggaagagtcgcctgcggaagaaggcctacatccagcagctagagacaagccgcatgaagctggcccagctagagctggagcttcaacgggctcgacggcagcagggcgcgtacgcgaatggtgggagcatgggagacccggctctcggctacacaggcccgatcgatccaggcgtcgccgcgttcgagatcgactacagccactgggtggacgagcagaagcggcacacggcggtactgacgtcggcgctccaagggcagcagacgtcggag

SEQ ID NO: 279242 - DNA, 784 bp, Zea mays
ctttgtctcggaggacgctagggagagggatcgccttaagatggtgcttcaccgtatctatgggaagttcatggtgtatcggccatttatccggaaagctatcaataacatattctaccagttcatatatgaaacagaaaagcacaatggaattgcagagctcttggagatttttggaagtatcatcaatgggtttgctttgccactcaaggaagagcacaaactgttccttgtaaggaccttaattccacttcacaagccaaggtgcactacaatgtaccatcaacagttgtcttactgcattacacagtttgttgaaaaagattgcaagcttgcggattctgttattaggggcctcataaaatattggcctatcaccaacagcacaaaggaggtactgttcttgggtgagttggaagaggtactagatgcaacacaacctgccgagtttcaaaaatgtatggttcctctttcccaccagatcgctcgctgctcgaacagccctcacttccaggttgctgagagagtattatttttctggaacaatattcactgcgagaatttcgttaagcaaaacagtaaggtgatcctgcctatcatcctccctgcattggagaaaaatataaatgggcactggaatcaagtcgtgcaaagcctcagtctgaatgtccgaaagttactctcccatcgtgaccctcaaatgtttactgaatgcttgcgaaaatacgaggaagacaagggctgggagaacgaatttaaacttgagcaagagttggcattgaaa

SEQ ID NO: 279243 - DNA, 761 bp, Zea mays
acaagtcgtccgcggacgctggtgcagaaatttcaatatctgttgcggtgcctcaaactatgggcaagaaaaagaggacttcattgccatctacttggcttcttcgctggaattcatttggctatccttgctgcatatgtttgccgcagacatccgaatgctagtataaatactctgttgtctttgttcttcgacatttttgttcactggccttggcctcttccagtgagtttgcttgatccgcctgttccttgtcggggtcctgatgggtgctccctcatgcccataatgttgccatgtattccaccagaattttgctcctctagtacaacagaaagtactttcagcaaaatcaaagaagaactttggcgtggctatgctctaagcaaggataccagaagtactgattttaactggagttggctctttgcaccttttccatatggtgcaagatacaaatgctttctccgcatagttctctctgctccgatgggagaagaattgcgtgactgggttggatgggtgaaatcacgattccgcaaccttcttctcaagctggagagtcttggtgtttactgtgaccctgatccctcagaacaagttgatcataccatcactgatccaaatgttgtattcttctggggtctcatctatagaaggaatattcaaatatgtataagttctctcaaagaagatttcatgaaaagtgtctgcaataacatctatggaaaggaaaaatgtgcccattcagacatcacaat

SEQ ID NO: 279244 - DNA, 544 bp, Zea mays
gagagggggagagaaaggttaaggaatccgagctaaggcgccgcttcttctcctcctgctgggttcttctcggcaccgtcactggagggagaggattcacgggacgaggcgacgcggaagggatttcgtcgcttgtgtgggcggcgcgtccgctggttgctttgcttccatggagagggatttcctgggtgcgatcgacagggcgtggaagtgcggcgaggcggcgaaggaggagagccgatcggagccagacagcccggcggcgacgcggtggcagtttgcggcgaggtccggcgtcgcgccggcgttcatgtcgttcaggacggaggcgacgggcgagggctctgaggcgttctcggtctccgagctccggccggccggagacgccttcgacggcatcaagaagcagagctccatgctttcgatctaccagcagcagaggcagtttggccacaacagcagccaggccacggcacagcagcagtaccctgcagcggcgcacaggcagcgctcgcaggtggcggattacggcgcggcggcaccg

SEQ ID NO: 279245 - DNA, 611 bp, Zea mays
gcagaggcttcaatgatgctgtgagtggctttccagatgatggctggtcttgtttgttgaacaccgatggtgctgaggatattacagttacaatcaactcatctccaaataaacttgttgggtctcatgtcagcgcttccccattattttctgctatggggggtggaatcatgtgcgcaaaagcatcgatgctgctgcagaatgtgccacctgctctacttgtgcgatttttgagggagcatcggtctgaatgggctgatcctggcatcgatgcttattctgtcgcctctttgagggccaacccatacactgttccaggtttaagggctggtgggtttatgggcaaccaggttatactaccccttgcacgcaccttggagcatgaagagtccttggaggttattaagcttgaaggacatggctttagccatgaggaggtgcttatgtcccgggatatgtttcttctacagctgtgcagtggcgtcgacgaggatgcacctggtgcgtgtgcacagcttgtctttgctcctattgatgaatcttttgccgacgatgctaccgtgctgccctcaagctttcgtgtgataccgcttgatgctaagacggatgtg

SEQ ID NO: 279246 - DNA, 633 bp, Zea mays
ggaccgtggcggacgcgtgggcggacgcgtgggtcaggggtcctatgctaactagagatgattcctacataaggaagggagagtcatttggagcaaaggcagaaactagggctggcagatcatccacctccatcaaatgcgcgccaattccgttctgaaccctcatcagcacttgagaaagttgagatagagaaggcaaagcaggatgatgatctgtctgatctaagcaacatactgacggagctgaaagggatggccggtgacatgggctctgagatcgagaggcaaacaaaagcaatgggggatgcacagaaggattatgacgagctgaacttcagggtcaagggagcaaacactcgagctcgccgtctcctcgggagataaaaaaatgcatatattcttgtctcttggatggtccataacacattaactatatgggggcatcaaattctgatgattttgtgcatcagattttgattagcattgttaccgtggacatgtcggcgtgtatggtagttgagacatattttatatgcttgcttcttttttctatttttttagcattgcacgagcttaggatttcagtggattttacatggaaaaccttgtctgattagaaacttcttttcgggt

SEQ ID NO: 279247 - DNA, 428 bp, Zea mays
cacaatcaccgagagctgtatggatttctttgagggtctcacttatgctcatgctgactttgcgctcacggatggctttcaggatcagggtaatccatactgggcaatgatgcatacaaactcgtacaagtatggatactctggtcctgggaactattacagttatgctcatgtctatgacatagacgattacatgcatagagccgatggtgggcgcagaatatgggataacactacaccttgtaaacaatgtggattctgccaatggtgccctgcagggtggtgaagctccccacacaacgacaaatactattaacaaggaatgcatccaccagtacaccaaagtccaggtagtcctcaggctgtttggcaagataacattgagcctgataatatgacatatgaggaactgttggatttgggtgagg

SEQ ID NO: 279248 - DNA, 614 bp, Zea mays
agaccggagtacttcatgaagcagcagctgacgcagagctccgacgtgtactcgttcggcgtcgtcctgctggaggtcctctgcgcccggcccgtcatcaacccggccctgccgagggaccaggtcaacctccccgagtgggctctggagcggaagaggcggggcctgctcgagaccgtggtcgaccgtcggctggacggaggctacgacctggagtccgtcaggcagttggctgaggtcgccgagaagtgcgtcgcggatgagggacgggaccggccttccatcggtcaggtcctgtggcacctcgagaccgctctgcagctgcaccaagcgcatctgcagagctcatcagcctcagctgctgcgggtgatctggagccctctgatggcgcgtctgctagcaacagcatcaggcgcgccgaagaggcagcagaaaccgctggtgtgacctatggagatggacatggagatggggaagcggtggaactcagagttgaggtactgtaaacgctgtgtgtgtgtggttgccccagcaaatatactgaaatccttttggttctttattccgtcgtactctgcaaagaaaatgcagtgttgagaggtgctattctttc

SEQ ID NO: 279249 - DNA, 440 bp, Zea mays
  unsure (1)..(440): unsure at all n locations
cggacgcgtgggctccccctctagcctcacctaccctatacacagccactactgttgatcgattgactttgaacccaccaggatcaggcttaggattacagcatgtcggcgtccccggagttgtacaggcccgcggaagcgccggccttctcgccgtcctgcgccacgcagccgctcgtgttcgccggcgacgactactgctgcaggacgccgacgggcagcgggatctgctacctgagggagcccaccacgtgcccgcccgcgccccggaagccgccgccgccgccgcccatgtgcaggaagcgcctcttccaagcggcggatcagcaggttgctggaggcggggcccgtccctgttatcagcatccgcctcgacgagctggagcgcctcttncggccctgcccgncgncgaccaccaccaccaccgacaagcgacgcc

SEQ ID NO: 279250 - DNA, 407 bp, Zea mays
aatccaccccctctcccccttctcgtcgtcgccgccgccgccgcccatccggggcttggactgtcctttccccgttctgctggtaggtaaggaattcctcttctggctccgacggattctctcgctccgtttgtctctggtacaattcgttcgctgctgcgagccctcgaatccgtttgtatccggagcagcggcggagtagtaatactagtacaattccttagtcgtgttcccaagtgggtggatgcgtctttgactgcccggcgcccgcccgcaccccgcagcagcaatggacgacggggacctggatttctccaacccggacacgtacctgtgtccggccctcggcaccgacccgcccagcagctgctccatggacagctacttcgacgagatcctcaaggaca

SEQ ID NO: 279251 - DNA, 327 bp, Zea mays
cgtggctttgttaacaagcagagcgctggcactcccagtgaaagaagaccaccttttggtgatgattgatgatgaacccggaggatgcggcaaaaggaggaatgatctgctgatccaatgaaactgagtttttttggtcttatgttgtgggaccataactgaaatttggtatttttctctactatttattgtagtggtatctggatttcccttgtgttgcctatgttgcaatacgccattttgattctttttttactttgttgtccctggagccttgagggtatatataatatcagtgatacgatgatattttgacccccagatttt

SEQ ID NO: 279252 - DNA, 305 bp, Zea mays
cgcgtgacacaattgttcacttgttcttggtttcggtcttacagaccgtcaccggcaccggcaggcagcagccttggcgggttggtcttgtgtcattgtttcctggctgccatcaatggaggtggtgaacaggtacgtcgccacccggcaccacatcgagggcgccccgacggaggccgattttgaggtgaaggaggagatggcgaggtgggcgccggactccggcgaggtgctcgtcaggaacctgtacctgtccatcgacccgtaccagctcaaccgcatgaagcggagcagcgtgacgcacc

SEQ ID NO: 279253 - DNA, 992 bp, Zea mays
gtcagatgaaagcgggataggaaaaaggagactaaagttaatcacgaaacaaggcctcgacctttccagaaatatacataccgaggatataaggctgtttcagatcgaagtgggcgagaccctacaggcggtttcaaaggccctgtaaagaaggaaccagagttgcaagctccactaaactcatcagccttggatgtcaagacaagtgacactacagaaatattttctgctactatcaatgttgcccagactgatgctaagaacaccacttctcagcctttatctaaagtgcagcatggttggggtggtattccaggtcgcccttccatggctgaaatagtgaagatgggcaggcctcaagctaaagttgggagcagatctgttgcaagtagcactgcgttgccaaccgttggtgattcagtcatttccaatacaccaaatcttgtgcccgaggaatataacagaactgtttttgcatcagaagcaggccatgtcgcagcagataaattgccaaacggtgctgttgaggtgcactctctacctaaagatgcttccgcatttgatatgttaccttcagctgagggaacagatgttgaagccccttccatgagtgctaatgcacaaggttcatcaacgccagatgccaatgaagatgacattgaaaaatatgcaaatttggaagagggcaatacagaaagcttgacgtctcctggacaagtttctgcttctggtaaaggtatacattcagaatatactgaacttgtcagccatctggatgaaggctcgatggagaaaacagatgactttcagctcgatgcccttccatttgagcacaacctaaatctgaatggagacgtgtctacagcgacaacacaatttgatcatttgactctgcttgatggaccaaaattgtctgatgagaatccggctgtaataatcccttgccatcttcagttttaaacgctgattgtgcgcacttgacatttggtagt

SEQ ID NO: 279254 - DNA, 1180 bp, Zea mays
  unsure (1)..(1180): unsure at all n locations
ttttcgttctctcacacgttcgcccacgcgtccggacaaactgaattatgctccaatgagaatgtggtttctctctaatcctccggggaaagcaacaattgaagtacagaatattgaggagtctacatggctaattgacagntacagttcagnactcaaacatcttgggcccccanccatgattgattactactttggaacgaatcgtgcaaactcatattcaaacctaaaatattgtaacccaaagtacctgtcaatccttaatcatttccgcttttacctacctgagatttatccaaagcttgacaagacggtctttcttgatgatgacatactagtaaagaaggatctggctggcctttggtcaatcaacatgaaggggaaggtaaacggtgcccttgagacttgtggagagagtttccatcgctatgatcgatacctgaatttttcaaatcccattatcaccaagagttttgacccacatgcttgtgtttgggcttctggaatgaatgtgtttgacctggctgaatggaggcggcagaacataactgaaatttatcactcgtggcagaagcttaatgaagatagatcactctggaaacttggtactctccctccgggtttggtcacattctggaacaagacatttcccctcagccggtcatggcatgttcttggtctaggttacaatccccatgttaacagcagagacattgagcatgctgcagtcatacattacaatggcaacatgaagccctggttggagattggtctacccaagttccggagctactggtccaagtatctggattatgaccaatctttccttcgggaatgcaacatcaatccatgaaggaacctggtgcttttagtcccttctgacataaccaatagcctgttttctgtcgatgtgcgctttagtgtagtcagcatagtactctcttgctttagatatcagttgttaacaagatttcttattgcctgtgcttcttgtcaaaccccttgcataattgcaggaaaatctgttatgtttttaaaggacaagctttggagcagggcaaactttagatagtgcaatgctcttatgcgatatcgcctttatgtactgaacgtttgctgcaatcctgtaatttggaagcaaactttccccccaatttaataggtattcaattgggtatcc

SEQ ID NO: 279255 - DNA, 402 bp, Zea mays
atcgcgagccggccgcccttttttttttttttttgagcttttttttgcctccttgggacagaaatgtgtccatattttctcggcttcgtattttatatattaattcaccaagcaaaatacacataatccctcggtacaggacaaatactctagctgtgaccgaagggcgtattcataaagcccaattcctgacgaacgcttgcaccttgaattggtactatatataagctcacaccctaattagacacacaagggaaaggaactgatccaaaattagacaccctaattcataaacaaaatttaaaacaaaggccttatagtgagattcttctttacgaacttgtgacgaccgcgcaaaagccatagcgcggccaccggcgggaagccaaaacacggggtcac

SEQ ID NO: 279256 - DNA, 329 bp, Zea mays
gtgggccagtgttcgcgttggccgtctcttcctatgggattctcgcactaaaggccttcttattgtggtaaacattgatggccaagttgatacccgtctcgacatcttatctgctcaggattcatatagctatgagacaaagcaaactctgttctctccgaggaaagagaaagctcgcagtcctgttggtttcttgcagagatcacggaatgctttattgggagcagctgatgcagtccggagagttgcttgttaagcaggttttggtgatgacactcgtagaattgaagcatttacaatgtcaacggatgggatgaattggacaggat

SEQ ID NO: 279257 - DNA, 506 bp, Zea mays
cttatggggtattttggtttgacactgcttcacgcccaaaatgatggcagcttcgtctgagctgggcttggatatggaagtcttctttcgtttagggtgaagtaagaccaagctcatgagcttattatcctaggtcggaacaaattagttgatagtgataggatcccctttttgacgtccccatgtccccccgtgtggcggcatggggatgtcaaaaggaaagggatggagtttttctcgcttttggcgtagcagagcctccctttgggaggcccgcgcgacgggctattagctcagtggtagagcgcgcccctgataattgcgtcgttgtgcctgggctgtgagggctctcagccacatggatagttcaatgtgctcatcagcgcctgacccgaagatgtggatcatccaaggcacattagcatggcgtactcctcctgtttgaatcggagtttgaaaccaaacaaacttctcctcaggaggatagatggggcgattcaggtgag

SEQ ID NO: 279258 - DNA, 482 bp, Zea mays
aacaatggttcccttgattaacactctcaccttagtggccggctatctgtggtacgaatatatctacaagctggacaaacatacatataacaagtaccatccctacacgtcgtggattcctataactatttatgtctgcctacgcaattgcacccaacagttgaggagtacccatttgtctctttttgtttggcttggcaaaattacaatggagagttatatttctccagtttcacatttggctcaggtaagtgccggacccagcttttttacataaagaaatgttttattgaaaatcaaaacaattacatcatgatgacacaaccatcctgagctactcctggcagcaagcaggagttcattaaactgaatctctgaaagaaaaatgttgaaatgttttttgagcttctgctgcgcagtttcagtttcttgcaccaaccaagctgtggtttcttttacaggtctagtattccgaacggaca

SEQ ID NO: 279259 - DNA, 435 bp, Zea mays
cgactcccgactgccggccctgccctgcgccgcgcggagccgcggaccgcccgcccaccaccgaaaccctagagcaagcagggatgcacggtccggtcccgctcctcctcctcctcctgctcctctgcacggccgcggcggcctccgacggctcccagccccaggtacgtcacgccagccgccagcgtcttctcttcccctatcctcgcttggctgcctcgaccccccctgccgcaatcgatcccagctcacgttgcgcctccgcgcaggcgcaggcaccggcggcggcgcggcgggggatggtgccggtggcccccgcggaggcggagctcggcgccatggtggcgctcgctctcaacggcacgcggcgccggctcggtggcagcttccagctctgcgcgccctgcacctgctgcggcggggccagcggcgcct

SEQ ID NO: 279260 - DNA, 436 bp, Zea mays
cgtccggcccggcgctgaataagattcccctgctgccggtcccccagatgagctgatcgagcagcccgtcgccaagccaaccggacatggtgagcgacggcgcgcgcgggctgctgggcgcgtacgagctcgggcggacgctcggggagggcaacttcgggaaggtgaagcaggcgcggcaccgcggcagcggcgggcagtttgccgtgaagatcatggagcgcgccagggtgctgtcgcagcgcgcggacgagcagatatgccgcgagatcgccacgctcaagctgctcgcgcaccccaacgtcgtccgcctccacgaggtggctgccagccagacgaagatctacatggtgcttgagctcgtcaacggcggcgagctgctggacaggattcaggcggccagtgagggaaagcttccggagcaggaggcaaggag

SEQ ID NO: 279261 - DNA, 431 bp, Zea mays
cgtgggaggatttttttgccgcagcgtccccatggcggcgggaagagaaaccgacgaacagctgaccgagtacgagaagcagcggctgtcgcggatacgcgagatcgaggcccgactcgaggccctgggcctccgcagcctcgcagcgtcccctcttctccgcagctcgtcgccggggacggccaaggggaagcagaagaagaggtccgtcgacgaggacgaggagtacgtcccgtccgatagcggcggtgaggagaaagacgagagctcgtcggagagcgcgcaagacgaagaggtggatggagaggggaaatcagcttctatgtcacgcgccaagggaaagaaaaagaaattgtcaaaatctggtgaatctacaaagaacacgcctactaagggtagtgcttcttttgctgaggtggtggatgatgata

SEQ ID NO: 279262 - DNA, 784 bp, Zea mays
cccagactgaactggagtgttgaggatgttccaggtgatagtcaacctgttgagaattctagcaagaaaactttgagatgtcccactgccgtttttgaggatgatcttcctgttaccaagatggatgatactcctgttactaatgtggacgatgtagaattcacctttcatgagaaaaccatgacctgattctgtcccatggaaaaagagaagacagaatatatcttctgaagatcaggcacttatctcatcagcggtagcaagcttaaataagttttctgatgatggaagctttatggaaaagattagcaatgttgagagcaagaacacaaatgtttccactgctagtgctagtgctgatgagcagagggacaatgggcagaaaacccctaaggagagttcaaacaaagtacaattagtgagcactcagaaactaaatgcaaaccagatggctgcaaagattctgcagctccgaatgaaaggcaagcatcaagaagctgaacaactttcgagagaaatggaagctttgctggagaatcaggatactgcccatgagaagcctggtcatggaaaagaaagaagctcaatcaggcctacattgaagcctactgcagctgatcacaggagaagagaagatgatgcggaccttcatttggctaataaaattatgcacaacaagcagtataacatgtccaaaagtatagaagatgaatatgattttggtgatgctcccactaaaaaggacaaaagaaagaataaagaagcacgtgacgagaggaaaagc

SEQ ID NO: 279263 - DNA, 581 bp, Zea mays
cgagacgagagacgagacccagacgtctcgccctcggcttcttcctcccctccctgaccgctgccgcgacctctcggcgaaaccctaacctaccttagaccccgccgccgccgccgcccaagggagagagagacttgcacatcaaagggcgtccgatggggaagaagaagaagcgcgtcgataaggtcttctgctactactgcgaccgcgagttcgacgacgagaagatcctcgtccagcaccagaaggccaagcacttcaagtgccacgtatgccacaagaagctctccaccgcctctggcatggccatacacgtcctccaggtccacaaggagtccgtgaccaaggttcctaatgcaaagcctgatagggagtcaacggagatagagatatttggaatgcagggaattcctgcgcatgtattggctgctcattatggagaagaggaagacccttcaacaaaggtacccaaagtagaagtgcctcaggtaaggcctggtattatgcctaattcgctaggcatggcatttcctccacagatcaggtagggcagatctaatttcaatctataattactatac

SEQ ID NO: 279264 - DNA, 588 bp, Zea mays
ctgccagctcaaggagggagacgacgcgaagggaggtgccgctgaggtgaagggcttcgaagtccgctacaacgacagtgttaactttgttgacgatggtatccggatagagccgtttaacttggagcgagaaagggaagaagggtatttcgatgagaatgggaactttgtggagtatgcaagaggcaatgagattaaggatgcttggttggacagtgtggaagttgacccaacatatgctgcaaaggttcagaacaaaggcaaagagaaagtagacgagtttgaggacctctcttccgatgacattgggaggctaaaaaggcagatagcaaacttgcttgagccaggagaaacgataatgcaagccttgaaaaggtggacgggtacatccacggataaacgtggaaagatggctgaggggactaaacgtatatttgatgaattgactgaagctgccatgaagctaatggagaacggcgattataatgtttactcagatgatcgtgagacctttgaacgcgaggctgctgcgtatgaacgtttggcacgtgctcgacttggtttgccagaagttgatggtggctctga

SEQ ID NO: 279265 - DNA, 413 bp, Zea mays
cccggccgagcgaattgaagaagctccccctctgaactgaagcaatggcaggcggcaatgccggtggcgccgctcgagtcctgttctccatcctcggcctggcgctggcgctgccgctgccgctgctcgtggccggcgacgacccgtaccggttcttcacgtggacggtgacctacggcgacatctacccgctgggcgtcaagcagcaggggatcctgatcaacaaccagttcccggggccgcagatcgaggccgtcaccaacgacaacctcatcatcaacgtcttcaacaagctcaacgagccgttcctcctctcctggagcgggctccagcagcggcggaactcggtcgaagacggcgtggccgggacgacgtgcccgatcccgccgggctccaacttgacctacattatg

SEQ ID NO: 279266 - DNA, 478 bp, Zea mays
ttcacgcgtccgcccacgcgtccccccccgcgagcagtctgcagtcgccgagccgcgtgtccgccgggccggcggttaccaagctcaccaaaaatctttccaggttcgaggccgcccatgttcgcctgcaggtctctcctcgcaagggctagtcggctcactcggcctgcgattccaagcgccgccggttcgccgcttcgttacctctaccagggatcatattgtcgaaataagttggcctcattcgtgatggaaggggcgcaaggatcaagcaatgtgacaaaacacaataaaaggcagtctcctgtgcagcgatggaggccagtttcaacagaagcagttccccagcatcagcaagatgacattattgagacatcaaattctggaagcaagaaaattatagaggattgcatagcttctagtgagaatttgccaccagatggaacaccaatgtggttgaagttaccgccaatgatgc

SEQ ID NO: 279267 - DNA, 420 bp, Zea mays
cggacgcgtgggcggacgcgtgggcggcgggctacctcttcgccatccagcacggggccaaggggatcttcgacgccgacgaccgcgccgaggtgcccgggaacgatctggggaagcatttcgacgtggatttgggatctggagtcaccaaccacccagtgctgctccagtacagccacgcggatcccaatcgcacagtggtgaacccctacgtgcacttcggccagcggtcggtctggccaagggggctgccgctcgataaggttggggaggtcgcccatgaggtgttctacaccgaggtcttcagtggccggcaattcattcagcaggggctgtcggacgggttgccacatgtagatgcggtggtctacttcactagaaaaccaccaactttggcgttcgatctgaggtttgattcgg

SEQ ID NO: 279268 - DNA, 1054 bp, Zea mays
ctcgtgatcctgttctcctacccacaagttgcgattcgcagatctctggcgcagccatcgaatccatcctttgtccttgactcatacttctgttgcaatttgcgtgctggttcctccggtggtgcatgtgcacgggccatgttcgacgaggtgggtttgagaagttctgttacatggtaatccccgtccttgggcttgtcatggtcgattgggaacagtaggattggttgctgagcatggctggaccggagaagactgttgtttggttcaggagagaccgcaggatcgaggacaacccggccttggcagcggcggcgaaagggggctctgtcctccctatcttcatatggtgcccctcagactacgggcagtactaccctggaaggtgctcccggtggtggctcaagcagtctcttacccaccttgggaagtcattagagctgctcgggtgcccactcgtgctgatccgtgcggaggacagcactcttgcagctcttttggagtgcgttcgttccatcagtgccactagagtggtttacaatcgtctctacgaccctatttcacttgtgcttgacaacaaaatcaagaatgagcttccagcccatggaatttctgtccaaagtttcaatggtgatttactttacgagccgtgggatgtttatgatgagaatgggcaggcatttacaacctttaacaagtactgggagaaatgtatgaacctacctattgagatatcacaatatcttgcacctacaaggctggtggcagcgccaggtctagcaaatgttcgctgttgttcgattgatgatctaggtcttgaatctagtaaggatgtggaatcaagcaatgctttgctaagcagggcctggtctcctggctggcgcaatgcagagaacatgcttgaggaatttgtgtcttatggtcttccagaatattcagaacatggtatgaaggttgggggaagtactacgtcattattcagaacatggtatgaaggttgggggaagtactacgtcattattgtcaccgtatctccatttcgaggattagtgta

SEQ ID NO: 279269 - DNA, 466 bp, Zea mays
acgcctcatgtcatcatcgtgggtactggggaggatgtggcggcgcgcatcatgtcgttttctcagaagggtccacgctcggtctgcatcctctctgccaacgggtcaatctctaatgtaacactgaggcagccggatgcatctgggagcaccttcacctacgagggccgtttcgagatcctgcagctgatgggctccttcacaatggccgaggaaggccggaggagaaccggcgggctgagcgtctctcttgctggccctgacggccgcgtagtcggcggcgtagtggctgggatgctgcgtgctgcaagtcctatacaggtgatcgtcggaagcttcctgcccaacagcctgaagcagcaccagaggaggaggatgagcatgcagcagccttcccccgttccggcgttaccagcacccgtggcacccccgccgcccgtgcttaccgcggccaccccgatctcgc

SEQ ID NO: 279270 - DNA, 383 bp, Zea mays
ttcccccatgacctgtccgtctcaatctccctcttccccgcaccaaatcgaagctacccctgggcctgtgcgatttgggctcggcctggggccttcctgttgctcaaaagctcgctcattcgatggccctggctgaaaggcgacaaatcccactggaattcggagcacagagctttgaatccaggggccaaaactttttgcgcatctcccttgcggaaaagcgcctcctctgcgtctgaaagtcggatcttttttcacagattcgatttgaagttcccgagcaggtcgaggaccgcggtgtcggtaagacttgctttgaagatcttgatcaccacaagagatttgctgaatttccggtcactgtactttttccacttggcatg

SEQ ID NO: 279271 - DNA, 466 bp, Zea mays
cgacctcgtctttcccccccagccagcctcgcctcaccgactccccgatccggtccctcccttcgccagctatgcatccctcctccggcgcgggggactacgccccttactacccaccttatccctccccggccgcgccgcctcccgccgcctacccgtcggtgtccgccccggcttctgcgcccccgtactcgtcgtaccccgcggacttcgcccccgcgccttcgtaccccgcgtacccgcccgccgacctcccccactacgcgccgccgccggctgcgcccgcgcccccggaagccgacctacccctacgggccggcgcccgcgccgcccgtgccggcgtgcccgcacaacccggtgccctctccggacccggcgctggatcgggcggggagctacggctacggatctggccctggcttcgggtaccggcaggagctgtacaccgccaagccggcgggcgggt

SEQ ID NO: 279272 - DNA, 490 bp, Zea mays
tcggcgtgtgtgttgttgacatgtgagatggttctctctgcctcacagagagagagagagagagagagagagaggaaggagagatgtcggtcgtctggttctagggaagagatgaggactgtggccagttttctgaagagaaaacaaggcctctctcatggttgctgtgccttgtgcctgtaaaataattttgttttgtttcatcccatgctggaggactggactgcactgctaatcctttgttttctgttctgaaaagtgggcaatcgagtgcttagctgttggggagacgtgcaaagatgccaacttttccgtgcgcccgccgagtctgtctgtctgttgcccacttgtgtcacctggaaaagtgcggtgtgcgggtgatcattttatatgtaaatgtgctttgttattaataatattatagcagcgcgtggtggtggtgctgctgctactgtaataaagacagatactccagcatggaaagtcaccg

SEQ ID NO: 279273 - DNA, 526 bp, Zea mays
cccacgcgtccgctgaattcatggtgaatggctcactaaggaatgttcttttaaggaaagacagatatgtgtagaatgcttgatcgccggagaaaacttacaattgctatggaagcggcgtttgggatggaatacctgcactccaaaagcatagtgcattttgatctgaaatgcgacaacttacttgttaacttgagagatcctcagaggccaatttgccaggttggagactttgggttatcaaggatcacgcgcaacactctggtttctgggggtgtccgcggcactcttccatggatggcaccagagctactgaatggcagcagcagcaaagtctctgagaaagtggatgtgttctcttttgggatagttttatgggagatcttgactggtgaggaaccgtatgcaaatatgcattgtggtgctatcatagggggtatcgtcaataacatcctccggcctccaatacctgagaagtgtgacccggactggcaaaagctgatggagcaatgttggtcggcgaacc

SEQ ID NO: 279274 - DNA, 666 bp, Zea mays
tctcatcttgagtctcgccgccgcaagcttgtgtaaggtgtaaccctaaccctaaaacacttaccttcgcctccagcaccacgcttccatggaggggcgcggaggctaagtatagccaacctctacaccatatccccatggattgagcggattcccaaggcatgggtacaaaccctcacctgcaagagctggccgcttcggcggtggcggcttctgaaccaccaccgcgggcgcgcgtggtgcggatcctagtgcacgatgctgacgccaccgattcgtcctccagcgaggatgaggcaccgccacttcttcctcggcggaggtcgaggggtggtagcagcagcctgagcgtgaggcgccgtgttatggaaccggctggggcaagctcggccgttcggttccgtggcgtccgtcgtaggccgtgggggcgctgggctgcggagatccgcgagccgcacaaccgccgcagactgtggctcggcaccttcgacaccgctgaggaggctgccaacgcctacgacgctgcgaacatccgcttccgcggtgtcagcgccactaccaacttccctgcggaccgctactcgccccctccaaagccagcgaacctatcatctcgctgactcctgaacccggaaaggtgatcaccttgccaccggtacctgtgaa

SEQ ID NO: 279275 - DNA, 1085 bp, Zea mays
  unsure (1)..(1085): unsure at all n locations
aaaattgcctatttttaaattcttgcatccaaaccaagcctaactaaaactactacttgctgaaaacattatcccttgttctctcaagggattttggatgtttttgcttgtaggtaaatgctcattgttccagtttatatgcttttaagtttcttcacttgaatgagctagagtataccttgttaattgcttttatagcctgcttaaggaaaaactatgcaaagaaaatgcacaaatcttaaagcataaataataaccatcacttacttttagtacgaagttgttacataattcctatagaatcataattctctggtacaaggctgggaatagtgatcatgtaagaatctaaattctaaaagcattggaatcctgatgccttggttttattctccctacttgtttgcaacttgtaatttttctcgatataatctctgtagctgaattgaagtatctgttttcaccatgcctaagctattcctgatcagtgaccatgctttatttattgttctatgtcgagtaattagccnggtagctcaccatggaatgcttttcgtcccaattggctacacctttggttcacgcatgttcgacatgtatggtatcagaggaggcagcccctattgcgcggaggtatttgctggcgatggcagcagacaacccagtgagactgaactcgcccttgcagagcaccagggcaagtacatggcctccatagtgaaaaagctagctctccatgcttgagacagccacccctgtgcagtggaagtcacatggtcaccttcctccggtgctcggcttctcctattgtttccggatacatccggcccgtcgtatatgtgcacagcttgccctatcgtttgtgaaagtagccacccctaaattaaggttcatttgtacattgtcggcatattcatattgttgtccatttgaacaataagagtgtcataataaacatcatatgtcatattggttttggtgtttgttttgttgcacggaactgttcttatactataaaagaagagtaattttgttctgaaaaaaaaaaaaaacaaaaaaagggcggccgctcgcgatcataatac

SEQ ID NO: 279276 - DNA, 486 bp, Zea mays
cttccctccgccggatccactgtctactttggtcctcatccccatccccgcacaccatcagtccccgcaaacatcacgctgacaaggaacatccaccgcgctcgccgccaacaacttctacaccatccaccggaggtgctggagaacatgcaggcgccggtcaagaaccccacgatcctcgtgatcgcgtcgaccgcgtagctgcaggaggctgatgaagtgttgtttggcttcccgacgaggtacggcgccatggctgcgcaaatgaaggccttcttcgactccaccggctcgctctgagaggcgcagaagctcgctgggaagcccgccgggttcttcgtcagcaccggaacgcagggcggggggcaggagaccacggcttggacggccatcacccagctagctcaccatggaatgcttttcgtcccaattggctacacctttggttcaggcatgttcgacatggatggtatcagaggaggcagc

SEQ ID NO: 279277 - DNA, 528 bp, Zea mays
  unsure (1)..(528): unsure at all n locations
tttttgcctttcctgccgccggccgggtctactcggcccatcttgtagctgcagcggcaccccctcaaaatcgtccaaccaatcccaccagctgctcatctcgaatccagcccgaaacctcgcgccacgcgtgccgtcgacccagttcgtgcgcgttcagctgctgccccgcgctcagggatcgggaaggcaagctctttggtggttcctaagggcgaatctcgtggcgattcgctcagatttggatttagggtttaggaggcggtgctggtgatcggtttgtgccgccgggagagatgtcggcggctgtggcgtgcgcggagagggcgactaacgacatgctgatcggcccggattgggcggtcaacatcgagctctgcgacatcatcaacatggatcccggacaagcaaaggatacactcaaactcctaaagaaacgtcttgcaagcaagaatacgaaagtgcaaattctaacactttatgtgctagagactctaagcaaaaattgtggggatatngttcatcaac

SEQ ID NO: 279278 - DNA, 311 bp, Zea mays
cacatgcgtccgcagctcactctggtacgagctggcgtacactgaggcaaagggtaggatcaggaagcgcgacaggatctggcagatcgcatttggttctggattcaagtgcaacagcgccgtctggaaggcactccggacggtgaacccggccaaggagaagagcccctggatggatgagattgacaacttcccggtggatgttccaaagatttcaaaggttggtggcgcttgaagaaccattcttcttattattaggtggcaagtggagttgggtgattgtcaggggctgggcagagatttattccatc

SEQ ID NO: 279279 - DNA, 427 bp, Zea mays
ctccaaaaccccaaaccctcgttcaacatagccattatccgaagttccgaacccacgccaagccccagggtccgaccgcagaaccgacccaaaatgtcgcccgcctcttccatgctcaccgccgtgtcgctctcctccccgctcccagccccgcgcctccgcgccgccgccgccgcctcctccttcgctccgccgcgccgcgcggcagtcgcactcgtcgtgcgcgcggcgtccgcatcttccaagtcccctgccacggcggaggcggccccgaagaagaagagggcgaccggcatcacccagccgaagtccgtgtcgccggcgctgcaggcaatcgtgggcgacccggttattccccgcaccgaggtcctcaagcgcctctgggcctatatcaaggagcataacctccaggatccctctgataaaa

SEQ ID NO: 279280 - DNA, 480 bp, Zea mays
cagtgataatgaagatatagatcgtgccattgcattatcgctagctgaggaagatcagaataaggggaagtcggtggctattgatactgactataatctggaggaagctgaacagcttgcacgggctctgcaggagagcctgaatgcagagtctcctcctcgacagaatgttcctattgaggatgtgccagtgcctcaatggaatattcctgttgagcgggtagcctcctcgacagtatgttccagcaaatgaaccaaccccacatgtttacccacggggtggatccaggatttgtgctggatgccaaaacccaattggccatggacgtttccttagttgtatggattcagtttggcatcctcaatgcttcagatgttttgcttgcaacaaacccatatcagagtatgagtttgctatgcatgatgatcagccataccacaaatcctgctacaaagagttttttcatccgaaatgcgatg

SEQ ID NO: 279281 - DNA, 627 bp, Zea mays
ggcaatttgttaagtggcgggctcaggctcagcccaccctccatgttccatggctcgctgctctctgattgcttcatccatccattaactccccccctcctttattgtgcatgcatgctttcctcctttataacccctgccgcgctagctgtctctccaccgcatcgaccggacggtctctctctcgtctctcccgacgcgcctccacggccggccccgccccggctcgctagcctcctcccactcccagtaccagcccccgcccctccagcaccaccagcagctcgccttcggaccatgagacgggtcggaggagacctgcagggcgacggcacgacgcctcggtccgcggcggcggggcaggccatgatggagcttcaggccaacgggtcggccgccgtcgggggcgccatggtggtggggctcagcccgctcagcgaggccctgtggcgggacagcaaggcgctcccgccgggggccggccccgccgcgctcatcggcgacgtgtccgccaggctcacgtggaaggacctctgcgtcaccgtggctctgggccccggcaagacgcagaccgtgctggacgagctcaccgggtacgcggagcccgggtcgctgaccgcgctcatg

SEQ ID NO: 279282 - DNA, 911 bp, Zea mays
gggaaataccactgagcatctctcgaccgaagttaatgatggccccggaaatgggacagtggtaccaatcattactgaagcttctgagatagtaacagggtctgattctttttcaacacaatcaagaactagtcaagtccccaatgagcttgatccatctcaagttggcctgcctaatccagtgcttgcaccttttcttattggatccccacagcataggcaagctgatagctctggacttacttttgttccaacaggtccaccagttccttttgctgtgctcccgcttgtcccagggaatagcgatggttctggcccccagtttgagagaagccaaggaattgatcagcttcctgccaatactgtaggtcaattttttggttcacttaatgatgttcaccaacaagattccagtgctatctcaacagtatcgcccagtactatgactgagccatctggtgaacacaagcctgatatcttgcatagtgactttgtcagccattggcacaatttacagtatgggcgacgctgtcagaatcctcgccccatgggtcctgttctataccctgttccggtgccaccgatgtatttacagggccatgttccatgggatgggcctggaagaccagctgcaccaaatgttaactggacacgaatggtgggcggtcaacgagtatttcctgtgatgcctgtacaaccggctacagaaagaactggtgtttttcagcactacggtgaagatgcacccagataccgtggaggcacaggaacctacttgccaaatcctaaggttcattttagggaccgacactcaaattcaaggaactacagaggaggctataatggtgacaggggtgactataatgatcaggagggaagctggataaactcaaaacaacgaaatccaaacc

SEQ ID NO: 279283 - DNA, 519 bp, Zea mays
ctgttacacagatgggcgacggggctccgccgccaggggctctatactccttcggaacgccgtggccggagctcaatcaaggcctcacctacaccgacacgttccgttgcgctgatgcggacgccgctaccaccttgattgagttctactctactaaccacaagagctcggcgccattgccagggtggatcgggaggattcgtaacgggcagataaccgctgatggtgaagttgtcactgatccagatatgactctgggggatgggtctaagttggtatatcatcgttttccttggcaggagccatttgcgccgtatttgctggaagtgctctacgaggatgatgacatggttgcccttaataagccttctggcttgcaagttctgcctaaaggactgtttcagcagcgaactgttttagcacagcttcaattgaaagactggaagatggcctcatcttgccggttcaagagaaaagatgtgcagtcacatccagtacctgttcatcgtttagggaggg

SEQ ID NO: 279284 - DNA, 549 bp, Zea mays
cggactcgtgggcggacgcgtgggcggacgcgtgggcggacgcgtgggatcgcaccgagggcgaggaggcaaaggaataacctgtgaagctgctgccatccactcatgtttctgccgtccttgattgcagtcattcctcccccaagtccatagagtgatagagaatggaggataatctaccagttaatgtccgggaatatcaagaacttgctaagaaagcactaccaaagatgcactatgattatatcaacggaggagcagaagatgaatatacactgagggagaatattgcagcatatggaagaattctgttacggccacgagtccttatagatgtgagcaagatagacatgtcaacaagcttattaggatataatatgccatcgccaataattgtcgcacctacaggggcacacaaattagccaatcccgaaggggaggtggccacagcatgagctgccgcggcacgtaacaccatgatggtaacttagctgttattatgtgatgagtagagggggtgtcttctgagaatcgggacattgacctaac

SEQ ID NO: 279285 - DNA, 601 bp, Zea mays
tgtctcgtgggcggacgcgtgggcggacgcgtggggccgcataaccgcatcctggccgccgagagcccacgtaattaccccgactgcccgagctcgccggctcgctgccactaaccagccaagagtaatccagcgcccaccgcatggccgcgcgcgcacctctcatcatgccgcgcgccgcctccagcgccggcccggtcccggctgcggcgacgaccgtggccaggcgccagtccgcgcagtgtctccacgcgaggggggctgtcggcggcctcttcttcgaccagaggacagcgcggccggtccaccacctcctccctggcgccaagttcggagcgattgggagcaccgcggaggccgcgccgtcggaggggctcgcgcagaagctgcagggggtcgatgtgttcgatctgagcggcaagacggtgcccatcgttgatctgtggaaggaaaggaaggcagtggttgcgtttgcccggcatttcgggtgcgtgctgtgccgaaagagggcggaccttctcgccgcgaaacaggatgacatgcaagctgctggagttgctcttgttttaattggaccaggtagtgttgaacaggcaaaggc

SEQ ID NO: 279286 - DNA, 991 bp, Zea mays
gttaattagctaattagctaggtacgtacctagctgacccacgccattgcgccgacacatgcatgcacgcagctgcgcacacggtgggcacgacggcgtgcttcttcctccaggaccggctctacaacttcccgctgccgggcggcgggcggggctcggacccgaccatcccgccgggcttcctgtcggagctcaaggcccggtgcgcgccgggggacttcaacacgcgcctggccctggaccgcggcagcgagaacgtcttcgacacctccatcctccgcaacatccgcaacggcttcgccgtcatcggcaccgacgccgcgctctacaacgacacggccacggtcgacgtcgtcgactcctactccggcctgctcagcaacttcttcgggccctacttccggcaggacttcgcggacgccatggtccgcatgggcagcatcggcgtggtcaccggcagcaagcagggcgaggtccggaaggtctgctccaagttcaactgactgattccgctcccgccaatgcaatgcaagcgcgtaccgtccatagatcgtcccttcattcattgcacacagctagctggctggccggccccatccatataagcatgaagagcacgtacgtacggtggggtttggttgcctgctttcatggcagtgtttctctcttcttcatccattcgttccattcatgagtacagagtacacacatcgcgtagatctctcgtctcactgtgcaaattaaagggaggttcaagcagtgcttccctagctgtgtatgtatagtatcgacgaaacggaaactgcccaaggttttgaaaaagcaatttgcttagctttaagatctgtgcagctctccttctgatgcggtacacatatatatagctacactgtggggtatatatagggtataacatgaattactcggccttgtgtttacatagaaatccttacatgattctgtctgttcggctgtggaaattcatttcctg

SEQ ID NO: 279287 - DNA, 447 bp, Zea mays
agaatttgaaggttctgttggggcataccatgtttcatatctagccactatgaagcttttggaagtgactggtaaacaggtggaaactagcccagaggcaaatgatcttggagaaattattttcttgtacaaacttgttgctggagcttcagatagaagctttggacttaatgttgccctgcttgcacagcttccgtctagatgtatcaagagggcatccgtcatggcagccaaactgcaagaggagttaagtccgcgggaggaaatcaagcttcggaggacaacggatgcacaaactgtggacggaccatctgaaagttccgcagaagttggtttgttttgtgcacatccttatcaacgattggcagaaacatgtcgcaggatactgctgaacatcacgttggctcaaagcaataatgatgtacgacacacttccttctttgaaaa

SEQ ID NO: 279288 - DNA, 552 bp, Zea mays
ctttaatgcaagaagcgaatgagctgtcgcggcgaacgaggcgataacacactcatcaactcatcgtaggagtagcctgaaactccacaaggcagtagtactagtctagtactagaggacgccattattatcggacgaggagtaaccatccaatcagacaacacttcatcgacgcaaggacgcatgacatcgggcaattttaccgaaccatctctctcttgtcttcctcccttgcttgtagccaagctacgctagcgtctgaagacgaaggaagctacagcggccgaggtccccgtttctgcgcccaccgaggcgtcgcgcatgcggccacccgcacccaggcgccggcacgggtgagtgaggcgtggaggtcgagcaatggcgggcagccttcgccggcccgtggatctgtaggcgcggcgcgggggggtgttggctggtgcgcgatgggatctgggagcagcaaggccaccacctcctcctcctcgcccacggcggcggaggcgggcggcgaggttaagaggccgaatgggagcgggaaggggagaggcg

SEQ ID NO: 279289 - DNA, 382 bp, Zea mays
aaagcagcttcgtcaacaaaaagagggtcaggacggcgttgatttggaaatgaatataaacggagcaaagtctacatttgaagatgatgagtttgacgatgtgggtttcactgaggttcagatgtcaaaacttaagaaaagcgaagccttcactagagaaagggagagagaaattgagcaggttgttgaatcagtcaacgaacttgcacagatcatgaaggatctttcagttctcgtgattgatcagggaaccatcatcgatcggatagactacaacatacagaacgttgcagcttcagttgaggagggttacaaacaattgcaaaaggctgagaggacccagaagaaagggggcatggggaagtgtgccactggcccttgc

SEQ ID NO: 279290 - DNA, 620 bp, Zea mays
caaaactgctgtaatgtgatgttttactatgaaatgtaatgtgatgcatcaaaagaaaattagtatgatgaggtatgcaatactgttgtgatttctgctccattttctccaatttcttcttgttcattgtccaaaactgctggatactggtttaagcatgtgttatcttgatgttctgatgctagggacatgttaaatcattgaacattaagaccgacccgccatatttgctttcggtgagcgacgcgtgcctgtccacggccacgatccgggtctccccgcccaagtagcagagcgacttatcggtcgggcgcgggacgatccggcccccgaagctgcacatcaggcggagctggccccttcgcctcgcccccatccacctccccaattggttctcgttcttcagtgcacgatatcaatccactaaggtgctgggtgcagttaatttcccaaactatatttgggggtgttcagcaaaaactgcgtcaactgcgcccgtgcgggtgagggatcactagaggctggactcgcgctagagatggtcaaggcaaaagcaagggtctggtatgatattgacattcccttagttcctttgcgttactgcgatggtgtgaatgggg

SEQ ID NO: 279291 - DNA, 516 bp, Zea mays
cgctcgctcgttcttccgcctcgctccaccaccggcgcccgcacgcacgtctggcgtagggatacagccgcacaggaagaccccctcccctcgacggaagcctcctccgagtgggggcatctacctctctttccctttagcttctgggcgcagttaattttccaaactatatttgggggtgttcagcaaaaaaaccgcgtccaactgcgcccgtgcgggtgagggatcactagaggctggactcgcgctagagatggtgaaggcaaaagcaagggtccgctatgagcctggaccggcttttgaggaggtcaaagcagaagccatgcttgatatatcaccaacagactcgacagagttttgggtaattcagtggcctaaggaccagatagatgttttggattttcatggcaaagagctttctctcaagctgcatagtgatggaaacttgggcaacttggaaaattcctcagggaaatcttatgagattgcgagctttgcagctcagaaaccagatgc

SEQ ID NO: 279292 - DNA, 412 bp, Zea mays
agtcccgactccgaaatccgaatccatggccgtcctccgcgcgtcgccgccgccctttctcccccatccgctctcgcgcccctctcagtgcaagcggcgccccacctgccgcgtggtcgcagccacagccagacccagtcctgctccttccaggcccaggagcggcggcgtccatggaggccgccccaagagggggcttcttgcggcaaggagaaggccgggggaggggcgggtgccctgcttgcgtgccgcggaggcgggggtcggtgcggcaggcgtcgcgaaggaggaagacgagtacctggcgcgggaggccgggtggggcgtgcggcggatggcacgggttggggacgagatgcggcgggtggcgcaggtccaggccgagggcttccacgtccccgtcgcgctcttc

SEQ ID NO: 279293 - DNA, 1391 bp, Zea mays
  unsure (1)..(1391): unsure at all n locations
caagggaactggctctgcaaacttcacaagtgtgtaaagagcttgggaaatacctaaacattgaagttatggttagcactggaggaaccagcttgaaggatgacatcatgcgtttataccaacctgttcatctactcgttgggactcctggccgaatacttgatcttaccaggaagggcatttgtgtgctgaaagactgttcaatgcttgtcatggatgaggcagacaagctattagctccagagttccagccttctgtggaggcacttattcatttccttccacctagtcggcagctgttgatgttttcagcaacctttcctgtaactgtcaaggaattcaaagataaatatctgcctagaccttatgtgattaatctaatggatgaactgaccctgaaaggaatcacacaatattatgcttttgttgaagaaaggcaaaaagttcattgcctgaatacacttttctcaaagcttcaaattaatcaatccattatattctgcaactctgttaatagagttgagctactggctaagaaaataactgaactcggttattcatgcttctacattcatgctaagatgttgcaagaccacagaaaccgagtgtttcatgattttcgtaatggtgcttgcagaaaccttgtgtgcacagatctgtttaccagaggaattgatattcaggctgttaatgtggtcattaattttgacttccctaagacatctgagacatatttacacagggttggccgttctgggagatatggacgccggggtttagcagtgaacttgatcacttatgaggaccgtttcaacttgtataggattgagcaagagcttggaacagaaattaagacaatacccccgcagatcgacctggccgtatactgccaatgatgaatgcgacattcaggagcatcaaacacttctctttctatttgagaaacttatcaggcaaatacgtttgtacatagcaacccatcagggctttgttttggcaccttgatgacgtttgtaagcttacctggattagtagaggaagtgcttcctgtaggcactgatactaacccgtttagctgaggacatgcacgctgggctgcttggaggcccagaactatgatgagatgagacaatatcttacctcacttgacattttcactcgacttgtttgccagtctcagttctacttgacttgcctgttctcatttgattcatcttccgttttcttctttcctaatgttatgatgcatatggatgtctttctgtagctgtatgatgtgttgagtttattttttcttggtgtatgtatacagcttaacttgaaattatttccatatcaaattaaaaaaaaaaaaaaaaaaaaaaaaaaaaaaaaaaaanaaagggcggccg

SEQ ID NO: 279294 - DNA, 410 bp, Zea mays
ggcggcgagccaacacctcctcccatggctgccccccagaccccagtcccgtccgcgcatccgctcttccgtcagcgacgcacctattctcccctctctccccgacgtcgcccatggcgtggacggcgacctccctcaccctgcaactctgcacgtgtaagggccgtgttgcccgcctcctttccccacaccggcgcagccccctgtcgccgcggccccttccccaaacagcacggcaccccctgctccccctgccccgcccgcactctccttccccaaataacacggccccacatcgctggttgcctcgcctcgccggggacccagcacgatggtcagggagctcgtgggtgggggagacacagaggagcggaggaggaggtcaactcaacatggacttgtgttcgtga

SEQ ID NO: 279295 - DNA, 480 bp, Zea mays
cgtgctcagcttcatcggtgcaacgcgcctgttccaccgccgctgcctgggacctctaattatggcgcgcggaggaaggcgaaggccgcctgtcgccgtgtccccgaaggcgtcctggattcctgggacaggttgttcttggagggataccagtctgacctccgtgtctccacagacggcggcgctgagattccgtcgcattcctgcgttctcggcgtcaaatcccctgtcctgagagctatgctggaggaagctagactgagagatgggtttcggtgtatccgtgtctctggcgcgccttcggaagcagtccgtgtcttcatcagatttctctactcttcacggtttgagcaggaacagatgaaggagcacgctctgcatttgcttgtgctctcccacgtcttctcggtgccgtctctgaagacggtctgcgtcgaccaactcgagaggggcttcctcgctactgacaacgtggtagac

SEQ ID NO: 279296 - DNA, 283 bp, Zea mays
  unsure (1)..(283): unsure at all n locations
gaaacacagatcatcatcattcatggtcatggctatggcaaactcggcaacgatcctgaccgtcgtcctggctctgatcgggctagcgctcctccgcgccgcagctccggcctccgcgcagaacgcctgcggcagctgcccgccacgctactgctgccgccagttcggctcctgcggcaccagcttcgactcctgcaatggcaacacgtgccagtccggcccgtgcacggncgggggcgccgggagcggcggcgccaacgtgagtggcgtcgtcaccgacgca

SEQ ID NO: 279297 - DNA, 425 bp, Zea mays
  unsure (1)..(425): unsure at all n locations
gctgagctgagctgcgcccgttttagcgagcgatgtcatgtccgcgcgcgtgcgccggcgaggattggattggaaccgtcgcccgtcggtcgtcgatggggatccacctggtggcgttcgtggcggcgaggggcttcctgcaggtgttccaggtgtcggctgccgctgctgtggccgctcaacctctggctgccgctcgcgcgccacctgcccgaggcctgcgccgccttctacgacgccctcgtctcgcacgccgcccgcctgcgcgccaccgtccggcgccgccgccgcgacagcggggacgccctcgacgagtacctccgcagcgccatcatgctaaccctctccgactgagactcttgagccgagcgcgcggncaccggccagtgccaggcaacggccagtaccggaggcttgcgtgcaca

SEQ ID NO: 279298 - DNA, 424 bp, Zea mays
ggacgacgaggccggcacctcaacgccgagtgttgcggcggcggcggccccggccggggcgcctgccccgaggccatccaccgacgcgcccatgggcgcgctgcgggacgaggagtgcgctaatctcctggccctggtatccaccgtctcgcgcccgctcgaggacgccgtcgcggatttcctcgcacgcgtgccccccgatcgccgcctccggttcggcacctccatcagcttcgtcctcgaggacaagatgatgcttcaacctgctgagcgtttagttgcatttgcaattctacatcaaggttattcctcacagttggcaaatccatttcttcctcttttaataaatgctgcatgtgatgaaacttgtgaggaagcagaacaagcatttctccaacttctgttaagttcgactaatggggac

SEQ ID NO: 279299 - DNA, 393 bp, Zea mays
acggggagggaagaagctcctgagctacttccagtgctgtatcaaggcctgaaaaggagctgccgcgatgctatgtctgtgtgcctgtgctttgtcgcagcagaacactcgtgagcaattaggtcccggctttgttaagtatccaaaaaatgtgcaatgtatttgccctgatggtcactcgtttgacctgttagcctgtatgaagaacaagtcaggttatggggccaggcagccgtctatctgtacatggcaccatcgatttgtttgcgactggtggtataatgttgccctgtaatcattgtattggatgggaatttgcaccgcctccgtatttttgaacgatcacaaggggcatggttcgtttggattggttttgtaattacttatgatggg

SEQ ID NO: 279300 - DNA, 429 bp, Zea mays
cggcgagcggggcttcctggaagctgccgttgaccccgacccggaggcataagcataactagggtgtaggggggccggcctgtagtgtagcgccccccgactcccgagcagcaaccaaccagcaaccgagccagccatgtcgcccacccctgcaccggccgcccgcgccggcgaggagctgccgtccactgaggtggtggtggtccggcacggcgagaccgcgtggaacgcctcccgcgtcgtccagggccaaatggacccggagctgaacgaggccggcaggcggcaagccgtcgtggtggcccgccggctgtcgagagaagccaagcccgccgccgtgtactcgtctgatctgcggcgagccgccgagaccgccgagaccatcgcgagggcctgtggcgtatcaaacgtggtgctgacggaggcgct

SEQ ID NO: 279301 - DNA, 597 bp, Zea mays
gtcggacgaaggcggcaccggcgagccgctcagcgacaccagaagcgggagatcgccgtctggttcctctccaacgcacccgccggcgagatccactacgtcgccaaagatgtgcgcgcgctgctaggggacgacgcggtgtacgaggccgccgccgcggaggccttcccggagtacaacaaggcccgcctcgtgtccctcgagctccccgaccgcagtggcgacataatcatcacaacttatggggagattgactagaacaattatctggaccccaggactgcgcaagatgctactatagatcatacgaaacagacttgtacgaaactgaggcccgctgaagatgaggagcttccatcggcttacattgaagagtttaggtgtgctttagatgttgaattgtcaaagtatgtttctgaagcttatcctaaaggggcctgtgccgtttattgtactagtggaaaggatatagagggaccaggagcagatttcagttttgcagcagttatttctgctgctaagcgtacctcacagaacttttgcaatggcagctggtgttcagtttggactattgaattcaattatgagttgcagttt

SEQ ID NO: 279302 - DNA, 351 bp, Zea mays
gtcggatcctgtcctccaaagcgtttatgttcgcgcgctgctaggggacgactcggtgtagtaggtccccgccgcggaggccttccacgaatacaacaatgcccgcctcgtgtccctccagctccccgaccgcagtggcgacataatcatcacaacttatggggagattgacaagaacaattatctggaccccaggactgcgcaagttgctactatagatcatacgaaacagacttgtacgaaactgacgcccgctcaagatgaggagcttccatcggcttacattgaagagtttaggtagactacctgtgcgcctttcctgtgacttattccagttaccatattatatca

SEQ ID NO: 279303 - DNA, 1070 bp, Zea mays
cagacatccacccaccagagccggtcgatccgttcgaaacgctccgggaaagattccacgacttgggacttctcacattcccacaccgcactgtgccaccgcgtgggtgccgccggcccgccgctctagccgttgcttctcccttcccgttcccaaggagttgtcctcgccggcggatccggggcgccgctgcaagaggaggaaggaggaggagaggataccagaatggcgtcgcgctcggcgtccaaggatatcatcacgctgcgaggctctgccgccatcgtcagcgagttcttcgggtacgcggcgaatagcatcctctacaaccgcgctgtgtacccggaggagagcttcagcaaggtgaagaagtacgggctcaccatgctgctcacgcaggacgagggcgtgaagaacttcatcgccagcctcacctcccagctctcagaatggctggaggccgggaagctgcagcggatcgtgctggtcataatgagcaaagccaccagcgaggtgctcgagcgctggaacttcaacatcgtcaccgacgccgaggtcgtcgagaagggggccatcaaggagaagagcgacaaggagatcatgagggagatccaagccatcatgcgccagatcgcgtcttgcatcacctacctcccctgcctcgacgagccatgcgtgttcgacgtgctggcctacacggacacggacgtcgaacgctccgggcacctgggtcgagagtgacgccaagctcatcgacaacccgcagatggttaagctgcactccttcgacaccaagattcataaggtggacacgctggtgtcgtacaagaaggacgagtgggacgaggaggagtagagtttgcaccaaaagttaccctgctgctgctagagcttggcgtgaaggctgtgtgaatcgttcattcacgtctatcgtgtactgcactaatagtatactgctactttggggggaagaaaaagtgtgagacgctcctaccatttagaatttcgagattgaaatgccggttttaatataacatgagtcagcgcctttaagatctggctgcgaatgcttc

SEQ ID NO: 279304 - DNA, 442 bp, Zea mays
cgcaggcgcgcgcgatgcacgaagagtgcaagcagcagctggaggcgagccgggccaccatggatgggctgctcaccgacgggtccaagctgatggactcgttcagcctcgtggtgaaggagctcgaggagtcgcgtgccacggtcaaggctcttgaggacgagatcgcggagacgtcgtcgaaggccgcaagcgaccgctgcaactgctcgggctcggagtcggaggccgccgagctgagggcggagctggaggccgcggaggagaggtaccaagaagagaagatccttagcaccgtcgagacgcagtgcgcgtacgagctcatggaccagataaagacagagtccgacctgcggcacggcacagccgcggcggcgctcgagggcgccaagtccgaggtcatcttcctcaaggcgagtctgttcgacaaggaatccgagct

SEQ ID NO: 279305 - DNA, 473 bp, Zea mays
tcaggccgcccatcgtgcaccgcgacgtcaagtccagcaacatcttgctcgactcggagctcaatgccaaggtcgccgacttcgggctcgcccggatgttggtccaggccggcacgaccgacacgatgaccgccgtcgccggatcgttcggctacatggctcccgagtccgtgtacacgaggaaggtgaacgagaaggtcgacgtgtacagcttcggggtcgttctgttggagctgaccaccggcaggttggccaacgacggcggcgagcacggctccctggccgactgggcgtggcggcacctgcagtccggtaaaagcatcgccgaggccgcagacaagtccatcgcggacgccggttacggtgaccaagtcgaggccgtcttcaagctcggcattatatgcaccggtcgccagccgtcctcgcggccgacgatgaaaggcgtgcttcagatactgcagcggtgtgaacag

SEQ ID NO: 279306 - DNA, 468 bp, Zea mays
cccacgcgtccgcgtcctctcctctcctccccggccccttcactccaccaacgaaccccacgcaggcagcagcacgcgcaagccgcaaggcaaggcacaaacactaggggccgggcatggcgacgcgggcggacgtggagaagggcgggccggcgaggaaggagcccggcaaggtgccgtcgccgctgtacccgcagcacgagggggagcgggagtgggtgccctggctcgtccccgtcatcttcgtcgccagcatcaccgtcttcgtcgtcaccatgtacgccaacaactgcccagcgcggcgcgacgccaagtgcgtcgcccgcttcctcggccgcttctccttccagccgctgcgacagaacccgctcttcgggccctcctccgccacgctcaccaagatgggggccctggtgtgggagaaggtggtgcaccgtcaccagggctggcgcctcctttccagcatgt

SEQ ID NO: 279307 - DNA, 552 bp, Zea mays
gactgtcctgctcggcgacggcatcttcgccgtggacggcgacaagtggaggcagcagcggaagatcgccagctacgacttctccacgagggcgctgcgcgacttcagcggctcggtcttcaagaggaacgccgcgaggctcgccggcatcgtctccggcaaggcggcgtccgggcagcccatggagttccagggcctcgcgctcagggcgaccatggactccatcttcaccatcgccttcggcctggacctagacacgctgggcggctcggcggaagggagccgcttcgccgcggcgttcgacgacgccagcgagttcacgctgctccgctacgtgaacgcgttctggaaggcgcagaggttcctcggcgtaggctccgaggcggcgctcaagaagcgggtcaaggtcgtcgacgagttcgtgtacaagcgcatccgcgagatagcccaggagctctccgacagcaagctggcgaccgatgacactgtccctgattcgaggcaagacatactgtccagattcatccacacggccacgaacgagtcctggac

SEQ ID NO: 279308 - DNA, 290 bp, Zea mays
agaaaactacagaaaatgctagatgctgaagctagccagaaagagaaacttgaagaagaaataggtgttttgagaagccagttattgcagatgagtatggaagccgatgagacaagaagtcttgataaaggagatgggccaggaaaaatatttcctggtttagattcattggtgtctcatactcgaggttcacaacccagagagcatgacaatggaccagaagcaaccgattgccaaaactctttgaacaaagttgggttacaaaagatattgtcattgctggaatctga

SEQ ID NO: 279309 - DNA, 537 bp, Zea mays
agctttcgcctccggcgctagggtttcgcctccctcctagttcggtccgcgagtgtaccaggaccaggtgatttcttcccctttgatctgctgtgacgtgggagatgccgccgaagtctaagaggggtggcgctgccgccgcgaggaaggcgccggtgacgaggggccggatggggagggcgcaggctgcggcggaagcggcgccggttgtggaggagatggaggcgcctgctgaggaggtgaaggccgccgaggaggtcccgaaggtggtggaggcaccgaaggtcgtggaggactcgaacgtggtggaggagccgaaaccctcgcctctgctgccgcaacagccggtggtggtggtggagaaagactccgatatcgcagccaacggtgccaacccgggtgaagatgacagagctgcataagaaatatatgaagatgaggacataggtgaacggctggagtttgaggatgaaccaaaacccacttccactcctccgacgaacaccccgacccccaagcctccgacacctaagccga

SEQ ID NO: 279310 - DNA, 1010 bp, Zea mays
acccatcctcgactatgctgattagacttgactgcctgaaacagccaactcaagacaggactctgatagagagtgtgcctcaagccggagatggatgctcatgcacagtccatatcggataacaagatcccgtcaacgcagtaacagtgattcttccgaagacatgagagcttggctcagagtctgaatagagtccgattgatgatcaaactgctgaggacatcataaaccagtaacctagacagcaagtcgtacggactttgactgccacaagtgcacatgtagcatcctttaatctcaaggggggccacaacttggggacctttagcttcttcaccatagttcttgggaagcaacaggttgatgcacatatttacttgtggaaatggaatgctaaaattgtgatatctgatgtggatggcaccataacaaggtctgacgtgctgggtcaggtcatgcctttggttggacgtgattggagtcactcaggtgttgctcgccttttttctgcaattaaggaaaacggttatcaactactattccttagtgctagagcaattgtccaggcatatctcacgaagaacttcctctttaatctcaaacaggatgggaaagcactacccaatgggcctgttgtaatttcacctgatggcttgtttccttcactctaccgagaagttatacggagagccccacatgaattcaagattgcttgcctggaggacattaaggcgctctttccttctgattacaatccattttatgctgggtttggtaacagagatactgatgagctcagttacaagaagatgggaatacctaaaggcaagatttttatcatcaacccaaagggtgaagtggctgtcaacagttctgttgatgtgaagtcttatacgtccctacatacccttgtcaatgacatgtttccaccaacaactctggttgagcaggtcagtttttttcatatctgctgaatagagtggtaatttgcttgtcttaggcatggactg

SEQ ID NO: 279311 - DNA, 1035 bp, Zea mays
ggactggacccttaacccaacaacagcagcaggaacaggaaaaagaaaaaactctctcccattcccatctcgcctcccacctcctccgcctcgccgccgcggcaggcaccgccaccaatcttctcttccgccccctcgttcgttcgctcgctcgctcgccaggagatcgactcgaggcgaggccatgaagtacgtgctggtgaccggcggcgtggtgagcgggctcgggaagggcgtgacggccagcagcatcggcgtcgtgctcaaggcctgcggcctccgcgtcacgtctatcaagatcgatccatacctcaacaccgatgccggaaccatgtccccatttgagcacggcgaagtgtttgttttggacgatggtggtgaggtggacttggaccttggaaactatgagagatttctggacatcaagttgactcgtgacaacaacataaccacggggaagatataccagtctgttattgacaaggaacgtagaggagattacctaggaaaaactgttcaggtcgtgccacacatcacagatgaaatacaagattggattcaacgtgtggcaatgaatccagttgatgacaccgaagagccagctgatgtttgtgtcatagaacttggtgggactataggggacattgaatcaatgcctttcatagaagcactaggccaattttcataccgtgtagggcctggaaacttttgcttggtgcatgtagtcttgttccggttataaatgtagtcggtgaacagaaaactaagcctacacaacatagtgttcgaggacttagaggacttggactcatgcctgatattttggcatgccgtagtacacagccacttgaagaacatgtgaaagtgaagctcgcacaattttgtcatgttccgatatcaaatatcattaatctccgtgatgtaacgaacatttggcacatccctttgttgctcagagaccagaaggcccatgaagctattttgagagtgttagacattcagtgtgtgggtaaagttgctcgagaaccccagttg

SEQ ID NO: 279312 - DNA, 434 bp, Zea mays
cgtgctccttgttttacagcttcaactttcacggactggtcgtcagttctagcgcttcatacacctgtcctgtggacttggaccttggaaactacgaacgatttctggacatcaagctgactcgtgacaacaacataaccacggggaagatctaccagtctgttattgacaaggagcggagaggcgactacctagggaagaccgtccaggttgtgccgcacatcacggatgagataccggactggatcgaacgcgtcgcggtggtcccagtggacggcaaggaagggcctcctgacgtctgcgtcatcgagctcgggggcactataggggatatcgagtcaatgcctttcattgaagcgttaggtcaattctcgtaccgtgttggacctggaaacttctgtctcgttcatgtcagtcttgttccggttctaaat

SEQ ID NO: 279313 - DNA, 800 bp, Zea mays
acctctgctattcccaaatatcaggaatgatgatgttccagattctgtaaagaatttgaatgagaaggtgtccccaaagtttaaggtcgatgatgtccaggattctgtaaagagtttgaatgagaaactttctgctgcccttttgactatcaatgataaagatgacttggtaaagcagcacactagagttgcagaagaggctgttgcaggttgggaacaagctgaagctgaagttgcttctctgaagcaactacttgaaactgcatcaaagaagaatacctctctggaggatcaggtcagccacctagatgacgcccttaaagaatgtgtaaggcagcttcgccaagcacgtgaagaacaagagaataaaatccatgagacagttgctaagaagtctaaagaattggagtctgagaagtttgagctccagcaccatattgctgaactcagtaagcagttgcaagccacgaaactagaagctactacggtgcgtgtccagcgtgatctgcaggaaaagcttcagatagtggagaaagaaaacaaagacctcaaggtagaattactcgcactgtccaaggacctgaagatacttgcacgggaaagagacctgagcaaccaagcagcagaaacagcaagcaaacttcacctggaaagtgtgaaaaagataacaagagttgaggcagaatgccttaagttgcgtcatttaacgcggcgtacgtccttgaccaatgattcaaggctgataactaacagtgcttgcatggaatctcagactgacagtcagtctgacagtggggagc

SEQ ID NO: 279314 - DNA, 653 bp, Zea mays
gggaaacggcggtgggactggcgataagacgaagacgaaggcgacaggagggctcaccggtcgcgaaccctcctcctccagccacgcctcgaaacggcgtcggggcctgcgcggcgagtccatggctgatcgcttcattcccaatgactttcctgacttcgtcgccgaggctgaggcctccgacggcgaggggcaccgccccgcagggcatcggggcctgctctcgcttccgtacaccaggctctccgaccacttcgtccgcgccgcgcgccgcctcaaggacaaggtggttgaggagacgtgggtgaaagccggacggaaggtgacggactacacgctctacacgggctctctcgggacagcgctgctgctgttcaagtccttccaggccactggatgaccggggagacctcaccctcgccgctgatatcgttcgcgcgtgcgatgatgcatcgcggggcctgccgttcttgacattcatatgcaggaaggcgggtgtctgcgctcttggggcggtgattgccaagcattgcgatgatcagctgagggtcactcagtatctgagctcctttgatgagataacaatcaccgagaaagttccaaatgagttgctgtatggaagggcaggctatctgtgggcttgtttgttcttg

SEQ ID NO: 279315 - DNA, 2178 bp, Zea mays
ccctttcgtccgcaacaaggaaccccaatcgagtgttctactgggccatgacgacagggctgctttacaggaggtctcgtcaatgttgcatggcaaagttgcatttttggaggaggaacttcctaaatcgcgtcaagacgcaacaaattaccatcaactgagtgatagggtagcaaaggaattgaaggatctcaaagatcatgaccaacaaatgagatctaagcaaatgaaggtgctgtctgatctgctgatagctgtgtcgaaagcagagaggcaagaagcgcggatgaggataaggcaggaatctttcagacttgggaatgttggtgttatgagagctggaactatcatatctgaaatttgggaagacggacaggcaataaaagatcttaattctcacctgaaatctttactggaaactaaggagactattgaaaggcatcgtaaatcacttaagaaaagacaatctgacaagggtgatggcagtgacgctgagactagcatgtccgaggaggacattgtcttacaggacgaaatatgtaaatctcgtctaaccagtatcaaacgggaggaagaacagtatatgagagagagagatcggtatgagttggaaaaggggaggcttatacgagagatgaagcgtctcacagatgaagatggctcacgctttaacaacttccaaattcttcaccatcgttatgctctgttaaatcttcttggaaagggagggtttagtgaggtttacaaggcttttgatttggtggagtacaagtatgtggcatgcaagcttcatggattgaacgctcaatggagtgaggagaaaaaacagagctacatacggcatgcgattcgtgaatataacattcacaaaactttggtgcatccaaacattgtcaggctatgggatatatttgagattgatcacaatacattctgcactgtcctagaatattgcagtggcaaggatcttgatgcagtccttaaagctacaccaattcttccagaaaaagaaggaaggatcataattgttcaaatatttcagggcctggtttatctaaacaagaggggccaaaagatcattcactatgatctaaagccgggcaatgttctctttgatgaggttggtgttgcaaaagttaccgactttggcctcagcaagatagtggagaatgatgttgggtctcaggggatggagctcacttctcagggagctggaacctattggtatcttcctccagaatgctttgacctcagcaaaacaccatttatttcatctaaggtggatgttgggtcagctggtgtaatgttttaccagatgctcttcggaaagcgtccttttggtcatgaccagacccaggagagaatacttcgggaagatacgattatcaatgcacggagagtggagttcccttcaaagccagctgtatcaaatgaggcaaaggatctgatacgccggtgcttgacatacaaccaatcagagagaccagatgtactaaccatagctcaagatccttatctctcatacgcaaagagatagccgctatgccggagaacactaaggcaagggtagctgatcatttatgagattatttatgtatggggatggataatcttgcgaaggagcaaagtgttccacaagctcaagaagaccacagagggtgtaactgtatatgttgtaaattttagtctttcccatcgcagcaatgacctgaaatccagaagccatcagttcaacggacagcttctttgtagcgtagagaaagcaggcatggtttgaacggggcatgcgtaacgtgatggtttcttggctggtgggctgtgggcagtggtcctgttgatggttggtttttgtttgctcatactgtcggtaaggtctgccaaatcagaaaccaccggtgacaggcgagagctcacatgctcacctccgaaaaaatctcggccttgcactggcaggatggactggattttgcgtattgccaaaacagatttaaggtagcatgcatcaatacaggttactttggataacctatagactcaccacagccacaagcacagaagctcttcgtacaatttcagagagtaccgatgtgccagatttctgctggtgccaatttgtttgtgatcgctgtcacccttgtacaacactgggatcgctcattgagcatacacaagttatgc

SEQ ID NO: 279316 - DNA, 677 bp, Zea mays
tgtttccgtgatcctaaggcgaagtctgaggtccaggacaaggaatcctccatgatcagctatacgaaggctgaattgggttgtaattttggtgtgatcgcagacaggtggtcgcctgaatccgtggaatcaggagccttcacaggagatgcagtggcgagcctgatgccacctgccccagcaggatttcataagaatgcacccgaaatgtataatttgcttgattcaatggatgtggatgtcaagcctcctcctttggtcagctctgacagcaccggcgagatgccattgtatggcgataaagttcaccgctcaacctccttaccaagggtctcgaagggagtggggttttttgctgtagatagagatgatgacgacgataagtcctctgggtgcactcatcccagcaccaccactaacaaggatttcaggtccaattgtacagctgagtatagtagggtaaggaagttgctcaccagtaagtacaggaaagttgctccagcgagggtttacaaatctgatctttcctatagtgatgttgatcggaagccttctttccggaacaaaaaaatgcattatacacgacagaggacacaaaggagtacattcaagcgtaggaagctctttgatcgccattcagttctagcatctgaaattggtaccgcacatggaaaggg

SEQ ID NO: 279317 - DNA, 455 bp, Zea mays
tcttccacgcgtccgcccacgcgtccgctcacgctaccgccgtgaccgatcatctcccactctctcgtcagatcctctcggctagctagctagctagctaggacagaggagggaggggaaggcgctggctatggcgactgcggcggcggcggcggccatggaggagccggacgtcgtcaacggccgcgacgtggtgagctgggtggcgtccggggtggtgctgtggtcgaccgccttcttgctggtgcgggcgctgttccccaagcgctcctacgacttctgcaaccgcgccgtctccaccatgcacgccgtcgccgccgtgtgcctcgcctgcctctccgtcgacgactggtcgtgccccgtctgcccgctcgccgccgcatcctcccctcgccagatgaaggcgctggcggttacgctggcgtacatggtgtacgacgcggcgtgctgccacc

SEQ ID NO: 279318 - DNA, 580 bp, Zea mays
cccacgcgtccgcccacgcgtccgcccacgcgtccgcgcacgcgtccgcggacgcgtgggcgatggagctaggaggtgcagctatagcagacgcagagcaatggaggccgccgaggctcttaactatgacagtattgtcaacagggatgagatcaccgacgctgcagctgcagcgttcgccaacccggagcaggtcccggagaagtacgtccggacggaggaggtccttgacggcgtcgtcgtcggcgcggacgagagctacgagctgccggtcgtcgacatggccaggctcctcgacccggagctggcgccgtcggaggtcgccaagctcggcgacgcctgccgaaactggggtttctttcagctgacaaaccatggagtggacaaatgcggtggtgcagcggatgaaagacgccacggtgcagttcttcagctccccgctggacagcaaggccaaggtggcggtccgagggaacggcttcgaaggattcggacaccactacagcagagcgtccagcggcaagctggactgggcagagagcgtgattctcatcacgcagtcagtcaaggacaggaacat

SEQ ID NO: 279319 - DNA, 431 bp, Zea mays
  unsure (1)..(431): unsure at all n locations
actaactactcaaaggggggtgtgagtgatcagggccgctttggtagcatccaggagcctgagctacagccaagctgcttctcgcgaacactgangcttcagaagaagctgttgtcttctggcgcatcgcacaccatctgtctgaggatccagccgcataacaagatggaattcctacctaaaaaggaatttgatacgtacttctgcgcgtatgagccttacgagcagtgtccaagatcagtttcaagggctacttacagttcaagagatgatgacttgtggagcaagaattcacggttcggttcaaatctactctgctggaaagccccaaaacaacccatgtaacggaggtacattactctgtattttcacatcacttggtccgtcggaatagccatgtgaattcagcgtcttggctcgctcggttgctg

SEQ ID NO: 279320 - DNA, 432 bp, Zea mays
ctcgccattctcagtctcaccttcgcttgcgtcgccatcgctcgtccgaattcgtcctcgcgtgccccagccaagcaagccacttggttcgatcggtccgcaaaactcgatccagccgctgaccgcgcgccgacatggggcagggcaaggaggtgaagacgcgaccggaccccgacgtggagatccaggagaagggcgagatcttcttcttctaccgacccaaggtgggcaaggacgaggcgcacggccccgacgacgtgcagcgcatgtacatcgtcctgcgccccgagtccggccgcgccgtcgaggagaagcaagcgccggactccggcaaggaaggccgcaagcgccgccggcagggagacggcgggcagggaagaagcgaggagaaaggcgtggaaagcggtcacggcaagcaggaggtgaacatcg

SEQ ID NO: 279321 - DNA, 547 bp, Zea mays
ccgacggagccaagcgacggttcatcttcttgcggcgccggcgacctcgagctgattgcagcgagaaggcggggacaaatcgatctcccctagctggctacacccgatggagccgagggttccttgcgttgacggcggcggcgacggcctcgagctgagggccgcgagaaggcatcgacgggagggcgggcgaatccacgtcctcgatgcgcaaatcctggagcctcagcgacagagatcgaatccattcaggaacatctttcatctattaactcaacgagaggtcttacctcgaacgaaacaccatgctaaaaggatatggaataacctctccaaaatatgatcctcatttaattgagttaaggttttcagatgcagatgctaaacttggtattttatcttgggcagaatcactgtccctgcatcgctggtctgccaagtattgccctcttttgccacctcctaggtcaactattgcagctgctttcagtccagatggaaaatcacttgcgtccacacatggtgaccatactgtgaaaataatgga

SEQ ID NO: 279322 - DNA, 479 bp, Zea mays
gctgatccaagcgagaaagaggctgatgatggtgtatcaggtaaagatatgatgagaaaacatcgccggcaagtgctattcagtggtattatcactgctgttggaattagcttgcataatcttccagagggaatggctgtatttcttggatctgtcaagggtcttcatgtgggcctgaacttggctgttgctattgccttacataacataccagagggggttgctgtagctcttccaatctattttgctaccaaaagcaaaaaaaaggcattttatacggcagcattctctggtttggctgaaccactaggagtggttgctgtagctttgttgtttccaagcagtttgaatcctgacattcttgaaggcctacttggatctgtgggtggtgtcatggctttcctcactttgcatgaaatgctgcctcttgcatttgactattgtggccagaagcaagctgtcaaagctgtctttgtggg

SEQ ID NO: 279323 - DNA, 492 bp, Zea mays
  unsure (1)..(492): unsure at all n locations
ctcctaccaccgttttataatccacttctcccactccccctgntttttcttcttccgctgttctactccggcgtgttggtcgacggcggcgcagatgacgaccctcgatctgatgggagggtacgggcgggtggacgagcaggtggccatccaggaggccgccacggcggggctgcgcgggatggagcgtctcatcttgcagctctcccaggctggcaccggggagcggtcgtcgtccccaccggcggtacaggcgcacgccagcagcagaagcagctggagcagatccagcagcaggttgactgccgggagctcacggacatgacggtgtccaagttcaagaaggtgatctccatcctgaaccgcacggggcacgcgcggttccggcgtggccccgtggcggcgcggtcgcagtcgcattcgcagggacctgcctcccccgagcccgcgcaatcggcgccggctcctgccgtgaggcccctgacgctggac

SEQ ID NO: 279324 - DNA, 565 bp, Zea mays
gcaaaacagcgaaacagtgcagagacaagctacaacaacctaccctaacaggccattccttccactgcacttcattcgatcctgtgctatagctggctgcctgagctcgctccaagaagtgtatatacctacagtatagacactaggcttcgtgtggcgtactcgagatgcttgcagtgtcgccgtcgccggtgcggtgtgccgatgcggaggagtgcggcggaggaggcgccagcaaggaaatggaggagaccgccgtcgggcctgtgtccgactcggacctggatttcgacttcacggtcgacgacatagacttcggggacttcttcctcaggctagacgacggggatgacgcgctgccgggcctcgaggtcgaccctgccgagatcgtcttcgctgactttgaagcaatcgccaccgccggcggcgtcacggaccaagaagtgcccagtgtcctgccctttggggacgcggcgcacataggctccgtggatccgtgctggggtgtccttggccaagacaacgacgcagcgtgcgcagacgtggaataagggaaaggggagtg

SEQ ID NO: 279325 - DNA, 405 bp, Zea mays
aactcttcgtctttctttcttcttcttctcttctccactgcacatcctcctttcttcttctcctcgtcgatcggcaagctaaggaggcaccattgcttgtcgtctgatccccgccgggcgcgtgtcgctgcacaagatgacgacggcaacagccgttggcagcgtcgccgaccgcatcatgccgcacctcctcaacatatatggatcgtctgcgacggcacgggacttcgagatttacgcgccaaatgcgacgtttgaggacccgctcatgcgagctcacggggttaagcagatcaaatcagcgttctacacgctgccaaaggtgtttggggaatccaagatcaccgagtacaccgtacaagagaatcccatggggccgggcaaaaccgagaacaagcagcacta

SEQ ID NO: 279326 - DNA, 529 bp, Zea mays
gcacccggaagccggggaggtgctggagttcgatatggaaggggtgtggagggagatggaaggcctcgtgaaagacgggctcgtcaaggatataggtgtctgcaattacacggtcgccaagctcaaccgcctgatgcggtcagcgaatgttccaccggcagtgtgccagatggaaatgcaccctgggtggaagaacgacaggatctttgaggcatgcaagaagcatgggatccatgttactgcttactctccgctgggttcgtcagagaagaacctagcgcacgacccgctcgtcgaaaaggtagccaacaaactggacaagaccccggggcaggtgctcctcaggtgggcgctccagagggggacatgcgtcatccctaaatcgaccagggacggaaggatcaaagagaacatccaggtgttcgggtgggagatccctgaggaggacttcagggccctgtgcggcatcaaagatgagaagcgcgtgctgaccggagaggagctcttcgtcaacaagacccacgggccg

SEQ ID NO: 279327 - DNA, 431 bp, Zea mays
cgaccattaaagttgatgctgagcaatcagatttgaggttctgtttcagagttatctggcccacaaagatctacacattgcaggcagagagtgcagtacatcagatggactggattgaaaaaataactggtgttattgcctctttactgagctcacaatcgccagaacagtgttttatgtcaagccctaagggcagtggtcatgataggagtaccagtgatggaagctcctttacaagttcagtggaatttgaaccttccgtaatcgatgatttagtactggagaagtactctggaaatgggcagcatgatgtaacaagaggcacacatcatcacagaaccagcatgaaacctgaaaaaccaattgacttgcttaggaaagttgatggcaataatatgtgtgctgactgtggtgctttggaacctgattgg

SEQ ID NO: 279328 - DNA, 401 bp, Zea mays
atcaagaagcgtctaaaagtgtttgaaagtttgaacattcctgtcgttgactactactcttcaaggggaaaagttcacaagataaatgccacgggcactgcagatgaaatatttgaagcagtccgtaggctgttttcttccttaaggttatgacgaggctagggtcttccagggaaccttgggatttgtctcttccacgcgcatggattttcggaaaagctactacgcatttcgatcagcatccacggagtttattatgtatggatgtatgtgttccctcagcacattgacatcttgtatatatgcccaaaaatgaatgtgaaccatgtggagtgtttctgaaaaaaaaggagctgaaccctggttggttgttgtagcttactacaaaaataactaatatg

SEQ ID NO: 279329 - DNA, 979 bp, Zea mays
cggacgcgtggcacaaatgaagaaaaccagatggcaataaacaggcttcagatagtcaagaatgagaagtcacaaatcgaagagaagagagaactctgtgtgcaagatgttcaacgattaatgaaagagaaagaatattccaaaagcatcataatgaacctaacaaaagatatggaagccatgaatagattgcatgagcagcaacttgagcaaattggaagaaaggcaaaggaaatggaggaacaattaaccaccagggtaaaagaagtagagtatctcttgctacaatcgaataagaaagttgaagaacttgagattgcttctaggctaaaatcacagttatgggatcagaaagagaacagttttcagagtcacatggataatcaacaactaattatcaaggacataagaatattgtcgcgatcatgtgaaaatgatatgtatgcacttcaaatgcagtggagaaatgagatctctaacttaggatctgggttaaaatgtttggttgatgctgctgaaaattatcataaagtcttggcggagaaccaaaagttatttaatgaagtgcaagaactaaaaggtaatataagagtatattgtcgtgtgaggccatttctttcgggtcaagacaaaaagtctactacaattgactacatgggggaaaatggtgagcttcttatatcaaatccatttaaacaagggaaggacggacacagattgttcaagtttaataaagtgtttagtccatttgcttctcaagctgaggttttttctgacatacaaccactaatccgatcagtcctggatggattcaacgtttgtatttttgcatatggtcagactggttctggcaaaacttacaccatgagtgggcctagcacatcgaagcaagattggggtgtcaattatcgggctttaaatgatttgtttgatatttcactaagtagaagaaatgccttctcatatgaggtgggtgtac

SEQ ID NO: 279330 - DNA, 553 bp, Zea mays
cccacgcgtccggtcaggtctgagataaaccagtcactctactactcgatggaaccagcaacatgggctgtgttcctcggcattgccctctgcgcacggcagcgctcttcctttcgcgcggccggcgcccggtctacaaccccccgccgggccccaagccatggccgatcatcggcaaccttaacctcatgggcgagctgccccaccgctccatgaacgagctgtccaagcggtacggtccgctcatgcagctccggttcgggtcgttgcctgttctcgtcggcgcgtcggttgagatggcaaagctcttcctcaagaccaacgacgcggcgttctccgaccggccgaggttcgcaatcggcaagtacaccgcgtacgacttctccgaccttctatgggctcctttcgggccgtacctgcgccaggcacgcaggatctgcgccaccgagctcttcagcgccacgcggctcgagtccttcgagcacatccgcgaacaggaggtgcgcgtgatgctgcgacagctgcgccaagcggctgggcgcaccgtgcggct

SEQ ID NO: 279331 - DNA, 385 bp, Zea mays
caccggcgaaccaaacctcggagaaaccctagcaaggccgcttgcccctctcaggcgcgacacagcatcggcgactagcgatgacaggatatcgcagccgcagtccgagccgaagctacagcccacggaggcggtacagccggagccctcttaggcgcaacgctacgacgacccacgcgaccgctaccgctgggccggggccggcggaggcggggaccgacgtggttacggtcggccgttggcgcagtccggtctcctcatccgtaatatctccctcacagccaggccagaagatattcgtgctacatttgagcaattcggccctatcaaggatgtttacctgccaaggaatttccacacgagggaaactcgtggttttggattt

SEQ ID NO: 279332 - DNA, 330 bp, Zea mays
aaagctccagatctcatcagatactgagattgacaattgaaagttctgcacgggagttcctacggaaggacaagtcaactacacttgtcgctagtgctaactttgttgatctagcaggaagtgagcgtgcatctcaggcgttgtctgctggcacgaggctaaaagaaggctgccatattaacagaagtttgcttgcccttggcactgtcattaggacactaagcatggggagtaatgcacacataccatacagcgattcatagctcacacgcatattacaaccttctttaggaggtaatgcaggaacggctattatctgtacactgagcc

SEQ ID NO: 279333 - DNA, 572 bp, Zea mays
tctccgcctcgtcgtcgccgaacgtgacggacgatttctcggcggtggcgccgccggagtgctccgggccgccgcagccagagaggctgctgttgttggcggcctgctcctccgccgccgccacgccgccggaggagttgcggcgcgtggacagcggcttggggtggttgtgcgcgcccttgtacacgatctgcgtgacgcgcccgtcggccagggaccgctccaccttcttcttcatggagcagctgtggtacgtgcacttgtagtagctgcgcgggttctcgctccccttcacctgcttctgcccgtacttgcgccagttgtacccgtcctcaagcttggtgctgccgccgcttccgccgctggccttgttgctcgacgggacggcgctcttagtcgccgcttcgacttgctgttgctgctgctccttgaaggaagggaaggacgtggtctgcgcgggcatggtgggcgcgtggaaggagaagtcgttgaaggcgctgccgaccgcagcccggctgtcgtcttgctgagattgagacgcgatcaggtcggcggcctgccggacgcgtggg

SEQ ID NO: 279334 - DNA, 565 bp, Zea mays
ccgctggtggacaaaaagaccgaagggaccgaccgtcggctgctctctcgtggccatggccgtggcggcggcgttcctctccagctccctcctccccactactcccggctcccacctcaccccattcactctgcgctcccgtctccgcctcttcacacggcgcgccgtcgtggtcaacgccgccgccgccacactccgcgaggtctgctccggccgcgtcccggaccacgtcctgcagagggctgaggagattggctatgtcgtgcccaccgagatgcaggagcaatccctgccgcttctgctgtccggccaggattgcattctccacgcgcagacaggctccgggaagacgctggcctacctcttgtccatcttctccgccatcgacttcagcaggtcctcggtgcaagcgctggttgtcgtccccacgagggagctcatcatgcaggttaccaaggtcgctagactactcgcagccaaggcgtgcaccgtcatggctttgcttgatggcggtacgctcaagaggcaaaagagctgggtcaaggcagaccccccgcgataattg

SEQ ID NO: 279335 - DNA, 480 bp, Zea mays
ggggccgccgcggcggaatcgtttggacccatgccgccgccgactcaggtgcagctagccaagcggctcgttgaggtgtcgttcgcggaccgcgccttcttcgccagcactggcacggaggccaacgaggcggccatcaaattctcccgcaagttccagcgggccgcacacccggagagcggcgacccgcccacggagttcctggcgttcagcagcagcttccacggccggaccatgggcgccgtcgcgctcaccagcaagtcgcagtaccgggagcccttcgcgcccgtcatgcctggggtgaccttcgtggattacggcgatctggaggcggccaagaagttcgtacggtccggcagggtcgctgctgtcttcgtcgagcccgtgcagggtgagggtggcattcacagtgccaccagggagtccttgcaagggctgccggacgcctgtgacgaggcgggagccctcttgggctttgat

SEQ ID NO: 279336 - DNA, 517 bp, Zea mays
gtgggggcggcgcggttttttgctgtcggccgcgagcctggccgtcgtggacggcgaggcgcggtacctcgtcagcacctacaagcggtcccgcgtcgtcttcgagcacggccgcgggtgcaagctctacgacaccgactgccgcgagtacctcgacatggccgccggcatcgccgtcacggcgctcggccacgcggacccagacgtgtgcgccaccatcgcggagcaggccggtaaggtcgtccacgtcagcaacgtcttctacaccaaaccccaggtggagcttgccaagcggctcgttgaggtgtcgttcgcggaccgcgcctatcttcgccagcactggcacggaggccaacgaggcggccatcaaattctcccgcaagttccagcgggccgcacacccggagagcggcgacccgcccacggagttcctggcgttcagcagcagcttccacggccggaccatgggcgccgtcgcgctcaccagcaagtcgcagtaccgggagcccttcgcgcc

SEQ ID NO: 279337 - DNA, 665 bp, Zea mays
acttgagctcacacaatcacgctacagagcgcagagctgcacgctccaccggcgaactcacctcggccgccctcctctgccagatagcctccctctactattcaagcccaaaccctaaatcctcggttcccaaatggcgacgccgccgactgcgctgctgttgctcctcgcggcggcagcggcattccacggcgcgacggcgaagacgacgatcgagccgtgctctggcgcggacgcgtgcccggctcttctgggctacaagctctacgcggacatgaaggtgtccgaggtggcggcgctcttcggcgccgacccggcagcggtactggctgccaacgcgctcgacttcgcctctccaggcgccgccaaccgcttcctccccgcgggaacacccctccgcgtgcccacccgctgcgcctgcgccgacggcgtccgcaagtccgtcgccatccgctacgccgcccggccttccgacacgctcggctccatctccgaggtcgtcttcgccggcctcccctcggacgaccagatccgcaccgtcaacgggctcgccgccgaggaccccgacgcgccgatcaacccgggccaggagctcgtcatcccgctcccctgcgtctgctttaactgcaccgacaacaacctgcccgctgtgtacctctcctatg

SEQ ID NO: 279338 - DNA, 390 bp, Zea mays
ctttttcacatcagtaccttctggttgagttggctcttgccatgaagctgggttcaggtcggatggagagtttaagaaggccatcttatcaagagagttggaagatattgcatctattgaagacaagttaggaaggtcacttacaaccatggagaaagatagaattggagtgggtaacttaagattatatttggaagagttgctgcagaagaggtacgttaagagtgttccattaatcattccacttcttgagaagcaacatcgaaatacaacacgtaaattgcgtgaaatcagtcatgaactcagtgatctggacgaagccaaactgaaggagaaagctcagctattccatgacacatttttgaccaagttatctttgctattgaaagg

SEQ ID NO: 279339 - DNA, 656 bp, Zea mays
cggacgcgtggtctaagggttaccttttggtggccagccatgataaaattcttgtcttcaacacatcgtcacagtattatgggagagtcggtgcgcctcggccgctgtttgccacaagcatcatggacatcaaatctgtgtttgcgggttctggtggcgtgctgcccaccgagccagctgggaagcctgttatcgcggcagaccgggagaagctggtgatcttgggtcttggggatggccacattgctatctataggtctaacttcccggtgtacaagccagagagcaatgctcgttgtatgcagtggaccagcgctgcttttcctcctgttcttgatcggcatttggcaagtatacgtgaaaaagaaggattctctgggatggacaccagaggagacatttaacacctctgtaacagcaccaacggggagccttttgaatcatccaactagtgatcgagcctttgccgacagcacagcaagaagcggtgaccggggctatgttgatggaacatcaagagccagtgatagaagctatgtggatgccactacaagaactaccgaccgaggctattctgatgctactagggctgtggatctgcggggcggggcgttgaggagtgctccaagaaggtacgtgtcccctactagatatgc

SEQ ID NO: 279340 - DNA, 440 bp, Zea mays
cgattcctggccaaagcgacggcgagacgttggcgacgcatgaggacggtgcgaggtcactgcgtggcggcgcgaggtgacggcgggccggcgccgcgcagccccgacggcaagcctccccggcaccttctcaccggtgagtattgagctctcccatcctcatttttttcttgttcttgatggatatggaaggggggcgagagtagcgagcggtgtgcaggcggcggtggaggccggccgtggccggtggtgacgaggatgagagggtatgcttccgatgaggaatgagaggagcacatccagtggcagagagatttctgttcctaggggatgcagagggtctaatcggattccagggagttcagtcgatgctttacgatggcactatgtccagaggcagcagcaacggtgatgagttagacgctgatgacgatgacttg

SEQ ID NO: 279341 - DNA, 574 bp, Zea mays
gtctccctccataaaatggtggagcagaatgacttctaaatctactacacttggaagttttgggtctttgatttagtccagagttgtgttgattcaacaaatcttgagtaaacaggttgccatttgccatattcaaagaaggaacattcaaatgacaaccattatcacctgctgtctcaggagaaatattgactgacaacctcatgtcaaattttgatttccaagttatcaggtcttcttcagaaccaagctggtcggttgaaccacacttatcattgaagtaattaagcggctgtatttcattgttgatgtaatcaaaatttttagttccttcaaatataatagatgaatcattgctaaatctaacattgctgtcaatgttttcatagttccaagaacgaaaacatttatctgatgtcctgttaagtgtgtgcaaggtccttggatgactgcaaggtgtatcaaccaacaaggatgggtgagaaaaatgatttaaagtatccttgagggagggactatctatcaagtcactgttccatagagcatgaatataagggaaattcatctggtcaat

SEQ ID NO: 279342 - DNA, 423 bp, Zea mays
gcgtccgctgggttctgcatcacatcctcgcatttataggtgacttcacaaatttagccaaggcgtggtatagccgagtgaagctatgtttcacctatgctacgacgagccaccatcacatttgcaacatgcttaagagcaaaatgacaccaaactaatggaaaatgtaatccatgttctatcaagatatttcttaccgctgcaaccaggcacaactgacatagtcttcagtcgatgccatgcagacggacatggaggttgtgttcgaggtgctgaagagcctagaggacgttgaggagctggaccccgagtggctgcatgatcctcacaagctgcacacgtgcgtggagaaggacacctccttgtcggactcgtgcggcgtcgacccatttcggctggtggtgatggcgcccgaaggcatgc

SEQ ID NO: 279343 - DNA, 287 bp, Zea mays
gagctttctattgaggacaagcaggttaagcaccgagcggattggctatgtgatgatgctcgtccagcaaaggtagccaaagaactgtccggtgggcaaggtctatcacttgacctcaatttagcagttggggcattggatgacaccgacggctcacggaattccagtgatctctctgtggaacaagagcatgaaaaagggcaccttgcagtcaagtgttcaacaccagcccctgactatgatctgttgaatctcgttgatgatgccattgtgtttcggccagttga

SEQ ID NO: 279344 - DNA, 411 bp, Zea mays
gctcgagcggcaccgcgttcatcgcgacgccgacggcgatctccccgccgccgtgaccgccccccttctcgcgcacccaccgtcgccgcctgagccttggcctgcgaactttggttcatcggagataaccgacgaggagatcgacgccgcctccgccgcctgctgccgcatctgcctcgaatccgagtccgagcctggtgatgtgctaatatctccatgtatgtgcaaggggacacagcagttcgtgcatcgctcctgccttgaccactggaggtctgttaaggaaggaactgccttttcacactgcacaacatgcaaggcgcgattccatctacgggttgaatttctggaggatgacatttgtcgtaaaatgaagtttcggatgttcgttgcaagagatgttatcattat

SEQ ID NO: 279345 - DNA, 793 bp, Zea mays
cagacagcaccagcagtctgcgcgcactccgcagtcggtcgtggagctctcgagcaaaagcgcgcgacatcgtcggagctagctacgcgtgcgctgcgcgctccggccggcggatcggatcgggtcggatggcgtcgtccaaggcgctcctcctgttggctgccgccgccgtcgctgcggcgtgcctggtcggcgccgcggacgccaagttcggccggctgggccggctcgtcatcaccggcgtcgtgccctgcaacaccggcagcctcatcgacatcgccagctcccccgccttcccgaacgcggacgtggagctgcggtgcgcgggcagggtggtggcgggcgcgacgaccaacaccaacggcaccttctccatggagctggacatgaccaacgcgctggccgcgttcatcggcggctgcacgctggtggtggacacgccgctcgtcaagtgcaacgccgacctcaccgacgtcggcagcctcgtctcctacctgcagggcccgctcacgcgcctgctcggcggcatcttccacctcttccccgccggcttctccttccacgcccgacgagcctgacgtcgtatctagctagagctttgtacgtacgtacgtactggacaacacaatcaaactttaaacatgctgctgggagctatatatatatatatagctccaactacaaatgtaaaatgtttctagacatgtgtaatgctacgtacaaactgagacgagaagttgaaccaaaataaacggttgggtgcttgctgtcagctaataagacatctttttcc

SEQ ID NO: 279346 - DNA, 643 bp, Zea mays
tcggaagaccggcgggacccacgcgtccgcggacgcgtgggtaggtagtcttatgtttgcatctccctggcaaccgggggttgggggcaagtatcagagactgtgtgtaactccaattgcagttgattgttcttcgtcagtaaaattctctgtgaaaggtttcaatatagttcagccaaccacaaaattactttgtgtgtttgatgaaaaatatttaattcaagaagagacacaaatgctacttgaagattcaactatgcagcaaggccctcaatgcctgaccttctcttgttcctttccttgtacaagtggaagaggattcatagagattgaagactatgatcaaagcagcctttctgttccctttgttgtcacggacaaagatgtatgttctgagattcggatgttggagcatggattggatttagtttcatttgatcaaacctccaaaagaatagatgatctgatgatttatcgcagtcgagcattacattttttgcatgaaatcggatggcttcttcaaaggagccatgtgcgagctacgtctgagcagcgacaatattgtcctgaccgcttccctgttgcaagatttagatggctgctatcctttgcagttgatcaggaatggtgtgctgttctaagg

SEQ ID NO: 279347 - DNA, 534 bp, Zea mays
cccactcgtccgcccacgcgtccggttctagatcgcgtccagccgcccttttttttttttttttaccttaatgctgcataagctcaatggttccaggggtgactgctcaaaggggccatcatcacaggggcagatactagtacaccaaccactctttctccctttgcaacaacagtcatacaagcagcaaactcaactcacagagagaggggtacaagaaatcaaacatgtcacccttagtaattttaaccagggggccacttcatctgccttccaccaagtacatgcaggtgcagatgatagacagattggcatccttcagcaccattgttgatgacaacacggtacccactcgctacaccttccttttctgccactactttcgctgcgtaaaggagccggcccaggatttctgtatgccttggctcagccttgtctaatccggttagcccatctctcgcttttgggatgactagaacgtgcacaggggcttgtggattaatatctctaaatgccagcacattttcatcttca

SEQ ID NO: 279348 - DNA, 402 bp, Zea mays
cgagctcgatcgacgttggctctgtgtggtgcgtgcgtgcatgtgccgcggacgtccgcgtgtaaagctggagctctgaccggggcagtcaccggcgcggtggcgggcagggcttccgacagcggcggcgtcctgcggggagctggactgggggcggtcgccggagctgtcctctccattgaggtccttgaggcttctcgcgcttactggtgctcgtcggaccggctgggctcgcacggcggagcatcgtccatggctgatttcattgagcagcttcttcgtgcccggtttgtgcaagagcaatttactgcttcaggatatgcatcatatcgctggcagctcagcatatcatattttggtcaggatgacctatacgacatctttggggacatttcatctgaa

SEQ ID NO: 279349 - DNA, 435 bp, Zea mays
ctcgagccgcgttcattgcggcaggccggcagccaaatcgagatctcgcccgtgctgaaccccaccactctcgccgacccggccgcagcaagcgcagcgcatcgacaggagccgaagaaccgaagaggagatggcgtcggcgctgtcctccctgcgctacggcgacacctctcggtggtgggcatctccgccgcgacggccgtgctctgcgaggccatgtcctggctcctcatctaccgcaccgccacctacaactccctccgcgcctcctccgcgcacccgcatcgtcgcgggctaagaagatggaccgcgtcgagaccagcctcaaggacgctgcgcgggagctctcgctcgccaagctcaagtcgggcgccgtcgtcgctgtcatgctcttcgtcgtcttcggcctgctcaactccctcttcgagggccgca

SEQ ID NO: 279350 - DNA, 933 bp, Zea mays
atttcctcctaaaatccccaagcctccaatccactgaactaaaccctagtcgacatggcgggtagagactactgccggttgccggtgcgcccgcgcgacttctgaggccccgcccccgtcccggcgtcgccggaactggctccactgtcgcccccatcactgggactgggagagtgggagttcagagccgcagacgctggggcgccgggtcaccggaaggccgggaaggaaggtgtggccgcaagacgcaggcaggaggcatcgactcgactcaccatgtctcagtcaccgggaggacgggaaggcatatattacagcaggcagaggaaacctgagcgcaatggcagtgtatttacacctatagctgcaatgtattccagtggtcatgcactccctgttgcaaataggagccacggtttggtatctggcagtctgagcaaggactgggacgacattcgccagcgcaaggatcagttggtcaacttccttgctagtcttgaacgagcctctggagattctgcggcagctggcaaaatcgaagatagcaaattggccagtcctgtggagccaactgaacaaaaagagaaggctgccataatcgttcttgattcagacgatgaggacggaaatggttcaggaaacagtaagttggcatctgagactaacaaagaactcggaacatctggattgattaataatatcgcagaaaggatgacgtttaatgggagccaagcatttggaaccgtgcatacttatggagataagaacacacagattgttccgtatggtcaatgttctgctttagtgaatcagtttcctttgcaaaccagttggcaaccatctattcagtttgagagagtcgtgctgcagaaaaggcctgaggagcagcgaatgccagatcttgtggctgctagcatagccgagaagagagca

SEQ ID NO: 279351 - DNA, 521 bp, Zea mays
acccacgcgtccgacacggtccgggacgctgcgctactacaggatatttagacttcgttggtgatgactacatcaactaacttatatattttcatgcgtacattaactgttgtgcatgtctaacaagacgtattaattgtaattttatagctctcgcatccacttgaactacatcgtgattggttcacaatatccaaaaccttccgtgcggtgaattggcaggcttagtaaccgggaaccaggaacttggccacgttcctcgttccgggaacgttcgttccgttccgggaatgtgggaacaatctcgttccagtagtgttaaatcctagattttgtagcgtaccgcgtaccaacgttccgttcctcgatcccatcgatctgggaagggtaccacgttccccgtcctcgatcccatcgatctgggaacctggttactaaaggcaagaagaactttattattaccagcctgggttaagaccggtcaaggtatattggcaaatggggattttcatattcatttt

SEQ ID NO: 279352 - DNA, 573 bp, Zea mays
gctcgaaggattttgttccaaataaacaagttttgatggctgatgatgatgagaatgaggttgatcttgatgagttgtatgcagcaacagacaatgagaagaaagtgtcagaattggatctatacatgagtgagggcctagtgaaggctaatgaaagtgatgcaccatttaatgccttatcatggtggaagggtcaagtgacaaatttccctattctttctacccttgctcgtgatgtactatcaatgcaggtgtcaactgttgcttcagagtcggcatttagctctggtggacgtgtggttgattccttccgttcgaagcttaaacctaaaattattgaagccttggtttgtactaaggattggaagcttgcttcagacaaagatttggagggtgaaataaaaactataagtgaagctatgaatgctatggaggtggacgatgaggttgcgacttgagatcttcaagcaagcatggattgcttgcactatcttatgttatttaaaaactatcctttattgtaatagtctattgtgttgaactgtcttgtgctatgttaaactcttgggtgat

SEQ ID NO: 279353 - DNA, 435 bp, Zea mays
  unsure (1)..(435): unsure at all n locations
accggccggaacgaccgacgcgtccgggacgcntnnncggacncntggggtacttcaaacggaacgggaaggaacggtgggtttcgcttggcggtgtcatcttgtgtgtcacaggcacggaaggcatgtttgctgacctangacacttcaacatccgggccgttcagatcagcttcaacggcatcttgttcccatcggtggtactgtgttacatcggccaagcggcgtacctgcggaaattcccggagaacgtcggagacaccttctacaaatccatcccagcacctctgttctggccaaccttcatcatcgcaatccttgctgccatcatcgcaagccaagcgatgctctctggcgcgttcgccatcctcttcaaagccttgtcgctgggctgccttcccaaggtgcaagtgatccacacctncaagaagtacg

SEQ ID NO: 279354 - DNA, 549 bp, Zea mays
gtcagagaaagacgtgatatacgctgagggagtaacacaagggaacggattggccttcattgacttcaccttggatgaccggagccctatgtcagaatcctttggcgacaaccacgatgcgtaccctcaacaaccagtaaacaagtaccagctgattagagtgagcgccaagggcatgaacgagggctgctagtgggtggaaatgtttgaggatgttagcatggtgatcttctctgtagcgctcagcgactacgaccagctcggagccccagcgagcggcagtagcaggacactcgtgaataagatgatccaaagcagggacctgtttgaggctacaataaggcagccgtgcttccgtgacacgccgttcctgcttttgctgaacaagtacgacgcgttcgaggagaatatcggccgtgccccgttgtcttcgtgcagagtggttcggcgacttctgcccgctgcggacgcaccacaacagccagtcgctggcgcagcaggcgttctactacgtggccatcaagttcagggacctgtacgcggcgagca

SEQ ID NO: 279355 - DNA, 633 bp, Zea mays
cgttcgtttttagcttaggcgggttttttctgtagctgctagctgttttgtcccaagccgcacacccgtcaaatgcatgccctgctctagaacgtacattggtggtgcacatctcgacaccttgacgggccagcttgctcagcgtcgtgacatagtggaaatgtctgattctggtgaattgtgcaaaggacttgctgatgatgtcgaagttcctatgctttcaaaactacgccggcaactggttggtaaaggttctcaccgccgtttagtctattctgtggattttggtgcccatgaaggtgctatggttaatttccttgatcactacgatgcccatctggtgatatttgaaaaacttcctgatggagtgtttgccgacccatttgagctacagcattttgttgagcgcaaagttttcgttgatgttgctgtttttggagacgccaaccttgaactgcccacagctctatccaatgggtcatctgttgagatccattttgatctcaggcgaatcatttcaaacaactgtaaccttgtaatagagatgcctctccatgctagatacccgcctcttgatgccagtggctatgccacagtggagtttggtagcccagatctattcctccgctacag

SEQ ID NO: 279356 - DNA, 446 bp, Zea mays
gcgactatctgcacacgcctcactggttgccagtttgccactgcatcagcaaggcatatcctgctgggcagcaataatgcctcactgcgtcgtcggcatcgcggcggcgctgctccttctgcagcagctgatggcctcgtcgtcgtcctaccccagcagtgcggtccttgcagactccgtgctcggccggaaagctggcaccgtcgtcgacgaggcgtcggcgcgtgagagttcacccccgggggctgggactgggaggtacgccgtgatcttcgacgccggcagcacagggacccgtgtacacgtcttcaggttcgacaggaagctcgaactcctcgagatcggcgacgacggcatcgaggtgttcgccaaggtgaagcccgggctgagctcatacgctggacatccccaagaggctgcaaattccatgctgcctcttcttgaca

SEQ ID NO: 279357 - DNA, 612 bp, Zea mays
tgcacgctgtcgcatgatctcctccccgaaggccgaatccgatagccagcgccaacaaaacctccctctccgcgcccgctccccacccccaccggggaccgcgcgcccatggctgccttactccggacggccgcggccctcgcgcccccgccctcgtcgcccccgtccgcacgggagccgcgtgggcggtgcctgcggctagcctgctcccggcgcgcgccggtccgacagcttcgggcgtggccactgccgactccgcacgtcttcggtcgctctgggggccggttccggcgcctgagcgtcaccgaggccgaggaggccgcgcagacggcggcgcaggaggatccagaaaccgaagttactggagagagtgctgcagatgacagtgctggaagcacagacgaaactccatctattattgtgacaacactgcagtcatacagagaagctctgattaatgatgatgaagcaaaagctgctgagatagaatcctttttactttctatcgaggatgagaagaactctcttttgagcaaaatcactgctctagatgtcgaactagcaactcaacgagaacgtatcttgcggattagtgctgattttgacaatttc

SEQ ID NO: 279358 - DNA, 635 bp, Zea mays
cctcgtcgcagtcccgccgttacatggcccgctctgttcccctttccggcgcccgcgacggactgcgacgagcggatagatagatctgtgccccgtccctgtctcgccatcctcctttctcctcctccactccctatcgactatcgagcagagcgaatccttagcggggaagtctttccgagctcagggagtggggtttaaaacgcggctcgacgaaaggaaggccgcactcgctgctgctgctggtcgcttgctttcggtggcgagcgtctcggtaaagcggcgtcggcgtcggaggcggcggcagagactggacttgcttgctccttgctgcgcagtgtagtgctgtgctaccttggagacaggatcctgccgcagggactcataattgatcagtgtgccccaacataagagcgaaacgtgactgagtttgccagctcccccttcatccactgtggtcgctcgtctgctaatgcccgcatcggaggattgctcacggatatgcttctggtgatgggcaacccggggcgctcgcggcagttgtcagcgctggttgcttccgccgccatcttgctgtcactgtccgcgttgccaatttgtcggccctacacctacgagcaagatgtgtttgcgat

SEQ ID NO: 279359 - DNA, 604 bp, Zea mays
  unsure (1)..(604): unsure at all n locations
gggctttccaacttttcattcttgatttactgatcattcaccacttgttacacttaattgacttgattgtgcaggaccattgtgtttactgaagcagcttagttcatgttcctgtcatgggtatggaacatttcatcagttctgcaaacctttcagcagaaggtttcacatcgtatggaaatgaagcagcagaggaaatgaaaaaactacgaggtctaagattggaaacactgatggaaacctgccaaggcacagaaagcggagatgtagcgatcaggtgtccaataccatgcaaaagcagcaggcggtatagggaacatgacttgagagctgcacaagatctttctgaattcattgtgagtaaggcttcacctccatactttatgggatctccaccacttcgtgcaaccaatcctcttgctcatgatgcacaattctgtgcgtggaaggtgcacagcgtagatcagtcactaggaattcctataccagccaagagttacaatgctcgctactatgcaaggaaagaatcttttangaaggcttgaagctactttttgtcaagttcatgatcgtcagtgatgtcatagtcgtatctccgcttctc

SEQ ID NO: 279360 - DNA, 285 bp, Zea mays
aacgcacgcacgcacgctcgccaagagcaaaggcggacggacggtgggctgcgggggcggggcagagcggagcgcagcgctcttgtctccacgcctgacgtctccctcttccccgctgtccgcagcttcggtgcttccttctcccgttcaggaccattgtgtttactgaagcagcttagttcatgttcctgtcatgggtatggaacatttcatcagttctgcaaacctttcagcaggtttcacatcgtatggaaatgaagcagcagaggacatgcaaaaactacg

SEQ ID NO: 279361 - DNA, 444 bp, Zea mays
gtgcattcttatgttttgcgcaactgacataccaagcaatgccgagagctagacgcaagaataataccattcctcaaagtagatctttactattatgccatgatatattcaaatcatcttctcaagaaagattgtgctaaacacttcaaaggggtcaagagtcgcgcatctcggtgaacgagacagaaaaagagtttcacagagctgcttgtagaagaactaaaacagagagaagaggaggcaacacaagctcagcaagaggccgatgttaagttgctcgaggccaaaaagttagcttcacagtatcagaaggaagctgacaaatgcagctcaggcatggatacctgtgaagaaactagggagaactcagcggaagcattggtccaacaaaagaaactgacttctttgtgggagcgaagggctcgggaactaggatggagaccc

SEQ ID NO: 279362 - DNA, 1090 bp, Zea mays
tgtctttgtgaaattgggcttgaggattattcgttggtattgttaagtagatacatcaatgctcttgaagctttaggtggatcagcttcacttgcagagggtcttcctacaaatacaagtctatgggatgatgcccttgatgcccttatcattggcataaatcaagtttgcttttcaggttggaaaccaaatgagtgttctgcaatagtgaatgagcttctttcttggaagcagaaaggtctatctgaatttgaaggcaatgaggatggaaagtatatttgggcactgagactcaaagccactcttgatagaacaggaagactaacagaagaatactctgaagcacttctttcaatattccctgaaaaagtcaagggttcttgggaaagcccttggaatacccgagaacagtgtcagaacatacactgaggctgaaattcgtgctagtgttatttttcaggtctcgaaactttgcactgtacttttaaaagcaactcgagcagttcttgggtcgtctgtgtgggatgttcttgttcctggagtggcccatggagccttgatacaggttgaaagaatagctcctggatcattgccgtcatccatgaaagaacctgtcgtgctagttgtaaacaaggcagatggagatgaagaggtcaaagctgctggggataacatagtgggcgttgttcttctacaagaattacctcacctatcacatcttggtgttagagctcgtcaagagaaagttgtatttgtaacttgtgaagacgatgacacgattaataaacatgagggtacttgagggaaaacatgtcgggtctgggtgcatcatccaataatgttgatctttcagttgtatcaaacaaagatgactgtgctgccatgtcttcagagccatccgctctaggagatctatttgcacagcacttctcactattgactacagacaagaagttagaatcgtctgaggctaagcttcttttgcctcaaatcatctaatcaaagcacgccaatccagcacatgttgctaactacacgttacaacacatatttttacacttgctgctactttttttcttttccataactc

SEQ ID NO: 279363 - DNA, 417 bp, Zea mays
agatgaggtccttgttattgcacaagatgatgatacttatgctcctgcccctctaccaggggtgaataagggttttctgcctaacataccaacccctcccaaatatccagagaaaattttgttctgtggttggcgccgtgacatccatgatatgataatggttctggaagcatttcttgctccaggttctgaattatggatgttcaatgaagtgccggagaaggagagggagataaaactgactgacggtgggttggatataggcgggttaataaacattaaacttgtacataaagaaggcaatgctgttatcacgcgacacttggaaagcttgcctctggagacatttgactctgtgagtccgtagtgctctcttttagagatattctgcacaatgtttattcaataaatgaaata

SEQ ID NO: 279364 - DNA, 429 bp, Zea mays
  unsure (1)..(429): unsure at all n locations
atcaaaatcacttctattgaaaaaagcaaaccctaccccctcttctccccttctctcgacggcgccaccatgccgcctccgccctcaaccctagccgccagggcaacaacagtagcaccgcagggcgtaggtggcagagcagggacgcggattccgactgacacttcgtcgtcaagctctcgccatttgtaactccttgctccgccgacctcgacgcaaactacaacttctcgctcgcgcctatccaggatccgctctcgccatggtaccgccctttttctcggtctgtgaatccacccccatctccctgctccctcctgcatttgctacggttcttggaagcaggttgcagggacggacccaaataggggaccaaacattcccttagagtttgcacgctngctgatgcagtgcaagcctgcaacatgc

SEQ ID NO: 279365 - DNA, 374 bp, Zea mays
ctgacgcgtgggcagagcgcctgaaccttccttcgctccactcttgccccccccctggcgccacactagcctagtgagtagtgcagcactcttgctcgcgttgctcctacctgtatcctgcacagcacaggaccagagcccaggaccgtcggcaaaaggggagcggccatgaagtacgtgctggtgaccggaggggtggtgagcggcctcggcaagggcgtgacggccagcagcatcggcgtcgtgctcaaggcctgcggcctccgcgtcaccaccatcaagatcgatccatacctcaacactgatgctggaaccatgtctccattcgagcatggagaggtgtttgtttttgacgatggtggagaggtggattt

SEQ ID NO: 279366 - DNA, 425 bp, Zea mays
cttgaggcaggcagcagagtgcgctgaacaccggcatggacaccatcgtctctctctcgcctcagatgcttcgccagcgccagggccaccagtctactgcatcatcatcatcatcagcttgggctattaccacagctaggatcggtcgccacctgtctactgcatcatcctgttccagcccgcggctgctcatcaagcagagggcgacggcggcatcggcaccggcaccggcaccggcacagaaagagaaagaggtcgtcttcgtggctggcgccaccggcagagttgggtcccgggccgtaagggagctcatgaagcttggcttccgtgtgcgcgctgccgtcaggaacgcacagagggccacgtcgctggtgcagaaagagaaagagcagcagctgcttgagcttgtggagtgtgacctggag

SEQ ID NO: 279367 - DNA, 530 bp, Zea mays
agtgtctccaccaccgcgagaaagcaggcatcgccttcacagtcaacaaaagctacggcctacgacggatacggtctcccctccactgcctcccttgccctattgtcttcttcatctcatcgcatcccatagttgtgccagttggagacgcttctgttgctgaaggagacctacataaactatagtcagccgctaagttaaacaagccacgtgctgggccagaacctagcaggcttaaggatgagtaaaatgatatctgttcaacatgaggcacaacgatatctatctttcaagaatcagtaaactgatatctgctagatgtgcttctctatcttcgtttgttttgaaacacatatatagttgaaaaactgtagtggtgagaaactcgaaatgaatctgagccagaactcagctcagactgccaaatttcataattttattcacaaatttcaacaatattgaacattgagtatatattaagcgaataccaaaatcatgttttctagcctatttcatgccatgatgacatc

SEQ ID NO: 279368 - DNA, 280 bp, Zea mays
ctccccgccggcctccacctccacggcgggtgtggaggcggtactcgtgcatgacccagtcggtgccggcgtccgccgccgccacggcggcgccggcagaagacgagcgtccgcttggtgccgacggggcgcttgcagcgcggcgacacgacgacggtctccttcccggacggcctccaccttcacggctgcgccgccaacgcgccttcgcccactaatgtgagctcccatggcggtggcgcggcggcggccgactgggtggtctgtcgcattttcagga

SEQ ID NO: 279369 - DNA, 638 bp, Zea mays
cactactataaggtgcaattcactgacaccaccacataaaagcaacaactactacagcaccccatataacatacaataatcatcctgagctatccaaggttgaagttcaagggcatcttattaagcctagtgcaggtataacgacacgttcaaaagctcgagtgactcctgatcaatggaccaagattcctctcccagttaagatcttctcattgctggcagatactttaactgaaattcaggaacaaattggtgctggtgatgacgatgactccgaagaggataatgactgggaagaagttcacaatggtgatgctagtatatcagatgatatcatacactcagcatcggttccttcaatgactaatccatcagttgaacatttaaatgcaatggccaaggtttttgatgaggttggtgagcatccaggtctgctcctttgttagttctgtcatatttatgccatatttaccttgagttgtacaacaggatgatgatgatagttatgacgatgatctgacaaaaaccgaccctcttaatgaggttcgttttcactgcagaaaagatcttccatttgaattagatgacgtcaaagtcaaataacccatattcatgcaggtgaagttagcggactttct

SEQ ID NO: 279370 - DNA, 488 bp, Zea mays
gaacgacttgatgctcacgtggagcacatgcttgatggtctggatgatgctgatggagcagaggacgtgccttttgatgaacttgttggtatgcaaggccctgtcttccacttggttgagaacgcaataacagttttggccagcaatgctatattcctcattgttgtgatctttgttccattctcattgggaaggattgttctgtactacctatcctggtttttctcttcggcttctactcctatgctggcaaaagtgatgcccttcacagaaacagctatttctatagctaatgatacattaaagagcgcacttaatgttgtgaagaatttttcttctgacagtaaaatgaaggtgttatcgggcatgtgattgaggttgttactcaatccttgaagataaatgccactggacttagtgtaattcaaggcactgggaagaacagtctgatgaaaggaacaacaattgcctcatcttatctttcagat

SEQ ID NO: 279371 - DNA, 454 bp, Zea mays
cccacgcgttcggcaagcttcggcctcaccttcagcggcaggtggtgctgcggagcttctcctcgccctagatcccgcgcacccaacgccagatcagagatcagggcgcgccggccgtctccattgcccggcggatcctgcgatgcgagctggaccgagagggaggagcgagggagcgcgcgggtagagaaggcggggcggggggaggaaggaaggaaggaaggagcgccggccggagcacacgtcccctcggggccctcggtcggatgagatcgacgatgaaggcgcagcacgccaacgggcgggggagcaggagccccttcctgacgtactacgcgctcacgctcgccttcataaccttacgctgcgtgctctactttaaggacttctactccacgctgcaccgtcccttgctccaccgcccccggcgtcacgccgtcccagacataagcca

SEQ ID NO: 279372 - DNA, 551 bp, Zea mays
gggtacacgcagcatgcagccgtgaatttcaaggacgcgacggtctccacgggcgcgcaggtggcgcagaaggccacggaggtgacggccgacaccgcgcgcaaggtggcggagtacgccaaggagaaggcggagcaaggcaaggagcgcgcggcccgcgccgccgacgaggtggaggagccagggagtggcgcaaccgcgcaggccaaggaaccggcgtcccagacggcggacaataaggctcgcgacatcaccggacagcacaaggacaccaccggcgacatggcgcgtaaggccgcggacacggccgtacaggccaaggacaaggtgagggacacggccgtatccatggttcagaaggcgggcgataccgccgtacgtgccaaggacacggcgtgggatgcggccggcggcatggcgcagaggtcgagagacaccggtgcccaggccggtgacaaggcgaaggacgtcacttggcgcgctgagcaggatgcaggggagttgaaagagagagcgtcagggaccgtcaagaccggcggtggcgcttcgac

SEQ ID NO: 279373 - DNA, 477 bp, Zea mays
ggacgctggccgcgctctgcatctcctctccactcctgctatttagcgccgccctgcgcctcccactaccgaattcccctcacctccctgctcgaatccagcgctcacccgcgccgcgtcgagacatgtcgaagaaaatcgtggtgaagctggacctgcacgacaacaaggacaagcagaaggcgctgaaggccatctccgtgctcgtcggcatcgacgccgtgtcggtggacatggcggcgcacaagatgacggtgatcgggacggtggacccggtgcaggtggtgagcaagctgcgcaccaagtcgtgggcggcgcacatcgactccgtcgggccggccaaggagcccgagacgatggaggagaggacggacagcggcggcgagaagaaggacggcggcggtggcgagggcaagagggaggaaggggacgggaagactgacggcggcggcggtggcgacggcaagagagacggcg

SEQ ID NO: 279374 - DNA, 692 bp, Zea mays
taactttgcagagctttctgaagcattgtacgtggcagagcagaaggcgagggaggcagtgcagatgcgctccaaggttcagagggaacttatgctggaggaggtggtgggtatggagcaaccgcgtgaaccacgggaatcacgtgagcagcgcagggagtctagagaagagagggaaggaaggattgagcgtgatagaatccgtgaggagcgcagacgcgagagggagagggagaggaggcttgaagccaaggatgctgcaatgggcaagaagagtaagatcacaagggacagggatcgtgatatcagtgagaagattgctcttggtatggcaagcactggtggtgcaaaaggtggtgaggttatgtatgaccagcgtctgttcaaccaggacaagggaatggactctggttttgccacagatgatcagtacaatatctactctaagggtctcttcacagcgcagtccacgatgtccacgctatacaggcctaagaaggatggggattctgatgtatatggtgatgcacatgaacagctggagaaggttatgaagactgagaggtccatgcccgacaagggattaactggtgcttaaaaaaggactggcaagcaagacaggcctgtggagttcgacaagcaggaaaaaaatgatccatttgttttgaataactttttgactgaggggaaaa

SEQ ID NO: 279375 - DNA, 394 bp, Zea mays
ctttgcaaagctttctgaagcattgtacgtggcagagcagaaggcgagggaggcagtgcagatgcgctccaaggttcagagggaacttatgctgaaggagaaggagagaaaggagcaagagctaagggcacttgcacagagggcacgtatggagaggactggtgccccacctgcaccatcaggtgtgcctgctggtggtggcaggggagcaattcaggatgttgatgaagttatggatatggagcaaccgcgtgaaccacgggaatcacgtgagcagcgcagggagtctagagaagagagggaaggaaggattgagcgtgatagaatccgtgaggaggcgcacactccagagggagagggagaaggaggctttaagccaaagatgctgcaatgg

SEQ ID NO: 279376 - DNA, 295 bp, Zea mays
ggagacgcaacgagaaaaaatccgtacggttaaagttgtggcaggaggagtgggggcgcgggagagatgataaggatggcggcagcgtctcagccgccatcgtcagccttgcggatgcacgggtgcggcggcgcggctccgccgccgtccgcgcccgtgcgcctcttcacggagtcgcggggtagagtcgtggcgtcgattgggaggggcaggaggcggaggcgcgccatctcgtgctgctcgtctccagacgcagatggccctcgccccgccgcgccaccgacttcggcagcgc

SEQ ID NO: 279377 - DNA, 934 bp, Zea mays
ctcgacgaccgagccgccttcttggaggccgtgcgctccacctgcctcgccgccgacaacccatcggtcccatcgtggagaatgtatgatggtgttttccagatacttcaaaacagtagctctcttgagcttgctgtggcaagtttccatctcttaacagaattgggcaagcaatatccaagaacacatgtggcagattctggtggacaccaatctttggtggtagttaaagagtcctgggtaccttttctctttggcaatggtgctgttagtagtgagattgggggaaacgtgaggagctcagatcacctatttgatccttcaagattctcgttgctgattgaggctattgtggaaccgacaaatggcacggatgataataatggaattaaggctatcaagaatatgatgctgtttcagtatcttgtcaacacacttgaagcagattttgtgcctcgccaaattgcaaccaaagagtcactagactgggtgattttcagagagtctctcttaagtatgcttctgggatcacgaaagctcgtgttcaaatcttttgtgaagaactgcatgtgtattctactcaaccagtattaccatgaagctaaagatgattatgaagacatcataccttctgaaagagaaactgaatcaacatcttatcacaatttctccctaaactatttgtcctttgagttaaaaaagacactcatttctctcaggaaattatttgtgatggttatgaaacttgacttgaccaggaaagaagcagacacattagggttaacctcaagagctgacggattcagaaactctatcatggatattattttggatgaactaacttacaacagcagttatttatccccatttctcttggcctttgtggaacggaagtggaaattggagattattttgcagtacttttcaaaatatt

SEQ ID NO: 279378 - DNA, 456 bp, Zea mays
tgcaaggaaaaatcaacttcgttactactgttacttgccatgaagcttatgctgaggactgtgatctatcagttgagcacctctacacagtcatgttgacttgcgccagagcaaaaatttatgcacagtgcctctgctttcaagcgacattgttttcagttaacacctatacgtactatcaactcatagaaaaattaggcctcagctgtggtcattagtcaatatatcaacggttgtaacatgtagtacatgtctggtaaatatggcgacatagtaagtataaacagaagctgttcttataaacctgatatctttttgttcatcttgaacgcatcgcctattcttgacttcttgtaaaccaacagaaatctgttgccttttggcgcctcttattattatataaacagaagctgaaacccgggggtcgcgctggtgatcatcaggtcattcatacat

SEQ ID NO: 279379 - DNA, 542 bp, Zea mays
  unsure (1)..(542): unsure at all n locations
attaaaaccaagtatccgttataaatggtctggtttataaatgctatctattttcccaaagaaaatatttttgggtgactacgctacagcttgatcctgctttgattagtccgttcacttgctaagtttattctatgttcactctcattacgttatggtgagatgttgacataatgacatgtgaccacaattatggcagcacatattgtttcagttactaaagtaccaactgctgatacatagggatcttaaataggaaaaaacaattacacatggtttcttaggcatgtcatcaagttataaacttttccccaaaaaatgtttatgtacattaccttgcaattgctaacctgttgtgcatttgattttgcaatcgtaaccatcgcgctatccaaatatacctccaatcaacaggatcgagctacgcaaattgctcctacattctcacatacacttaggggtgacaatgggctctaaattttaaactataatatttaaggttctgatcggattangatcaggctctatttctattcattttt

SEQ ID NO: 279380 - DNA, 433 bp, Zea mays
ctatgcgtggcggtgtatgccctgactgccctttcagggtacctcttgtttggcgaggatgccgagtccgacgtgctcaccaacttcgacaaggatctcgggataagattcagctctctgctcaactacattgtcaggatagggtatgtcatccacctggtcctcgtcttcccagttgtccacttctcgctgaggcagacagtggaggcgctgatcttcggggagctggcagcccctagcaggaagagaacactcacattgacagtggtgcttctagcgctcatctaccttggctcgacaatgatacccaacatctggatggccttcaagttcaccggagctaccacagggctggcgttgggtttcatgttcccggccctggtggcattgaagctggacaaggaagggagtcgcttgggacatggggagaagc

SEQ ID NO: 279381 - DNA, 946 bp, Zea mays
gatatattatgttccggtaagattttgtgggaacaacatgacatttcacttgttacataacttgttaatatttctagagtctatcttcaggaattttcttttacttcatctaatttatgagcaacgaccagagcttttgaagaagttattctacttttcctctttgttgcatgtattgtggaaccttttcatttgctactaattaggaagctctgctccttgattagatatgtctgcttttaaagctgcaaacccagatgctgtctttgaagattttattcggtggcattcacctggtgaatggttgagcgaggacaaaacagatggtaatgcaggctggcctcccaaaggaaagctttctcaccgtatgtcccaacatgggaatgtgtggcgcaaaatctggaatgatgctctgccattgcctgtttctgaacagaagtctttgcttgaccctgttcgggaaggagaaaaggtgcttcattaccttgaaactttaaggccacagcagctccttgaacaaatggtgcgtacagctttcaaatcatcagctgatatcctgaataagaccatgtatggtggcttcaaggaaatgaagacaaaaatggatcgactatatgtcaccatggcgtcaacactgaaatcttttctagggaattctgatgtcaatgatctggttggaggcctgaaacggctctgtcaagcctttgagcacatcgagaagttactgattcttgctgcttccatcaatcggaagcttattgatgctccacgactagctcaagcaatattttacgactactacaacttctaccttccaaaaatgggaactagcctggaaagcatttgctatgagaaggagttcacaactaaggaaaaggtcgggatgtatgagagagatgctgtgtcgaacctgtttcctccccctactgctaatcagtcttggagg

SEQ ID NO: 279382 - DNA, 675 bp, Zea mays
gcgggcgcgaccaccgccacgccctaccccccctcccccgccgcctagtccgagttgtggaatccccgtggactcccgccccccgtccagcccccgcgcgtcgccgcggcgcgccgggccgttctgctccgccgccccgcccgcctcctcaggtgtccagccgaggaggacgtagagctgggcatataacgagctagatttcaaaaaaaaaaaagggaaccatgaagaaagtgttcgatcagacggtccgggacctaaaaagagaggtgaacaagaaggtcctcaaggtgcctggaatagaacaaaagatccttgatgccacaagcaacgagccgtggggtccacatggatctctactggcagacattgctcaagcgacgaataactatcatgagtaccagatgatcatgcacattgtgtggaagagggtcagtgacactggtaaaaattggcgtcatgtttacaagggattgattgttttggattacctggtggcgcatggcactgaacgagttattgatgacatcagagaacatgcttatcagatatcagcactagctgatttccagtacattgattcttctgggagagatcaaggtagcaatgtacgaaggaaatctcagagccttggcagtttagttaatgataaagaaggatacaggaagtagagagaaa

SEQ ID NO: 279383 - DNA, 1473 bp, Zea mays
ctccagtctctgctggtctcacgtggccacgttgccgcgcatccgcgattccgcgaggcaaagcaacgagccgcttacggtgttctactgccgcgtagcagcggcagcggcaccgacggcatcccaaaaggcagcgacgtctgggtcggacttggaggccccggggatcggtggccaggctgagctcctcccagagtcccagtacgcctccggagtccggatccgcggagccaggctgagctgctcccgtggtctactctccagtacgcggctcggcagggaccgggagcgaggacgagcgtcctgcgtcgacgggatcggcgtgccaggggagcgctgaaatctgcgcttccgtctccggacggccgatgccaggccttgctcgggagaggtagcaaacgaaacatggagctgaggccgcggcggcggctgctgctgctgcttgcgctcatttgcctgcgtgctccccgtttggcttcggctcagcagccggatgaggcgacggtcatagttaaagggctcactaggattgcggaaacggatgacaactacgtctgtgctacaattgattgggggccgccggagaagtgcaactacaatcagtgcccatggggccaggcgtcaattcttaatctggatctggatcacccgtttctggctcaggccattcaagcatttgaccatttgaggattaggctgggaggctccttgcaagaccgagttgtttatgatgtgggaacagaaagtccatgctccccatttacaaatgtatccaatgccttgtttggtttctcagttggttgccttggtatggataggtgggacaaactgaatgacctattcgagagaacaggagcaattgtcacatttggtgtgaatgcactctacgggaggtataatgttcgacgttccatctgggcaggcaaatggaattccactaatgcatatgattttgtaaaatacacaatctcaaagggatacccagttggctcttgggaatttggcaatgagctgagtgggcatggaatcggagcaaaagttgatgctaaactttatggaaaagatgtaattgaatttaaatccatccttcggcaattgtataaggcaccactgtcccagccactcctgttagccccgggagggttctttgatcaacagtggtattctcagctacttgagacttcaggtcatggtgttgttaatgccttatctcaccatgtatataatcttggtggaggtatgtgatttattgttttgaatgtaatcccatctgagtaatcatgtctcactgttccaaaaccattgcatgtgcctactaaaattccatgatgatacagatgcttacataggtagaactactctaagttaattctgatggaatctgaataaatagctgaacatttgtaggctctacctattaaaagtttaggattattaaaatactttttgtaatgccaacaaaattgtgatcct

SEQ ID NO: 279384 - DNA, 222 bp, Zea mays
gctgttcccctctctcttccccgtcctgcaggctccaggcgctgctgctctcgtcctccgctagcgagcgaatcgctggcccgacgccgcggcgggaggtatctcgctttcgatcaggattttggtcggggcgtcgttctccggtgcttatctcatttctatttatcggtgcctcgggttcacggccaaattcgctgctgcgtgggactttggagattggag

SEQ ID NO: 279385 - DNA, 546 bp, Zea mays
ccctctcgtccggtatttgtcttcggtgttgcagacgtgttcttcccacgcatgcttttaatctttttaaaatctccatttgcgtaagctcagtctgcagtttacaaatgctttgagtcctgcgctcctgtcctgctgttcttgtctagcagtaaacaagtcatttcctttgttgtcacatggtggctcgccgagtgctggtgcacacattctctcctcgttccaccttgctgctgctgctgcagttcttggcacggccttgtattgtatgaatatgattgtatcacatgccatgtgactatgtgagtagctgaccacggctcaccgcgaggcgcacaggtacagcagcgcaggcgcggcggcagcccgccgctggatctctcccgaggctccggcgatggagcggtcctgctacttcccgctgcggtgggagagcacgggcgaccagtggtggtacgcgtcgccgatagactgggcggcggccgacggccactacgacatcgtccgccagctgctgcacctcgaccctaacctgctcatcaagct

SEQ ID NO: 279386 - DNA, 446 bp, Zea mays
cccacgcgtccgcccacgcgtccggctgcgcacaccgacttcttttgcacaaggtacagcagcgcaggcgcagcggcagcccgccgctggatctctcccgaggctccggcgatggagcggtcctgctacttcccgctgcggtgggagagcacgggcgaccagtggtggtacgcgtcgccgatagactgggcggcggccgacggccactacgacatcgtccgccagctgctgcacctcgaccctaacctgctcatcaagctcacctccctccgccggatccgccgcctcgaggcgctgtgggacgacgacgcccgcttcgccgacgcggcccggaaccgcgcgtccgtcgcccgcagcctgctgctggagtgcgagtgcaggaaccaccgccccggcgccggggagaacacgctgctccgggccgggtacggcggctgggtgctcta

SEQ ID NO: 279387 - DNA, 738 bp, Zea mays
cgaaaatccgaaatcggcgccggtgaccttcccgtggcccttgtacaaaactgacccccgtcggagcaccgccatcggatgcgacggagacggcgtcaatggcgtcctcatctgctgtcgagcccagtttccgcctctctgatcgagagaggaggtcatcgctgggactcagattcacggtgctcctgatgcacgtcgtgttcgttggcgctgtcttcatcctcgatccgaccctcgactggcgaatccacgaggagccgtggtatatagggttgtatggagtgctggttctgctcacgctagtgcaatacttctacacagctggctcatctccagggtatgttattgatgtaatgagagctggttccatgatgcatgcaaccttcgtcaacactgctgctctttcaaagcagtcaaattcaagaaatggaaacacaaattctccaacgagtcatgctcaactacagaaacttagcgcgatgactcctacatcatgggcacagatggttgtggatctttatcctccagggtcaaacagcagggattggacttgcactcactgcagggttgttcagccacctcgtactcggcactgccatgactgtgataaatgcgtccttcaatttgatcatcactgcatatggcttggaacatgcattggcaaaaagaaccattgtcgttcttggtggtacatatctgaagacacagtcttgtgtatctggactgctgttctctaca

SEQ ID NO: 279388 - DNA, 414 bp, Zea mays
cataagccgcgcccgccttcgcacgctttgttccgatggcagccgcggctgtgaccctgccctcctcgggcacgcccttcgccgtcgccacaaccgcctcttcctcatccgcccgccgctgcctgctcctgccctccgcggctccccgccgagctctccgcgtcgtggcctccgccgctaccgaggcgccgcccaagcccacgcagccgccgacatcgccctccggcatcgtgctcgtcgacccatccgaagcccagaaggtgcaccggctcaaggccgtctacgaccagaaggtcgtcccgctcatcaccgaggagttcggctacaccaatgtccaccaggttcccaagctcgagaagattgtggtgaactgcggtctgtgcgcggaggcagtgaactctaaggtgctggatg

SEQ ID NO: 279389 - DNA, 680 bp, Zea mays
agccaattgaagaggctaccactgtagaggtgtagtctttgccttctcctgctgcagttaacctgaaaccacctcccaagattgagcggaatcaatcatttgatgatgatgattttgcaaacaagcctgttgccatgaaaagtaatgcagcagcagcaccagttaaggcaactgtttattcagttgctgacctacagatggcaacagatagcttcaacatggacaaccttattggagagggtactttaggacgtgtgtacaaggcacaatttagtgatggaaaggttctagctgtgaagaaattaaacagtacaacactgccaaggcaatcatcagatgatttctatgagctggtgtcgaacatttcgaaattgcaccatcccaatctcagtgagcttgtgggctactgcatggagcacggacagcacttgcttgtttatgatttccacaggaatggttcactgcatgatatgctccatctctcagatgattataacaaaccacttagttggaattctcgtgttaagattgcgttgggctctgcacgtgcactagagtaagcaactctgatctctctcccttatgcaactatgatgatagaattttgataaaaaatgtatgttgagcgaattctttttttggtgagtgaaactctactgcgaacacctcaacctttactc

SEQ ID NO: 279390 - DNA, 361 bp, Zea mays
ctcagatgattataacaaaccacttagttggaattctcgtgttaagattgcgttgggctctgcacgtgcactagagcatcttcatgaaatttgttctccatctataattcacaagaactttaagtcgtccaatattttactggacaccgagctcaatcctcacatttctgatgctggacattcaagttttgttccagatgctgaattccaggcttcagatcaggggtctgggtatagtgcccctgaggtcgagatgtccggtcagtataccctcaagagtgatgtctacagctttggggtcgtcatgctggaactcttgacaggccgtaaaccatttgacagttctaggccccggtcagag

SEQ ID NO: 279391 - DNA, 339 bp, Zea mays
tcgcggacgcgtgggggtggccagatttcttctttcgcgcatctctatcttccttccccagctcactctccagcgcatctgattttttccaccgccgcgcgctagtgtgcatcttctgaagatttttccaccggatgtctcatcttatgccctctcctctccatttcttacgtagcccagatattccagcagccgttcgctcgaatccaccgccgctcctgccccaatggcgcacgcccacctcctcagccatggagctcacgagcatctccctacgccctctgctatctgctgttctcatcctcccagctcgcttctgtccccaaccatggaggtcgg

SEQ ID NO: 279392 - DNA, 511 bp, Zea mays
tcgcccaccttctcagagactcacgaactgacgactacagatctcccaccgctcgtcatgcacctgcttgacgcgaggcagcgccacacgccggatttgagctcctcccaacatgccgcctccaacatggggctcccgctcgccggggccgcctaccagccctacgtttctgagcttctttccttctccatcgagcgcctccacaaggagccggagcttttgagggtcgacgcggagtcggtgcggcggcagatgcaggaggtggcggtggaaaactacgccgcgttcatcgccgcctctgaggcgctctccttcgtccgcgcgcacgttgagagcttcgacggccacctcgaggccatgatagaggagataccaaacttaacatctggctgcactgagttttggtgagtccgcacaacaaattctggaggagaggaagcttaatcaaacattactagccaaccacactacattgcttgacttgcttgaaattccacaattgatggacacg

SEQ ID NO: 279393 - DNA, 833 bp, Zea mays
  unsure (1)..(833): unsure at all n locations
ccacgcgtccggggacgcgtggttccagaaaaagcactcccgttctcggaaagaaggcgccgttctagcagaagcagcacctgcgcagcggaaatcatactcctttcgactgttctcgtgccaaggcgatataagcaggaacgtgatcagccatcccaaagcagcgaagaaggaacccgtggtgtctgtcgagaaagagctggacagcagcgagctagctcctgctgtcgtgcctctgctggaacgagcggtttccgtggtatccagttcggacagcctgagtcagtgcgaggacgccgtgcacgaggtcgccagagcatgctcggcctgggacccgagcctcgtcagcctgcgctcgcccgcctctttcatccaaggccttctcgaggtcacgctgacctccaaagacgacgccgtgctggagtcggccatgtcgatcatggggaagctggctctggggaacgaggtgatcagacagctcgtgctcaacgcggacccgcagctggaggttttcctgaggctcctgaggagcagcgagctgttcctcaaggcggccgtggtgctctacatgatgaagcctaaggccaagcagatgctgtccctggactgggtgccgctcgtgctgcacgtactggagtgcggcgacgaggtgcagtctctgttctccgtaagatgcgcccccaagatcgccgcgttctatttcctggaccagctgctcatggngttcgacgttgacagaaacgtcgagaacgcgaagcagatgatcgctctcggtgggctggacctcctgattcgcaggcttggcgctggcgacgctcgcgagagcaggcact

SEQ ID NO: 279394 - DNA, 555 bp, Zea mays
cagtgacgcagagctagctagctagtagctagctgcgcaccggcagtacgtacgtagatcccgggcgggcaatcgaaccgcaaacgcctctgggtttcgggaagggtgctttgctctttgcagccagctggccggccggccctggtgttttatataacttggaaggttcagtcgctgacagagaggaagaagatggtgaggaggatggggaggaagctgggcctcgacagggtcctcgactgcttctcgctctccctgtgctccagcgcctgcgcctgcgtacactccgtggaggaggaggagcaggaagacgaggacgagcggaaggccctggtgagcagccagctggaggagctggtgaagctgagcagggatctcgtcggcggaccgccaagaccctcgctttccatctggaaccaaagaccgtggagctcaaggtgtccatgcactgctacgggtgcgccaagaaggtccagaagcacatctccaagatggacggcgtcacgtcgttcgaggtggatttggagaagaagaaggtggtcgtgatcggggacg

SEQ ID NO: 279395 - DNA, 389 bp, Zea mays
gaaaactccactgacctgtccgttacacttgcaccggagcgggagtccgggagcgcagagatcgctggggagatggcgtgagaagcagcgagcgaagccaccgcaagccgcgaaagcggggcggaggcggcaggggagtgctggagcgaagcgctcaagtcgttcctggaccacatccccgtctcctccgtcccgggcgcgctccaacccactgcctccccagcggtggaggtcaagctccacggctccgtcctgggcgccctcgacgccatgtacagcagcaacgccgcgggcgcggtgatcatcgacgtggtgcacagcagtctaggcaagtacgtcgatcgcgatattggcttcgtcgagttctcgagcctagtcctgtgggcact

SEQ ID NO: 279396 - DNA, 558 bp, Zea mays
tttagaagaagaatggcgttgctcggcgagtacagcagtcaggagctgctccagggtcagctccagctctggcaccagtccctgggcttcttcaagtccctcgcgctcgcggtcgccatggacctccgcatcgccgacgccatccaccgcctcggtggcgccgccacccttccccagatactcgcggaggccgggatcaagatcgacccgcgcaacaacaagctccgcgacctgcggcgcgtcatgcgcgcgctcaccgtgtcgggcatcttcaccgtcgtccagcgaccagcgtcgtcgtcagatggaggcggcaggcgtggcgcacaagcggaagggtccggtctacaagctgacggcggcctcccgcctcctcggcgtcggagagaaggagagctcgacggcgacgacgaggcagctgcctcctcctccttctctgaccgtttatgtgcagctcttactcgaaacctgccgaggatccgcgttcaacagggccgtgcgcgagtggtttcagttccggcagccgccgcaggatgatgagcagcaccagcagcccgg

SEQ ID NO: 279397 - DNA, 787 bp, Zea mays
aatcatcaccgcaagcgtgcgcgcaacccagctcccaccgacgactgcaccggccgtcgctgccgcgctacttcggcccctttgccggcgacgagcaccaccaggtagctgctaatggagatcgacagcctcagagaaggatttgatcgagttgctgagaaacgttcattatcttctgctaaagctctggaagttgttgatcaaatagtgaatgaaattgagcaggctattgtgaagctgcagatgatgaatacagattctactggaaatgttgaccacccatccatccttgcagaactgaaagctaagctcaatgaaatggcaccactaaaccagcttgaaggcagccaaaaggagctcaatgttgctctgagcaaatatctcaaactccttgagaagtctttcaatccagatatatctaaggcatacagaaatgtggattttgaggtccatacagtaaacaatatcatagcgaatcatttctaccgccaaggcctctttgatcttggtgacatgtttgtccatgagtgtggggaactaggcggacttccttgaagctaccgtttcaggagatgtatgctatccttgaagccatgaaagcgagaaacctcgagcctgctctcagttgggctgccaaaaaccatgatcagctgttgcagaatgggtctatgctggagttcaagctttatcagcttcagtttgttgaaatattgtccaaaggcagtaggggtgaggccaaagatgaggctcttttatatgctaggactcacttggtcccctttgcagc

SEQ ID NO: 279398 - DNA, 330 bp, Zea mays
cattgatgaagcaatagaatcttataatgatccctgacacattttgaggttgtgactggtctctcatttcttgtattctgacaacagaatgttgacattgccatcattgaagcaggtcttggtggagctagggatgcaacaaatgttattcgaagtactgaattagcagcatctgtcataacaacagtagggagggaacatctggttgcattgggtggctccctgcaaagcatagcaatagcaaagtctggaatcatcaaacaaggacgaccggttgtgattggtggaccattttcagaagatattgagcaaattattcgtgacagggca

SEQ ID NO: 279399 - DNA, 482 bp, Zea mays
cttctcgctttcttcacccgcctactcctcctagggtttcctcccgcctcgctggcgtgccgcctcccctcgccattgccgcggggcgttccgccgctcgtgggacgccgcatcgagactcgagagctgttcgtgctgattcccgcggagccttgtggctgcgactctgcggcgtcgggtggggtggggaggttttgacgcccgtgggggtttggatcgagggcccggagctgtgtctccgcaatgccgggctggtctggcggcgattgctagggttttctggtcggatttcggtggaagagctgaggttttgcttcgagtgcgggagctgcctgcaacccccccgcttgccttggcccgagctcggtgtttccgcagcaatgcctagccgattttagctcgctctggggttccgaagggcgaatgggctgtcgggcggttcgagattgcaaggagtcggtggctcggcccaatgtccgggg

SEQ ID NO: 279400 - DNA, 649 bp, Zea mays
gttaaaaaatacagcactgaagaacatcatgtttcttatccattatgaagacgaaagtactaggtacctttgtgtatgcccagtaaacaaggcactaaatatgatttgttgttgggttgagaatccaaattcagatgcattcaagcggcaccttccaaggatctatgattatatatggcttgctgaagatggcatgaagttaaaggtgtatgacggcacgcaagcatgggatacagcttttattgtcaaagcatattgctcgactgacctggttcatgagttttctccaacactcaggaaggctcatgagttcataaaaagtttgcagatccctgaaaaccaacccgaccatgaaaattattaccgccatagatcaaagggttcatgggctcattcaacattagacaatggatggtctgtatctgattctacagcagaagcaattcagaataaagatggtacattttcaacatacgagcgtaagagcactgcatctttgttggaggttctcaacccttccgagacttttctaaacattgttgttgatacccgtcggtcgaatgcacgtcatctgcgattcaagctcttgttatgttcagagaaatgtatccaaggtatcgcgatcaagagataaaaaaatgtattaaag

SEQ ID NO: 279401 - DNA, 261 bp, Zea mays
ctgacctggttcatgagttttctccaacactcaggaaggctcatgagttcataaaacgtttgcagatccctgaaaaccaacccgaccatgaaaattattaccgccatagatcaaagggttcatgggctcattcaacattagacaatggatggtctgtatctgattctacagcagaagcaattcaggcattgtcgttgttatcaaagttctcttccaatcttgtgggggatcccttaaaggaagaaagattatttgatgcag

SEQ ID NO: 279402 - DNA, 638 bp, Zea mays
  unsure (1)..(638): unsure at all n locations
ttcgtcgtcgtccccaggtttatctaanggtgaatgtaaaatccaacatagaaggacagtgtgaggtgtaaaggcagtgagcatggccagtagggctgggtctgataccttctctgacaccagtgacaggcactctgaatctggttctatgcagtctgttgatgatatcctaccacgtagggggattatgggtcttccgaagctctctattggtgaaatgggtcagaattctgctgaccctgagcttgtttgctttgactatgctgattcagaagagagattaagtgatatatcagatagtggtctttccatgggtacagagacggatgtttcagtaagcagtatagttgagttgacacgttttcaggagcaggaaaacatacctagcactctgaaagaacaagagagtgcacgaaaaattccaaatgatcagttgtccaaggtggccacccgagttcagaagacaacagtacccaaactagctcaaacttccttgtggcctaaactaagagatcctccagcccttagatccccagggagaatcacaacacaaacaatatctgtaccaaggacgtccatgacttcgaagagatggacataagtcaagtttgatcaacatgttctaacactagtttatg

SEQ ID NO: 279403 - DNA, 708 bp, Zea mays
gcgggaggacggagagcgccggcgaggaggcatggagccagacaaggccggggaggcagcgaaggagccgacggaaacggaggctggagactccgtggatccccgcgaactagtgtccagcgacgacgagatcgactactccgtcgagcctgatttctacgaccccgacctagatgacgtcgatgagcggtgggtgagcagacagaggaaaggccgcacatctgacgccgtgcttagctgccccgcctgtttcactaccctgtgcttggattgccagatgcatgagaagtacgtaaaccagtaccgtgcgatgttcgttcgcaactgcaagatcaagactgaccaggtcctgcgagagggcaagagcaagaggaagaaacgcagaggaggaagggctggtgatccagctgccgcatctgaaggcgaaagcaaggggcagtcctacccccccgtctgctgcgaggtctgctcaaccgaggttggagtgttggaccaggacccggtgtaccccttctttaacgtgatccctagcaactcctgaatgccgtgaactgttgctctgtaggagtggtacgttcgtagtcgtaaaccccccccccatatacgcaagcttttgcgctacgccatctgtctcttatcgctgatcagcctgtacatcgggtatgtatctttacggatgttttgtttctgcagcatgatgcggttttg

SEQ ID NO: 279404 - DNA, 1103 bp, Zea mays
tttattcgtccgcccacgcgtccgcccacgcgtccggggacgcgtgggtggataacggcttcatggacatcccccatccgcccctgatgaatgacccctttgtgttagtgggatgctcagcgccaagctccacggtggagaacatgggccaaagcacactctgtatggatggcctgaacccagcaattgttagttgcagccatgttaatggaaatacacaggtaatgaatgacataacagcgagagatgatggcagcaggttagtccttggtttgggtccaacaccgaatttttattctgcagtgtccactggctcaaaacaagctcagagattgtcaggccagagttcaactttcactgattcagggatgctgaggcttggccttcacaccgatggtgggggagcaattcaatgtctgcaagcaccgaatggagcactccattctttaggtattgtcgacgaggcttcgacatctactactgtaaggagcatgggtggttacatgccatccctactctttgctccccgctccaatcctactgccaacgagacacaagtagaaatcccagattctctaaacctcacgcacagcaccagcaacagtcagcatattcaacgtcacctccagttcagccccgaaccttctgcaacgaccgagtcatcatttggtatgagttctgatgttgtcactgcaacaactacatcagagcgtagccattcccgacatcctaagaaatgcaggtttaagggatgttccaaaggtgcaagaggagcatcaggattgtgtattgcccacggaggtgggcagagatgtcataaacctggatgccataaaggtgccgagagcagctctgccatactgcaaagcccacggtggcggtcgtcggtgtgaggagcttggttgtaccaaaagcgcggaaggaaaaacagattattgcatcgctcatggtggaggctgccgctgccaacatcctggctgtcctaaagctgcccggggtaagtctgggcggtgcatcaagcacggtggtgggaagagcggctcggttaagggttgcatcaggagcgctgaggggaaggctgggctgtgcatttctcatggcgg

SEQ ID NO: 279405 - DNA, 543 bp, Zea mays
cccactcgtccggtagaagctaaggcgcgagtgataggagggttttggttctgagaggagcggggcaatggcgggtggtcgtggctcgtcggcggcgaggctagcgctgctactggtggtggtggtggcggcggtggcgggcggcgccgtggcggggggcaaggtggtgcacgtggaggaggcgcaccggcggagcatgctggccaatggcctcggctcggcccctcccatggggtggaacagctggaaccatttccagtgcgacggcaacggcgaggtggtcatcagggagaccgcggacgcgctcgtgtcgaccggactcgccgctctcggctacagatacgtcaacatcgatgattgctgggcagagccacaacgtgacgctaagggcaacctggtggccaacaccaagacgttcccgcacgggatcaaggcgctggcggactacgtccacggcaaggggctcaagctcgggatctactccgacgccgggttccagacctgcgccaaggcccagcccgggtccctctgacacgaggagct

SEQ ID NO: 279406 - DNA, 344 bp, Zea mays
cccgggaagaaaaaccaccaagagagcttgtctccgagggttaggagagagaaagaatgagggatcttcatcgtcgtgtggatagatcatagtcgccgttgttcgggccccggagagtgatcgagggggtccacgggggcaccttgcacgtagtcgttgccttcttggacggtgatatccactagagcgcctccaattgctcaccgaagcaacccagctgcggtcgagacgcatctcaccatcagcatgtacttcaacgcgtgcgattcatggtaaggatccttccacctagtttgccatgttcttcttaacatatactagcatacttcggattgttgtttcat

SEQ ID NO: 279407 - DNA, 819 bp, Zea mays
aactcgaatgctccggtgtgttttgtatttttaaagggacgttgcgctcatggcgatgagtgtcgtaaaaagcacagctatgtatgcctcgtctttgaggcaacaggagagtgcccacaaggatcaagatgcaagcttcatcacccgaagaagaaaagcaaatccaagagaagcaaagtagacaccgtccaaaacaacagtcggggtcggtattttgagacaaacgttggccatggcagtggagcaagaatagtttatttggaggaagatgagagacagaaaccagagcaagtctctggtgaggagtttgctgacttcattgaacttggtgccggtattgaagtccctgaagatgcagacacttcggatgacatacagctgatggaactggacttagggaatctcgaggtgcaggctgacaataatgacgcgataatcaagccacttcggatcatgagaacggcaagagtttgatgagttctttggttggatacagctgcagtgttcctgggtcagggtggtattttacgctatgtttgacgtggcatataggcgctgactggagtttctatttctcgaagactggttctgacgggggcaatcggtttttgcttggttgaaggtttgattttgttcatcttgtacatcttttattaggaaatatattaggaccatatggcagtggtagaggccatgagggttactggctgttaacccgtgttttttcaacattacccagagttgaatgtaacaaacagtgctttacaatatgaaatgaatgaaggtttgcatacaggaaatgaagctttcattttgtgt

SEQ ID NO: 279408 - DNA, 450 bp, Zea mays
agcctgatgacgccgccaagggcgcgcccgccgtcgtctcccagtcggccccggagatcttccgcggcagcaagctgtgccaggggtacgtggtggtgggcacgacggtgggcctgttcctgccgctggcgcacgtgctgggcgggttcgcgcgcggcgacgatgcggcggtgcggtcggcgacgccgcacctgttcctgctgtcgtgccaatcctgacggagaacgtggtggggtcgctgggcgccttctcgccgcccgtcagggcgctggtgccgctgctctacaccgtgcgccgcgtcttcgtcatcctcgactgggcctacgacgcgtgggcctccaccgcgcaggacgccgcctgggtgtggttcggcaggtgcctcgccgccgccaacctgctctacttctccgccaacctcttcgtctttctcatcccgaggttcctgccccg

SEQ ID NO: 279409 - DNA, 303 bp, Zea mays
ctcgagccgcagcgaggcagcagctgcagccggccgcgcccccatctcatctcgggggtcgggacctgattaccccaatccgtttcctcaccaaatacgccacggcggcgcggcgcgctcgcttacccacaatggcgctcaccaccgcctccacggtctcctctccctcccgaatcatccgccgcttctcttcttctcaagactctcgccccccttcctcgctcctacatctcgccccgcgccgaggaaccgggaattccccgcgcgcctgtagctggcaccggctcgttgtgcgccggatgg

SEQ ID NO: 279410 - DNA, 526 bp, Zea mays
  unsure (1)..(526): unsure at all n locations
agcgtcgaaaacccaaatccaaacgtcgccgcaaaccgcgcgatccccaggcccaaagcgccgccgttcatgagcttcctcgccggccgcctcgccgccaaggagggcgcgtacttcctccaggagtcaaagactgccgtcggccgcctcgcggagaagctcccgccctccgcttcggcgcccgggggtgcgtcggcgcagccctcccccgacgtgctaccggagatcctccgccactccgtgcccatcagggggacgccgcccccggccgaagcctccctctccgcgtcctcccgctgggccctcccgccgggcggcggcgaggctgcgggcttgcaccccgacgcgctcaacccgctccgctcctacgtctcgctgccgcaggccaccttcggccccaaaagatggcagcttccgaacgaacaacctaactacttggcgtcaacagcaaatgaaaggcggcgagatcgggccccacctnccttggaccctgagaattgaaagcggaatgctgggtactcacaga

SEQ ID NO: 279411 - DNA, 651 bp, Zea mays
  unsure (1)..(651): unsure at all n locations
tgctgcggcgccggagccgaggaaggagtacccgcccgacctcacgctcccggacctcaagagcgggctcttcagcaccgacgagttccgcatgtacagcttcaaggtgaagccctgctcgcgcgcctactcccacgactggaccgagtgccccttcgtgcaccccggcgagaacgcgcgccgccgcgacccgcgccgcttctcctacagctgcgtcccctgcccggagttccgcaagggcggcgcctgccgcaagggcgacaactgcgagtacgcgcacggcgtcttcgagtgctggctccacccggcgcagtaccggacgcgcctctgcaaggacgaggtcggctgcgcgcgccgcatctgcttcttcgcgcacaagcccgaggagctgcgcgccgtcaacccgtccgcggtctccgtcgggatgcagcccaccgtttcgtcgccgcgctcctcgccgcccaacggcctcgacatgggcgccatgctcaacccggcctggccctcctccccggccgcggtcagcaggctcaagaccgcgctcgccgncggccggcgagctgggacttggacctcgagctgctcgcgctcgaccagtaccagcaaaagctggtcacaaggtgttcgtccccagggcccgctggggaggcg

SEQ ID NO: 279412 - DNA, 611 bp, Zea mays
cccacgcgtccgctgaggtttcacccagatcacgtttgctagtatgtgtagacctatattttgagaatgtcactacacagcagctaacagatataaccattgaatctgaagaggcttctagcagtgtggattctatagaccaaacatcagaaggatattcgggtgtccctactatcgttcctgtggaagggatacattcgttggccccacaacaaatggcaaagttggttcttcaggtccattttcatcaccatatcttgcctctaaagctgtctgtgttttgcaatgggaaaagacatccagcaaaacttcatcctgacattgcttattttgttcggccactacccatggacctaaatactttcctatgcaaggaaaaccaattgaggggaatgtttgagtatgcgaggaggtgcgctttcaaagatcatcttcagaagctaggtcacgaggacagtgcagagcacatcgataagaaccttcaggtggcccagagtgttgcttcaaaaatactgagcaatgctaatattcaccttgtctcaatggatatgccagtaaccttcagtgtcgatgacgcctctggcttgtgttggagattcagcggtgaaatc

SEQ ID NO: 279413 - DNA, 504 bp, Zea mays
ccgaggaatgccttgctgcaggcatggattcctacatatctaagccggtgaacttccagaatataaacgagtgcctgcagcggtacttggtgtctcagtgtctaaccgactattgtaaagtagaaaggtaggctgtgtaggccaggaaagttttgtgggatcacctacgagttcgtttgctgtaaatcgatgcgtaataaattctagcgtatcctgccttgtcgaccattttaccttcaccttctgggagacagagacatactgaatctgacctaaccccaccagtaagatcaagagctaactctgaactttaggatcccatttggttacgaggcatatccctgtatataattgtcacggaggttcttatcctttagcagttagtcttctatctgtatcgtaattgatgagcaacatcggttttatgatgatgtgatggagaagcaaaggtgtaatacagcaataagtgtacatgtattgctggaacatgtatagatcaaacct

SEQ ID NO: 279414 - DNA, 1032 bp, Zea mays
cgtagaaagaatggtaaaatggttgaaggtcagtggttatatcttctttacgggaatcgtgcttccatcaatccggagatacagaaaggaaatttaatccaacacactatcgagaaccaagtttttatactaaggttttcaaagaatgccatacctttgatcaagatgggaattctttcgaactttctctggttacttgcaagtgtattggtgcttatgttaaaaacaagaaaaaccaaaaccagatatgttggctatggcaaaaggtccattctcatcagaagatgggggatttcaaagatttttggacaatgtgcagtacaaagccagtggaatactacgctatgaacgtatctttggagatggctacgtgagtactggtggagctgagactacaaaagaatttgtggagaaactgaatcttaagcctgggcagaaggtgcttgatgttggatgtggaattgggggaggtgacttttatatggctgagaagtatggtacacatgttgttggtattgatctttccataaacatggtatcatttgcacttgagcgtgccattgggcgcaagtgcttagttgagtttgaagttgctgattgcaccacaaagacatacccagacaacacatttgatgtcatatacagccgtgatactatccttcacatacatgacaaaccctccttgttcaaaagtttcttcaagtggctgaagcctgggggaaaggttctaatcagtgactactgcaagagtcctggaaaaccatcagaagagtttgcaacatacattaagcagaggggttatgatctccatgatgtggaggcttatggacagatgctcaagaatgctggtttcagtcatgtcattgctgaagaccgaactgaccagttcctcagtgttttacagaaggagctagctgaatttgaaaagaacaaggacgatttcctgtctgacttcacccaggaggactacgacgatatcgtgaatggatggaaggcaaaactgcagaggagctctgctggtgagcagaggtg

SEQ ID NO: 279415 - DNA, 327 bp, Zea mays
cgcgttcatctcgcccgtacgccgacgctttcgcctggctcgcaccgcccgccggcagtgcctcagtccagatcaagcctccctcttcccacatcgggtcctagttgggctaccgcagccctacgccaggtgccgagcccctcgccgatttcttcgccggcgaagagtgcccaccacatccgcccctgatggacaacgtcgagtctgcccctgactcgccggcgcaggcgccgccgtcatccgcctcttctctccccaaggagcaatcgcaggtggagttggagctgaggctgcttcaggctcttgagtcctaccctccatcaaaac

SEQ ID NO: 279416 - DNA, 364 bp, Zea mays
  unsure (1)..(364): unsure at all n locations
gtggccaancaaatctaccatgcgacgacttgcgatgcgagcatgacacataccctttagctcgtgcttgccgccgtgggcggggcgtcccggacccgcatcgtggtgcttgccgtccctggtgagtccatgagacgtgtgtcactgtcatccggccgttcagcgcggagcccatccggccatcccgttcgtacctaaccggcaccttcttctgcggatcaatccggcaaagccagcgcgcgcgatgcgccggcggtgggacagctgcttctcgggcggcgacgtccgcgtggacggggcgcgtcccccccgaggagccggaggccgaggtcttctccttcgccgagcccctgccgtcgtgggc

SEQ ID NO: 279417 - DNA, 538 bp, Zea mays
caaaaaaaaaaaaaaaaaaaaaaaaaaagggcggccgctcgcgatctaggggagttccactccactctcccataatgaggataggggcaggggcgaacatggctgcgtgctcctccgttccctgctccttccccgcgaacctgaccctcaccgccgaagccccagcggcatcttaagctctcatctccctcggctccctgctacccagtttcgtcggcttcgatcactctctgccgccgcctcgccgccggcgagtcgcctccgcccacgagcctccgtgtccacgtcgcccgccccgtctaaggactacgagttcactgacgggaacggagaggtggagctgagactggacatccaaaagctcggcatagcgagttcaaaagatgttttcgttgatgtcgatgacacatccctactcatcagagccaagtctgacgggacactgaggactttgatgaacgtccaaacactgtttgataggattaagtcttccgagaccatatggttcatcgatgaggaccagttggtggtgaatctg

SEQ ID NO: 279418 - DNA, 789 bp, Zea mays
gtttgtgcatcatcagtacttaatgtcgtcagcgccaacagttgatgaaggatctacatcgcgctcgacgcttatctggaggcatggtgggttcgtttcttaaccaggatgggatttctctggaccaagcgctcccagttaaccctaatcaggttcaagtcccagctccttcagcaccaaaaagttcagctgcctcttcttctgggtttgtccatccacagcagcgcagcagtatcacaaaaatctgttcgcacccaggttgtgcaaaaggagcgaggggttcatctgggcggtgcattgcgcacggtgggggcagaaggtgccagaaaggaggctgcagcaaaggagctgagggaaagaccatgttctgtaaagtccatggaggggggaagcggtgtgaacaccttggatgcaccaaaagtgcggaaggccggactgatttctgcatagcccatggcggcgggcggcgctgcagccatgaagggtgcaagagggcagcacgaggcaaatcgggcctctgtatcaagcacggtggtgggaagaggtgcgaaaagccaaactgcacaaagagcgccgaagggcgttcaggcatgtgcattgcccatggtggcgggcgccgctgccagtacgctggctgcgggaagggagctcagggcagcaccagtttctgcaaagcccacggtggcggcaagagatgcacacgccccgactgctccaagggcgcagagggaagcacggcgttctgcaaagcgcacgggggcggcaagcgatgctcggctgacgggtgca

SEQ ID NO: 279419 - DNA, 454 bp, Zea mays
aacatttctttgcacatatacagctgcttgtatacagaagtttttatttgatggagaggtagaaaaaaatgcaactgagttgaaaaatgttgtttcgtgcgctagttacatgcttgaacaaaagctgcttgaagcatggtgtgctgataagactgctgaagcattaagatgccagaagttgctggaggatgaagaggaagctgctcagaaaaggcaagccgaactgatggaaaggaagcggatgaagaaacttaggcagaaagaacagaggccaaaacacctcatggatgacgacccgacagttcagtcaccccaaatcatggatgatgcgacatgttctactgccattcaaagtgtgaattccatttatgatcctgactgttttgagcaagaagaatcgcagtatcttcaatttccagcactaattactttggaaactgacaatgattttaat

SEQ ID NO: 279420 - DNA, 522 bp, Zea mays
gtctcctgtaaacacccgcccgctagtgccaactgccaaccacctccaattacttcacagcagcgcggcgccgagaagatggcttccccctcgtacaggcttgcggcggcgatcacggccccctctaccggcgagttcctcgtcgtccggcagccgcgcccgccatccccacccgaggaggaagaggattaccggcgcttcgtcgacagcgatctctacgacctcccgtccgcgcccctcgggccactcgagggggcaccccggtcggaggtggccatcggcggcgcggactctgtcgccagccgcctcgacctctcgcgcctcgacgtgtccgccgcccttgatcagatttttcaccaatttggcttgccggctgggatgagtggggagtggaggctcctgaagtatgtggaggaagcagaatttggcccggatgctggcattaacacggtgtacattgtcggatctcttgagttgagattggatgatctgccagagtcatgtaaatggatgtccaaggag

SEQ ID NO: 279421 - DNA, 861 bp, Zea mays
  unsure (1)..(861): unsure at all n locations
gccaccgtttttcaagcgtctcacgacattgctctgatccacttgagaaggaaaaaagtgttagtctgtgttcaatgatcaaggataatgtcnnaaaacatcttacacaagtatgtcttccagtttactttaacgaaccattatcatctcttcaaaaatgctttgaggacttggaatattcttatttgttgcatcgtgcatatgaatgtggcctaaagggggacaatttgatgagaattcttaatgttgctgcatttgcggtttctgggtatgcttcctcggttgggcgcccctgcaaacctttcaatccattgttaggggaaacctatgaagctgattaccctgaaaatggaatccgtttcttttctgaaaaggttagtcatcatccaatggtcatggctcgtcattgtgaaggaaaagggtggaaattttggggagacagcaatgtaaagagcaagttctgggggcaaacaatccagctggatcctgttggtgtgttatctgtagaatttgatgatggagaaattttccaatggagtaaggttacaacaacaattaataacgttatcattggtcaagtttattgtaatcactatggaacgatgagtataactgggaacaggggatattcatgcaagctgatgttcaaacggcaatctttccttgagcgtaaccctcggcaggttgaaggattggttaaggacggtgatggttcgacggtggcaagcctaatgggaaagtgggatgagaggatgtactgcagcgcatcagggcagaatgtgattctgttgtgggagaaaaatgaagctgcgactaatcccactcgctataacttatatcgttcgcaataactctgacgag

SEQ ID NO: 279422 - DNA, 424 bp, Zea mays
catagattttagcatgtgttcaatcctctagtgtgctcgtcacagaacacagtctagagcaccaccgtgcaaacgacagcctgtaggaaaccgtcatggctgccggcggtgccgaccaaagggggaataatgctgcgacgacgacttttgtggtgccagcggtggcgctgagcttggggaagccgatgccgcgggtgggcttcggcacggcaacggcgacgctgggccaagcggagggccgcgccggcgtgacggaggcgatcctccgcgccctggacgctgggtaccgccactttgacaccgtcgcagtctacaacacggatgcctcgctcggggacgcggtcgttgaagccgtgcgcgccgggactgtcgtctcccgtgacgatctctacgtcacgtccaagctctggatcaccgactcgca

SEQ ID NO: 279423 - DNA, 593 bp, Zea mays
gcagcttatcgcatcccatagcggcgccgcgccaagcacaacccccacccgccacaggcgggggcgcatgtgagcggtcgccgcggccgggagaccagaggaggggaggactacgtgcatttcgctgtgccgccgccgcggggttcgtgcgcgagcgacatccggcggggcggggcggggggcctgagatggaggctagcgcggggctggtggccggctcgcataaccggaacgagctggtggtgatccgccgcgaccgcgagtcgggagccgcgggcggcggcgcggcgcgccgggcggaggcgccgtgccagatatgcggcgacgaggtcggggtgggcttcgacggggagcccttcgtggcgtgcaacgagtgcgccttccccgtctgccgcgcctgctacgagtacgagcgccgcgagggctcgcaggcgtgcccgcagtgcaggacccgctacaagcgcctcaagggctgcccgcgggtggccggcgacgaggaggaggacggcgtcgacgacctggagggcgagttcggcctgcaggacggcgccgcccacgaggacgacccgcagtacgtcgccgagtccatgctc

SEQ ID NO: 279424 - DNA, 880 bp, Zea mays
  unsure (1)..(880): unsure at all n locations
tgcatgttactgctgaagcaattcaatggtgngatgtgtgcagtaggacaaactggcacgaaagagtatgaaacattgcanacattgtactgtataaccacagaagcagtatgatggctatggatgtttctgactgtgcagatagcgagcattcggattccactgcatcaaatgatggtatctctgggaaagagattatgagagtccgagaaaggtcaagctggtatctatctaatgcagaagtacagataaactcatggcggattcccatctggcagaaatctaagatttgcttctatgtgatggaccatcctgctgcagagtcggtcgaatcagttagcagtggtggagaaattgagatcgagaagttacctcttcatgaggttgagatcaggagaagggaattgctccctgtattcaagcagttcctatattctgagcgacattctagtgataggaacgttgcaaatggaaggagtaatgcaaatggaggttttcagaatgtcttgtccgtcatcaatgatgtacaatatggctctgtaaaggataatggtgaatatgaaaccaaatcggtggctcctttgtctgggttttacactgatacgagggaaacggttaacacaaatggtctagctacgcaaacattctctggacctggctcagctgttaatcttcagcaagtggggaagcgcaattctattgaatctcctaatgctgcaattttggctggcaaggcagagaatgatagcaatggctatatatccacgccacctgaaacaaatgcgtctatcagatcattgagcagctattctctcttggatggacatgtggacggaatgctgtctccaaatagcgcatcacacaagccagaaacaacaaa

SEQ ID NO: 279425 - DNA, 413 bp, Zea mays
ggacgcggcagttagcagtggtggtggagaaattgagattgagaagttacctcttcacgaggttgagatcaggagaagggaattgctccctgtattcaagcagttccaatattctgatcgacattccagtgataggaatattgcaaatggaggctttcagaatgccttgtcccacatcagtaatgcacagaatagctctgtaaaggataatggtgaatatgaaaccaaaccggtggctttgtctgggttttacgcagacacgaggaaaacagctaacacaaatggtctagctaggcaaacattctctggacctggctcagctgttaatcttcagcaagtggggaagtgcaattctattgaatcttttaacactgcaattgtgtctggcaaaacagagaatgggaacaatggct

SEQ ID NO: 279426 - DNA, 530 bp, Zea mays
cgcacggcacctctaccattctccccacctctccctcgttccccttcgaaccaaaacccaaacccaaacaccaccatcaccaccacctccaccactcatacagcggcagagcgagagccgagaggcgagccgcattgccaaaccgggcgagccgcagtgctgcaaccgcccaccgcgcacgcgctcggggaggcgccgcccgccaccctacgcgcgagcccagcagcgggaggaggaggcgagattccaaagggaaaaaaaggcggcgggagcaaaaggggaggcgaggtgtggaggggggaaaagcggcagtgggcagctgggagggagtccagagtccagtccagtccagtccaaaccagccggaccacggccgacgcggcagggcagctgtgactggctggaaggcaagtgtgctcggcaagcgacgcacgccacgccaccgacaccggcaccggcacccccgcccgcggtgatcggacccgcgcgccagatccgacaccccggcccgaatcgcggcggactccagc

SEQ ID NO: 279427 - DNA, 465 bp, Zea mays
gtccggaaaagcccttatttttactgttgtctatggctctactttctgacatatagcaaggcacaagcgactacgtgtaaaaaactcggcctgcacgggtaagtcagcccccagcattatattaagaaaaatactttctcacgcacgtcgagaaaaccccggaatccctgccaaacccatacacagtgtcaccgtagcccatgtgagaacacgacatcgaccgggaccaggccttagacatgtgctttggcgtgggacgaggacatttttttaaccacaacctaaaattcgctcccacgcggagtcgaactcaggacctgagaagtgctactcaaaccacctaagcaactcagctagaggccctttcgcaacaacagctacttatcacttaccatgttggcatggtgtggttggcatgttattccctttcttatgtgtcatcctttaattattccctcccctatc

SEQ ID NO: 279428 - DNA, 392 bp, Zea mays
  unsure (1)..(392): unsure at all n locations
cttaaaggataccgattcctgtttccattttttgaagaaggcatctntcagcgtctagcggatctttggcttgagtcagaaatcacatcaggttctggtagcatgtcaaccacctcagatgcgtcatcgtcatcttcaacatcttcatcatcgaaaaagggcgcaaagacggaatttgaaaaaagactcggggagttcttcaagtaccaaattgaaacacattcttctgtcgcttatggagatgggtttcgagcaggcatcgcgagccattgagcggtacggcttgagaaacacccttcatcatatcaagatgacggggtctttttcatgcttaagctgctttttttttaccttggctttggatatgggtatacatatctttttttgaaaac

SEQ ID NO: 279429 - DNA, 446 bp, Zea mays
accgagacagcggacttccgtaccgcgcgccttcgccaccgccatctatcctggaagcctgctgctctgcacgcaaccacgccggcccccgtcaaccggtcgccatctctcctggactcctgctctccacgcaacgacgggcagccccgcctcagctcctcaccctcctcgacaactctccctccggccggtcggcccccacgactccccggggcccgtcgtccgcacgggcacgggctgcacggtggtgggagcagagccagagcagccgaggaggcacatctactccgggctccggacctccctcggcctcaacccctctggagtctggattctgccatttcataccatctccgcttcgccactgccagcgcgctggccctggagcggaggcagaaggggtgactacaaggagcttttcgtatggcactgcctaggacggctgc

SEQ ID NO: 279430 - DNA, 544 bp, Zea mays
gtcaggactcaggacgtcaggtcacacccgtttagccaacgcctccaccgctccacggcgacggcggctcctccacggctccagctccaggccccagctcaccctccccctcccctcgaggcggaccgcccccacgtcgccggcgatcgaatcggcggccgtagcctcgcgcttccggcgtcggagagtgcgcccgtccggcggaggagatggcgctgcggcacctcgtcacgggccagaacaactgcgtgccggacggcgcctcgtcgtccaaccccctcaacgccctcgccaacgccttcctcggccagtcctccaaggcgcagtcaataaaggaacttcctggttctgttaatgtcccatctacatctgactttagcgtgtctgctcccttgtcaaacatccctggttcagaaaataagttcaaacaagaccagcgacctcttgcacggggtgctgactttattcgaggtggtcctgctaatgattggattgagtcttttcggcctccgagggttcctcaacttggtgtagaagcacaatt

SEQ ID NO: 279431 - DNA, 448 bp, Zea mays
ccctccgcgagctccctacccctcgcgctcacgccggcgacaagtttccgccagagttaggtagatcaggtgctgcgccggcagccgtggaagggatggaggacctcgcgagttcgcgtggcggcgggggatgcggtggtcttgatgcgcagatcgaacagctcatggagtgccgcccgctcccagagacggaggttaaaacactgtgtgagaaggccaaggagatattaatggaggaaagcaatgttcagccagttaaaagccctgtgacgatttgtggtgatattcatggccaattccatgatcttttagaacttttccggattggtgggaagtgtccagatacaaattatttgtttatgggtgattatgtggatcgtggctattactctgttgagacagtaacgcttttagttgcacttaaggtgcggtacccgcaacgcattac

SEQ ID NO: 279432 - DNA, 461 bp, Zea mays
  unsure (1)..(461): unsure at all n locations
gcgccgttatcnaatatttgtcatccgttttctcttttataaactaaaacacgataaaggaagaggtaaagaacggagagagtagtggtcctttactttcatgcagctagaattctaacgccctcctgcatccttgtgcagagaatggcgcggtgatgattcagtttggccatcagatgcctgattacgactccccggctacccagtcaaccagtgagacgagccatcaagaagcgtctggaatgagcgaagggagcctcaacgagcataataatgaccattcaggcaaccttgatgggtactcgaagagtgacgaaaacaagatgatgtcagcgttatccctgggcaatccggaaacagcttacgcacataatccgaagcctgaccgtactcagtccttcgccatatcatacccatatgccgatccatactacggtggcgcggtggcagcagcttatggc

SEQ ID NO: 279433 - DNA, 299 bp, Zea mays
gatcgggtcaggtcagtgctccgtgttgcgttttcttaagaacacgaaaaaaaaagaggggagagtttctttcgggtcctctttttctttgattgtcgaaaggccgctcctttaggagatttgcgcgcttctcgtcgagattagccgccggtgctcggatcgatctgtttgcggtggaggaattttgaggccaagaagagagttggaatcggatcgggagctcttgtggtcacagggtgcgaaaaaagcgagtgatttttgggaggatttcttgttgggaaaaatcggttgttcagcgg

SEQ ID NO: 279434 - DNA, 617 bp, Zea mays
ggaataaccgggtttacctacgcgtccttttcttacacctggcggccgcacgtccgcccacgcggcctcagttgtccagctccaccttgtcgactcctccccgcacaagacaaaaaaaccctcgccttggaggcgcgtgagcccgacacccagagcgaaaaaaagcgaggggtctgaccgccggcgatggcgtccatctccggagcggcggcggcgccatcttccgctgcgtgccggctgcggctgcgtaggcacctcctgctgcggccctcgcacctccgcctccgcgcgccccactccatcgccgacctctcccgctcctccagctcctctagttccgccccgacccgggcccagccgctgggctccaggccggagaacggcggcggcttccgcgcggtggagaaggacccgatcaagctgcgggagcgctacgtcgagtggctctaccagcacaaggagctcggcctcttcttcgacgtcagccggatggggttcacggaggacttcctgcgccagatggagccgcggatgcagctggccttcgccgccattgcgggagctcgagaagggcgccatctccaacccggtctaggctcgcatggttggccactact

SEQ ID NO: 279435 - DNA, 569 bp, Zea mays
atcatgcactagctgactagcatctgtgtaatcggtgaccgctcttgacttgttggctcctcgctcccacggtagctaaagctagctaggtgggtggtagcaccaccatggcctcgcccaagcattctcatcgccatcatcgtgcggcggcgacgaagcatcgtcggccgctggcgctgcggcgtgcgatgctgcattcgtgcgtgtgcttcctggtgggtctcgtgaccggcctggccccttccgactggacggacgccgcctcgcgcgcggccgtgcacgcgaacggcgcggccacggcgcaggtgttccgcgcgctgcacgccatgaaccagacggcggcggcgggggcactgggccagctgctggcgctgcagcactaccagcagcagccagtggtggagaaggagaaggagaaggagaagcctctggatctggtggtggtggtgacgactacgacgacgtctacggggctgttcgagcgcgagcggcggtcggcgggtctgacgcgcacggcgcacgcgctgcgtctggtgtcccctcccctggtgtggctggtggtggaggcc

SEQ ID NO: 279436 - DNA, 717 bp, Zea mays
actcgccgtcgccaaccatcgccgcctcgcgtccggacccgccgttcctccgaggaaatgggtgcactgcaaccctcattttcaccagcaatgactttgaagagtagctgcagcgccctgaagttcccaaaaactgcactgttatctggttttggtggcattccacgccttcaagatgcgcaagacaggaacactagcgtcgcttatttgatccccaaggctgcttcagtgactgaccagtcaatagcagagccaccaaaaaccaagcaaaataggcacacagtcgacccaacagctccagaatttctgccactcccatcttttgaagaatgctttccaaggagtaccaaagaatcaagtgaaatcatccacgaggaatcaggtcatgtcctcaaggttccattccggagagtccatttgactggagatcagaagcactttgatacatatgacaccagcggtcctcaaaatataagcccaaggattggactcccaaagataaggaaggaatggattgataggagggaaaagctgggtagtcctcggtacacacaaatgtattatgctaaacagggaattgtaacagaggagatgttatactgtgccagccgtgagaaccttagtcctgaatttgttcggacagaagttgcccgtggacgagccataattccttccaacaagaggcacctggaattggaacccatgattgttggaaga

SEQ ID NO: 279437 - DNA, 522 bp, Zea mays
cggacgcgtgggcggtccacaaagacaattatctcgttgtctgccggtgtcagcttcctccagatcaagacagcggcaggtagagcagagaagccagctagctagcgagctgaggagagatggaagcgcagaacggctacagcccgcttcttgccggggacgaccacgaggcggcggcggcggcgatccacgccaccggcggcgctggtgatgaaggcgacgacgtcaagctcaggctgctcgggtacaagcagcagctcaagcgcgacctctcgtaagttctttacccttaccatccctgctcgatcgatcagctctcgcgcctctgttcgtcggaacaaacacaacatggtccgcgctgtctctgcatgttactcgcatcgcgcagggtggtagccaacttctccgtgagcttctccatcgtgtcggtggtaacgggcgtgacgacgctgttcgggacgggcctccagttcggcgggccggcgacgatggtgtacggctggcccatcgccggcgccttca

SEQ ID NO: 279438 - DNA, 1153 bp, Zea mays
tcttcacgcgtccgcgacgcgcacgcgcagagctccgtaccggcccagagctccgcatccgcaccggccgccggcggcgtggatggggaagctctccgccctgaagcgggaagcggtcggagtggactaggcgctcggtgacttcctagtttagaagcggtaggtggaggcgatgcggggcggggcgatgaaggccctgcggcgatccagcacctcctcggcgccatcgccaagggtgccgtcttccccgcggtcttattcgtggatccaccgccggtcgcttctcgttacctcgccggcctcgccggcgacgtcctctgtgtctgaatcggcgaatttgcccgcggagggttcggattcagcgccagcgtcagtggtggcagcttcctcgtcgccctcgctggctgcttcgtctccgaacatggaatgtacattccattctaggggtggaatcaaatctccgtggtctcgaagataaaggaaacgggcgcctacttgtcaacactggattcgtctattctcagcgtacgggaagcttcgtgatgggggaagaaagtttctaaagaaggttcgcagtgggggaattgagccaggcataagggctgaagtttggccatttctgcttggagtctatgatttgaacagctctgaggaggacaggaataccatcaagataaagaaaaggaaagaatatgaaaaattgaggcgacagtgccaccatgttctgcattgcaatagaggaaatggtctgaatgttataaatgagttcctgaatgaggacttctctgatggggctgaaggttcagagtcaccatattccaatggtgctagtaagagggcttgtgtgatgcccagagaattgaaatctttaggcagtaaggcagaagagtcagagagttctaactgggatgttgtggaatccatagatgaagatacaagtgagttaacttctgttgatccatgcatgatagaatcagaatcttctgaatctgagtcttcatatgaagaggaccctgatagaacacctgtctctaccaatatggaagagagctgtgatcccaaacctagatttggccggactgctttagcaaagtcagacctttttcttttagacaggactcctgaggattttaccacatggaagcgcattata

SEQ ID NO: 279439 - DNA, 665 bp, Zea mays
cagggaaggaggccagaatcccccgtcgacgcgcacgcgccgtcgcgcagagctccgcgtgcgcatcggccaccgcccacctgcgccggccgccggcggcgtggatggggaagctcgccgccctgaagcgggaagcggtcggggtggactaggtgctcggcgaattcctagtttagactttagaagcagtaggtggaggtgatgcggggcggagcgatgaaggctctgcggcgatccagcacctcctcgccgccgtcttccccgcattttcattcgtggatccaccgccggtacctcctcgttacctcgtcggcgacgtcctctttgtctgcatcggcgaattcggccgcggagggttcggattcagcgccagcgtcagtggtggcagcttcctcgtcgccctcgctggctccttcgtctccgaacatggaatggggtggaattaaatctccgtggtctcgaagaaaaaggaaacgggcgcttacttgtcaacactggaatcgtctattttcagcaaatgggaagcttcgtgatgggggaagaaagtttctaaagaaggttcgcagtggggggattgaaccgggcataagggctgaagtttggccatttctgcttggagtctatgatttgaacagctctgaagaggacaggaatactatcaagat

SEQ ID NO: 279440 - DNA, 562 bp, Zea mays
gtagccacattcatccatggaggcgctctacttgctggcctccctggccgcgactgtcgtcacctccgccttccactcgctcctgctgttcctccgcctcctcctccgctacccgcgccgcgctgcccctaccgatgatgggcccgccgcggcggcgcggctctacgagggccgggtccggcacgcgcgacggcgcccggcggcgcacaccttcgagtaccccgcgcgctacgccctcgtcgacctcgaccgactgccgctccccggccacctctccgccgacgatgcccgccgcgtcgcctccacctccggccccgtgcacctcttgacggtacccgagagcgtggggtacgagcagaacccgctgagcatttactactgctacgattctgcaggacaggggcaagatggagagctcagaacgtgcattgccgaggtcacaaacaccccctgggcagagagagtgatgtttaccttccaaccgggctctgatctcattgcgaagcccttgcatgtcagcccctttatggatatgctcagcaactggagtattcgcgctgat

SEQ ID NO: 279441 - DNA, 491 bp, Zea mays
  unsure (1)..(491): unsure at all n locations
actcgcgtgcgctcgcatctgggcaaccgaacacgagccgtcgtgtctactcagtcccagctgccaaggtcttcgtcgcctcgtcgggctcgggtcctttgccggcgacgagcgcgtgcacaccagaagaatacagtggaagtggtatgcggttgtaaaacgatttcgattattccaagcggccggcgatggctcggagcccctgcgacctccgcctccttctcctcgctgcagctgcagctttcatctacatccaagtgcgcctctttgctactcagtcccattatgcggaccgtcttgcggaagcagaaagatctgaaaatcaatgcaccagtcaattgaagtccttgatcgatcaagtcagcatgcagcaggagaagattgtagcattggaagagataaaggtacggcaagatgaagaacgtgcacatctgaggattntgataaaggatcttgaaaaaaggagtgtgcagaagctactagacaagaat

SEQ ID NO: 279442 - DNA, 445 bp, Zea mays
agtttctgctgttttgtttaatcaaatgcgtgtcatggcctctacctgagctgcgaccttgtgacagacttgaacttgtgtgaagttcaaagcaagagtccttgactacaaaaagacttacataaattaataagtcaaaacaagaatggaaagggtctaaatactcattagtaatgttttaagacaaagtcttgctttcagcttccaggggttaattttattttttgttttaaattgataattgcgatatggttgatctatattgcgttcaaactgtggagctttcatgtttactggaagtagtcttaaaatattttttacttagtcaccaccacttttgatactgtggtggcatcaaaccagcaactatttagaagtgttacacgacttccttcttgagtattgcgagctgattcagacgagactgaaagcatatgaacatatt

SEQ ID NO: 279443 - DNA, 425 bp, Zea mays
accgtatccattggaagacaggaaccagggggttttgctgctgttctttggaggagaagagaaatgggaggcttgctcttgccgcatcaccgaacctttccaaattctttgcaagcttccatcccgggacctctctctcttcacaaaggcgaccgcaaaaaccttcattacttggcacctgatgtgcacctcttctgttccctgcggcaaggctttccacgctcatcttggtcggccgtcatcagatcagaagccagcggcgacgcggtggtggcgtcgccaggcacggtcatcaagcgtagcaaggaggagctcatcaccttcttcagagacatacagacatccattgccgagtgctcgcgtaaagcttccaagaggacgaggaagcagccgctgtccgtccaagagtcgcagagggagagcag

SEQ ID NO: 279444 - DNA, 574 bp, Zea mays
ggggtatctgcattgtcaaatttacaacatgtgcaatcaacacatgttactaccaacttgaaggagcagccctgcaaatcaactggtgggactggctgtcctgagctgcctactgtaaaagaggagaaaagcagcagttcaagccaatcgccgaacaacagccagtcaatatctagtgagccatcgaaggatgcaagaagttcaactgctgcttctggtggtgctagtaaaacttctggaagctcttcacggagccatcgaagggcaaacaatggtcttgtctcagggaacctgaaggaagcttctgtaggaagatctgtctcccttgatcgatcattgctgcaggataagtcatcccaaactggaacagcttctgaaaaaggacctgatatgccacttgatcatggaaataatcatagatttattgttcgctttccaaatataggtcgtagtcctgctagaagtgcaagtgctggatcgtttgatgacccatctgtaactgggggtagagcttcatctcctatggttgtggataggcatgatcagactgagcgcaaggtgacagggaagactg

SEQ ID NO: 279445 - DNA, 458 bp, Zea mays
cgcttctataataggataagctccctgtgcaagcaaaagcccacagaacgagtgaggccaggcgacttcatactgctcgcctcgccgtctttcccccaatctgttgctcctccgggctgcgggcgatcgccgtaccccggccgccgcagggaaccccctcgccatggccttgcaggggaagaagctcatcaacaaccccgacgatgtggtgacggagttcatcgaagggttggtggagacttacccgggtctgcagtacctcgacgggttccctcagattaaggtcgttcttcgtgctgatgtcgagcgcggttcctatgacaaagttgcagtcatctcgggtggtggaagtggccatgaaccttcccatgctggatttgttgggcccgggatgttgacagctgctgtttctggagatgttttcgcctctccacctgttgattctattttagctgcta

SEQ ID NO: 279446 - DNA, 648 bp, Zea mays
ctggcacagaggaaaattggctacggtacaaaacaccgaggcatcgatggactcttccaccagctgacagctatgatttcccctgctcacctcgccttcgccgccgccttcctcctcgtcgtccggtcgtcggcgcctggcgctgctgccgcccgcccgatcttcgatggcaagccatccccctccgaggccaccgccactgcgaggtggctcgccgcccagaacacgtggggtgtcctcagcacaatatcaagtgacttaagtggagctccatttgggtattccttcttgtctcacttctgcaaacagctggcatatactcttttctgactggtgaacttgattcatggcttcttttatgtatagcaatgtagtttcatatagtgatggagtaccaggcgagggccgtggaataccctacttttatctgacaactctggatcccagtgcaagagatgcactggaagatgaaaggacctcttttacccttagtgagttccctctgggaacttgtggggaaatagatcctgaaaaccccacttgtgcaaaacttgcccttaatggaaaggtactaaaaattacatccatgataagatgatcgatcactcgccgtttgtatgcatttagcctatttgtttagttgtgttt

SEQ ID NO: 279447 - DNA, 447 bp, Zea mays
  unsure (1)..(447): unsure at all n locations
cttccaccagctgacagctatgatttcccctgctcacctcgccttcgccgccgccttcctcctcgtcgtccggtcgtcggcgcctggcgctgctgccgcccgcccgatacttcgatggcaagccatccccctccgaggccaccgccactgcgaggtggctcgccgcccagaacacgtggggtgtcctcagcacaatatcaagtgacttaagtggagctccatttggcaatgtagtttcatatagtgatggagtaccaggcgagggccgtggaataccctacttttatctgacaactctggatcccagtgcaagagatgcactggaagatgaaaggacctcttttacccttagtgagttccctctgggaacttgtggggaaatagatcctganaaccccacttgtgcaaaacttactcttaatgggaagttgaagatgggtgaccctc

SEQ ID NO: 279448 - DNA, 418 bp, Zea mays
gggtgatctgaaggaggaggaggcggcggctctccaaactttagcgacatggcaatgcggttggcggctgcggccacgttcgtgcggcgcctggcgccggcgcgcccaccagtacgcatcctggcggcggcatctacggcggaagcggaggcagtgacgtgcgggcgcggggacaagaaaaccaagcgcgggaagcggttcaagggctccttcggcaacgcacggcccaagcgggagaagaagattgagcgcatcaaggaccgcgtcgaggtgccccgctccacacccctgggcccctctactttaagcttatctgagatggagactccccccacattcctttttcatccttggggaacccgcgcgcactggggttgagagggtcaccttctacaaccaggaagacttcgttaccaac

SEQ ID NO: 279449 - DNA, 276 bp, Zea mays
cccaggcgcccaccagtacctatcttggcggcagcatctacggccgaggcggctgtgacgtccggccgcggggacagagaaaaccaagcgcgggaagcggttcaagggctcctacggcaacgcccgaccgaagcgtgagaagaagattgagcgcatcaaggaccgcgtcgaggtgccccgttccactccgtgggcccctccccttcaagcttatctgagcgcctcccctcggtccgccggggggcccttggggttgctgcgaagtagcagcaactg

SEQ ID NO: 279450 - DNA, 510 bp, Zea mays
gtaaaagccgccgcctccaacccttgtaaaagtttcttggatagtccgtagccgcttgccctgttcgcatcttcgcgcgtggcgcacaccgctccagctctccttcgacgggcacggccgagccgccttcgtcttggccgcagcggtgcgcgctctccatggcgtcctaattagcctagccgcaacgccgcgcccgtgcctgcggcatggatgaaccccttcttggcaatggtcttaagaccagcgggaaaagagagagcctggtagtggccgaggtcagaaaacagatgtaccttgctgggccactcatcgctgcatggatcctacagaacattgtccagatgatatctatcatgtttgtcggtcacctcggtgagcttgccctctccagtgcctccatcgccacctcctttgcaggcgttactggcttcagcttattgtctggcatggcgagcagctgggacacactgtgtgggcaatcgttcggggcaaagcagtactatcttcttg

SEQ ID NO: 279451 - DNA, 472 bp, Zea mays
gggagagagatgctgcaggtggaggaggcgctggcggcggtgctgtccgcggcggcgggccacgcggagccgcacgccgtgccgctgcagggcgcgctcgggctcgtcctcgcggaggacgtctgcgcgcccgatccgctccctcccttccgcgcctccatcaaggacggatacgccgtcgtggcctccgatgggccaggggagtatcctgtggtcacggagtcgagggcgggcgacgacgccctcggcgtggtcgtcgtccccggcacggtcgcctacgtcaccaccggagggccggttcccgatggcgccgatgccgtcgtgcaggtggaggacaccgagcagctccctggcggagcggatgggtccaagagggttaggattcttgcgcgggcctcccaaggacaggacatccgcagtgtgggatgtgacatagagaaggattcgattgtgctcaagtctggtgagcata

SEQ ID NO: 279452 - DNA, 1083 bp, Zea mays
tcctagtgacactccgtattcagttcgataaggtggatgttatcataacatcatatgatattatacggaaggatattgatcttcttggaaatatcactcggaactattgtgttctggatgaagggcatataataaaaaactcaaggtctaaaataacgtttgctgtgaaacagctgaaagcacaacaccgtcttatcttgagtggcacacctattcagaataatgtgttggagttatggtctttatttgacttccttatgcctgggtttcttggaacagaaaaacaattccaagctgcatatggaaaacccttgctagctgccaaagattctaaatgttcagcaaaggatgctgaagctggtattcttgcaatggaggcactgcataagcaggtcatgccgtttctactgagaagaacaaaggatgaagttttatctgatcttccagagaagataatccaggatagatattgtgatctcagtctattgcagctcaaactttatgacaaattttccagctccaatgcaaaagacgagatttcaactatagtaaaagcaaatgaactggaggaatctgcacctcaaccaaaggcaactcggcatgtgtttcaggcattgcagtacctattaaaactatgcagccatcccttgcttgtaactggggagaaccccccaaatcatcttgtggatcttctgaatgaaataggtctgggatctggcagtgagcttcatgagcttcaccactcacctaagcttgttgctcttcaagaaatacttcaagaatgtggtatagggtcagaaatatctagtcctgatgcttctacagctgttgggcaacacagagttttgatttttgctcagcataaggcttttcttgacatcatagagaaggacctgtttcaatctcatatgagaagtgtcacatatttgcggctggatggctctgttgatccagagaagagatttgaaatcgttaaagcattcaattcagacccaaccattgatgtacttctgctaacaacccatgtcggtgggcttggcttgaacttgacatctgccgacacattggtgttcgtggaacatg

SEQ ID NO: 279453 - DNA, 329 bp, Zea mays
cccacgcgtccgcccacgcgtccgcccacgcgtccgcccacgcgtccgcacaggccctctccgatactcttccttcctcggtccaccttttttttcccggccctctatctccttagctgccaagaacacgctgttcgatcgtctcgtgctagcgtggtagtctggaagcgtctctttttttttcttcttcctgttcgatccagttctacccgtccaatccaatccaagctcctcccttcaccccaaagggacgagagagagagagagaggtcctctatggccgggcctgctgtccaccctcgtcacggcagccggccggcgctctgaac

SEQ ID NO: 279454 - DNA, 419 bp, Zea mays
cccaaacggccgtttcctcctcccgttgtcagcttcgcttcgcctccggagtctggcatgcgcgtcgcgagtcgccaaaccaaacccaccgcccttataaagacaccttcccctttcccgtcgccctcctctgccctgctcgagctctccttccgcgctccctacccacaagccttttccgcaggtgcgccgcctctgcgaggtggggtgactccgtgaatgggtgacctgggaggaggagactggcgggaggcggtggccgagaaggggttggcggaagccgacggcgggcccgaccatctggtgatcatggtccacgggatcgtcgggagcacagcagattggaaggttggagctgagcagtttggtaaactgctctcagacaaaattatagttcattgtagcaaccgcaacatgca

SEQ ID NO: 279455 - DNA, 782 bp, Zea mays
gaatcagcaaagactaattgaagcggatgcatcaaatgcttcacttaatcagcctcgcattttcgctgtatcttctgataataaagatatagagcgtgaatgtcctagcccaactccaaggtctgaatgcaaggaatctcttatgaagaactcagtattaacatcagcggcgcctgaaattcttgtaagatcttctgcatccgcttctgatacatgcaaaatggaggagtttgtgaatcagcaaagaccaattgaagtggatgcatcgaatgcttcacttaatcagcctcctcgttgtcacattttcactgcttcttccaataatcaagatattgagcgtgaatgtcctagctcaactccaaggtctgacagtaaggaaccttttgtggacaacttagtgttaacatcagcagtgcctggaaatctactgacaagttctgcagttgcctctgatacatgcaagatggagatcttcaataagaaaataacacttgaagcagatgcatcaaatgctccacttaatcagcctcctctctctagcgttttcgcttcatcttctggtgatgaccaagataatgtgtatggacgtcctagtccaaatccaagacctgagggtgagcagccgctcatgggtaactcagggttaatatcaacagtgcctcgaaatctaacttctacttctgcatctgcttccgacatatgcaaaatggagatcttgaatgagaaaagaacacttgaagcaaacccatcaaatggtttgattactcaatctcctcaaccca

SEQ ID NO: 279456 - DNA, 446 bp, Zea mays
gaccagacgcaacacgacggcgacggccatggcttcgccggacctcgccgccggcgacggcagctacgactttcaccttcgctctctctccgcggcctcacgggactccgctgcggcctccgaccccgcctctgaccccaacctcctccaatctgttaggacggtgtgcgagatgtgccgaacggcgaacgaagcgaaggacgagatcgtgccgcgggcgttccccgtgatgggcaagctatttcagcgatgcgccgccgctcccacgcaggccgttgcctccaccggcgtgctgctcctcaccattttgcaattcttcttggattttggggaggctgttttgcatgatgctgatggtagcttgaaaaccttcttccgctcttgcttaaggagtttgcagatcctattggtgcagagcgcacagttgaattccttgtaacaaacaa

SEQ ID NO: 279457 - DNA, 732 bp, Zea mays
gaggcagttggctatgctcttactgcaccagcaggtcaaatggatctctctctgtgggagcggttctatttgcagggcatagattcactgatgaccctgtacgagctggattactggcctccccaagacaaggaagtgaaccagcgtagcctgacactgcccgccgtggggctgctccagggctgcgttggactcaggaagctcttcgtccatggcaccacgcacgagcatttcctgacctttttcttgaaggtgccaaatctgagggacatgcagttacgggaggactactatcccgcaccagagagtgatatgatgaacacagaaatgcgagccgagtcttggctccggttcgaggtgcagctgaacaacaggctaattgaggattaacggtgaatttggtgagctgtgagagcatcagatgaatacagagaggtgctgatttacttgaaccaagtggagttgatgccggggtggtgctgtgcgatggatgatcacggaagtagcaagggtagctgccgtgcttgtgtatccgacaattatcggtgatctttactagttgtttttccttttaaaaataagagtgtatgataagggagttgatgcagaattcagatatttgcatgagtttggacgataaactagaatcgagagaattttgcagggatgctttttttccctcccatttttgagctgagtccagttgaacaccgaccggattaagtggcaatt

SEQ ID NO: 279458 - DNA, 1214 bp, Zea mays
cccacgcgtccgatccaaataccagtggagacaaagatgtgacttcaggtgacaaatctcagcatggatcttcagaattacctcctagagctgaattgattggcaacaagcaaatggcagtagaaggctacaaggcgcaaagtgagatggtgatcgacagcctggacaggttaattacatcctgggaagagcagaaagaatctgtgattgttgaaggagtgcatctaagccttaactttgtgatgggattaatgaagaaacatccttccataataccatttatggtatacattacaaatgaggataaacacatggaacgatttgctgtacgtgcaaagtacatgactctagacccagcaaagaacagatacatcaaatacattcgaaatattagagctatccaggaatacctatgcaaccgagctgacaagcatcttgtgccgaagatcaacaataccaatgttgaccagagtgtggctgctatacatgcaacagtcttcagctgtcttcgcaggcgagcagccggggagcaactgtatgacctcaacacaaacactgttgctgtagtggatgaggaatacaggaaccagcgtgcagctaacaccttgggttctaagggcatgtttcagttgatccaaaggaaggggtcttcaaggaatctgatggcacttcttaacaccgacggttcagtcaccaaagcttggcatgtaagtgcaagtgatggcaatgggaatcttaatggtatcacaaacaacaagaagtctcctgaaaatcctatgctggatccctcacaaatcgggaaggcagaagccgtcaatctccagtttggtccttttgggatcagtgcctggatgagtgacacgggtggaaccagccatactgggagtgtggaagacctgaggcctgatagtgtggagactggtggtagaaattattcgtcgtgctgcagttcgccaaagatgtcagattccacctcgaaggagcttatggaggactactcagtctatggcagtgacgaagaagctgacgaccctcgtgatgctgaaactgatgatgacctaactgatgaagaaagagacatgcacgagatagatgcaggctctgtagacgagcactcaaccaagtcggatgaggctaactaggacttagccatgcgtgatgtgatggagaatggtgactggtctgacgacgaccaagctgtgggcaaaaccaag

SEQ ID NO: 279459 - DNA, 598 bp, Zea mays
tttcccacgcgtccgcccacgcgtacgcccacgcgtccgcgcgttcgtgtacgtttatattatttttttataagggagcaagagggctcggcggcagcggcagcggcgacggcgaccgcgacggcagtggcagtggcagtggcaggctgtcagccgtccctatcttgtgtgtcaagcgcgaactccctatctcgtgtgtcaagcgcgttcgcgtgcgttctaggcacaggcagccgaggcgagccccttccgctcagtggccgccgccggaccgtggacgcagctagcccatcagcccatggcagggacggacgtcgcaggctccgcacgcggctccgatgccgcgctcggcaagacgggcgaaccacccgccgcggcgcgctctggcgcagccaagaaggtggctctcgctctgctagcctccttctcggcgctgctgtacagccagattcagccgccgccgtctaagatccccggcacgccgggcgggcctccggtcacggcgcccagaaccaggctcaaggacggccggcacttggcgtacctggaatccggcgtcccaaaggagaaggccaagtacaagatcattttcgttcac

SEQ ID NO: 279460 - DNA, 607 bp, Zea mays
gctattttgtatgttcaaaatcaaaagatggatagagatgatggaggtttcatgaaatttccgtcaaggtatacagttgctaagagcaaacaagaaacaacacctgaaacagctggtttggatctgtatgatggaaggtggcttcctggtagtggccgtaggggtcgtggacgtggaagtagaggaggtagcaggggaggcagaggtcgaagtcgaggtggaaggatcccaagaggtgttagcagctcatcaaggatcgagttcaagggtggtattgttgcttctgataaagcgccaaggaagaatgtacgccgagggcgtggtcgtggtcgtggtcgtagacgtggacgtcgaactgtgaggcctcggcagccatctgttggcagagccagatcaattccaaaggaaaatttgttgggaagctttagcatgcttagcagctcaaaggctgctaccattgaggagtctccacgaagctctggcgcagacgagtggggcttggagaccagatcgacatacactgaatgtgatgagaacagctctggatcacagtcagaagataacgaggaaaatggccagcccatggatgatgattatgaagatcaag

SEQ ID NO: 279461 - DNA, 306 bp, Zea mays
ctcgcctcctcgggctccggcccactccttgcttccctcgctcaccgagagccagagccagtggggcagccaaagccgagccgcaaccgcaaagatcttgcgcggcctcctttccccagctcgcgtcactcactgtgccgctcgtgccatccaccctcggttcacccaaccaacaatccatccgccaccacaccccgctgcggcgatgtgcggcggcgccatcctctcgggtttcatcccgccgtccggggtgccggcggcggcagcgtcggccaagaagaaacagcagcggcgtgcgacggcgga

SEQ ID NO: 279462 - DNA, 401 bp, Zea mays
  unsure (1)..(401): unsure at all n locations
gaacaaacttcctaaaggaaattcgaaagtttataccctgtcaatcacaaacaaagatgatagccagccaaccctagagcaaccagagttatcaaaacaagacacagaaggaaacttattggcccattctcatgatgatggacttggtgacaaccatcataatcaagctgcaacaaatgaaacctttacaagcaaccctccagctatgcatgttgctcctgacaacaaacagaataactggtgcatgaatccaccgcagaatcaatggcttgtcccagttatgtcgccttctgaaggtcttgtctataagccttttgccggcccttgtcccccagttggaaatctgctgacaccattttacgccaactgtgctccgtcaaggctgncttctacaccatatg

SEQ ID NO: 279463 - DNA, 397 bp, Zea mays
gaccaaatgtccactgcacacacctcacagatcctctgcagccgcagctgccacctccttgggtcctttctgcataggtggcggcacgtacatattctgaagaagagatcgagatgaccagcgtgtggaagaccaaggttctgcctggcctcaacaagatctttgacaaggatggcaagaaggctgcagctgcaggcttcttgaagtccttcgacaaggtctgtaccgcgatcgaatcatctgcaggcccgagctgcttcagatgaacctagctagctacaagcctggccatcacgcttgatttccttgatcacttgatttctacttcaggaggagattgacacggagattgaggacaagaagacagagctggagcccaaggtcgtggaggcctacg

SEQ ID NO: 279464 - DNA, 2352 bp, Zea mays
cggacgctgggcggacgcgtgggcggacgcagtgtgcatgcatataagagcaacaagatactggcgcagaggagcaatgcccggcatggatgccttcgctgctgtgtcactactcgccacactctttctggttcgtgcggcagctgcccatcctccggcggcggctgcggacgccatgacgccgacggactattggcgagcggtgcttcctgagaccccgatgccccgagccatactcgacctattgaccacatctacaggtgaggaaggctcaaggaaggtcaccacgtcaaatgggtaccaaggccatgacttaaggacggtcagcacatcatatgcatctcaagatggggacaactcatggaaggccaccatgtcatatgggttccaaagtggtgagggctcgaggaaggtcaccacatcatatccgtaccgaggccaggacttaaggatggtcagcacatcatatgtatctcaagatgaggacaactcatggaaggtctcgatgccatctaggttccaagttggtgagggctcaaggaagctcaccacaccattcgaatcacaaaggaaggactcaaggaaggccaccgcatcatatggaatccaagatgatgaggacacaaggaaggccactacatcatatggaatccatggggaggacccaagaaaggccaccacgtcatatggttcccaggatgagaagggatcaaggaaggtcataatgtcatatgggtctaatggtgaggatgatccaagaaaggccaccacatcatatggaatacaagataaagagtatcccaggaaggccaccacatcttatggagttcaaggtgagaaggacccaagggaagctaccatctcatatgggtcccaggatgatgaggattctagaaaagtcaacatgtcatatgggtctaatggtgaggacgacccaagaaaggccaccacatcatatgggtcccatggtgagtatgaatcaaataaggccacaatgtcatatgggttccaaggcatggaagatttaaggaaggccaccacatcatatggaatacaagatgaagagtatccaaggaaggccaccacatcatatggagttcaaggtgaggaggacccaaagaaagataccatgtcatatgggtcacaagatgacgaggaatctagaaaaatcagcatctcatatcggtctaatggtgagaacgactcaagaacgtccaccacatcatatgggtcccaaggtaaggagatcctaagaaaggtcaccacgtcatgtgataggtaccacagttgtgaagatgatgcgcggaaggccaccgcatcacatagagctgaaggtaagcaggacatgaagaagatcagcatatcatatggatctcatcgaagtggggagcactcattgagaaccaccagtacaagagagaaaggtgacacaagtaaaggggacatccatcaccatgaccatgctgccgttcacatccacagcagcggcaacaagctagtagcagatgttttcttcttccacgacgtcctacgcccagggtccgtaatcacgccgatcatcccaccgaccaccaccctaccacctctgctgcctctccgcgaggccgacgcgctcccgttctccaccgggcgcttcgccgacatcctcgccatgttcgcgccgacgacatccgacgccatgggcgaagagatacggtcgacgctcgacacctgcgagaacacgcgcccgctccccggcgagaaggccgcctgcgccacctccctcgagtctctcgccaggatacccgccgtcctcctcgggacacgcaacgtccgcgctttctccggcgacatgcccaccgatcctgccggcacgtcggcgaagcgggggcggtataacgtaacggccgtgcagaagctctccgagtcactgacggcggcggcgtgccatgacctgacgtacccctacgccgtgttctactgccacacgaccaacccggcggccacgtacctggtgaagctggcagcccaggatggcgggacgccggacatggaggcgttggtcgtgtgccacctcgacacgtcattgtggagtcccagacacccattcttggtggcgcacagtctcaagccaggggacgacgcagtcgtgtgccattttctctctaagctcagcatcgtctgggtccccgctggcgagcaggggtggcgtgcgtgaagtgaagcctaatagcgttaagtacccgtgctcagagctctatctgtaacctgtatggacctaatgtggctctgtaatgctaaataaaacctgcgtcaatcatgtatcgtaaaaaaaaaaaaaaaaagggtggccgctcgcgatctagaactagt

SEQ ID NO: 279465 - DNA, 319 bp, Zea mays
aactcatggaaggccaccatgtcatatgggttccaaagtggtgagggctcgaggaaggtcaccacatcatatccgtaccgaggccaggacttaaggatggtcagcacatcatatgtatctcaagatgaggacaactcatggaaggtctcgatgccatctaggttccaagttggtgagggctcaaggaagctcaccacgtcaaatgggtaccaaggccatgacttaaggacggtcagcacatcatatgcatctcaagatggggacaactcatggaaggccaccatgtcatatgggttcaaagtggtgagggctcgaggaa

SEQ ID NO: 279466 - DNA, 580 bp, Zea mays
gtttgcacctgtgcccgactcaaccaatctactcgctgctacaacagagtttgcctgttgccttgcttccacctcccggctgcagctgcacctgctgctcgatcggatcggccgcgcgcggcatgtcgaccaccacccccaccaacgccgcctcccagcagggcgacgacgctgcggctggcggcgcggacaagaagccggcgcaagagacggtgacgaagacggtgcagacggtggaggtgcggtcctcggcagggcagcccgacgaggagggcgtgctcaagcccgtgaaggtggtgcacgagatccccgccaaggacagctccggcgtcaagcaggactaggactagctaagctgcctagctcgatcgatcatctagctaggatcgatgctgctgctgctaagctgagtggatttgatgctgctgcggtcagaaatcttatcgtcatttccaccccccaaccagatcctagctagtaattgcaaataaacaaatgttgcgttggatcctaatgtgaattagtgatctgtgctgtgcggcctgccgcttcatttgtaaacatgtactaataagacgcc

SEQ ID NO: 279467 - DNA, 413 bp, Zea mays
cccacgcgtccggcgctctggaggcgccaggaggaggaggaggaggaggaggagaagaggggagccaggaccaggagcggcagctgcacgcgctcctcgtcgcggccgacaagtacgacgtgccgttcctgaggcgggcatgcgaggcgcggctggcggcgggcgtggcgccccggaacgcgctgcggacgcttgaggtcgccgagctgagctccagcgccgcgctcatggagcgcgccatgggcgccgtcgtggagcacgccgaggaggtcgtgttctcggcggagtacgagcggttcgccgcacggaacgcggggctgtgcgtcgagatcacccgcgcgctgctggccaggatgccgacgccggcgaggagtgatggcccgtgcttagagcttgaaagcagctgatgcatg

SEQ ID NO: 279468 - DNA, 440 bp, Zea mays
aacgagttaacgaaagccttttatccaagctcagggaagggaagctcacagtttcgttggatccaatcttgttttatccaagctcagcgatggcttctcgtcagcagcatcctactagctaccacgccggcgagaccaaggcccgtgccgaggagaagacgggtcaagtgatgggggcggcgcaggagaaagggagggaggccaagcacaaggcgtccgacgcctccgaccgcgccatgggaatgggccacgacgccatggaggcgaccagggagaaggcgcgcgccgccgcggaccgaaccatggggatgggccacgacgccggggaggcggccaatgacagggcgtaccgggccaaggacgcggcctccggtgccgctggccgcgccagggacactgcgtccgacgcggccggcgctgccggggaccgcgcccgcgac

SEQ ID NO: 279469 - DNA, 510 bp, Zea mays
cccacgtgaccgcccacgcgtccgcagatcactcccgtctcccatccccttcctctccgagcaatcctctgccggagtccaagctccaatcagatccggacccaccccctccccctccgaagaagccctaggcatgccccgcagccgatgaggtcgctccgccgggtcctcatcccgctcgtcctcctcgcaggactcgtcttccgcgtggacgacggcggcggcgcgttcctcccgcccccgccccccgcgctccccgctcccccgccccgcctcgcacttaacggagaagcggctccggaggatgatggggcggcggcttcccgctccacggagatcgtcgcggcggaggcgcgctccaccgagttcgtcgccccagcgaggcccaagaagcagagcctccgggagctccttgtccggccgcagcctgcgcgccacgagccggctagtttggttaccgacgaggcgaaagccgaatccagctctgtgcttcattttgcgataatgcac

SEQ ID NO: 279470 - DNA, 173 bp, Zea mays
ggacgtggacggcgcccgtgaggatgccgatgccgatgtccggcgatgtgcgccaatgccgcagcagcagggcatggggggctgcgccgtccatctggccgcccgcccccgagtggggctacagcgcgcagccatacggcagctacagcggcccgcctgccggcgggtactac

SEQ ID NO: 279471 - DNA, 631 bp, Zea mays
ttccacgcgtccgcccacgcgtccgctcctgtgtacaccactcccgccccgcctaccattttatccccgcctctcctggcctctgccgccccgtcgcacagaatcgcttggtgcaccctgcgagggcctcctcgaaaccctagcttgcccagcccggcagcccctccgggccatgggcaagtacatgcgcaaggccaaggcttccagcgaggttgtcatcatggatgtcgccgccgctccgctcggagtccgcacccgagcgcgcgccctcgcgctgcagcgtctgcaggagcagcagacgcagtgggaggaaggtgctggcggcgagtacctggagctaaggaaccggaggctcgagaagctgccgccgccgccggcgaccacgaggaggtcgggcgggaggaaagcggcagccgaggccgccgcaactaaggaggctgaggcgtcgtacggggagaacatgctcgagttggaggccatggagaggattaccagggagacgacgccttgcagcttgattaacacccagatgactagcactcctgggtccacgagatccagccactcttgccaccgcatggtgaacgctcctccggtgcacgccgtcccaagttctagggagatgaatgag

SEQ ID NO: 279472 - DNA, 444 bp, Zea mays
ctctggcatgagcgcagccctaggacgccgtccatgctgggtgaaggctcaacaccaaagtgaatgaaagcaacgatacattgcttaagctattcaaccactggtcatcagttatatgagtggttttaaagtggtttcagtgttagtatccttatatgaagatgtcctctgatgagattactacttatgtgtatctccagtctctcttttttttgttctcctgattaaaggagtgatatacctgtaatctctgaactagcagaatattagagtggctacttgaaaaatcatgtcactagcatattatcattctttaattgtctataatcattgatactatattactatgtacatgaaattggtggaaattatgcacatgcatttccattgaacccaagcatgtatctggattctggaatactcaaatgctcccaatattccatt

SEQ ID NO: 279473 - DNA, 453 bp, Zea mays
cccaaactcagatccaagcaaagcaaacatcacggctcgtcgcagtcgtcttcctccccacgcgaggccagatccaacctgcctcggccgaccaccgccatggctcccacggtcccttcggcggcgaagtctgcctctccttcccaaccttccgggaagagcgaggtggcagatctgaagcagcagctgcggcagctggcggggagccgcgctcccgatgcggacgaccagcgccgtgatgtcttcaagagggtgatctcctgcatgacggccggcatcgacgtgtcggccgcgttcggggagatggtgctctgctccgccacctccgacgtagtaaccaagaagatgtgctatctctatgtaagctcccacgcgcgcgcgcacccggacctagcactcctgaccatcaactttctccagcgggactgccgtgatcaggaccccaccattcgc

SEQ ID NO: 279474 - DNA, 416 bp, Zea mays
  unsure (1)..(416): unsure at all n locations
gncaaagcgccgctgccgcccgtgcctcattcgctgccgatcgtggccaacggggggatggtggaccagctgacgcaccgcgggctggcggcgctggcggagacgtacggcgggctgctgcacctccggctggggcggctgcacgcgttcgcggtgtcgacgcccgagtacgcgcgcgaggtgctgcaggcgcaggacggcgcgttctcgaaccggccggcgaccgcggcgatcgcgtgcctgacgtacgaccgcgcggacatggcgttcgcgcactacgggcccttctggcggcagatgcgcaagctgtgcgtgatgaagctgttcagccggcggcgcgccgagacgtgggccgccgtgcgcgacgagtgcgcggcgcttgtccgggccgtggccgttggcggcgggggcggggg

SEQ ID NO: 279475 - DNA, 1111 bp, Zea mays
ctttttcgtccgagaatgctcagataatccctggcaatatgtttggcatcttctttgaggaaatcaaccatgctggtgctggtggattgtgggcagagcttgtaagcaacagaggttttgaagctggtggttctaatactccttcaaacattgacccatggttgatcattggggatgaatcaaatattattgtggcaacagatcggtcatcatgttttgctagtaacccaattgcacttcgaatggaagtactttgtggagctagtgaaactaatgcttgcccatcaggaggagttggaatctacaagcctggttactggggcatgaacattgaaagaacaaaggtctatagagttaccatatacatcaggtcatcagaatcggtggagctaatggtttctttaacaagttcagatggtcttcaaaatctagcctctcatacaatcatgggagacaaagaagatttcgttgagtggacgaaggttgaatttgatttgcaatcaaattatataaatactaattcaagacttcagcttacaaccaccaaaagtggcataatttggtttgatcaagtatcacttatgccatcagatacttatatggggcatggtttccgtaaagatcttgcctctatgctggcaaatctgaagcctcgatttctaaaatttccaggtggcaactatgtaatgggaaattaccttataaatgcattccgctggagtgaaactgttgtaccatgggaagagagacctggccacttcaatgatgcttgggcctattggactgatgatggacttgggttttttgaatttcttcaactagcagaagaccttggcgcttgccccgtttgggtggtaaatgatggggccagcatctatgaaggagttccatcagcaacaatagctgcatttgtaaaggatgttgttaatggcattgagtttgccaggggagaccccgagactgcatggggttcagttcgtgcagcaatggggcatccagagccctttcagctttattacgttttaataggaaatcaagaatggtcaaagtactattataaagataactatgtgaagttctacctctgcataaaagcatcctattcagacat

SEQ ID NO: 279476 - DNA, 436 bp, Zea mays
cctggttctttcttgctccgctccccacgcgtactcgctctcgtggcgacgactgggtgatcgccgccgccgtcgccgccaccactcaccaccaggccttcaccggcgacaaacaccaccaacagacacaagtgcttcagtcattatagtgccagtaccattctgccagcgagttcctttgccacaaaaagataacactcggatatctcatggcaaaacctgggattttaggccgcagcagtgcacagagatcaaatgagggcatgcgaatcatattctcagcagctattggtgttatgctagggcacttgtttggcatttccttccctaccggtaatataacatagcttcacttcccttccagcattatctcctatatcgaggacagaaactctggcatcacaacccaaacattattgaatcatgcatggacgtc

SEQ ID NO: 279477 - DNA, 510 bp, Zea mays
cccacgcgtccgcccacgcgtccgagcagctctctccgactccttcgatcccttccctcctctcgccgccggccgattcacttcttccatcattcgattaagcaagcaaggcaaggcgcatttccctcgggtgactcgatcggccgcgcgcgatgtctgcgacgcagccgtggaggtcgctgctctgctgcgcggcggcgggatacgacgacgccgacgagccgtcgccgtcgtcgcgggggcagaggaagggccggagcaggagggaccgggaccgggagcggctccagctgctgctgctgccgtcgtcctcgtcggcggcgtcgcgggtgtcgctgtcgagcctggggggttcgtcggggacgctgacgcccgaggacctgtccctgacgctgtcgggctccagcctgcacgccttcacctgcgccgagctgagggccgccaccgcgggctacttccgcgccaactaccttggctgcggcggcttcggccccgtctaccggggccgcg

SEQ ID NO: 279478 - DNA, 439 bp, Zea mays
  unsure (1)..(439): unsure at all n locations
gcgtncgaccaagctgtcggactttgggctcgccaaggtcgggcctcagggcgacgcgacccacgtaacgacgcgcgtcatggggaccaacgggtacgcggcgccagagtacatcatgacggggcacctcaccgccaagagcgacgtctacagcttcggggcagtgctgctggagctcctgacgggccgtcggtccgtcgatcggtctcggcggcccagggagcagagcctggtggactgggccagaccctacctcaagaagcccgacaagctctaccgggtcatggatccagccatggagtgccagtactcgtgccaaggggccggacgcgccgctatggtggcgtacaagtgcctgagccagaaccccaagtccaggcccaccatgagggaggtggtccaggccctggagcccgtcctggacatgaacgactacctt

SEQ ID NO: 279479 - DNA, 362 bp, Zea mays
cccatccagcggtcgacttggacttctccgctactgtgctgttctgtgcagccgtgcaggggcgccaacgactccgagctctgctccatccaactcccatggcgggctaccgcgggagctcctccgtctccgcctccaccggcggcgggggcagcgcggtggccgcagccttctccacccggctgctgctactcctcacgctgctgccgctcgcgctcgccgccttcgccttcgcgctccagtggcgcggcggtatgcgggacccggcaggtgcagcctggcccgccgacgcgcagccttcccgggcatggagaacagccccctctcctcctcctacggaggcgcaggctcctacttcgccg

SEQ ID NO: 279480 - DNA, 573 bp, Zea mays
gagtatttaagctttattggcactcttccacaggatgttgaggtagttaattcagtagaggcagactgtccctgagaagccacggctagagctgttcaagcatgactgctccagctctggaaaatgtagtgaatatagcaacacagaatcttctgatgatgttggcaagcaagagattagtgaactatcagatggagatgattttcatttctatgacacaaggcaaagtttcagtgaatttactacgactcctgctgacctgagaaagggatgtgtaaacaccggaaatgaagatcataaatctgttgaatcactgactgttgatgaggccgagaaatatatgctgtcacatccaaaaaggcgctcacagttgcctgaaccaatagaaaaggagaaaggagttagcctttggtcaatgatcaaagacaatgttggaaaggatctaacaagagtctgtcttcctgtttactttaatgagcctttgtcttctctccagaagtgctttgaagagttggagtattcttatttgttggatcgtgcatatgaatgtggtttaagggggaatggtctgat

SEQ ID NO: 279481 - DNA, 406 bp, Zea mays
ctcgtcacgtacgcacacgtacgtacacacacctcgcttgatatcatgcccgtgtgctctcaggtctgaaacaacgctgtccgtctctccggcgcggaggggataaaagtctcggcgtgaactcctggccagtcttttgctgctgccatatccgcgcgcgtgtcgcggcgaggtagcagagtggtgggtggtggccagtgccgcgggttgcgttgggatggcggcgcttgtggcgctgacgctgacgctggcgctgacggcggcagtgacagcgacggcgaaggagtgcaccaaccatcccgactgacctgtcgtcgcacacggtgcgggcgcggctgcaggcggcgccggccggagcggcaaagtggcggtggcccgagcttgtccacgagcacctcaaccccac

SEQ ID NO: 279482 - DNA, 420 bp, Zea mays
  unsure (1)..(420): unsure at all n locations
cggacgctggttaaaatggaagccgaggacgggcggccaaggagttaggtgtaggccaggcaggcagaggcagcagttctcctctacgaagcggcgttccgatccgagatggggggccagcagaacgcgctccaccagctcgtgtccttcatcctcggggcgtccgccgccgccgtcctgctcttcttcctcacgacggcgacgagcggagcgtcggttcacggggatctcgagctgggccaacggaaccacgggctttgacgacgatgctcccgtccaggcggctcctgctacccgggcaaatcacgccgacgcatagggcgcggcggcggagcaggaggacgagctgcagcggctgctgcgcgcggtggcggacgaggaccggacggtgatcatgacgtcngtgaacgaggcgtgggc

SEQ ID NO: 279483 - DNA, 425 bp, Zea mays
tggcagagagcacctactccagtttttttctctgttctcagttctcactcccatggccgccgcggcctgcaacccagtggctccttccgggcctgtgccgttcaaggacgtcgacgacggcagtgttccagagcaaactcccaaggaggagttcggtgacctcgtggccgcgctgccgagcaggcagcagtccatcctggagctgcgcctgtaccagggcttctggctgccggagcactgggtgccggggaccatcgtgttccagcgccgcttcacgccgcgccccgacgacgtgatcctcgcgagctaccccaagtgcggcaccacgtggctgaaggcgctggccttcgccacggcggcgcgtacggcgtaccctgccggtggcgccaggcacccgctccgacggctcaacccgcacgactgcg

SEQ ID NO: 279484 - DNA, 448 bp, Zea mays
gcggaaggcggctagccggctggagagcagtctcggcgctcgacgctcgggggcggcagggacggagagacgagcggatttctatacgtcagctcgtttcggccccgcttgggggcttctcctcggcgtcgtcgctccctccgccgcctcttcctcttcgtgtcgagcgctacagagaaagctcgtggacgggcaacgaaccaacggcgttttcatacgcggaaccatcctcttcgttttcggattgcagtacgtgctacaatatcacatatctcgggtttatccgaagagggggttattcacctagctttcaccaccagtgattttgcggacgacggcctatggttcccaaatcaccgaccgatcgacgacgccattcttctccccggcaacataagctcacccatcgtcgtggacttcgtttggttctcggatcgtcctccccaca

SEQ ID NO: 279485 - DNA, 835 bp, Zea mays
tctctccccaccccctcgtgcttctttgatgacgtgctgcattttgctcggccgacgcaagggcacgtcgctcggatgtagttgagtgactgtgactccagcaaggccggcgtcggaatgtccaccacaaccgccagcctcgccgcctccctcgcgcgccacggcctcccagccgtcatcgtcgacgctggcctcctcaacctcgatctcttgttcggcttcaagaaccgtgtccacctcaccgccgccaccgtcctcgcgggagacttcccactcgactaggcgctcgtctgccaccatgcgctccacgacctccacctcctctgcctccaagcctcgctccatgctgcccctctcgttcggatccaagaccctcacctgggtcacagacgcggttacctctgttggagcgaatgtcgcccacccactcgctcggctcattaataatgggaacatgacaagttataacggagggagagcgaagtctacttcaactaagcgaaggccttgggatggagggatcgaccaggacaggcaagggccttgccaactcccgaaggcctagcgccctaagacgcaggctatagtcactactcgcgcatgttattaaagcgggcccgtgcggctgacatcctggatcgcctgaccccacgggtaagcctcagtctaggtaggatttgtggtgtgtcagtccgggttgtatttaactacactataatgacctgtaataacccttgaagggaaatattctacggataacgtaggtaaacagggactgtatttacgaggatgagacttgttggtcacttgttctcaaatgctgtgaatcaagaac

SEQ ID NO: 279486 - DNA, 646 bp, Zea mays
cattactaagtcttgtcatctatgcttctatttttaccacgaatgcggcacggcaccgacttgtagctgggaagtcaaagaatttacttgaatttggacttcgacgggctcaagggcctgatggaggaatcagtgcatcaagatattgttatatgggaggatttgatgcaacaagcaatgttgcagcaggaagattgtttgggataccaatacgtgggactcattcacatgcatttgtgagctccttcatgggtcttgatgaaattactgacaaaacacttactagttctgatggttcaaacacatgtgaagattttatctctctggcgcagaactggctgatcaggattcaggattctagttcattgcatggcacctttggagaaacgagccaaagtgagttggctgcattcacgtcatatgcactggcatttccaaattccttcctggccttggttgacacatatgatgtcatgagaagcggagtgccaaacttctgtgctgttgctttggccctcaatgatatggggtataaggcagtcggaattaggttggactctggtgatttagcatacctatccgttgaggcccgcaagttcttccatgcagttgaaaaagaatttgtgttgttggctttgggaaaaca

SEQ ID NO: 279487 - DNA, 577 bp, Zea mays
caaccgaggaggaggcctgccaggttcgttgccggccgtgtgtttgttcgcccggccggccggcccgaccaaggggaagctgcagcctgctcgctcgatcgagctcttgcgtaggccgttgacgatgtcatgtggcccctgtgcgtcatctccgagaagctcttcaggatggcgggcgacgacggcgcgcagggggcgccgggctcgccgtaccccgacgggcggatttcactagcacgccgatcgtactacgtcgatgttccgcatgtgcagcaggccttcacctgggactgcggcctcgcttgcgtgctcatggtgctcaggacgctagggattgattgctgcgacggcattgccgatctcgagaggctctgccgcaccacgagcatttggacggctgacttatcatatctgttaaacaagttttcagtcagcttttctttctgtaccgagacccttggagcaaatccacaatattctgctgaatccttttatagggagcaattgcaagacgacatcgatcgagtggacgagctatttgggacggcgctcgatgctggaattagcattcaatgca

SEQ ID NO: 279488 - DNA, 276 bp, Zea mays
gaataacggtccgacccacgcgtccgctggaagccattttgaaccaaagacgattcctccacctctaacaaataaggctgactgggagagtaacccacttgaattggacttcacaaaagcaactgttatcggaaagggctctttcggtgaaattctgaaagcaaattggcgaggaacacctattgctgtcaagcgcattcttccatccttatctgatgacaggctggtgatccaagattttaagcatgaagtcaacttgctaataaagctgagaca

SEQ ID NO: 279489 - DNA, 315 bp, Zea mays
gttccggtgaacctgaaagaggtgctggtattcgtgtggaaaagaatatggctaaggaagctcctgcaagtacgcacctcatactcataccatgacgacacctggatgtctcctactacgatgtacctttttacgctaggcgtgtatatttcggggagatacctagaggtggattagagaacttgaagagataggctataacttttgcttagtatttggagacacacgttaggccatgtgttggctatagtatttccttaaccgaacttttggaaatggtggtaaacgttagatgttgtgaagcacttcataggc

SEQ ID NO: 279490 - DNA, 511 bp, Zea mays
taattgcgtgtgtctttgattacgatgttttgctcacaaagttgctactgctttccaataattcttgacagcgtcaacgagtttgtcagtgcaaagaccgacccaatgataccagtgtatgaattcttaacttgattctctcatgccaggccagcagaaccatggcccatggttccccttatcagtgtctctctctctctctctatttttttttggctgactttgctgcttgcagaagcaaaaggagacatggatcttgcagcttctcgcggtggatcagatcaaaattgcgcacatgcttttcatgcctgtgctgctggtgccactgcttgccgaagcccaatgcgccaagctgcttcagctggtcttgttgcacctgccgcgacacgcagtgctgtactccgatctgccgatgttcaaagaccccttcgtgcagtcccggctgctgcacctgcagcctttccagctgcagctgcaagacgccaccaggctgctggcattgacgacccca

SEQ ID NO: 279491 - DNA, 669 bp, Zea mays
cggacgcgtggtttttaggggcaacgcgtccaaccggccggacctcaccggctcatccctcatcgccctagtccccaagggccaagtccccaaccccggctgacgactgtgcccgtctccttccctgattcatccgcaagcccacccgtcggcgatcgtccatgacggaggatcgagcgcacaaggtcgccgacgagcccgccgcctcaggcaggcaaagacctgaaaggaagaagaggaagtgggatcaacccgcggaggacttggtctccgcggcggtgacggctgctgccgtgtcggggatgcctgtgatgaatttcggtgctcttcctggcgttgtactgcctggcgtcaccgcatatggagctgctacattgccaagtgtagtccctgttccgtattcattgccgccccatattgcaccatcggtgctccagaatgctgctgcagcagctcagaaattgagtcaggcaaaaataccagatgaggtcattgcacgggaaattgttataaacgatgcagatccatctgtgcgatataagcttaccaaacgacaaacacatgaagagatttcagaatgcacaaacactttcatcattaccaggggaaaatattaccctccaaatttaccttctgatggtgagaagccccttttttacatatttttgt

SEQ ID NO: 279492 - DNA, 1020 bp, Zea mays
  unsure (1)..(1020): unsure at all n locations
ttttcgcgtccgcccacgcgtccggaggaggatgaggatgctgtggatgttgagagggaggagcccgccaaacgccagaagtctgtgcaagctgatgctcctgcggcagctgccgcgtccggggctgttggtaattatttatatttattaatttcttgctgttttactgttagcttgtttagtgaaggcgttctatgggttgtagtttccaattttccatcgcatgattaggtttaaacatgtgataaggcttctaattcagtaaccgagacagaacatcagtgatatattaccttatagcttttcatgcaattagtgttttttcatcgaattcagtcacggatttagattatctcattgaatttgacgcanatcatttcacacgcatgcgacataccttagtatttttactattgaagtgagttctaatttctgatatctgttcccaaagtattacagctggtgcagatgattgcattatcagtttctatgtagagttttcttattccatctatttgatggtgttgtcctggaagtattgcgattctgaacacatctgataatgaaactaagtaataactatatggtttgaatttaattttcttacatactgattattgaaatctctaaaggaccgtttggatggtcggtaatatttgagttctttatggttactaaaatataccataacatttaaagcttcaaggtgtttcgatacagcgatgtagttttacatccaattaccatgttattttgagttcttgaagaaaacctattcaaaactcatttcccccatttttttttaaaaatcaaagcacacctcacattacctttggcaccattgtgagttatgaagcattggcctgtctaatttcatgcgaaagggcctccagctgagttggttaggtggtctgattagcactccttaggtccggaatttagctctccatgggagcaaatttcagtatgattttaaaaaatcccctcgtctgtcccacgccaaagcacaagtctaatgct

SEQ ID NO: 279493 - DNA, 482 bp, Zea mays
cccaaccttcacccagcggcgctgcccctgtcgtcgtcttcccgcacgcttccgagcgtcaccctccccttctttccccatcgcctcccttccaccccctctcatctccgtctcccgcgccgacgacttgagcagggcttggccttagggttcaggcaagatgggtgagcgcagagtgctgaacaagtattacccgccggacttcgacccgtcgaagatcccgcggcggcggcagcccgagaaccagcagatcaaggtgcgcatgatgctccccatgagcatccagtgcggtacctgcgggacatacatatacaagggcactaagttcaactccagaaaggaggacgtcgtcggagagacatacttgggaatacaaatatttaggttttacttcaagtgcactaaatgctctgctgagatcacattcaaaacggaccctcagaattctggctacacagtggaatcgggggctagtcgcaatt

SEQ ID NO: 279494 - DNA, 539 bp, Zea mays
cacctcagcaaaagaaagctagctagtactctagctatatatacatgataactagacaaggatcgtgaagtaattaatataatgacaaagtcgtcaggggcgctagatcttgctcggagcaccggagggtcgcttagcaaggaccaagtcaaatccgccgttgatcagtatgtgaagtaccacgacctccacggaggcgaacaagaatcaaggaagtcaaattacgctgatttggcaaacaagtactatgatcttgtcactggcttctacgaatatggatggggcgactcattccattttgctggcggatatccgggtgaaacttcccgtgaagccattaagcggcaccagcattttatggcactacaattggggctcaagaagggtatgaaggttctggacgtgggatgtggaattgggggacctttaatagaaattgccagattcagctcaacttcaataactggattgaccaacaatgactaccatgtctcaaggggcaaggagcacatcttttcagcaggtttgagtgagcaatg

SEQ ID NO: 279495 - DNA, 568 bp, Zea mays
ggacgcgtggtttggttgagagttccggccatgagcgagaagagattcatgcatggcgcaaatttcatgtgtgttttgcagacaaggatcgtgaagtaattaatataatgacaaagtcgtcaggggcgctagatcttgctcggagcaccggagggtcgcttagcaaggaccaagtcaaatccgccgttgatcagtatgtgaagtaccacgacctccacggaggcgaacaagaatcaaggaagtcaaattacgctgatttggcaaacaagtactatgatcttgtcactggcttctacgaatatggatggggcgactcattccatcttgctggcgggtcagctacatatacataccttgctctagttattactatctatcgacgaaacagcatccgttgtatctcagttgagatgtcgagttgctctagatcaaagttttggtaattttacagcttcagtcccatactcccatgcttgtatttcagatatccgggtgagacttcccgtgaagccattaagcggcaccagcattttttggcactacaattggggctcagataggtatgaag

SEQ ID NO: 279496 - DNA, 574 bp, Zea mays
gtatgtatatgcgtatgctatatatatcactgaaatccattttcatccataacagttaagaactagacatgaattgcagcagtatgtatagcaccaaaatacatgtgacactggcagggaaacagatagtgcacagcatgattgctacatggattcggttcagaggaatatatgcagtgacacagggggtttggtttcgtcccttaatcaaagatacaactgaatggtcggcgtgttcatcaggtctaaaagcacctctcaggaaaccactgaccctggtacagtatatatagcattgtttaaccacatgtatatcctgctataagattgatgtgcagcagaacaggacgtattgggagattgcagaatttggatctttatacttgtgcgttgtatttaatctgttccctaattgtttgttttgtttgccgacatctctcccagtcccaacaatcatttttttacgcgatcagtttgaaacagtgcaaaaacatgctaattccttatttttccttgcaagatttgtcttttggtccttaccagattccctgggaggcgcttcgttctggctggg

SEQ ID NO: 279497 - DNA, 613 bp, Zea mays
gggctggttgccccccccaggattcaccgtgtggtcgacgtcctccatcaccacccaccggatgaccgtggtgatgctcgtcatatggaagaagcacatcgtctacgtcctcctcttctacgtggtgttcggcctcacggagatgatctacctctcgtccatcctgtccaagttcatccagggcggctacctccccttctgcttcgcgctggtcctcatgacgctgatggcgacgtggcactacgtccacgtgaagcggtactggtacgagctggaccacatcgtgcccaccaaccagatgacggcgctgctggagaagaacgacgtgcggcggatccccggggtggggctcctgtacacggagctggtccagggcatcccgcccgtgttcccccgactcatcaagaagatcccgtccgtgcactccatcttcctcttcatgtccatcaagcacctgcccatcccgcacgtgctgcccgcggagaggttcctgttccggcaggtcgggcccagagagcagcgcatttttcgctgcgtcgcgcgctacggatacagtgacgcgctggaggagcccaaggacttcgcgtacttcctggtcgacaggctcaagatg

SEQ ID NO: 279498 - DNA, 514 bp, Zea mays
ttggctacatctttttttcaaagacaaacaggaggtgggcggctgtatggttctccttcgtccctggcacatcctcttcttcctcacatgcttctccccatcctttgttcatcctatggaaccaggcacctaccgttgctccaatgtttccatcccatatccttttggcgttgctggtaagagcccctccctgtcccgtggatttaaagttgtgtgtggacacagtggtccgttgctgtccatcggaaacagcatgcttgggattcttgacatctcgttgcttgatggtcttgtgagcatattggctagtgctagttctcagcagtgcataggaggggaggcgaactctagcgttaaccttgaggggaccgtcttcacattctcagacacaaggaacaagttcacagctctgggttgtaacgtggtggccatgcttttgaatggcagcacggggtatagcggtggctgtgcttccttttgctctagcggaaatagcatcatcgacggctcatgc

SEQ ID NO: 279499 - DNA, 383 bp, Zea mays
  unsure (1)..(383): unsure at all n locations
aaaaaagcatcaacacagggaagtggagcaaacatattgatcagttggtacagcaaaggccaggaacaggaaagcggacagcataagcttatagagcttctatttctgtaccagtgtgacagatcagtataaaatcctctgtcatacatagaccagaagttgtgtgcatcgcgtgaaagctaatttttggggtcttgttgctgtgggcattcctgctcatgtgtgaagttattttttgtagaaattgtacctttacaaattgttataggagtgacttttcatagtagtaaagcatttgtgtgacctgtccccgatatcttcccagaatacaatactactattacatgaaagngttgacctggttgaatacatataaataaaaa

SEQ ID NO: 279500 - DNA, 395 bp, Zea mays
cggccctccccaccgccaccattttcccctgcgacatgggccgcaatcttccagccgagcgggtggaagcacccaggagcagcaagatggacaagaagagaaagaaggacaagaagcggaagctggcagccgaggccgacgaggaggaggaggcggcggtgacggcgacagtggagaccgtgaagagcagcaagaagaagcgggtggagaatgaacccggcgcaggagcaggggaggcggagaacggcgctgagaagaccgtggcggtgaccgggaagggttccgaggaccctaagtacgcgccgctacggtcgttctccgctgccgagctgccgtctcaggtgctcgaatgctgcagcgcgttcgcccggccgtcacctatccaggcacacgcc

SEQ ID NO: 279501 - DNA, 708 bp, Zea mays
  unsure (1)..(708): unsure at all n locations
tcgcatacccgcttccttctctccaatctccggtgctcgcatcccgctctgcctccatgcgccgcggctgttccatgacgccagtcctctcgcctctgtccggacccaacacccgggcggctggaacccgcaggtgcgcttagtgccgctcgaggaggctcgccgtttgctggattcgttctgtcctttgccggccggcattgtgccctccgcggcggcgacaggggcgtgcgcggtgctgctgtaggggagggtgacggccatctcccaggtcggccgcggcccgggctggtggcgtgcagttgcgtgctcgactctgctttttaccgttgcttgctactctatctaccgtctgtacaggtctactgaaattccactattctgccgntgtatgctttgtgctgtttggtgtgcagaggaagacggattcacaaagcatggtgctccccaagtctagcagggtgtgttgtatggcttccacgctccagctgttgttttccattgccatcacagctttggcctttttcctccacccatgcgcatcgactgatgagttccaccgtgaactctacggttggtccaatggcatcgctacatggtatggcgcagctgatggcgctggactgacggtggtgcgtgtggataccagaatgctgtggaccagccacctttctcatccatgattgccgctggctgctcttccatcta

SEQ ID NO: 279502 - DNA, 631 bp, Zea mays
tctcggtacgattccaccaagaaccgcgggcaacaattcacaccgcgcttctcttctccagcgatgcagacgacggcggcggcggctgtggcatgggcgcctggcccatcggcgtccacctcgtcatcgtcctcgccgtccaccttcagggtgggggttgcgtcgacggccgtgcgggcttgttccgcgcccaggcttgttgcgtcctccgcgcccctgggccgtcgacggctgcggcaagtggttcaagctgttgccaatccagaccctgcgatcgagcttccattgactgctgaaaatgtcgagatggtgttggatgaagtaaggccgtatcttatggcagacggaggcaatgttgcgttgcatgagattgatgggaacgtggtaaggttaaagctgcaaggagcatgtggttcatgcccggcttcagtaacaacgatgaagatgggtattgaacggcgcttgatggagaaaataccagagattgttgcagttgagcccattgctgatgaggaaactggccttgagttgaaccaagagaacattgaaaaggtacttgacgagattaggccataccttgctggcacaggaggtggcgagctcgagtttgtcacaatcgaggaggctattg

SEQ ID NO: 279503 - DNA, 354 bp, Zea mays
  unsure (1)..(354): unsure at all n locations
gnccgcccacgcgtctcggcccgcctggcgccggacctactcccgccgttacgtcccctctctcccccacccggcgagcctcgcgcccagacgtactcttctctcccgcacccgccgcccaacgtcacgggtccgcccccacgtatccatgccttaggtgccggctagcccctaggcaaggcggtacccctccgcccagaggcgcgcccaggcgagagcggaagagcgttttgttgaacactgaccaggacacccgcctcgctcgcgcctcatccttctccctgtttcccggtacacagctgcgcgaccgaggaccgaatccgtgaaccatgtcgaccagcaagggcagcgcag

SEQ ID NO: 279504 - DNA, 569 bp, Zea mays
  unsure (1)..(569): unsure at all n locations
cagctgcagtgagtcgagagcgagactgggactctgggagcttcgagagccacacgccccagccccacgggccacgggcgcactcctttcccctgtaccccacaacggcccaaccccgctagctcgctactcttctgctccaccggacaccggtgaccgcgttcatgccgctcccgacgatgacccactccgccgcctatctcctcccggccccaaccgccccgtccgaccccagcggcgctgccccgaccacctacgcgctcgtcgtcctcaaccagcgtctcccccgcttcgcgccgctcctctggtcccgcgcgcgcctgcgcgtgtgcgccgacggaggcgccaaccgcgtcttcgacggcatgccggagctcctcgcgggcgaggaccccgccgaggtccgcaccaggtacaagccagatgtaattaaaggggacatggactcaataaggccagaagtgaaggagtattattccaaattgtgcacaaacatagttgatgaatcacatgatcaggacacaactgactngcacanatgtgtatcatttatcacaagcaatctccct

SEQ ID NO: 279505 - DNA, 735 bp, Zea mays
ctccacgccacaaccagacggggtacgtgctgcctcgtcgccaccaccatcgctcctcctccccgccgccaggggctaggacgaggcaggagacagaccgacagccggcgatgtcaccgccgacctgtcagacatggagacggggcccgagcaggaggcgccggcggaggtggatcccttggtggaatggtggctgctgttccggctccggtcaagaagaagcggaacctccccaagactccagggtcaagttttcttatctccaagaacaattgggttttattcaagcatgtttgggaggaaaacaaaattttactttctatgggaggatattgaagacatacaaggaatacctcaatcaatatcatcatggagtccatccattataataactcttcacaaaggtagaggcatggatgcaaagcatggtgcaaagagcatggacaatggaaagcttaagttctgcttgcagtcttttgcatcatttagtgtggccaataggacaataatggcattatggaaggcaagatctctgagcacaaagcttaaagcacagcttgctgaagaacaaccccaaattaacacccttcaaagtgaggacagcggggcctttgttggatagaggatgccaagagccttcagatgactgaagttttctccttgaccatttccaccaatatggcctcgcttatggaggtgtttgcaggaggacccttggaatgaaggtaatggata

SEQ ID NO: 279506 - DNA, 1490 bp, Zea mays
cactcatcagaaacccccgcaccctctaactaaaccctcaccggccgccacccatggcgagggccggcgccgccgccgccgccgccggtcgctgcctcctcctctcccgcccgtcccccctccggctccgcctcctccacgctgccctctccaccgccgcccccaccctcggccccacctccactccggctccccctccgcggcacgagctcctcctcgagcgcctccgcctccgccacctaaaggacgcctcctcccccggagccccgaggcctacctcgaggagcgcggagcggagctcgcagcaggggaaggggaagagggtcgaggccgcggagagcttcgaggagctcggtctcggggaggaggtgatgtccgcgctgggggagatgggcatctccaagcccacggagatccagtgcgttggcgtgccggcggtgctggccggaaccatcgtcgtgctcggctcccacaccgtatccggccgcccgcgcgcccgcttactccctcttgttcagctacttcggcgtgatgaggcaatgcttgggatgtcaatgaagccaaggcgtccaagagcagtagtactctgccccaccagggagctaactgagcaggtttatcgagtagcaaagtctatcagccatcatgcacgttttcggtcaacgatggttagtggaggcacccgtctaagaccccaggaagattctttgaacatgcccgttgacactggtcgttggcactcctggaaggattcttgatcatatcaaggatggtaacatggtttatggtgatattaagtatctggttctggatgaggcagatacaatgttctgatcaagggctttggaccagacatccggaagtttcttgctccgttgaagaatcgtgctgcaaagcctgatgatcaagggttccaaacagtattagtcactgctactatgacaaaggctgtgcaaaagttgattgatgaggaatttgaaggtattgtccatttgcggacatcatcatttcaaaagagagtttcaacagcacggcatgactttatcaaactttctggagcagaaaacaaacttgaggctcttctgcaggttcttgagccaagcttggcaaagggaaacaaagttatggtgttctgtattactttaaattcaagtcgtgcagtggatcattttttaactgaaaatcatatatccactgttaactatcatggagaggttccagctgaagagagagttgagaacctgaacaagttccgcaatgaagagggggattgtccaacattagtatgcactgatctggcagctagaggcctggacctggatgttgaccatgtcatcatgtttgacttcccatcgaattctattgattaccttcacagaaccgggagaactgcacgcatgggagccaaagggaaagttacaagcattggggctaagaaggacgtagccttagctacaccgattgaagaggccatgaagaaaaattgagag

SEQ ID NO: 279507 - DNA, 439 bp, Zea mays
tggtgccagaccacgcgtacgacagcaacggcgtgtggtccgggtccgcctcgcgcctcccggacgggcggatcgtgatgcgctacacggggtccacggcggagtcggcgcaggtgcagaacctcgcggagccggccgacccgtccgacccgctgctgctggagtgggtcaagtcggacgccaacccggtgctggtgccgccgccgggcatcgggctgacggacttccgcgacccgacgacggcgtggcgggcggcgcccaacgacggcgcggcggcgtcgtggcgggtcgccatcgggtccaaggaccgggaccacgcggggctggcgctggtgtaccgcacggaggacttcgtgcgctacgacccggcgccggcgctgatgcacgccgtgccgggcaccggcatgtgggagtgcgtggacaacaaaccgtgcacgaa

SEQ ID NO: 279508 - DNA, 653 bp, Zea mays
cggacgcgtgggcgaaattgttttagattgtctgcgttgcggcagacatgggggttggtggggaaaggtttgccacgctgcttatgatgagacttacggaggcagtcatgctttggctctcagacgaccagagcttttgggaagaggttgaagaaggaccaagggctctgggtccggttggacttcagcagttctacctcgatatgcaatttgtgatccttttcgggcaaggtcgtttcttatctcggcatgtgcatcaagtcatattggacatcattgatagagcgatgagagcgttttctgccacggggatggaccctgataggatccttccaagcgacgactggttcatcgacgttgcccaggagagtattagtaggttcggcggcgggagggcacgagtccccaatggggacagggaggtgaacagccccacagcctccgtgtcagcacagtccgtgtcgtcagttagatctctcggcagctcctagcgtgcaaagtttctgtatcaatattactgtagggatttgtttggatgtgtttgtgctggtacatatgtgtcagtaattaattgtatgcctaggccaagaaaatccttgaaactggttttgttcaaaaaaagaaaaaaaacaaaaacgtgtggcgtttatgtt

SEQ ID NO: 279509 - DNA, 645 bp, Zea mays
ccgcctccgccggatgcgcgggtggcgccactcccccggaggactcgaggaagagataaggatgtttcagacaagagtgttactgggaggaatgaacatgtatgaccgctaccaggattggcgccttgacgttgataacatgacatacgaggagttgctcgagcttggagacaaaattggatatgtcaacacagggttacgtgacgacgagattactcgcaaccttaggaaggtcaagcacccatccttcagttccttacggttcgcaacagaaatggaaagaaaatgcagcatttgccaagaagaatttgaaacaaatgaagagatgggaaggctagactgtggccatagctaccatgtgtactgcatcaagcagtggctctcgcagaagaacatttgcccagtttgcaagactgccgtcagcaagaattgaaatccaaactccagtcacgctgtctgtagatctcggtgaaaacagcaaattctgttgtcctgtacagcccgttatatatattattattgtatgaacacaatccattcgtttcatcttgcagaaagaaaatgccatgttttggtcaaaaaaaaaaaaaaaaaaagggcggccgctcgcgctagttctagatcgcgagcggcccacaccgtctg

SEQ ID NO: 279510 - DNA, 914 bp, Zea mays
aattgatatatgtgtactttttaaaggtattttatggttatttaaatgtagctgcgtctgctcgttgaggtgtggatctttcctcaacacggtgaggtcatccgtttgactgctagcctaggcgtgctgtcccggatggatggtggttcaaatccaccaagattctttagtagtcggaacttattgctcaccaatgaacttaccattgctttaggatgttttatttttgtatataggcttagccggttagggcctgtttggatcagtttataagaaactgtttttttgaaaatcgaggtggttccaaatatatcacaaacagcatcttagttaaacaggaccttaaccttagttaaacaggaccttagttttgatatgaggcctgcactcagcccggcagcgatcaaaatcgaacgtgtgggatctctgatatttgactaggtctggtcggtagcaaaccaaacatgtaagaatttctacatatactcaacgtcttacaatttgcagtttagagaacagagagtttttgtttttgtttttgcttagttcacgtctctttcatcgaagtggcttctcatttttgcctagactctttattttacaagtaagaatttcttcctagatttttatgatccacgggaatttacactgaatcttttgtcagaaaaatgcaagaatttcatataatccagtttatttttattttttgataataaaatttctctagtaaaaaaatgttgtagggcctaggagttctataatttataattcataccgaattatcagcaatctcctttatagaagtgatatatgtagaaaacaaaaaaaaaagatggcattcacgttttctagaagtggtgataatttgaattttgtccaaagtcgtactgacatgttcccggcgaagggcgttc

SEQ ID NO: 279511 - DNA, 819 bp, Zea mays
cccaagggagattcaagtatcatccatcagtgatccaatctcagctacgttctgtgaacgagttgagaaagctaactcaagccattccttcacagcaggacttgctcaaagtgtaggattaaggaatcaacctctgcgcgtgtacagcatggtgaaatatgctgcaatagcacgaggcgatgctgaaatcttcatgaaatttgcaagagctggatacaaagagaagatatgggatcatgctgcaggggtggttatcattcaggaggctggtggagtggtcacagatgctggtggccgcccattggacttctcaaggggtgtttacctggaaggtttggatcgaggcataatagcttgttccggagcattgcttcatcaaagaattttaaatgctgttgatgcgagctggaactcatcaacactatgaaccaaacaataaggtcttaggagagaatggcctcatgttggtcatagcatggtaaggtaaattggaaaactgatttaagtattcattgtggtgctgttgtgactatggggtaacaccgtaacagtgcagcatataggatagtaatagattgtctgctcatataaacaagaagtcgtctcttgaggctgacaaattgctggcttttgttcaacgatgccatatgtaattttgtataggtgtctgttgatgaaaagcatgtgtgcatgcttttgtttttactaattgacatgtttcttttcaacttgtgcctgtcaatcgtcaggtgtattggttaagacagtgcagcaccatttgctgacaatcataatgttaaaaccttcaactgattcatc

SEQ ID NO: 279512 - DNA, 825 bp, Zea mays
  unsure (1)..(825): unsure at all n locations
ttccgaggagccaagggtgccgaatcagttggcgagccacaatgtaacaaatggtcagtgttctatattggggcctccctctgccacatcatcaatggttgctcctgttctaagaactgatagcacaactcagctgctctctacaagaaataacacagttgactcaaataatttaggttctgttcatctacaaggaaacagtgagctaaagaagcctcgtttagcaaaagtgccgggaagtatgatgctatctaatgctgaaagatccgcaggtgggattcttggttccggtgctcatcgagaagtgattcaaaattcagacccttcacatagggatgctaaaataaaggaccaaactggcttcagacagggtgcttctagcagtaatcggacaatccgttgccaaagatgtaatgaatatggccattctacacatttttgcgaaattgaaaaacttcgtttgtcttcaggaaaacctttgagtgagcgaaacttgaaggatgcatctgccaaaagaaataagacatccgaagttagtacattggcttctagtgaaaaaactccttccagagaaccagagcatgtcgtaaagtgtgctattaatcagaatctgataaatgggcctaatgatggtatacctgccccatccagccatgtaaagaagcactcattatcacctcgagctaatgtgtccatccctgggagcggagtagattgtagcaagcctaagttcaaaaataatgatccatctctatctggcacagcaggaaatcttgntcataatggtcgcattatgccaaatgatcatagggatgaacctgctca

SEQ ID NO: 279513 - DNA, 429 bp, Zea mays
cgtccgattcccggtcgaccccgcgtccgcggacgcggggcgaggcgcgccaccgcctgccgaatcgggctgctgaaaccaccttggcagtggcttcacaggccgctttcctcgcggggttctcgcagctcgccgcgcagccgggccgcgaccgcgccgtggcggtggcggtggcggtggcgccggcgccgggcccggcccgggtggccgttgcggcggtgggtagcgccaagttgggcgtgaaggcggggacgtccaggaccgcggcggtggcgcccctcggggtgccgtgccgggccagcctgatcgagcccgaccgcgggcggctggtggacctggtggcgcccgaagagggcgggcggtgcgcggcgctgctgcgggaggcggcggagctgccgcaccggctgcgcttgggccgcgtcgacaagg

SEQ ID NO: 279514 - DNA, 561 bp, Zea mays
gcccacttgaagaacctgcagcatcatgtgctatgttgtcttgaatcttacatgagctaaattctgaagtgttttcttactgacgaaaacatacacacctttgcaacgccatcctaaactctttacatgtgttatcaggtgtgggaacatgaagtcgatggcaacacaacctatcaagtctgtgatggcagcggtgaagacccaaactgttgcaggagtgtgtttgcgctgttctggagcgcttctgaccatttgacctacatgggagttgagatagcggccgacgactggagcacctgcaggatcgtccttgggcgaggcgtcgagcagctcaaagggagtcttcccaacaacattgttacgtccggacgctccgtcgacgttgtcatcgctgatgatgatacacttcagattgattgacgcagttcagggtagtcgttggtagtcatgcatatagctagaagataagctggtggctgttggtgcatgcttcaaaacaaatcaaaaggctttcttcctttttttgcttccgggctctttcaaccatatgtactatgccac

SEQ ID NO: 279515 - DNA, 445 bp, Zea mays
aaccctccaaggcggtaggccggagcagagcgcgctccaagctgaatcccccccatctcctcgtcgccgtcgtaagtcgcagccgatgacctacccgacgctaggagtagcgtctgattgaagaaaagtttattcaacaccggttgggatggtttgggcatgtccaacggagatcctgaggcaccggtgcatagagacatcataagacaggacactaatgtgaagagagaggtagaagttgaccaaacttgacatgagatgagacaatcaaaagggacttgaaagaatggaatatctcaatggaattgtatttggatagaagtgctcggaaaaaagctatccacgagcccgaaccatgatttaggccctttttcttttaatgctctcaaatgcttttcttcctccctttatctctttttctactattggggaccattttgtttgg

SEQ ID NO: 279516 - DNA, 1044 bp, Zea mays
ggtgttttcccccaaacaccgctccacctccttcctcctcgttgcgctccggatccatccccattccccagtcgccgcccaagtcaaaaggagggaagcttcttccactacagtccttgaggccgcccatcaacgactagacgctggtcaagctgcaccaaccctagccccataaccctaggtccctcctccacgcccccttccagagaggcgaggaaggaggcgaaaggaaccatggattcctccggcggcggcggtggagcgcagatcaagggtatggcgacgcacgggggccgctacgtgctgtacaacgtgtacggaaacctcttcgaggtctcctccaagtacgccccacccatccgccccatcggtcgcggcgcctacggcattgtctgcgcggctgtcaactcgcagtcaggggaggaggttgcgatcaagaaggttggcaatgcgttcgacaaccacatcgacgccaagcggacgctcagggaaatcaagctgctgcgccacatggaccatgagaaacatccttgccttaaaggatgtaattcggcccccaactagagagaactttaatgacgtgtacattgttactgagttaatggatacagatctccatcagatcgtacgctcaaatcagccattgactgatgatcattgccagtacttcttgtatcagttgttacgagggctaaaatatgtgcactcagcaaatatattgcaccgcgatctgaagccgagcaatttgttcctaaatgcaaattgtgacctcaagattgcagactttgggcttgcaaggaccacttcagagacagatctcatgacagagtatgtggtcactcgttggtaccgggcaccagagctgctgttgaactgttcacagtatactgctcccattgatgtctggtcagttggatgcatactaggtgaaatcgttactcgtcaacccctgtttcctggacgggattacatccagcaattaaaattgatcactgagctcataggctctccagatgatgcaagcctgggatttcttcgaagtga

SEQ ID NO: 279517 - DNA, 393 bp, Zea mays
gaaaagccgggacgaccgcacgcgtccggacaaacccaatcagaccgaatgggcaccgcatcaccggactccggcgaccttatcgaggtggggccggcgaggccgggatctccggtagccgtggtgaccatcaaccggccttcggcgctcaacgcgctgacgaagcccatgatgatctccatggcggctgcgttccggcggctgggtgccgacgacgccgtggcagcggtggtgctcgcgggccgcggtcgcgcgttctgctccggggtggacctgacggcggcggcggaggtgttcaagggcgatgtgaaggacgtcgccacggaccccgtcgagcaaatggagctctggcggaagcccatcgtcggcgccatcgacgggttcgccgtcact

SEQ ID NO: 279518 - DNA, 425 bp, Zea mays
ggcctgaatcccgggcgaccacgcgtccgcggacgcgtggggtctaatgctacaaaagtttgctttgaagataagtttttccctggaaaatcgaggaaaattggatatgcccctttcttgtttgcttatcttgtcatctgcctcatcctgttcctaaactcaattgtatttgcacctaatttttctaggatcactgctactgctggtctttggtcttgggctgctgtatcacttttctttgcatcacaagtaatgttctacagagttagcagaaaaaatcctggctacatcaaggcaaattccaagcgaactgacccaaaggagccacttatggaaattgatcttaccaattcctctacttggacaggcaattggtctcaactatgccctacttgcaagataattcgacctatgcgctccaaaca

SEQ ID NO: 279519 - DNA, 843 bp, Zea mays
tcgctattctagcgcgctctgacggaggcggcgcgttcgatcctcacaatgcagtgaaatcactctgctctcctctgcttccttctataaatctggtagaataactccgtcaagaagcaacgagcatagaacaattcaacagaggaagaatcaggcagggagctctcccattcgcatcccaggccaacctcaaccccaatccaatccgttgcaggtcgcaggatggctccgcgtgagcaccaccagccccaggaggaggaggaggaggacaccgcaggcgtcgtcaagctcatcagcgccgagggcttcgaattcgtcgtcgacaagaaggccgccatggtctccaacaccctacgcaacatgctcacatcgccaggcggtttctccgagacgcgccagggcgaggttcgcttcccggagatccccaccaatatcctcgagaagatctgccagtacttctattggtcgctccattattccagtggcaaggaaacagcagagtttctgatcgaacccgagatcaccctggagctgatgatggccgcaaactacctggacacttgatgaggagcctgagggatctaaccctaggaaccgtttggttgtgaaatttgaaaaggtaatgtaaacgttatccgataacactgtaaattttaaaaagtaagctattacttggattgtttggttcagcgtaagagattatgttgtggcttaaacaaacacgctccaacgtaatcagttactgttgtaatcaaaaacaaaaaaaacaacaaaaaactaaaaacaaatcgaacaaagaaaaaaggataaaagaaaacattttcgaaaaaaaaaaaggggggc

SEQ ID NO: 279520 - DNA, 467 bp, Zea mays
gaatttcaacttgggctaccttccaggaggagataaaactgtaatcacagtgcctaggacaactgagctagcattgcgagctgccagcagaattctcagttctgggggactcataagtgttcttgtatacattgggcatccaggtggaagggatgaactcgatgttgttgaatcattttcatcaagccttcctgtggatacctgggtgacctgcaaacttcaaatgctcaataggccagtttctccagtactcgttcttctgaacaagaaatgatgacagttccgatacacaaaaagatggggcttttgggggttaacttatgagtgatgacgcttgctgatggagctcaatacagccaactagcttcacgccatccgtgcagacatttgattggcagctgcagtgtaacttgtcataattttgataccactcttgttgtgttgcccttattcacgactagactttc

SEQ ID NO: 279521 - DNA, 836 bp, Zea mays
tccacgcgtccgaaaaaggcttaaaggttctgaagcactaagaatctcaaatagcataaatcattgttctgcatttgagttctcaggtgttcaagagagtttggagaatcaagatttctcatatgatattgattttttgtcacaattcattgagaaagaaagggaccattattcttctctctggagtccaactaattcaattgggcagagagaagcaagagaatggctgcgaaggctttgggttctgaaacctgatctgagagaactaatatggaagggtgcatgccttgcaataaatgttgacaaatggtattcatgcttagaggagatatgtgcatgccatagtttaccaccacctacagaggatgagaagcttcctgttggcactggtagcaacccagtcttcattgtctcgggcaatgtgattaaaatatatgctgaaggaggattggtttattctgtccatggtttgggcacagagcttgagttctatgatctcctgcaaaaaagtggttcacctttgatcaatcacattcctgagataattgctagtggcttccttgagtataaggatgatatctacagcacggttccgtggaatggaaaaggaataccagaaattttggttaagtactactcattggaagtttcttgggccaacagctgctttccttttgggctttggaacaagcaacgatttgggatgtgtaattcggctgatgtttcaaacaaaccaatttggccttacatggtaacaagaaagtgcaaaagagatatttttgcttgcattcgcgatatgctgtccaagactgatattcttcatcttgcattattct

SEQ ID NO: 279522 - DNA, 457 bp, Zea mays
ccggcacacgcctcccttatccctttccgcgccccatcaccattgccacaaatagcaaccaaggcagtaagcctagccaagccaaccgacggcggcgagagtatatatacacacacacctgacgcctctgctgctgctgggatcaacgcggcagcttagtgacgacgacgactcttctgtctctgcgttgattaatggacagtaacagatccatggcgacgagcggcgtggctccgttcgtggccaagacgtaccgcatggtggatgacccggcgaccgacgtgcgtggtcgcgtggggcagggacaacaacagcttcgtcgtggccgaccccttcgccttctcgcagacgctcctgcccgcgcacttcaagcactccaacttctccagcttcgtgcgccagctcaacacctacggcttccggaaggtcgatccggaccggtgggagttcgcgcacg

SEQ ID NO: 279523 - DNA, 433 bp, Zea mays
agaaagagtcccccacatggttcctcttcgccaacctgtttcgcccgaggtcgctctacagctttgggttcatgcgctgatcgagccgtcgcttccaagaaccgctgccgtgcagtaagttcaccaccgttcacgaagcaatccaggacatggggggatcttcttcagaaggtggaaaaaccttcgttgtgtcctagcagtgcaggtttggcatgtaggtagagcatggcatgggtggtgttcatatatccgtcgtcgccgtcatcagcatcatcatctgtgtcatcagcatccgcgtctgtaaatatgacagcatttgaccatttgtacatataacgtgtaaactaaaggacgtaaatataagctgtacagaatatagttaaatcccagatttgttgcgacgtcgtaaaagccggcgcccttttctcctttt

SEQ ID NO: 279524 - DNA, 290 bp, Zea mays
atggtattcgtcgtcttggcttcatcctctcgcccgccgtctcgactgtagcaagcggggctgctgtccgccgcattcaggagccatgcgtgaggggatgagggagagggacagaggcgggagcccggatgcgtcaggtcctccgcccttccgcggcccggcgtacaagacgaagctgtgcgcgctttggaggggcaggggcggctgccccgccccaactgcgggttctcccaccgcgaggctgagctccggatgccgccccctcgcgcgtccttccagcctcgccgtcg

SEQ ID NO: 279525 - DNA, 400 bp, Zea mays
cagcaaatcctcctcccgtttcaccatgccgccctgctgctcccccaccacctccgccgtcaccgctgcggcggcttctcccggcgcctcgcgcacgggtggcctcctgcgccgctcgcgcccagcccccgccgccgggaatggtaaaaagattgattctctgagggcaatcaatggagcaccaccttgcattccggtgtccaacaggtcgttattgactcctgtaaccttgccagttttccgggatccaaacatgaggaacgacacgaggctgcgcatcttatcaggcacagactatccttccctttcccaggagatagcaagttacttggggctagaacttgtgaagataaccataaagaggtttgctgacggtgaaatatatgttcagttgcaagaa

SEQ ID NO: 279526 - DNA, 365 bp, Zea mays
tccaggggcacgctgctcccattccgccgcgcccgtagtcgccggtccccttgctgcttcgtgctcccgcgcaatcagtgaacacctccacgcgcagcgccgcccgtcgactccatggaagctgatccgtcgccgccgtcggcgtgcgcgctgactgagtagctcgtggagaaggtcgtgctgcgcaccccatctgctgacccggcgatcctcgtccatgctgcactcgtctgcgcacggtggcgcatcgtgaatggcccgcggttcacgcgatgctgccgcaaccttcaccgctggtgcgagggtcgcagcccccgatgcttggctttcctcccagcaccggcgccgggattcgcttcgtgctc

SEQ ID NO: 279527 - DNA, 602 bp, Zea mays
ccagctaaccacttccccaacccccaatccatatctagcattctactgtagtggcaacgatgatggccgtgtctctgcagctgcgcccaatccctcgtctccctccgtcgagaaatcgctgcgcaggcacaagtccgcggatggccgccttgagctgcagatacaaccagcctaccaatgtgcgagggcaaacaaggctcacaagccacataacacgcagagatgccctgtcgttcatgtcatccggcgtgctggccgcattcgtgctcgtggtggccagtccggcagaagctagaccttcgagattggagaacaaaaggaaagccctggagaagcttgagaagctccgggagaaggcgttaggcccgaaggagaagagcggagcccccggtaacggtaaggagatgccccctccggcgaacttgctaatccctcctgcggccgtggaggctttcttgtgaaaggcagtctgccgatggacccttcccttgtgttaaatggcgaggctagtctgagtttgtacgttgttggagtcttgtataactatgccaactggaaaatgaattgaaagtgagcttgcatgtttggctgagagtttggtc

SEQ ID NO: 279528 - DNA, 473 bp, Zea mays
tccgcataacagagtattcacatgcaaggtgaccgtccacctggatgaactggtcaacaccattatggagtgtttcagcgaccccaaacctaagaagaaagctgcacgggagaacgccgcacaaggggcattatggtgccttgagcgctctggttatgtcaagtcatcttcagatgttcctgacctgtgcggccatcagcccttctgctagccagatctacccttgtaggagtattaatgttggtagacgggtgcagcttgttgctgtggcacagtggttatccatgcactgatgccatgatactcttgagaagttgagtcccttatgaatcttgagccggctgtgttggctcgtgtacctagtctctagctcgtttggttacatgcccaacgcctgcacttgtactgtgtaaaatactgaactccggcgatcagtgcaataaaactgaaactcctagcgagctttttctttg

SEQ ID NO: 279529 - DNA, 652 bp, Zea mays
cacctcccctgccgtctcttgaactgaatcccccactccgacctccagttcgatcgcgttcgcggccccccactccgtgttccggaataagtagccggcggtttcctcaccccaggttttgcagttgctggggagtgggaaattcgtccggctccggtttggccaatgctcctgcggtttcttggagaggccgctgaagcagcagcccttgcctgagggattctccgtttctcgggcggagagttcggttgcggcgggggacaaaaagaattctttcgtcggattggcccaagttcttggttgatccgttacataggcccccccactgtacgctgtgttagcctttttccacgcgtttctttccttactctagatccgtgtccccgcccgattatttggggggaataggcggccgatcgaccgggggcagagggatttggaggcctgacctccgatggaggtgcacgccgacgtcgatgggtccggtgtgcccctggccgtgctcctcaagcgggagctgtgcaaccagaaggtggagaggccggacatactgttcggggaggccaacaagagcaagaaaggggaggacttcacgcttctcttgcccaggtgccaccgcaccacatgcgaaggtggcggcagtggcggccgc

SEQ ID NO: 279530 - DNA, 504 bp, Zea mays
ctctagccgaattttctctagcgtaaatgtgttacgagaatttgatgttctcattccagaggaagctcgccaattgagaaggaaagctctctctcgtattgaatggctgcaaaaagctgatgtgcctaccatagcacagattgaagagttccattcgatgcagaggatgatgaatgctcctgattcaaatgataatattgatctactgttgagcattgatttgttgggtttacaaggagcaggtaaagcttttccaaacaagattgtttttgatgataagcttgtgttggctaacacacaagaattctttgatggaaattttccagtggattcttggttaccaatttttgtgaattgtctttatcctgtaagtcaattaccttcagaagctgtcgttgtaaatgttacatgtggtagtggacgtggtggtttacccaccactgcttggattagttctgcagttaacaatcgctcctcagacatcaacaaaaggattcgcacagc

SEQ ID NO: 279531 - DNA, 513 bp, Zea mays
gcaggtcagcctgaaagaaagcggcggcggcaaagcaagcagggcactggctcactgctctgtcctctcgtctccagagttcagaccaccgcatcgccatggcgccgccgcagacgatcccccggcgcggcctcttcattggcggggcctggagggagccgtgcctcgggcgccgcctgcccgtcgtcaacccggccaccgaggccaccatcggcgacatcccggcgggcacggcggaggacgtggagatcgcggtcgccgcggcgcgggacgcgttctcccgcgacggcgggaggcactggtcgcgcgcccctggggccgtgcgcgccaacttcctccgggcgatcgccgccaagattaaagacaggaaatctgagctggctttgctggagacacttgattctggaaagcctctggatgaagcatgtggagacatggacgatgtcgctgcatgctttgagtactatgctgatctggcagaaagctttagatgggaagcaacaggcaccgatc

SEQ ID NO: 279532 - DNA, 295 bp, Zea mays
gctgctactgccagaagactcgtcgatttttttttccagctccacttgagtcatgtgacgagaagatttgcagctagtatatcagaacggtggatttgggcccgagtgatagcgccggaggaagcgtgctccgtgtgggccctccctccggaccccgcccgcgaccgtttctgccgcatggaggaccgccgccgcgtgcggcgttagtcggccgggcggcccgccttccagttccagccgcttggaagccgtcgaggtactccccgccggcgtccaaccttacacagtccgtgtt

SEQ ID NO: 279533 - DNA, 589 bp, Zea mays
  unsure (1)..(589): unsure at all n locations
ngtcctcagtgcgcggccggccggggattcatagggaatcggatcggaggggaagcaggagcccgcagggggcggctagcgcagtctcaattcaaggagctgaggacgacctgtccgtcaggagctgatcgagaaacggagggacggttccacagtttcagtccagctagctagctagctagaagatcccattcgctgacagatgggttcctacatccaaggagatggtgaggtccctgtgtacgagtcgggcgccgaggtgcttgagaaggtgcaagagaaatgggcggcggcggcggcgcatcgcggcctcctccctacccggccatgtactcgagcgtgttcggcggcatcatcctggacccggccatgatggttctccccatcgacgaccacatggtccaccggggccacggcgtgttcgacacggccatgatcctggacggcgccctgtacgagctggacgcgcacctggaccgcttcctccggtcggccgcggcggcgcgcgtgggcacggccccgctcccgcgcgagccctgcggccatcctgatccagatgaccgccgcctcgggctaccgcatgggctcc

SEQ ID NO: 279534 - DNA, 334 bp, Zea mays
agcagttgccattgctctaaagctatcatttggtggatcaaatcaattcatctacgtccagacatggttcttcatagtagtaagtcactatttgctgcttggtgcaattaaactacttaaacaaggctctggactcgttcaacacggctgtggtttctcctgtatactacgtgatgttcaccattcttaccattgttgcaaacatgatcatgtacaaggactgggcctcgcagactgcaacgcagatcgcaacacagctatgtgggtttgtgaccattgtcgcggggacttttctgcttcacaagactagggatatgggatatccacaccacca

SEQ ID NO: 279535 - DNA, 276 bp, Zea mays
gggcgatggtcgtcaaagaaaaaacaagattaaagggtgcgtagaaggaggaagtggtaagaaagccaatgaaaatgaaaatgtcacaagtaagaaaatgattcgtgggaggtttaagtgtccaaactgtggtgaatttggccacaggaaagcaagctataaatgtcctttcaatggaacaaagaaaagaaaaaggagaccaaggaaaaatgtgactaaaggttggtttccaaaagatttcgaagcttcgtcgcagctcatcctgcaagagaacga

SEQ ID NO: 279536 - DNA, 399 bp, Zea mays
ctcaggaggccaaagccccttcctcagcttctgcttgtacagcaggagtgcctccccattgaaagcaatgctgagactggaagctgcgctctgcaatctgcacagcccacacacggctctagctcgaggaacagcagcagccagcagcacgggtatccttcacaggtagccgccctctggttctaagaaccccctcctcttcaacgaattattatggctctagggcgggatgatcgtggaggagctcctacagtggtggcgtgtggtagatagaggtggtggagcttgtgtcgggtaggggaagagaacggcagcagcgctagtggctactactgcccaccaggattagggcggacgcgtgggcgcacgcgtgggcggacgcgtgggcggacgcgtgaa

SEQ ID NO: 279537 - DNA, 359 bp, Zea mays
  unsure (1)..(359): unsure at all n locations
tagctgcataagtttaaggtggactgtgctgtcctgtatgtaatgcgtgagagacatgttgtttatctgccgtgctgggttggacgccttttgccttttgtggagttttccatgtgccatgcgattctgtctaatggtacgatatgtttctgttcccctatgctgggtttccgtgtgctatactgctatgtaattctgcccaaatgtttgtacatgttatcagtgtgattggagagcctatgtgatgctcgtataggatgcacttttcatccgaaatgttttattttttttgacagatcagatgattgtattgtattgtcgtgccccgaaagtgttttgcatcaaaaaaaagaaanaaa

SEQ ID NO: 279538 - DNA, 398 bp, Zea mays
gcgtcgatggcggctatggatgcggtgatgcaacgcgtcctcgaccagttgtcccaaacgaagagtcgataacagacgccatgattggacgctgcagcgagctcgagcaacgaatcgaagcgtctgagcacaaggtggagacccgattcatctccctagagatggatcaggcgcagttcgaggagtggcgcccagatgtggagaagcgcctcgacaacatgtcccttgaactcgccagggcgtccaggctcctggagcgcggcaccttcactgtcgaagcttccaaacccggtctgattctgtcttcggggtcggcgttcgggcgctcacctgccggattccacaacgccgactggccggatggccactgcgtcgaacacaatcaccgggagcgggag

SEQ ID NO: 279539 - DNA, 371 bp, Zea mays
gttgatagattggtgattggtgtaaaagattgagatcagggattttccttagtctgacctgagtgcttaacagttcacgagtactcaagagcagccaggcacctatgaattctccattggtcccatcctcatgtgcccgtttgtttcagagatttcagtcctgaaagttatgaatgaacatgttgtattttgtgagcatcagctcacgtgattgccattggacaaaaacgtgataaaagtgttaatacttcctatttcaatatgttttgtccattcggtgtcattactctaataggaaagacatagctgagacatggagaagttgaacacaagtattacagcaatacagcactggacaacaaaattaatct

SEQ ID NO: 279540 - DNA, 398 bp, Zea mays
  unsure (1)..(398): unsure at all n locations
ggcggccgtggcgtctgagccctgagtcagttacacgccctcgtgcgcgcgctcctcccgcgacgcatcggcggaaagcgcgcacggccacggncaccggaacctcaaaagcgagggtgtggtgatgccataactaggaccgcacgcacatgctggcatgcatccatgtccaggatatgcaacgacgcaaggatcatcccacatccacatccacatccatggccggcgttgcctttttggtgcgtgtatattaacccgcgggccgtcgttcttgcggctatccgcacactgaatcacgaatctctcgagccgcagtccagtccatccggctgcaggctctctgagtctgagtacgttggcgttccaggcgatagctagcttggcttgcacaagcgatc

SEQ ID NO: 279541 - DNA, 474 bp, Zea mays
  unsure (1)..(474): unsure at all n locations
tctacgcgtccgagtagcaacaggagcgcaggcggaactagagcggtcttggtatggcttattccctcgcgcccgcgtcgtgggcactgccgctgcagatgggcggggctggggcggcagcggcggggccttcctgccgcgcgacgctagccgtcgtcacggagccccgctgggccgcgtcgctgcgccgggcaagggttctcgtggcgctggcgccccggtgcgtggcgctcgacgggcccggcgccagcggcgaggaggaggcgcccaagatcgaggacgagaggaagaagagcggtgagacgaataagccggcgcgcggtcggccggtgtggagccggatcctcttcgcctccaagaagacacgatagatcatcatcctcaacgccctcacggncatctatgcaagtgatattccggttttgaaagaggtcgaagccctgacagagcctgcggtcttcaacatggtgcggt

SEQ ID NO: 279542 - DNA, 456 bp, Zea mays
cccacgcgtccgcccacgcgtccgcccacgcgtccgggagcagcactacactcctccacgcctccacctccagcctcccgctggtctggcctctctcgtggtgagcgcgcctgtaagtgatcctttctcgcagattatttttgtagttttcgatggaggcggattagctttgaactggtggatcgtgttgggcatcgtattgtgactggttctgttctgtgaatttcgctagttttttttttctcccacagattactctgaatatgcgtgcccttaattgtgttacgatttggcttcgtcgcggtagtctgttgtgatgcgcccattatttcgcgattaattgtatgtgattctgcgttccattgattgagaataggcagtgaacccttccgtttcttatttcactgctaactgtatctaggattctatggattcgatgtgaagtcccaagggtag

SEQ ID NO: 279543 - DNA, 736 bp, Zea mays
aaataatcgcgctccttctcccaccagctctccccctttttttcctgcccacatacaaatgcttgggcattagcgatcctcctcctcgttctccttccccttctccctcctctgggtctgggtgcgccctcccctgctccacttctccggcgctgacatgacgtccacggcgtactcgcggtcgtccaagctgccgggcggcgagcggcggctgcccccgcgcctcatgcgggggttcgcgtccaagatcgagcccaagaagctgggcgtcggcctcatcgccggctgctgcctcgcgctcctcacctacgtctccctcgccaagctcttcgcaatctactcccctgtcttcgctagctcggccaacacgtccgcgctgatgcagcagaacgcgccgccgacctcgtccaagccgtccgtgccggagacggagaccatcccgccgcatgagacgataggcggcggcggcgacagctcggatcccgtcgatctgcgtgagggcgcgacgggctccgaggagcccggcttgccggaagctgccctcacgaggaaggacatggcggcgggctccgacgagccccgcttgcccaccaggaaggacgacggcgaggatgcggcggccgagcccaccaccaagccatctgaggatggcaggggcaatggcagtggtggcgggccaggagtaggcaagatgatttgcgacgagaacggcgtggacgaggggttcccgtacgcc

SEQ ID NO: 279544 - DNA, 366 bp, Zea mays
  unsure (1)..(366): unsure at all n locations
ccttccccttccccctcctctgggtctgggtgcgccctcccctgctccacttctccggcgctgacctgtgctgccgcagcccgcacgccccgcgcgacatgacgtccacggcgtactcgcggtcgtccaagctgccgggcggcgagcggcggctgcccccgcgcctcatgcgggggctggcgtccaagatcgagcccaagaagctgggcgtcggcctcatcgccggctgctgcctcgcgctcctcacctacgtctccctcgccaagctcttcgcaatctactcccctgtcttcgccagctcggccaacacgtccgcgctgatgcagcagaacgcgccgncgacctcgtccaagccgtccgtgcccg

SEQ ID NO: 279545 - DNA, 571 bp, Zea mays
gttgtcggtacggaaagcaaaggccttgctgctgacactattgcctcattaccttgggtgacttaccaggcacaagacaagcaagatggcaacatggaacagtgtgttatttgtcgtgtggagtttgacgagggcgagtcattagttgcactcccttgcaaacatccgtaccattctgagtgcataaaccagtggctgcagctaaacaaggtatgcccgatgtgcagtgctgaagttcccacttctgtgaacaagcaggcatgacttactcaaccggaagaagatagcggtggcttggtatttatctgccattgatggaatgaaagaagcgccaactgttaaattgttcagggaagcaagggaattggctgggttctgattccctgttttcttcagttcgacaggcttagtcccccccggcctgtacgcatgctaatttgtatggccataccgctggttatttatgcattccatcagacgccgaggattcattgcttgtagatgtaaatcaacaatcacaccaccatagtcaatagctgttgttttaatgccaatagcaacgttcatgttt

SEQ ID NO: 279546 - DNA, 434 bp, Zea mays
cgcgcacagaaacacaagcgagtaccagagcagctaggagtggtcagtaatggcgcagctgagagcagccgccgacgagcagcaggaggcggcgatgcacggcgtcgcctccggcgacgggaacgagagcaacaagaaggcgcgcgcggggctctgtggcctgctccgcgagcgcaaggtggtggacctggcgcgggccaagcggcggctggtggaggttccctacaccgcgacgctggcgcacacggccaacgcgctcctggcagcgcgcgtctctgccgtggccgtggctgcgccaccgggccactggatcggcgccggcggctccatgatcctcgagtccgacccggccaccggcgccgtccgcaagcactacatcggcatggtgaacatgctcgacatccttgcccacatcgccgaggccagcgacgacg

SEQ ID NO: 279547 - DNA, 373 bp, Zea mays
aacaaataagctgaaagtactgtcaaggtcattcgactgttatgctcgctctcatctatgggtgcggtggatgtatacctctacgacatcgagggacttctcataaaatcctatgaacctgctgtgaatgtttcaagagatatgactgcaggagaacattttggcattggagcaaacatcacagatctacactgtatccaaagatagatgatgatagattgtctttctggctctgatggcaaggagggcattgctaaagcagccagtttactctgctcaacttacctcaatggtgatactcatggagatgacaaaaggaaaccagcatttacagaagctgatcgcggggggaccgcaggctgtaggttgtggt

SEQ ID NO: 279548 - DNA, 621 bp, Zea mays
cgaaagaacacctctgttttctctgtttgaaagatgagcttaatcctataaacgcacacaagaagctaacttaagaagcgttcccatgcatacgcattagcttggctagatgagtcactatgacaatgaccgggtccagtgatgtgtctggtctaatcgggatcgtccggcaagaagggaaatgaaatcaggtgcattgaacctgagcttgtcatatacccaccacatctcaaaatataatccctttttcactaaacatatattcatcaattaatctacgaatgcagtttgtatgtacgtttatattcattatcatttattctaatgtggatggaaaaaaagagtgccacaaacaactatattttagcggaatgattaataatctaatggtatacatgacgtatgggcttctaagcaagccatgtgcggaaatgcagaatcggcccatagccggcatcggcggacctgggcatgttgggctggagtcctaagatgacctttttgcgagatatttgactcaaacaatctaaccaactcaactaaactagatacttttggctcttttatttcttttcacgaaactttttgtcaacgtaggtttttagtttggtatacttatta

SEQ ID NO: 279549 - DNA, 505 bp, Zea mays
  unsure (1)..(505): unsure at all n locations
aacacgccccatgtccatgtggttctccgtcggtcttaaaatggtggtgtttcgtcacgtactccctccggtttcctattagttgtcgttctggataaggttcgagtcaaacttataaaattttgactacaaataactattttgttatntagtttttggaacctgatatttatatgcgtcaatttgtcataaaaagtacttttataaaagtatctctacaactattaagagtggagccctcaccgcccccgccgcgaatcccgctcagcgctcacgtcagcccgcacgcgattcaccgccgcccgcggcgcgtagtccggcggcgacgatggcggggcggtcatggtagacgagcgtggtgcgctcaaggaagctgatgggcgtgagcggcgcgtttaggtgtgtggttggcagcgctcgggagtcggacgtgcggcctcgtggttgtgctcaggcagcccgaacgaactgcggatggcgctcaggcgcgcggcgagcagcactc

SEQ ID NO: 279550 - DNA, 752 bp, Zea mays
aatgcagacacctgttatctgaaggcatggaggaggatgctgcttgcagtgcatttgattctgagaaggtaaccttagaggagttccgtaacatgaagcaatcactgatgcgaaacaacaaactagttgttaggattgctggccgctactttccctgggatgctgctgcacctatagtactcggtatgatttctttcagtgaggaacaagtttttgaacccaaaggaatgataaatgtggagcgagttgagcaaagtgcagctccaggtggcagctggagcatctggccatttagtttcagacgaacaaggactattactgctatccagccagtttgtgaaagtattgttgagacttctgtatccactcctaaagaattgacacattttaaagaactagatagagaaaggaataaatccagggtaaagaggattgagaggaaggtgcgatcactcactccaacatctgacgagcttgcatctcttgatctcagagagggcaggaacgtggtaacatttacgttctcaactgcaattgttgggaaacagcaggttgattgccacatatatttatggagatggaatacacgcattgtaatatctgatgtggatggaactatcaccaagtctgatgttcttgggcagttcatgccactagttggagttgattggtcccaaaacggagttgctcattgattttctgcaataaggaaaatggatatcagcttttatttctgagtgcacgcgctattt

SEQ ID NO: 279551 - DNA, 581 bp, Zea mays
gaaaatgaaccgggtcaatgcagctcaatgtcaatggatgcccccatggctggagcagcaaatgaaccattaaatgtaagcaatcataacattgaggaacaaaactcatgtcacgaccttggatcaaggatgtcggcaagtgttagcaatgctaaactaatggacagacatgatatttccaaggagctacagtgcactgctgattccaggctggatactgttcccaaggatcagttctctcctgccattaatccgccggaagttttagacaaacctggcagtcagcttgaaggtgtctccaactatgatgtaaaccaagctccagagactgaaccgggtgggaaacagatgagagaaagaaaaaaaagcaggaaagataaaaagcggaaacgtgacgaaaaactagataaaaaaatatgacccagagtatctagagaaaagctccttaataagaaggaaaagaaagagttggccagaaagcagctagaatgtgaagagctacccctgaacagcggagagcagtgaacccttcatgttacaggaagttttgccttcaagggcaccagctcagttctaagtgt

SEQ ID NO: 279552 - DNA, 515 bp, Zea mays
  unsure (1)..(515): unsure at all n locations
cnttccntctacgatgcctcgcaagcccaaacggaaggctccggcctcaccggcgaggcacgacccttcgccggagccctacccttcccatgcctccccctgctcggcacaatgcctggtagtccgcgacgccctcctcgcgttccacgggttccccgaagagttcgcggccttccgcgtcctccgcctcggtggcctctcgcctaaccgtgaccctcggccttcgtcccccacagtgcttgacggcctcgtcaccacgctcctctcccagaacactaccgacgccatctcccgccgcgccttcgcctcgctcaaggccgctttcccctcctgggaccaggtggtggatgaggagggaaagaggttggaggacgccatccggtgcggcggcctggcggcgacgaaggcggccaggatacggtccatgctgagggacgtgagggagcggaggggcaagatttgcctcgagtacctgccggaactgtcggtggatgaggtgaagaaagagctctcgc

SEQ ID NO: 279553 - DNA, 421 bp, Zea mays
ccagtgtaccgcatcgggacgactgacgcgctttcgacgacacgccaggtccggcatccatgggcgccgcggcggccgacctcgaggcgcgtcagctccgcatcctcggccgtatttctgacctcgagctcgccgcgcagcagcaccgcctcggggcgctctccatctccaccgcgccctcagagaaaggcgaggccgacgcgggggctaccgaggttcatctcgcagccctcctggccgcgcgcggcgtgcgggacttcgccttccgtcgcgttcccgccgactactacgaccgctccctcgaggagcggcgcggcctgctccgagccgactcagtcgcccagctctgcaagagtatcgtcatggtgaacacccaagctgctgtagatgttggtgattgcagtaatccaaagaattcaaa

SEQ ID NO: 279554 - DNA, 300 bp, Zea mays
gaatcgcgttggttcgacgcaaacgctacccggcgcccccttgcccttggggccggctattttaccgcacccgttctcccctctctaccgcagatcagatcacactcgtagagagaaggaaaaatatccccaaaccctagctcccgatctcgttggcgaaccctcgcgtcttcttcgaacttgaccgccggcggccccccggcggcccggttcgtgatggagctgtacgccaacgaggtgcccaagaccgcggagaacttccgcgcgctgtgcacggccaaaatggccttggccaattcc

SEQ ID NO: 279555 - DNA, 826 bp, Zea mays
ctcttctcgcagaaggcggccgggcgcgggtgtggcctgcgggtggtgcggtgcatggcagcgtcggacgcggcgcactacaaggccgcgcgggaggacatcaaggaactccttaagagcactgcctgccaccccgtcctggtccgtctggggtggcatgattctggtacctatgacaaggatattaaggactggccacagcgaggtggagctaatggaagtttaaggttcgatgctgagctgagtcatggagccaatgccggcctgattaatgcattgaagtttatccagcctatcaaggacaaatacccaggtaccacttatgcagatttgttccagttagcaagtgctacggcgattgaggaagctggtggtccaaaaattccaatgaaatatggacgtgttgatgtcacagcagctgaacagtgtccgcccgaggggaggcttcccgatgctggcccacgtgatcctgctgaacaccttagggaggtattttatagaatgggccttgatgacaaggaaattgttgcactatctggagcacacacacttggaagagcaaggcctgaccggagtggctggggaaagctagaaacaaaatattctaaggatgggcctggtgagcctggagggcaatcatggacagttgagtggttgaagtttgataatagttacttcaaggagatgaagttattttttttgaacgaaattcacgaccctgaagtttttgagccagctcccctggaaagaagcgaagggaccaggatcttttactttggcttacaaatgctgcattttttgaggaccaatctttaagggtttcccc

SEQ ID NO: 279556 - DNA, 354 bp, Zea mays
tttggaagatgatgtggcctctcgaatatgatcctggcatttgctccacttatgaagaggataatactggggctgtggtccacaaaattgaaggaaaggtaaaatcaatacgtcagtttggtaagtacgagagggagaatatgaagaagagggcaaacgatggtgatggacctgtccctatttcggtcttcctggttgctagtgtcctaaaagagaacagtacaaagcttctgcaagaggctcgagggattgatgacattattaggatattgaataatgttaatggaaatctggacgccaaaagagcttgcgttgttgcactaaaactttataagaagtatcacaaaaaggaaa

SEQ ID NO: 279557 - DNA, 497 bp, Zea mays
ccatgggcagtcagaatggagtatgagatctacaaagcggcaaattccatacatggctattgtaaggtgggagagctgaaacctgagaagtcgatccctgattcaattctcagacgagcaaaagggcttgcaatcatcactgaggtaaaggttggagtgatgcttacatacaaaatcggtactggattggttgttgctcggagaggtgatggttcttggtcccctccttcagccatctctacttgtggtcttggatatggagttcaggctggaggtgagttggctgactacatcattgttcttaggaacaaagatgccatcaaaacttttagtggaaatgcacatatgtcaattggggctggtgttagtgcttctgctggtcattttggacgagtggcagaggctgatttccgtgctggtgatggtggttatgctgcctgttacacatacagttgtagcaaaggtgcctttgtgggctgtgcgctcaatggaagtgt

SEQ ID NO: 279558 - DNA, 530 bp, Zea mays
tcggtcctacatggcagaaatggacctataaggttggtctgaatggtgaggctttgagtcttcattcacttagtggcagctcttcagtagagtggggagaacctgttcagaagcagcctctgtcatggtacaaggctttcttcaatgcacctgatggtgatgagccattagctttggatatgagtagcatgggtaaaggtcaaatctggataaatggacaaggtattggttggttctggcctggctacaaagcttctggagcctgtggtgaatctgtgattaccgcggagagtctgatgaaaagaagtgccaaaccaactggggtgactcttctcagagatggttccatgttcctcgttcatggcttaatccgacggggaaccttttggtgatatttgaggagtggggcggtgatcctaccggaatttcgatggtgaaaagaacagccgggagtatctgcgctgatgtctcctaatggtaaccattgatggcaaactggcgaacaaaaggctatgagaaagccaaaatcc

SEQ ID NO: 279559 - DNA, 792 bp, Zea mays
aagatcttcaacataccactgttgagcattgcaacctcatttgtggcacgaggatatttctaggagtgctaccaagcatcctagttcaggcaaattggagctgacatctgtatcatctgccctgatcttagctgctggaattggtataatggaagcattagcattgttcctaggatcaggattgtttcttaaactaatgggcgtgtcacctgtatctccaatgcacagacctgctaaactctttctttcattgagagctctcggagcacctgcaaatgtgattatgttggcagtccaaggtatctttcggggattcaaggatacaaagactccggtgttttatataggtttgggcaatctttctgctgtagcccttcttcctctacttatatatggctttaagcttggcataactggtgctgcaatttctacagttgtgtcccagtacattattacagttcttcttatttggtctctaagtaaaagagctgttttgcttcctccgcgaatagatcaattagagtttggtggatatctaaaatctggtggaatgctgttgggaagaactctttcaattctgctaactatgaccattggtacatcaatggctgctcggcaaggcccaacagcgatggctgctcatcagatttgtttgcaagtatggcttgctgtatccttgcttgcagatgcattagctgtttctgcccaggtatgtatgttgcgttctggaagtcatctggctgttaaaattggtttcctgaactctgctggtcaactatactacatgcagag

SEQ ID NO: 279560 - DNA, 1238 bp, Zea mays
ttgtccttccacgcgtccggctggtcaagaacgaatacagttggaacaaagaggccaatgtgatatacctggagacgccggctggtgttggctactcctactctgctgatgctgcttactaccagggcgtggatgacaagatgacagccatggacaacatggtgttcctgcaaaggtggctccaaaagttcccacagtacaggggcagagacctctacatcgctggagagagctacgcagggcactacatcccgcagctcgccgaggccatggtggagttcaacaagaaggaggagaggatcttcaacctcagaggcgtcgccctgggcaacccggtgctggagttcgcgacggacttcaacgcccgcgccgagtacttctggtcgcacggcctcatctccgacgccacctaccgcgtgttcacctccgcctgcaactactcccgctacgtcaccgagtactacggcggctcgctgtcgccgctgtgcgcccgggtgatgatccagcggacgccgagaccagccgcttcgtcgacaagtacgacgtcacgctcgacgtctgcctctcgtcggtgctctcccagtccaagatcctctcgccgcacgagcaggtcgggcagcggatcgacgtgtgcgtggaggacgagacggtgaggtacctcaaccgccgggacgtgcaggcggcgctgcacgcgaggctcgtcggcgtcgacaagtgggcggtctgcagcagcgttctcgagtacgagctgctcaacctgcagatcccgaccatcagcgtcgtcggatcgctcgtgaaatccggcatccgagtgctcgtttacagcggcgaccaggactcggtgatccctctgacgggcagccggacgctggtgcagaacctggcgcgcgacatgggcctcaagaccaccaccccgtaccgggtgtggttcgaagggcagcaggtcggaggatggacgcaggtgtacggaggcggcgcgctgtccttcgccaccatcaggggcgcctcccacgaggcgcccttctcgcagcccgggcgctcgctcgttctcttcagggcgttcctgcagggccagcctctgcctgaaaccttctcgtgatcagggtgcccgatgcagctccttctgcaggtggggtggggggttttgcactgtagtaatctgtaagaaggtgtttggtttggtttggcgccgcggtaggagtaggagtaggagcgagcgagcggccggcgctgttcga

SEQ ID NO: 279561 - DNA, 527 bp, Zea mays
cactccgcttcatcttccgctggatccctagtctactccggcctaacgccttgggacctccgctgctgttctctcgccggtcatttttggttcaggggctgatcgcttgatcggatcggcgtcgcacccctatacatcatacatgtcgacgcccggctcctgtcctgcgacaaccgccgccacccaccctcccatgtgcgccgctagcgccgcaggtggatcgcaaaaaatggtgcgtccgcgactagtgctcttcggggactccatcaccgagcagtccttccgccccggtggctggggtgccgcactggctgatacctactcgcgccaggctgatgcaggttggcagaggctatggtggatacaacacaagatgggctcttgtcttagtacatcacatctttccgctggatggtttagcaccccctcttgcaaccactattttctttggagcaaatgacgcagccctgttaggaagaactggcgagcgacaacatgttccagtttagaatataaaaataatctca

SEQ ID NO: 279562 - DNA, 555 bp, Zea mays
aaattttgcgaagaacgcccttgtgaaaccagttactgtcaatgtgggaagagctggagcagcaaatgtagacgtcattcaagaagtcgagtatgtaaaggaagatgctagaattatatacctccttgaatgcctccaaaagactccacctcctgttctcattttttgtgaaaacaaggctgatgtcgactacatccatgagtaccttcttctaaagggagtggaggctgttgctatccatggaggaaaagatcaagaggagagacagaacgcaattgactccttcaagactggtaggaaggatgttctggtggcttctgatgttgcatcgaagggtcttgattttcctgacattcagcacgtcattaactatgacatgcccgccgaaatagagaactatgtccaccgaatcggtcgaactggtcgatgtgggaagactggcatagcaactaccttcatcaacaagaaccaaactgagaccacgcttctcgatctcaagcatctgctgaaggaggcaaagcagaggattccaccggtgttggcggagctcaacga

SEQ ID NO: 279563 - DNA, 397 bp, Zea mays
  unsure (1)..(397): unsure at all n locations
cggacgcgtgggcgacgacgacatcacagcgcacagcgcagttgtggttgcagtttgcttcttcgctcgacatgggcacgggaggcgtacgctggtcgtcgccgccctcgccgtggtgttggtgacgaggctgtggacggcgctggcccacctggtgtggcggccgtacgccgtcgcgagggcgttcgcgcggcagggcatccgcgggccgccgtacagggtcttggtgggcaacggcaaggaggtccaggcgatgcttgcggcgacgagcggcgacacgctggacctcgcctcccacgactacatcgcgcgcgtgatgccgcannaccgcgcgtggttgtcgctctacgtgaaggggtgtcctgacgtggtccggctcgactccggcgctgttcgt

SEQ ID NO: 279564 - DNA, 649 bp, Zea mays
  unsure (1)..(649): unsure at all n locations
gccgggggcgcgtccggaagggcgccgncntctttacagccgngtgctggcaaggcccagcaggccacgcagtcggcccggacggttacgcccggggtcggcgcgcaacgggacacgggtgccgccgccacggccacccccggcgccggcgagcaggacaagggggtgaccgtcacggggtacatcgccgagaagctccggccgggcgacgaggaccgcgcgctcagcgaggcgatctccggcgccgtgcagcggcgcaaggacgacgccgggggcacggtagcgcagcgcgtgccggcgcccggccaggccgtcgcgtcgctcaccggcgggaaccgggtctccgagaccgtacagccaaccaaagccacgggggaagacgtgaaggaagggtatgcggcggaggcgcccgtgacccgcggggaggagatcggcggcgcgaagctgaacacgaatgccatctgaagtgatacgcaagaggagagcacggctgctctctgattactgtgtcaggtttgtgtacacgtggatgatgtgggttgcgctgtggagtagcagctggaataaacatgctggttgtgttcgacgtggtacgtttttggttttacgtggtggtgtgatcttgtatccacatgttttttttttactc

SEQ ID NO: 279565 - DNA, 348 bp, Zea mays
agtgcgcgcacccaccgccgccgcggtccagatctcccacccaaagtgctgccggcagcatgaggagcgcgggtgcggcggcgaccgtgacgcgtctggcgcagcgggtggtggccccggcggcgcccacgccccgaggccagctcccgctctcctggctggaccgctacccgacccagcgcgcgctcatcgagtccctccacgtctttcaagggccgagctgacgcgggagcggaggcgcccgccagggccattgagcgcgcgctggcttgccccgctggtgagcttctaccccatcgccgggagactggcggtctcggacgagggggagctggtggtggactgtac

SEQ ID NO: 279566 - DNA, 381 bp, Zea mays
  unsure (1)..(381): unsure at all n locations
agaaaaanggccgacgcacgcgtccgaaaactcttctgacttattcagccatggcggctctctgctcgccacgccgccgcctgccgctgccgctgctgctgccgcttctcctcgccgtcttggttgccgcttcccgcggcgacgacccttccggcgacgagtacttcaaccgctccatatgcaagctgcaaccatacagatgcggcgaagtgaatatcacctacccgttctacctttccgacgacacggcggacgtcctggggaactcctcctcctactgcgggtaccctgggctggccatcgactgcgtggacgacgagtaccccaccatccagctcggcggcggcagcagcacaggctactcctacaacgtgacggaca

SEQ ID NO: 279567 - DNA, 514 bp, Zea mays
  unsure (1)..(514): unsure at all n locations
attgtatggtaccttcttatctccacgcatcatcttagatggtatcatgtctttggagtggtctgcctcaagtgaatggattttgatgagtggtggctgtgacggggcaatacgtttttgggacatttgaagagctggatgctttcggcgtctggaccaatcaaggtctcagacttggaaaaaggccccttgttaaaagtgctctatataaggatcacacagattccttaggaccttcaccttccgcaaggagaaggacaggcatttctaagaagagttcatcagctttgcgcataattcaaaaccctacacatggacacatgcaacagagattgcatcctggtttgtcatctattttaaaccgttctactgctcattatggngctgncactggtttacgaacaactgcagatgggatgtaccttcttatctcaagatctgattctcgcttaagactatgggacatctattcatgctgcaataccctggtcaattttgaagcttttccattgca

SEQ ID NO: 279568 - DNA, 513 bp, Zea mays
  unsure (1)..(513): unsure at all n locations
cccggnctgaaaaccgggccgaccacgcgtccggtcgggaccaacgagatttcgtgcgaggtcgtccgggcgtgcttccgtagcaacggtccggcggcgccggccgctcgcccgaaccgcctggccctcccggcagccggcgcgggcgccgaggacggatcggcggttgtcaagggtgtgggcaaggaggactccgacaaggcgtgctccgacgcggccatgctgctggcaaagctggcgctggcccggcggagcgccgacaatgttagcgtggtcgtcgtggatctccgccggggcatatgaatatgattctcggagcgaagcagagcagggcaaaatcatatgctccatgcttgaaactagctcttctgaaatccacgctaatttctcccccattttgaccatccttctattttgatgtagtatttagtagtagatcctgatcagatgaatataatagacgctttttttctctaaaaaaaaaaaaaaaaaagggcgccgctcgagatctag

SEQ ID NO: 279569 - DNA, 569 bp, Zea mays
tggggagaccgacgcgtgcgatatatgcttgcggaggttgggaagattttttattctttaaagtactgccaagcatctcgtaaggtgctcaagtcctctggtcgtgcacctgaactagaagcatggaagcaactgtttattaccctggaggaccggatacgtacccatcaacagggcggttatgcaacaaatcttgcccctggaaagattgttggaaagcttttcacatcacttgataaatctttgtcccgcatgatgggtacacaatctgcaccgttgcctcaactgccgcagggtgctgcaaatgagagaggtgtttattcttctcctgatacaaaagtagtaaatagtcagtcagtgatgtccatggcaccattagtgtcatctgcttcagagcagtctatgagtgaaattggaggaaatagtgtctatggcagggaagttgcacataacagaagtatttctgaaccagacttcggcaaaaccccccaacagcagggtgctgctgtatcaagtaaggcacagagcacatcaggttcaggcagttcacgttttggatggttggtgca

SEQ ID NO: 279570 - DNA, 430 bp, Zea mays
gggtcgagcacgcgtccgggcttattgatcatgccgtcttcgctcgctgaccaccaccgcctcgctcgtcgagcatatagccatgccatggcaagcacaggctcagagggatagataggtccagtgcaagcgcgcaggcatcgtcatccagggagggtggtggcccgtggtccacatcgatgcgatgccggttcacgttgcgctcctcgccgtgccggcggtggccgctgggttcctgcaggcgttccagttcgcgttcctgctgtgggccttcaacctggcgctgccgctggcgcgccacctgccgcacgcgtgcatcgcgttccgcggggtcgcgtccttgtacggagccgaactgcggcggtacgcgggcgccgccgtccgggccgccgtgcccgtgctgcagccgccgagccaccaccggtacgcc

SEQ ID NO: 279571 - DNA, 653 bp, Zea mays
gaactggaaatgttgttggaggcctactttgttgttatcgattacaccctcagcaagttgacttcgctaaaggagtatattgatgacacagaagatttcatcaacatacaactggataacgtccggaaccagctgatccaattcgagctgctcctgaccaccgccacgttcgtggtggccatcttcggggtggtctcgggggttttcggcatgaacttcgaggtccctctgttctcggttccgcacgcgttcgagtggaccctcgccataactggggtctgcggcgccgtcgtgttctgctgcttcatctggtacttcaagaagaggaggtttttccccttgtaggtgaaagcttgaagcttctcttctctcgccctgtcaccagagtccagacagcagcgtacgtatgagactgggtacggcaattgtacatgctgcattgttctcgaaatgcgctgtctgttcacgtgagcttttctccctttttaagctcacgccgctgatcgtgtgtagcttcaccggtctgctgtacactttgtattattgttgttgctggctgctgggcctgggtagtgggtactgcatgtgacactgttcggccccggaagagggaaaggagcccaacagatcagatcagtgctgttctcctctcc

SEQ ID NO: 279572 - DNA, 445 bp, Zea mays
ggacctggcgacgacctctacctctacctcgccgccaccgtcaccgtggcccgccgccatataactaaaccctcgcctcgtcctcctcccaggctcgccaccctccgcctccgacacatggcccacccgcacctcgtgctcccctccccgaagtccctcctccccgccgccgcaactccatcgcgccgcgccgtcgccatccgcgcggcgctctccaccgctttgtctccggccaaggcggcagctggagcagaggcggtgcgatcgatccgcgcgcggcagatcgtggacagccgcgggaaccccaccgtcgaggtcgacctcgtcgccggggacggacgcctccaccgctccgcggtgcccagcggggcgtccacggtgatctacgaggcgctggagctccgcgacggtgacaaggccgtatacggcgggaaggggcgtactc

SEQ ID NO: 279573 - DNA, 386 bp, Zea mays
gaccggcccggaatacctggtgcgacccacgacgccgccaccctcccagctggcctcgtgacgggcgctttccccatctccacatcgccgccccgcgcagctaccgcatcggcgacggcgatgagacacgggacgaggctgctctgcgcactagcgctgacgctgctatgcatggccacccacttccagggtgcatcctgccgcggcggcagcggtggcggtcgcggaggaggaggaggcggtggcggacgaggaggaggacgccgcggcgggtcaggaacaggtggcggccggtcgggaagaggccgctctggtcgcccgttcctcggcggggtcggtgcgggagccgccgccggcgtcggcgcgaggacggccgcaggaggatc

SEQ ID NO: 279574 - DNA, 517 bp, Zea mays
agctgctaaatcaaataaaagcatgtttgtatctggtgatgatgaccttccgaagagagataatatcggagaaagacggagaaaacatgggcttcgcgtcctatcaagagtaggggctaactcagcagaggatcatgagctgccagatggtgacgcttctgaagaggaggaccaccatgagttgccagaaggtggtgatgaatctgaagacgacatccatcgggatgtcaaaagaaagaggactgataagctatcacccaagaatgctctgtactcgccactccgggcgttgaacatctggaggaagaaacagaaggcgatggcaagagacgatttcgtatcagatcttgaagaacagggggttgactcgttccaggaataagaagaagaagaacccgcggaagaactacagggataagcacaagaacaagcttgtcaagcggaaaggccaagtgcgtgatatcaagaagcagtctggtccgtatggaggtgaaacgtctggcatcaacccgaatgt

SEQ ID NO: 279575 - DNA, 488 bp, Zea mays
  unsure (1)..(488): unsure at all n locations
gcgtcgaaaagcccncctgcaccctacttcattctcgagtcgacttgtgcgccgccattctgcgtcgccgcggtctcgcgggcccgccgccgtcctagccgccctgtccccgccctctccgtctcgcgccccacgcggcccttgtccatcttttccgtcgccggctcgtgcggtccgacgcctgccaccggttcctcctctcgagaaaggcggcggcgcccgagagagcttctttgagggaggataaggcggcgcggagcgtctctgagcggctcaggcccctccggcgctgagctttcctccggcgttgtgtgtgcctgagttgttgactcccaattgaagcgtggtcaaattacctcggctccggtatgggttggagctctttatgggttgctaaagcgtttagagtgtggctctaggcgtggattttcaccaatggcaatcgagtgcctcgtgctatgggcggggcaagaggtgggtaagagctg

SEQ ID NO: 279576 - DNA, 486 bp, Zea mays
  unsure (1)..(486): unsure at all n locations
cggacgcgtgggccaatttcatatcttcttttttttttttcggcggccgccgcggccgcgggtccccaaaaggggggttagtggtattcccaaattcaatcataaatcattcgcgtgctttcatttcaattcacacgggcgccgcgaaacagaccgagaacaagcatctcgtgtcatataactctcctataccgagtcttgcctcgctgcgtatctgctgcactttcatcaacaccagtctctctcctcctggattgcattgcccccgcgcgagaacgcacgcacaccgaccggaatagccatgatcttctgatccaatccaagatgggcctcaaggagcagcagctagacgccactgaccaaactcgtgatgccgccaactcnctcgcttctgtttctgacgagcaccacgagggaccccgtgtctcaagctgcagcactgacaaggattctggccttccaagttgctgagtctgccattgcgtg

SEQ ID NO: 279577 - DNA, 595 bp, Zea mays
ccgtccggttaccaaactaaattggcacaaaagtccttgttgaaagaggaagaaaactcttctgaaggggggagcttgagctttgaagctgttacacctgaacaggatgccccatataatgatgacaatgaagaatctcaaatgcctgttgagaagcatcaccatattctggaagaggttgatggtgagcttgagatggaggatgtagctccaccatctgatattggggcaaccaccaagtgccaaccagagcaaagtgacaccaatcgtgcaccatctgaccaacgcccttcagatgctggccctccacttcctgtggaccggcctccatctcctccgccattgccatcatctcctccacctgtccccgttcctcagagtgcacagatgcagcctaaattacaaatggcatctgatcccatggcgccacatcctcaaagagctacatatagtgttcaaagtcaacaacagcattctattgcagagcacccaggtaacatgaattcttctgttgcaccattgccacccccaccgtttaacagttcaggatatggagggcaacaaaatcagataccacctccgttctagatcgcga

SEQ ID NO: 279578 - DNA, 426 bp, Zea mays
  unsure (1)..(426): unsure at all n locations
aaaaacngggccggccgacgcgtccgagagcgtcaaacaattcttgcttcccgctagtttgctcgcaagaaataatggctccacttcggcttgcttctcgcacagcctggcatcctggccttacaagcagccgccatgataatggccggcacggcctgtcttcttcaccgccaggaagtcgtagtaagcgagccgtagccttagcttcaggccacgagctgaaaagacgacgacaggcggtgggggtcatgttgtgagcgaaaagctgaccccctggcaaatccccaggagggagtggttcccccctagctttatctttggtgccgccacttcagcataccaaattgaaggcgcttggaacgaaggtggcaaggggccaagcacttgggacgacttctgccacaaatatccggagtggatagcgga

SEQ ID NO: 279579 - DNA, 1005 bp, Zea mays
caccacctgtcgacctcctcatccccagcgccaccctgcggtgccccccggcccctcaccagtgccaccgcctcgtcgctccgtagaccccgcgcctccgtctccccgccactcgccggaggctgccgccatcgttatgccatggccgtcatcctctcctccgcggcgccaacgatactgactcgtcccacgcgccctcggaggcagccgaggagcggcctccgcgggggcctcgcgcgcctctcagctgcgctcggactcgcgcacgcgggcgccggcgccggcgccgcactcgccgcgccgctctcctacgaggagatgctgcgcctctcgtccgactccggcggtgatgttggcgggttcgcgctcccggagctcggcctcgacgggctcgttgacttcgtcaacgagaaccctctcgtcgtcgcggcaggcgtcgcggccatcgcagtgccgcttctccttgcgcagcttctcggcggcggcggcagctccaagccatactccgtcctgtccgccaaggcggcctaccagcggctgctcgaggagcccgacgcgcagctcgtcgacatcaggccgctcaaggatgcacgagaggccggcacgcctgatctcagggaggctaagaagaaggctgctgccgtaccttacaacggggagggcaaaaacggattcttgaaaaagttgacactaaagttcaaggacccggagaacaccacgctgatcatccttgacaaatttgatgggaactccgaactagctgctgagcttgtgacagccaatggttacaaagctgcttttgcagtgaaggatggtgcagaaggaagccgaggatggaagagcagtaaccttccctggaaggctccgccaaaaggattcagctttgacttgggcgaattatttggggatggttcagatggtttgcctgtgacaattggtctcgctgcagctactggtttgggagtacttgcctacacagagattgaaactttgctacagtttttg

SEQ ID NO: 279580 - DNA, 856 bp, Zea mays
aacattcgcaacgaagagtccagtccagcagaacaaagcagagacgatatacgtcaagagatactagaagaaataaatcagggaaaagagcatgttaaaatgtccctagcttctgttgagggcatagatgaaaagttggggcagcaagagccagaaacaccggaaccaagagcatcagccaaattaatctcagacggttctcctaatcaaagcgatgaaaagcaagagaggcccagtccagtatctgttcttgagtcatccttcgaagatattggcagtccagactgcataaacaagaaagagtgtgagctgcatggtctccaaaggaccctgtattttccagataatgaaccagacgttaatgtcctttgggaggacaagaatgtcaggttggactacataaagctggtgctagaactctcagaactgtgcgcagaacaaaatctagaggtatggtacctagaggacgagttgatcagcccctgcttgtttgaagaactacagagccagggtgatcagacggatgatcgaatgcttctgtttgactgtatctgtgaagctctaacagagatccaagagagatattttagactctcctcttggctaacttttctaaaacacgacatacggacacctccgacaggagagaacctaatcacagaagttgataggtacgttaacgggtatattatccagtacagtcttccaagtactctagagcagacaattaaaagggatctggaagttcagacgtggatgaacattagatcgaaaaccgaagggattattatggagatgtgggagtttgtattggatgagttggtagagagactgtttcgatttgggattgaagtct

SEQ ID NO: 279581 - DNA, 738 bp, Zea mays
  unsure (1)..(738): unsure at all n locations
gtgaactgcgaatgtgcgctgttacgctggttggtattgttgggacataccttaatgttttggctctgtcactgttgttcctattatttgcaagctggctagcctatgtaacatttgaggacacaccacaaggaaagaccattttcacatcatacggtacaacattatatcagatgtttgtcctgttcaccacatccaataatcctgacgtatgggtccctgcttacaagagctctcgttggaacgccctgtttattgttatttatgtgctgttaggagtttatttcctaacaaatttaattcttgctgtcatttatgatagctttaaagagcagcttgcaaaacaacttgctcaaatggactctataaggaaaagtattctacagaaggcatttgatctcatcgatactaacggtcagggctaccttaacaaagaacagtgcatatcgttactggatgagctaaacaagtacaggtcgttgcccaaaacctcgagggaagattttgaactaatcttttccgagcttgatcggagtggtgatttcaaggttacctccgaggaatttgctgacctatgcaatactattgcaataaaattccagaaagaaccaccaccttcatatctggagaagtacccatctttctaccattcaccacagtgtgaaaggttgaagtcctttgtacggagtcgcctctttgagtatattggtgnctttgttcttctggtgaacctaattg

SEQ ID NO: 279582 - DNA, 603 bp, Zea mays
cccacgcgtccggaggtgctgtaagtacccttccgtctgtctctccctcactcccttcgcgacgactacgcccggtgctcttcttcggccccaggtagctttcgctgccgtcctacggcaggtgcccaagtcttcttcgggcccttcaacgacgacgagcactaccagtttgttgaagatggaaaataaagagttgttcaagatgggaagtgcagatacagatactgctgcactgcacaaggagtgggatgatgttctctgtccgatatgcatggaccatccgcacaatgctgtccttctgttgtgcagctcccatgacaaaggatgccgatcctatatatgtgatacaggctataggctttcaaatggcctagataggttcaagaaaatgaaagtgaatgatgaggacagtccttcacagtcaagctcgtccatgcctaggggtacaggaaaccaaaatgttgtccagagatctcgttttggtcccactagagagagccccaggctacacatagacatatctgtacccgatgaaacttccgatcatcaagatgccagccacagacctgctgccatagttggagaacaggaagaaaacatcta

SEQ ID NO: 279583 - DNA, 522 bp, Zea mays
  unsure (1)..(522): unsure at all n locations
cttggaggacgancttcagaaacacggntctgncggggtcgacctttgaggacgatcggggatgtcgcgtncgaggacacgatcattggctacattgacctgcagaagctatgtgcgaacagtatcagcgcagatgagactggagctgggctgtaggtgattttttgaaggatcaggagggggaaacccctactgcgcattttattagaaagcgaaaattaaaggttaggccctgttccttttacaatcaataaaaagaagagaaaaagaaagaaaaaagaagagctatttctatatttgccacaaatttagccagttcgggattgaggtgtcgaattctccccgtgctctgtgaatgattagtcgcaattctctactaaattcctgagtgcagcggagcacggagggatctctgtttgaaaacagccactcgtttcggcttttccagatgctccaagtcataagaatagtgatctccatagagaagggaacgttgagctggtgtttgaggtttacagatgc

SEQ ID NO: 279584 - DNA, 342 bp, Zea mays
cggcctcggcagtgtgctggaggctagagccgcgtctccttgccggacgtagccgcaacgcgggcctgcatggcgagccgggcgagcgccggcagccttggcgcacaacgcctctgcaggggcgccggtcattagccagggacgagcccaacgccgcatcgagccccgcttctggtggccgtcgactcagctcgatgtcgtctacagctagccgtggatcttgcctggacctcgtcgttcctgctcgacaacgcttcagcatgccgtcgagttttgcctcgccttaccgtcaaggtcccctagcgcgcgagctcccttttcagccttcctcggtgcacgcgc

SEQ ID NO: 279585 - DNA, 669 bp, Zea mays
gcacattaacttaattatttcctactatctgatacactttcgtcaaacaacgaaatgcctttccagagctgagactgccttatacaaacttctacaaatacagcttaagtttttaagtgtgtgctctaccctaaccttatagaacatgctgaaggtttggctcacaaacttctagataaatctttcaatgtcgtagcagggagtattagatccatcagaagcttgccaaattgagagggtatataaagaggtgttaccagaactttccttctttcaaaacaatagttttgtcgccttttcctgtcgtatcagtcgtctacatagcatgccaaaacccctctgtttctttttcctcatggaaaagcttcagtccccttcttatttatcaacttcatacaacattaacccatagttatcatggcagcgcgtaggcgctgactaggcatccaagcggtcggcagtggatgccatgcctcgtcgcctcgcctgaacccagttaggcgatggtaagacatctcctagaatgcccacctagctgttgaactaggcttttatgggtctggcttgtgcactatacgcccagtttcctcttctttcctctgctgacaccaccgttagagccgctagatcgctcacgccggctgactgccgcgtgcctgtgccgagcgc

SEQ ID NO: 279586 - DNA, 649 bp, Zea mays
tttcgtccacgcgtccgcccgaaccaggcgtcggtggcggcgaccaggagcgcgcagagcatctacgtccagaactccaggtacctcaaggccgcgagggggctgctggacgaggtggtcaacgtccaggacgcgatcaagcggaagggggacaagagccagcagggcaaggattccggcggcggcggccgtggcggcgagggcaaggacgccgagacgagcgacgagaaggctggcgagcacgaggggaactcctccgcgccggagctgtcgccgtcggagaggcaggacctccagaacaaagtgtcggcactgatggcgctgctggatcaggtggaccgcaagtacaggcactaccaccaccagatgcagatggtgatgtcgtccttcgacgcggtggccggcgccggcgcggcgaggccgtacacggcgctggcgctgcagaccatctcccggcacttccggtcgctgcgcgacgctgtcggcgcgcaggtgcagtcgctgcggcggagcctgggcgagaaggacgggtccgcgcagggaggcgggctgccccggctgcgctacatcgaccagcagctgcggcagcagcgcgccatgcagcagttcggcatgatgcagcagccgcagcacgcctggcgcccgcagc

SEQ ID NO: 279587 - DNA, 329 bp, Zea mays
cccaatcccacgccagtcccgcaggaatccccacccaaattcccgtctccccgatcgccgcccttctcggtgcccgtaaaccctacccccggagtcgcccgtgcgctgtcgtgcccgcgttgccaccgtcggtcgtccgcggcgcccgtcaccaaaacctaaccgcagcctgcagatcccgattccgcatggcggcgggagaggtgacggccgcctcgccgcagatggagcccgcgggcgcgcgcaaggactggcgcgccgtccccggctcctcgctccgctccaatggcgccgaggatgccgcggagcacgggcagctggggcagtcg

SEQ ID NO: 279588 - DNA, 507 bp, Zea mays
ttcgtgccatggacagctggtacgcgtggctgtcgcggacggggctggcgccgtcgctggcgcacgagtacgggcgcctcttcagccggaacaagctggagccccgggacgcgccgcacttcgaccacgacctgctcaagagcatgggcatcgccgtcgccaagcaccgcctcgagatcctcaagctggccaggaagcaggacgccggcgcctcgtcgtccgcggcctcgcggctcgggcgcagggccaccaggtgcctgtcccggtgcgcgcgcccgctggcaggaggcggcgcgtggagggccgcgtcgtcgtcggtcaccgtcgtcccgaggatctgcggcggcgaagacgccgtccgcgtcggagcagtgcagcggaagggcactggtagcggcaccaccaagaagatggtgctcatgatcaccgacggcggcgtcgccggaggagggtacggctacggcctcaaaggccgtggcggcgcgaggctgtcgtcggcgtcgtcgc

SEQ ID NO: 279589 - DNA, 379 bp, Zea mays
accaaattaagtgtcttaattgtcatttcttctaggagtagtataatatataacacctgtctgtctcttccttcgctcctttcttttcttgtaccatgcagaccacaaaaacaaaagttatcaacagttgcctcaatccagtttggaatgaagtcatgacattctccatgaaagagccagtaggaataatcagatttgtaagtttctatgccgacgaattctactctcgtcaaaaaagcaggattcaggacctgtttggatcagtacactaactgtccatgaatatggatcaatacactagcattgacaatctgaaatctgtggtgaattttcttgttcctttttctcagttttcggtctctctgaattcaatacatta

SEQ ID NO: 279590 - DNA, 370 bp, Zea mays
cccacgcgtccggtctcttcttccacccggcggcagcgggcagcgcaggcgggcagaccaagtcgcctgcagagtgcagactgcagatacagtccgtgctctgacggagcaacaggagaagcagagcgagccgaggcggagtcgacaggcgagtggttccaccgaccgtctcccctgccgcaagcgaacgggtgagcggggcgccgtggatctgatgtccctttgagattctactctgcttctgttctccctacagcttggtgccttatcatggaggaagcggggaggggctgcggcttgctcaaggtggttgtgacgcacggccggaacctagccgtccgggatttcacgtccagcgacccctacgtca

SEQ ID NO: 279591 - DNA, 364 bp, Zea mays
ctcttcttccacccggcggcagcgggcagcgcaggcgagcagaccaagtcgcctgcagagtgcagactgcagatacagtccgtgctctgacggagcaacaggagaagcagagcgagccgaggcggagtcgacagcttggtgccttatcatggaggaagcggggaggggctgcggcttgctcaaggtggttgtgacgcacggccggaacctagccgtccgggatttcacgtccagcgacccctacgtcatcgtccacgttgccgacaagaccacaaaaacaaaagttatcaacagttgcctcaatccagtttggaatgaagagatgacattctccatgaaagaaccagtaggaataatcaaattt

SEQ ID NO: 279592 - DNA, 557 bp, Zea mays
cccaaccctaaccttctctcccccactccgccgccgcattgagcacggggtcgcaaatcgcgcctccggtcctccgcgacacagggcggcgactctgcgtgcgcacctcccgcctccggtgggccgtcgcgcccagccccggcggctgcactgcacgccgcgggcgggcagcgggagccagcagccgctgctgctccacataggcagcctttccgctatgttagcgcttgtgccccaagcgaagcgttacccttacccaccgtttagcgcgtgcgcttagtgccgcattttggaaccctgagtgatagtacatgcagtatttcaatcttggtgtttggtcactgaccgtaacagtttgctttgtatgcatggcccttaagatcgcctcccttttgctatgtgggagcgtgtcgagtcatagccatgcaaaattaacgacgaggttctggcgagtttttctctggaacttcctcccttcctgttgcagttctaggtgtcttcatccggtgcatcgagttccctgtagtgtatgatgaccattatgtggcagctgtttt

SEQ ID NO: 279593 - DNA, 1031 bp, Zea mays
tggccctggttcaaaaagatggagcagatcgtgggaaactccgcatctcctgcctcctccaagcttctaactgctgccgaggatgagaaaccgaggcagcagcagcagcacagcagcaaaaggtatcctctttcctgtactggccctcctactggggttggtagctccagaacgaaccctctttcaaatccaagatggaagagggtgcttctgaagattgggggcactgccctatgtggagcagctcatcaaaatgttgatcccaaggtgattatgctgatcgctagagaagttcaagtggcatgccatcatggtgtggaggtggcaatcgtggtaggagggcggaatatattctgcggtgacaattgggtagctgcaacaggcactgatcgagcctcaacgtacccaattggaatgatggcatcagtgatgaattcagtacttcttcaagcatcgctagaaaagataggtgtggagacacgagtccaaaccgcattgatgatgcaagaagttgcagaaccttacattaggcgtcgagccatacgccatcttgaaaaagggagagtggtcatctttggtgggattggtgtgggcattgggaatccattgttcacaacagatacagctgctgccttaagagcttcagagatcaacgcagatgttgtccttaaaggtattgttggtgatgatgagtatggctgtcctcctaggagcaacagtaatgcttcatttgagcacatctcctttagggagttagcagcaagaggaatcaccaaaatggacatgacagcagtaacatgttgtgaggagaacaacattcctgtcgtcatctttaacatgttggagcctggtaacatctcaagagcaatttgtggagatcaaataggcaccttagttgaccagtcaggaaggatcacataaaactaggaggatgaatggtagcagagctccaggacatgccgatactctgggtgggacatcactctggggggacatcctgaattctttgctcgtggatcttttccgtatag

SEQ ID NO: 279594 - DNA, 824 bp, Zea mays
cggctcgaggcatattcgaggaggttctgcacgggaggctggacttcgagtcggagccgtggcccagcatctccgacggcgccaaggatctcgtgaggaggatgcttgtcagggacccgaggaagagactgacagctcacgaagttctacgtgatcgccgagaacctgtcggaggacgagatcgccgggctgagggagatgttcaagatgatcgacgcggacaacagcgggcagatcacgttcgaggagctcaaggttgggctggagaaggtgggcgccaacctgcaggagtcggagatctacgcgctcatgcaagccgtaagcgcaccgcaccttgttcccgtccttgtcactggcactatgactgcgagtgctgaaggaaaacttgctgttgctgcgtgcgtggtgcgcaggcggacgtggacaacaacggcacgatcgactacggcgagtgcatcgcggccacgctgcacctgaacaaggtggagcgggaggaccacctgttcgcggcgttccagtacttcgacaaggacggcagcggctacatcaccgcccaccagctgcaggtggcgtgcgaggagttccgcctgggcgaccgccagctggaggactttgatcggggaagtcgaccaggacaactgtacgtgagcccccccctcctcctcgttccttcttctcttctcttctctgcgtctgaattgttctggacctgctgctgcaggacgggcgcatagactacaacgagttcgtggcgatgatgcagaagccgacggtgggggggctcccgaagaaggccgacctgcagaacagcttcagtatcgggt

SEQ ID NO: 279595 - DNA, 663 bp, Zea mays
cggacgcgtgggcggacgcgtgggcggacgcgtgggcttcgtaaaaaactgcagggggcccattctgaagggttggagcaggttgtactaaaactacggaacgacatgcacaagtctgaacttgagcgtgatcgattggccatggaacttgaagacgaaagaaagttacggatgactctagagcatcatttgactgagcaacagaagctagaggccatatcgtcagaccactttacagattcaatccagctggatcttctgaaaactccagattcgaagtctgtaccagatggctttgttgcctgtcgctcacgttactcacaagatgttgagttcagcccaatacctgaaaatttggataatattgctgaagaagatctatggacacgtctgaacaaaggctgtgttaccgatcttgatatgcttgagatgacacctaatctcaaacgcgagtcatcctttctacaagaaaaatcatcagctgcgccattggaggaacctaccaacgccatatgccagaggttagaaaaggagtgcatctttgatcagcaacagcttgaggaatcaaaggcgagatgcgctaatctcgagaaagattgcgacgtgctgagggacgagaacttgtccctgcacaggagctctccgagttcaagcgagaggcgg

SEQ ID NO: 279596 - DNA, 390 bp, Zea mays
cggctcccaccagcgtgagtccgtgaccagccccaatgccctccaaaccctagtccacagctcctgtaccctggcggccatgccggatctgagcaccagctacctccctcccttccctgaactgtccctcgatgcgggggccctcgccgtcgaccacgcggggaatgctgcagccgccgcctcggccgatgcggcgtccgcgtacgcgtcttcgtctgcctctgtgggcagcggcgtagacgacctcgttattccagcggaatgccggtggaagggccatgtccgcaccttcgacatggcgggcgcgggcgctgtcaccacttgccccgccgcgcggcgtggcggcgggaagaagctgtcactgattccgtcactcgagccggcacggac

SEQ ID NO: 279597 - DNA, 511 bp, Zea mays
tcggctcgagtcgccttctcttctttttgtcttgcgtcgcagcatggtgaggaaccccctaaaagccaggccgacgctggtgctcatcagccttcgtctgatggcggacctggcaaccgttggctatagccgaagagttgcagaactgggtgcgttaccgtgagcgacgcggcggcggtggcggtggctcgccgccgggcaaaggctgctgcttgcccaaccagtcatcttcttcagcgtcagggcgacacctcggtgacgattgttgcaagcaaatgcgtattgtgtccaagaggctggtgccccaggggccaaaccctctgcacaactgaccagctccgggctccaggtctgcacttgcatgcatcgagagataggcagaggcgttttcttttcttttttcttttgtaacgcagccatgcagagtgattagtgaagctgcaggtcttcctcttccatgaggtcatgtaaattataggcctacggcttagtttgccgctagctcatacgc

SEQ ID NO: 279598 - DNA, 375 bp, Zea mays
  unsure (1)..(375): unsure at all n locations
gccatttangataactgcaacaggatgggttcaagaattcaacaatactgccagaattggcaagaagataaagctcacaggcacaccatgcaagatatttaagaagactgcactaatcaagggaatgttcacatccgatttagaggttgctaggtttgaaggtgctgccattcggactgtaagtggaatccgaggacaggttaaaaaggcagcaaagattgagccaggagatatgttgaagagaaaaggggaaaatacagaaggaatcgcaagatgtacatttgaggacagaattcttatgagtgacattgttttcctgcgtgcctgggtcaacgttgaagttcctacgtactctaaccctgtgaccactgctct

SEQ ID NO: 279599 - DNA, 623 bp, Zea mays
ctactcgtacgccttcgcgtccgactgctcgctccctgcccttccctctacctctctccctagggtttctaccacgcgcccgcttccgactagcagcgctagcgtcgcctaactccgaccgaggggacaacgagggttttgggacggacggagggagatttgaaggaggcagcggagggccggagaccagaccatgaggccggtgttctgcggcaacttcgaccacgacacccgccagtacgacctcgagcgcctcttctccaagtacgggcccatcagccggatcgacatgaagttaggctatgctttcatttactttgaagatgagcgtgacgcagaggatgctataaggcgtctcgacaatgtgtcttttggttacaaccggcgcaggctctctgtggaatggtctacgcaagttgaaccggtgccaaagagccgtgataggcctactggggatgtaaagccaacgagaaccctctttgttatcaattttgaccccatacgcactaaggttcaagatattgagaagcattccgaaccgtatggcaagattgccagcattcgcattcgaaggaactttgcgtttgtacaatatgagacgcaagaggaagctagtgccgctg

SEQ ID NO: 279600 - DNA, 720 bp, Zea mays
ggtgcgaatgctgtttgaaaacctaggtttttctcgcggttaagccgttaagctcgtgcttgctcactgctgatccctcgactgtgtcggttcgctttggagctcgaggaagcttgccttgccatccgccacagcaggctcatccatcaggatctactaatttgggaaatgatggcagtcatcctgcctaggaccggccgcagggcggcggaggcagcggtgtcactacactccgtaccgccgcgcgccgcctgtcactttgcgcggtctttgggcggcgtctcttctgcttgcagcatggagttcgtgtcgtggcaaaatggcgggggcatcctgcaccgggcggcctccgttgaccccactgctgtggtggaggctggagcggttgtgcactctggtgccgtcctcggcaaagaggtcgccgttggttctggggctgcggttgggccttcagtttccataggtcaatcaactagggtcgggtacaatgttgtcttaagcaattgctcagtgggtgagttctgtattatccacaatggatcctccattggtcaagatggttttggcttttttgtggatgaggctggacaagttaagaagaaaccacagatgctgtgcgcaagaattggagaccatgtagaaataggggcaaatacatgcattgacagaggcagctggagagagacaacggtcggaaatcataccaagattgataatctg

SEQ ID NO: 279601 - DNA, 548 bp, Zea mays
cggacgccatggaggaagctcgcgaccacaggctctcctccaccgccggccgccccttcctctctggcttctgcgccgcggcgctccgacgtaagcccctcggcgcccgcgcctccgccgccgccgccgccaccggcgagggccttgtgcggcagctcggcgtcctcgacctcgtgctgctcgggatcggtgcgtccatcggcgccggcatattcgtcgtcactggcaccgtcgcccgcgacgccggcccaggtgtcacgatcagttttgttcttgctggagctgcgtgcgtgctcaatgccctgtgctatgctgaactggcgtctcggttgcctgctgtggttgggggagcatacttgtacacgtacgcagcgttcaatgagatcaccgccttcttggtcttcactcagttgatggtggattaccatatcggcgcagcaagcattgctcgcagcttagcaggctactttatcgagttcttggagctattcccgctcttgaagggccaaattccaagctgggtaggccatggtgcggagtttttttgc

SEQ ID NO: 279602 - DNA, 297 bp, Zea mays
atagagagtcaagaagttaaagaagcactcagagcacaaatggaagtgcaacgaagattgcacgaacaagtggaggtccagaagcatatgcagatccgaatggaggcgaaccagaagtacatcgacacgatactagataaggcgttcaagatagtatctgagcaactgagtggcttcagcatatctgaccaagacctaccgattctcacctctgctagggccatgcttagccctgcagatcacttgagttcgtctgtcttcccccagctctccgtcagctccgttagccttcacaat

SEQ ID NO: 279603 - DNA, 256 bp, Zea mays
tttcaaggtgccctagaaatctgtctacgagatccctaagattttgagcatgacatatgaccccctattgcttttgttcactttgctaacactgaaagtccgagtccacatgagttgggcatcagttggtgtttatttcctgcttgttgggtcttgcgtctgaattgggaatcagtttgtgtttatttccaaaaaaaaaaaaacaaaacaacccccaaaaaaaaaaaaggacggctgcttgcgatctagaactagt

SEQ ID NO: 279604 - DNA, 359 bp, Zea mays
tcggcgaggcgggggcgcggggcaacgcaaagcagcgcaggggcaacgcagtgcagcaaaagcttcgatctttatccgccggattcctctcctcccctttcctctctctccgtctccccgcttgctttgtgcttcgttgttgagaggaggggagaggaggggagacccacatccacttgcctttctcctctctcctctcgcagccccccttccaactcctcctggtccctggaaaaaaaggagaccttttggtgcaagattcgatctgctgtggctgcctcggccttgctgcgtgcgcggagatttggtttcttggctggcggctggcgcgcgcgggcagttggagctctttgattcaa

SEQ ID NO: 279605 - DNA, 620 bp, Zea mays
taattcttctccctgtccattcggtgttatctctgggtatgtgtggtactaacccgatctgtccggtccctgctcgggtcgggtctccttctccagcttgtgagatcgacactggttgacactgattgtagcacttcgtggcgccttattgggtcgcgggtgcggtttgcgctctacaaattttgggtttggtttcgctgaaccctcatgacccaagcgaagtccactcctgggaggagggagatgggccgggcgcgatcgccggaaccgctcgatttcttcatatggactgtccaggatgttggattatggctggaagaaatatatcttggtggctacaaacaagtatttcaagaaaatagtgtcaatggagaatatctagaaagcttgtccatgtttactactgagcagattctgcgctttattaggcggtgccatatgaaatggggagactttatcacactgtgcaaagagttgaggcgcattaaagtcgcctgcctcaaaggggagcaagaagtccgcaggccatggtgggcgccggcatgcctctccatagtgttcgtgagggcagccaagcagaacaggaagtcccgtgtcgtctccttgaagctggaaccata

SEQ ID NO: 279606 - DNA, 410 bp, Zea mays
gctcgctttctactagctctcgacgcgtcgccgccgaccacagcacggctggcgtgtggatccctcccgctctcctcgccggatctccacccgcctacgctctctctgaggccagtggggcagagatccgtgagcgcgaggactggtcccttcttgggttgggtctcttctccagctcgcgagttcgccactggttgacactgattgtagcacttcgtggtgcctgattggatcgcgggtgcggtttgccctccacaaatttgggtttggttccactgaacccccatgacccaagcgaagtccgctcctggaaggaaggagatgggccgtgggcggtcgccggaaccgctcgttctcttcatatggactgtcgaggatgttggattatggctggaagaaattaaccttgg

SEQ ID NO: 279607 - DNA, 825 bp, Zea mays
gttattcatggtgatatcaagccagacaatctcttggttaccagtaccggcaacgtgaagatcggggatttcagtgttagccaggtttttgaggatgatgatgatatgctttggagatctcctggcactcctgttttcactgccccggagtgctgtcaaggttcagcctaccatggtagagcatctgatacatgggcagttggtgtcactttatattgtatggtctctgggcactatccatttctgggggatacattgcaggaaacttatgataagattgccaatgatcctgtgcaaatacctggagacatgaacccccaacttgctgatttgctcctaaggcttctctgcaaagatccaggggatcgcatcacgctgcaggctgcggctgagcatccttgggttgctggtgatgagggcccagtccctgaattcatctgtagatgtgggtttggccgcaggaagaggaatgatgtccgcgaagaagtacaataacaaagcatcctcggatagtccacaggtctagtgtagataattgataaaggttggcaaaacgtagccctgacgatgagtttgttttttgtttgtttgtttgtttgtttgtttgttgtttcgtgtccccaatttccaacgagtgttgggcgctcgactgaacatgtttcttttagtaagagaatctcgagtgtaaccctaatgacagttaaacccaccgtctgcccccaattttttgttgccctatataggacatacatacatacggtcacaaaccaccaaggtgccgtaaacctgcactgccattcagatagtgtgagaagttgcgtttct

SEQ ID NO: 279608 - DNA, 400 bp, Zea mays
gttactcacttgggaatcaatgcacatttccctttttaatcatagtgccttgttgacaccttttgtctctgtgcaagcaggaaggatttggaggatgacagaagctgcagttacaaggtactggtgccatggatgtgtgagggttgttgaggaggccatgggggaggagatcatagtgcccattttgtggtggtggattcattgaagagatgattggtgaggaatttgatgggttggccagccagcagtcagagcgggattcatcacaatggggagcgtcgaacaacccctttgagcagccaatggcgtaggcggacagtgaggatgaagaagatgatgatgattacgatgatgatataggccgtgcatttgagagtttcatcaggaagcatgggcggcc

SEQ ID NO: 279609 - DNA, 289 bp, Zea mays
ccagccacctgaactcgtaacttccgcttcttcttcttctttcgtcgttctactcccatcgaagctactactgaggacgggcgcaggcggagaacgagcggatccgctagcaggggaacagccggcgcggaggaagggtttggaggatgacagaagctgcagttattacaaggtactggtgccatggatgcgagaaggtcatcgaggaggccatgggggaggacatcaagtgcccgttttgcggtggtggattcatcgaagagatggccgcggaggattccgaggggtt

SEQ ID NO: 279610 - DNA, 374 bp, Zea mays
gggaaaattcctgtgcttgaagtgtaatccttcctaatgccagcctttgttaaatcacaatggtcctgatggtactgaacagttcaggcaacgtatttccggcatactgcagaggagggtattcaaagggaacgagtatccaaaaggcgatgccgtcgaatttggtaaactcgagagcttgttggagaaagctctgaggttgacatcgcgctcaagatacaacacggttgcttccgtagcacagaacgccacattttggatcctgaagatcatcaactcgaagcactgttctgagcaggagctcgcacgcgtggttgatctgttccgttcaatcttgagcgattacgacaggaagaaatcgcggctgaagcttg

SEQ ID NO: 279611 - DNA, 426 bp, Zea mays
gcggatgcataatctctgcttggcatcacaaacactttggtaacttcggtgaggtcccactcaagtgaaggaatcagcccttctgatttcataacagctttactcaagaagtttgggcagcatgggaatcatgatgatgagtctgtctcattacgatggggtgatcttgggctttctgtttcacatatcttcaggcctgtgcctggatgctgtaccatgcttggtcctatgaatactgaagtaaagcaacggaaagttgtagctgtcggtaggaaacggactgcacggccaacagaaaatacctgtcctgaagagcttgctgagtcttcagaggaagtgaagacagacactgacaggaatgtcttagttatgtttgatatccttaggcgaaagaagagcgcaaaatcggaaaaccttgtgttgaat

SEQ ID NO: 279612 - DNA, 455 bp, Zea mays
ctagaacgaacagccgtctcgtatttcgttttgtcttctgactccggtccggtaagtaatcagagtccaggcggcagcacagcagcttcctttcctccggcgatggcgaagaatcccaaagatgccgctccggaggaggagatgcccgccgcggccgaggaacaggcagcgcctgccgcgacggtgaaggtgctcttcttcgcccgcgcgcgggacctaacgggcgtggcggattccgcggtggaggtgccgccggggagcaccgcgggggagtgcctcgcgcgggtcctagcccagttccccaagctggaggagatccggggctccgtcgtgctcgcgctcaacgaggagtacgcggccgactcggtcgtggtcgccgacggcgacgagctcgctgtcataccgcccatcagtggcggctgacgttattaaccacggccgacttgtgtggaggt

SEQ ID NO: 279613 - DNA, 411 bp, Zea mays
  unsure (1)..(411): unsure at all n locations
gtgctgtctctctctctcnctctcgtagtcgtgcggccaccgggtgaccgccggcgccgccctaagccaggtgccgtcttcgttgggtccctcggttgcgacgagcacccaccagtaatgctgttggcaagctcaacaagacgctatgagcaatttcctttagcacgaaacaatggacttccaagattttcaagagtaaaaatgtcatgcttgggaacaaaccatagtaaccatcattctgataccgtcagatcttcatcccctagttgtggagataccagataggtccaccctgtagtcaaaatgtgtggcatcacatcagctagagatgcagaaatggctgtaaaagcaggagctgagcttataggcatgatactatggcccaactctaaacgctctgtctcgttattg

SEQ ID NO: 279614 - DNA, 501 bp, Zea mays
  unsure (1)..(501): unsure at all n locations
ggtgtacccgttctaccactaccaccagtaccacgcctcgcaggggggagtagccgccgcgcacttcttccccccggtctccgccgccgccagtcaccgccgtcgtctccaagcacaccgtcatggccgctcccaaagtggagcaggtgacaggctgcagctgaaggcacgaggcgatcgatgatggcgacgacgagcggcggaacgaaaggagcaggccaaacaggctgcgctgcacatgaagggtgtcgtccgtctgtcgggagggcccgaagcgacgcaaggcccgggcccccattaggccattgctacatcccccctctgacttcgtgcgtggctgcacggccaccgtgccgggcaagaacagtctgtaacaaatgattcgattcgtctctctctcgtttaccaaccgtatttttttccaatggtaaacccgttaccagtgtctgtagggggcagcggaccccaataaatcgtcataatatttcgccgttcanaana

SEQ ID NO: 279615 - DNA, 818 bp, Zea mays
ctctcctccagtgacagcctccggcgcctcctcgggctgccatccagcccgtgccactgccactgcacttgctgtgccgaccccagctgcggtcgagtgagcaatggagcggcggcggcggcggcggcggccaccgaggctgccgctccttgtgttcgtcttggttgccaccacttgccccctcgggagctcagggattggaagcttcggagtcggtgcggagagcaatggagcttcgtctagttttaggaccaggagtctgctgcagattggagacagaaacgaagatggcctatttcatctgccacatacacgggctctcacgcacaagagcagatctcatagaaaagttccaacacccgcaccagcaccagagtccgctccagcaccctcaccatccatgtctccaccggacagctcaccgtctccgtcaccacatggttcacaccctgtgccacgccaatcaacttcacatcgtcatccatccataacacctccacatttggtcaggcctgggcctaggcaagatggaaatgatcctttggttgatactccagctcattctcggcataaacatttttggacaacctatggtttagttgcagcagggattgcggttttccttttggtatcagcagctagtattctctgcttccgagctaagaaaatgggaaccgtaaggccatgggcgacaggtctaagtggacaattgcagaaagcttttgtaactggtgtaccttcgctgaaacgatcagagctggaaacggcatgcgaagatttcagcaacataattggttctacctctacctgcatgctgt

SEQ ID NO: 279616 - DNA, 563 bp, Zea mays
cttctcctcgctctaaactcttcctaccccgctacccgctctctcgttggacgtgacttcgggagattgccggagatgtcgtcgatggccacgaagctcttcaacaccgccgaggtggagtcgtcggacgcgcaagccctagtcgcggacatgcggaaggctatcggcaccatgaagtccctcgccgtagacttcgagagggacggaaagtccgataaggtgaagaagcttgaggagacggttctggagttggtggcttcgtacgaggactgcgcggccatggcccaggcaattaaggcagtacctggagtgtatcagtcatctgatcagccaacggatttcaaaacattgatcggggtggaggctagcaagattagggaagcgtcatcggcatcacaacagaaccacccactctttcggcagttcagggagtctgtctggaatgttcaccatgctggtcagcctatgcctggtgaggaacaggaggacattgtcatgactagcactcagatgagcatcttaaatgtcacatgcccattaactggaaagcctgtgattgaatt

SEQ ID NO: 279617 - DNA, 494 bp, Zea mays
ctgggtaacgtgatatacctcatgtgcggtccatgcacaccccgagatagctgcactcgacaactcctcaaggtacaccgcaggctttgtgcgcttaattgagccggctgggaatatagttgagggcagtctgtcggagttgaacagccttgtggcaacttaagtttcaggccgtcaattgaccttcagatgttatacaatgttcattaccatcgaatctgagacgtcagacttattctgatgcagagggcgccgttcctaagctctatggtaggatgacagattagttttagacatcattagtgatgataaactatgctttgctgtgtttccaatcgatccgattgtatgtatggctccgtatgtaattttgtaggtgtatattgccgaaggttttgcgacgtttttttgcaacgaaagtttagagttgatgtgcgtttttttttaaaaaaataaattcacgcccagtgggcctcgaacctgattgagactaa

SEQ ID NO: 279618 - DNA, 1091 bp, Zea mays
ggcgacgcgcctctttcttggtggcggggctcttttgggagagtgagctgctgcctccgcaactcgagcgccgattgtcgcgagcaccgcggcctcgatccgtcaagctaaaagcatgtctggacagcaggaccacgctaggaaaagctctagctcaagcatcagcagcagtactcaagagagcgaggaggaagcacctgtccgaagcgtcaccattggtagcctccttgcccaagcagatagcaccagtggacatagtcttgggaagcgcctgtcccatttggggtcaatcccgtatactccccgagttaatggaaaaatccccactgttggtaatgcaacactggaccacgaacgattgctggaaaggttggccacttatggcctagctgaatttcagatagagggggatgggaattgtcagttccgagctttggctgatcagatatatcacaatcctgactatcataagcatgtgagaaaagctgtcatgaaacagccgaaggaattcagaaaacaatatgaaagttacgtaccgatggaatataaggtgtacttgaagaaaatgaaaagatctggggaatggggagatcatctgaccttacaagcagctgcagatcggtttggtgccaaaatttgtttgctgacatcatttaaagacacctgtttaattgagatagtccctagggatctaactcccacaaaagagctttggctaagcttctggtgtgaagtacactacaattccttgtatggaatcgacgatctcctgacccgcaagacgaagaagaagcactggctgttctaggagggttctgaaggatccaaattctttcagcagctcctgctctgtccagccagcgcagctctgtcttagtacttactagttggccaacactgtatcatatcctaagttgagtctaggctttacgcttttatgtacagtcgatctagatcttgtaaaattccctcaaggagcaacaggaactgtacaactcttagatccatgagattttggtgatctctcctccatgggaatgatagggcctgggggtatgtacattataaaagccccccggggccttttttcg

SEQ ID NO: 279619 - DNA, 299 bp, Zea mays
gctctctcacttctctagccacggactccatggagcagcagtaggcgcccagctccttgcatcaagtgagcccggtggccagttccctctcccagccgagctcctccccttccagtagatgagcacgccgtccctccctatttcagctcgcctctatccgccatggtccggccagggacacccacgtcgagcttcctcacacgcacgctcagctccagctcgccggctgtgcagctcgcccatggtctttctggccacgacctccctgctcctcacttccgcagccacggtcttccatg

SEQ ID NO: 279620 - DNA, 315 bp, Zea mays
gattccagcgctcagtctcctacacatggcgcgcgcgctcacccagctcttccccttccagcagctgagcacgccgtccctccctatttcagctcgcctctgtcctccatggcccggccagggacacccacgtcgagctccatcacacgcacgctcagctccagctcagtcgagctcgcccctgcgcgcgcgttctcctgcgtccagccgggcgcgcgaagcttctctgctcgcggcgctccctgtctgctcggccatggtgaaacctccttgccatagacgtcggagttcctctgctcgttctcacagccgtcg

SEQ ID NO: 279621 - DNA, 454 bp, Zea mays
cgggtcgagccccgcgtccgcaatatactgcacatggcgcgcgcttacccagctcttccccttccagcagctgagcacgccgtccctccctatttcagctcgcctctgtccgccatggtccgaccagagacacccacgtcgagctccctcacacgcacgctcagttccagctcgccagtcaaattctctgcgtcgcgcccagctcggatttcgccggccaccgttctctaacccgtgtgctggtcggtgtcgtatagttttagtttgatcggctcgtcgtcgacttcgtcagttgtcatcattcgtcgtcgcaccgttcgccgtcgagtttcgctacccatcgcggagttctctgctcgccacaacgtgtcgaacttccgcgtcaaacttatctcttccgttgccggtgtcctccccggagccgaatcctgggcgtcctagtatttttagctat

SEQ ID NO: 279622 - DNA, 424 bp, Zea mays
cgtttcgtcgtctccacacgcaatagcatccgagcaaagaagccaaagagcaactgggagcgaggacgggaggcaacaagcggcggcggcatggaccggaacctgagcgggtttctgatcgggtgcctgggcgccgccgtgacgctgctggcgtaccagcagacggtggtgaccagcacgcagagcgtcgcggcgggcttcgtcgtcatcctcttcgccctcttcgtcaaggaaggattcatttccctctgaatctctggtgcgcgtcagccagccatgcatgaggaggcgtcatcgctccgctgcctgtatttctgctcgctagttcagtcccgcagctgccgctgtgctcgtcaggttcttggaaaaatactgtaatagcgtagtgacttttatgtacgacacggatggttgttgctggctg

SEQ ID NO: 279623 - DNA, 354 bp, Zea mays
aatagcgacacctcctttcctctccctcgaggtgtctctcccagaacgcacagcacagtcgcagaacaggaaggcagagagcagcgccgcgatgagaggaggacgagcggggcccactgcggcgttcatgtccgacgagccgcctccagccgacgcggaagaggtggaggagaactccggcgccgaggaggaggacgaggagacggtggtggagcaggacgacgacgagctggagctggggctctgcctcggctccaagcaacagcagcagcagcatccgccgccgtgccggatcctcacggcccgggacctgcagccgaggtccctgtcaccggattcctccgtgtcctcttc

SEQ ID NO: 279624 - DNA, 1207 bp, Zea mays
tgccggcgatgctctgctccggccgcatgctggcctgcaacggggtcttgcccggtcggctccggctgccgagggccgacgcctaccacctgcgcccaccagcgctcgcgcggaggtggcgcgtcgtggcctccgctgcggcgtccggcggctcccctgacctcccatcgtcgtcgtcttcgccgcctaatccgccgtttggggccggggacgaccagaccgccgcgtcacctgggttttgcatcattgaagggcctgagacggtccaagattttgcaaagctagacttgcaggagattcaggataatattaggagccgccgaaacaagattttcttgcatatggaggagattcgaagattgagaatacagcaaagaataaaaaatgtggaactcggaatttcagatgaagagcgtgaccatgaactccctgattttccatcatttattccgttcttgcctcctctgagtgcagctaatctaaaggtctactatgccacatgtttcaccctcatagctgggataatggtgtttggtggttttcttgcaccaatcctggaacttaaacttggtgtagggggcacgtcttatgaagacttcatccgcagcgttcatctgccgatgcagttgagccaggtagatcccattgtggcatctttctcaggcggagcagttggagttatctctgccctaatggttgttgagataaacaatgtcaagcagcaggagcttaagcggtgcaaatactgtttaggaactggatacctggcatgtgcccgctgttcaagtacgggcgctcttgtgctcacagagcctgtttcaacattcagtgatggcgatcagcctttatccgcaccaaagacagagagatgcccgaattgctcaggctcgggaaaggtgatgtgtccaacatgcctctgcactgggatggcaatggcaagcgagcatgacccccggatcgacccgtttatttgaggtgcacctttagtccaggaactgctgcaacgtgtggaagatgcttttgtagataacagcatccacaaaagattcacagataggccgaatcgtgaattcgaatcgacgttgtacgacacgaataggacgaactgaagagtgcagagaggtgtatgttgtaaagtaataaaaaaaatatttagaccaaagaccgtttggccccgttttatagaaatcaagctatgtttgattgt

SEQ ID NO: 279625 - DNA, 636 bp, Zea mays
gcgcccgcgcgtgcccctgcccagtttcccgggggacgcacacgcctccagtttcttacaaggtgagaatttgctgaatcccaggacgctttagctcagatgaagaactggtctactcgcttccccacaattcttcgagggtgcgaaagtatcattgaaaatttaaggggacaatatgcacattctgttggctgcttcgatgaagcagctttccactttcttgaagcaaaaaagctgacagagagtaaatcaatgcaatcgatgtgtgaaacctatgcagctgtgtcatatatttgtaagggtgatgcagagtcgtcttcacaggcactagaactggttggtcctgcctatagaacaatggactcatttgttggtgtgcgagagaaaacctgtatcatttttgtttatggactattacttatgagacagcataatccgcaggaagcacggaaccgccttgcaagtggtttgaaaatagcgcaccaacagttgggtaacatccagttagtttctcagtatttgacaatactgggcacattggcgcttcagctacatgacgcagcacaggctaaagagatcctgaagtcttcgttgaccttagctaagaccctaatttatattccaacccaaatctgg

SEQ ID NO: 279626 - DNA, 490 bp, Zea mays
  unsure (1)..(490): unsure at all n locations
cacgacagcaagagcagcccgctccgctcctcctcccctgccgaagctccacacagcagaagcgaaaactgcaggaaggccaatcgggcctggcaggcatgcttgcccgctgccgcaggtgaggcgacccgcagccgtccgagacgcaccccggcgcaagcgcgcatccgccatggatccggcgtccgaggagctcgagcgccgcagccgctatctcaactcgctcatccgccgtactaagctcagcgccaccccggctccccctcctcagccggagccggagccggagcacgaggtagcgccaccgaatccggagccggagccggagaccgcggttgggaagcgcgaggaggccaaggcggatccagtggtcgctgaggaggagaagcgggaggccaaagtggcgggggacgggaaggggaaagagatcaaggggaaggacgacgggggtccccaggaggacaacagcangaaggtgtcagtgcgggtg

SEQ ID NO: 279627 - DNA, 458 bp, Zea mays
cccaagcgtccggcgcggggctcacagccgccgccatccgcaagaaggcggccgaggtcgtcgcccgcgtcgacgcgctccactgcggcggcggcggcggcggcggcggcacctctccgcagccgctgtcgttccatcgccgccgccccaagaaccccgacctcaaccgggagccaaccccggaaacctcagacgacgagtaaagcgcgctgattagggtagctagctagccaggcaggcaggcagtgaggcagcagtagcaagtaaagcaagcaaccaggtccaggcggcggcggcccgccaaacggatgagcgtgggcgggtgcagcggcaaggtgttcggtggaatgcggatgggctcggaggtgtccaataatggagccgcgacgtcgacgtcagggccggaagccgtagtaaagtggaatagcgcgcgagctgtgccgtttggttgcccggag

SEQ ID NO: 279628 - DNA, 489 bp, Zea mays
cgtcgtcaaggtgggcagccaggtgaagaagttgaaggaaggcgacgaggtgtacggcatggtcagcgagaatccgctgcaggggcccaagcagtccggctcgctggcggaatacaccgccgtcgaggagaagctgctggcgctcaagcccaagggcctcgacttcgcgcaggccgccagcctgccgctagccgtcgagaccgccaacgagggcctggagagggcaggaatatccgccggcaagtccgtcctcatcctcggtggcgccggcggtgtcggctcccttgcgatccagctagcgaaccatgtctacggcgcgtccaaggtagctgcgacggccagcaccaagaagatcgagctgctcaagagcctaggtgccgatgtcgccatcgactacactaaggagaacttggaagagctaccggacaaatacgacattgtcttcgacggagtgggtcaagggtgacaaagctgtcaaggtagtgaagg

SEQ ID NO: 279629 - DNA, 507 bp, Zea mays
catctggtgctaaggggatatactggaaaacggcgtacttgtgctcatccatgggaccttctatcaagctaaacataaaagaaatgcttgactatggtttggaatcatctgactagatgtgaccacaggcaccagttaagtcagctggcatcgttatcaccttcacagattaactatttgccccttgcgacaaatgagcagaaacatggttggtgtatggcaagcaggtgcttaggtacagttttctcagtttttagggcacatcatgagagcagctaaagtcacccagattgacaaagagatggtttgttggtcatgtatttatgagaaaattatgcatggtttcatagatgtctgtctctgagacgtttgttgtaatgttccatattttgtcaatagtcgtccttgagcttaagccaacaatttgttttcacctgtcattaatttaattacctttcataaaaaaaaaaaaaaaaaagggtggccgctcgccgatctagaactagt

SEQ ID NO: 279630 - DNA, 388 bp, Zea mays
ccgtgcagctacaaatctatgctccaatattcgctggttcagaatctgatccagcaatccaggtacggacggtgacctgacaaattaaatgtggcctgcctcccccagatcgagtgcttgcgcgaggatgggcaggtaacgttcgccgacggctcgcgtgtcgccgccgactccatcatctactgcaccgggtacgactgctcgttcccgttcctggacacgggaggcctggtgaccgtcgacgacagccgcgtcggcccgctgtacgagcacacgttcccgccggcgctggcgccgtcgctgtccttcgtggggttgccgaggatggtgctggtgccgcggttctacgtggcgcacgcgaagtgggtggcgcacgcgctgtcaggct

SEQ ID NO: 279631 - DNA, 446 bp, Zea mays
attcaaagttcttgacgccccctcagtggagagacggctcgatactcgatagctggaagcaaatggatgacatcaacctggagaccagtggaattgacgccatgaatcagaggaggttgtcttggccctccatcaagagggacccgtaggtcgcaggtcacccattggatttaggttcccatgttacataaataggattccaccttgtgtagttggcattgattctctgtgtttttaatccgatcacctgcacccatttggcatgttcgacttgtgagagatggtctataagttccttaaatcaatgtcgtggcaaaatttgatatgttttaggcccctttggcagggcaacttttgctctaactttgttattgtttacataagccgtactaaacagtatttttaaaataacttttcattaattatattttttgttaattattatt

SEQ ID NO: 279632 - DNA, 785 bp, Zea mays
gttctagatcgcgagcggccgcccttttttttttttttttttttttttttgtgaaaatctcatttacacggcaaaagattcacagattaaacgctgtttacattgggaagtagtacataggtacaggcggcgtacagcatgcaatgcaacatacaacgctgcatgcatgtgtgcacgtgtagttgattgagctcagcgccgcttgacgggatcgaagttagagacagcgacgacggcgccgacgatggcgacgagcacgacgcctccggagacgatgctgaggaggaagttcttgagcgacggcgagatcccgggcgcggcctccgcgacctccggcagcaccagcgccgccgccacggccgccgcggccgcccactccttggccgggtgctgcttctgatgcgcggacgacgcccggacgacggccatccgggtcgccgaacgacggggcgcgagcgcgacggcccggcgcgacgtcgcgttcctgccggcgcagagaggcttcccgagaccctgcgccacggacagagacgccgcgacggcggtgacggccatgggtcctgggctccgctcaggcgctgctctcgggacgtgtgatggcactggcaggagcggctggccggggcccggcgccccggggagagcggcacagatatgtagataggatgagctggaggggcgccaggtcagcccgctcctcccacgtggatggacacccttggcgccaagtggtcgcgcaggataaggtcttatcgccacctggtgcgtagttggagatgagaagc

SEQ ID NO: 279633 - DNA, 372 bp, Zea mays
agtatgcaatgagatcatatcttaggttagtccacaacataaagaaaccgaatgcgctgttgaatccgtctcatacatacatacagatggcatgaaatgaaatttacacattcacgcattaaacactgttttcattgggaagcacacggggagagagatctcagtacataggtacaacaacacacaacgacgcatgcagctcaaccccgcctgacgggatcgaagttagagtcggcgacgacggcgccgacgatggcgacgagcacgaccccaccggagacgatgctgaggaggaagttcttgagcgacggggagatccccggcgcggcctccgcgacctccggaagcaccagcgccgccgccacggcagcc

SEQ ID NO: 279634 - DNA, 557 bp, Zea mays
cgcggcggcgggcgtgctcggagggctggcgctggccggcggggcgagctacctggaggacaagttcgaggagcgcgtgtcggagcgggtggaggacaacctggagagggaggagtcgtacggcggcggcggcggcggctacgggggtggctacgacgactatggcggcaacgacgactatggcggcgacgacgactactgatgggtcctgatcctccgatcgttggcccggctgctacgcttgccatccacctccaccttcgtctcgctgtcctagatgtttgctgtatgaatcgcatagtagatcatgttctctattcctgccttcagtttcttttctcagttgtggtttatcgcggcggggttgatgttgagatttgagatcctcacctgaggaatggaaaaatgctcacctgaggaatggaaaaatggtaagggcttgttcggttattcctatcccatgtggattggatgggattggaaaaaattatgaaagattttaacttgtttgagattgaaatccatccaatcccacctataaatgaaagtcaaaattt

SEQ ID NO: 279635 - DNA, 780 bp, Zea mays
agagcgccgtcagcaacaaagtcttgcatccaaactaaaagaacgaagggtagacaagttctgctggaacctgagattgaaattccactcagggttgaacctcccacggtatcaaatgatatccaaaatcatttaagaacaacaaatcagtttcttgcaccaagccatatgatgcaggcaccttatgttgcacagcagtttggtcttggttctttacaaggattcccaggcatgtcaccatttgggcagattcaagaaccaacacctcttcagcagccccatgtacaaccaccatcgtttcatagtggtcctcaaattacacaggctccacctccagacattcaatcactacagttttcttagcaagcaatcctcagcttggccaccagaccacggatcaaggccagtacaccattccagtctgggatttcctgtgacatacagtatcctcctgtttggttgctagcagcttggtgcctgactcgcccagcatcagttgaaactaacgattcttacttcctcacgcatctccacgcatgcaagtcaacgagggtaaaaaagcctagcttgcacctgcgcgcacatgcgtccactatatttttacttccccaagcacgtgcctgggcgcggtcaacgcatgcacggggccaggcgcgggagcagagccaaccaatcatgcagtatgtgatgtatggcgaagtagcaatgtagttgtaaattatgtaatgacactgcccctccccgaagggttaatgtcaatgaaatcctccagcatggtgc

SEQ ID NO: 279636 - DNA, 555 bp, Zea mays
ttgtttcacggagctgaacctcctcgtcgacgtgctctgcgcttccacacttctccgccggccggatgggcgtcgggccgtacctcacctacgtcaccgtgacggccgacaaccccatcctcatcaaggcgatggcgacggggctgcagctggtgagcgcctactggttcctgcggatcctccggatggtcaggtacaagctcgccggcaagaagaagccgacgccggccaagctcgccgccgccgccgccaactgacgtaataagcgccggcgacgaccttcacgagctacgcacatttatgataccgggagttggattcgacagaggccgtgctgtacatatagtacaaatacacacacacgcccgcctctgaagcaatgcaatgcaatgcaatgcaattcctccactgccaaggatgtgtctgtcctccccctccaaccaagtgtcggtgggtaccaactgtacgcgcgttgctagcgcaaaaagaaaagaaaaaaaagaaagaaaaaaatcgttcaatgagtcctgttgaatgtggaggccctttaactgc

SEQ ID NO: 279637 - DNA, 791 bp, Zea mays
ttcttttgtgcggccggcgacggctcacgcatcgctcggcgcccgccccgcgtccgcgaggtgacgaccggcagagcgcgccctcgcggcgctacccgacacctgcgacgaaacgccccgagtgcactagtgaaggagtgcgtcgacgcacgggctcgggaacgcggtgtcgccatcgcggagccctagcgagatcggcgggaaggtccgaaggcgagcacgtgtttgtgtaacctttctccccttcttccctttgccggccggcccttcagcggcgacaagtgcccaccaggcggtggtttacgttgagctgaggagtgaggaagatgtctggaaatccagtcggcgtcgacaacacttctaggaggaaatttgacaaggaagagtacttggagagagctcgacagagggagcagagggagaaggatgaagctcggaaaggcaaggaaaggggtcctcctgtgcaaagacagcctttgaaacacagggactatgaagttgatcttgattctcgtcttggcaagactcaggtggtgaccccgattgcaccattgaatcagcaggctggatactactgttctgtatgtgaatgtgttgtcaaagattcagccaactatttggatcatataaatggcaagaagcatcagagagcactgggcatgtctatgcgtgttgaaagggcatcacttgaacaggtccagaaaaggtttgaggcacttaagaaaaggaaggatccaagtgcctttactgaagaagatttggatgagagaataatgaaacaacagcaagag

SEQ ID NO: 279638 - DNA, 437 bp, Zea mays
agcaaggaaaggggtcctcctgtgcaaagacagcctttgaaacacagggactatgaagttgatcttgattctcgtcttggcaagactcaggtggtgaccccgattgcaccattgaatcagcaggctggatactactgttctgtatgtgaatgtgttgtcaaagattcagccaactatttggatcatataaatggcaagaagcatcagagagcactgggcatgtctatgcgtgttgaaagggcatcacttgaacagctatgcaggcgcttattgatcttcacgtggaggacaatgcaaccgcgacgatacacaaggtataagaagttcaatcaacattttccctccatgagtgaatgcagatcgatcaaattgagaagatgactacttcaattgaagatgatcggaagataagtgtttgtgatatttttttattgcca

SEQ ID NO: 279639 - DNA, 398 bp, Zea mays
aggacgcgtgggcggacgcgtgggataaaatctcttcgttcacaaatagacaacatggagtcgtcgttctcgtcgtccttgggtaataacagcagcaggatactggtcattggtggtacggggatgatggggcagcacctcgtcaaggccagcctcgccgccggccaccccacggccgtgctcgtccgcccagccagcagcagcaagctagagcttctcgagaccatcaagggtgacatctacgaccacgagagcttggtggcggcgttccaccaggttgacgtggtcatctccgccgtcggccaccacggaccgcatgacctagaagacggccagctcaagattgtggcagccatcaaggaagcaggcggcagcgtcaagcggttcgtgccgtccga

SEQ ID NO: 279640 - DNA, 353 bp, Zea mays
cttcgttcacaataggcaacatggagtcgtcgttctcgtcgtccttgggtaataacagcagcaggatactggtcattggtggtacggggatgatggggcagcacctcgtcaaggccagcctcgccgccggccaccccacggccgtgctcgtccgcgcacccagcagcaccacgctagagcttctcgagaccagcaaggccagcgcggggaccgttgattggaggtgacatctacgaccaccagagcttggtggcggcgttccaccaggttgacgtggtcatctccggggtgggccatcacggaccgcatgacctaaaagacggacagctcacgagtgtggcagccatcaacga

SEQ ID NO: 279641 - DNA, 867 bp, Zea mays
agcggccgtctcctccacctcaaccgccgcctcctacttctccccgcagccgcagctgccgatctccaccgccgaccctgccgccagcaaaagtaggttgatgcggcagccacggcggagcagcagcttcgtgatggtggaggcgtcctctgccagcggcagcgacggcggggtggccaggacgaagagcctcacggaggacgacctggaggagctcaagggctgcctcgacctcggcttcggattcgcgtacagcgagatacccgagctctgcgggacgctgcccgcgctcgaactctgctactccatgacccggaggttcctcgacgagcagaaggcgccggggcaggaggaggagttggagcctgcgtcgccgccgctccccaattggaggatctctggcccgggtgacgatccagaagaagtgaaggcgaggttgaagtattgggctcaagctgttgcatgcactgtcaagctctgcagctaaactaaaggtcggatagaggctgaagaatctggttatatggttttgggatacagggagcggaagggggtgcttctgctctctggcatggaagcgacatgagtgatctcatctgcttctacaaaaaaacttgggaagggggaggaaccattattcggaacggtgacaggcctcgattcagaatttgagatccatggtctgagcttctacgaaagggttcggaagccctgcccttcctcagggtgggtggtccgcatagtgcagcgtttccaaatgcatgacccgctggttctttttgctgtttccctgtaatgatcaataggtgctctaattgtcgccctcctgtaataatgcactgaatcgaattttgagttttggccttt

SEQ ID NO: 279642 - DNA, 546 bp, Zea mays
cccgtccgagaaaatacagctgcccttatagacagttcaaatggcacttgttatttagatgtcagggagaacagagttaaggatgactcacaagaagcttacaatggcccagaacatatttaccaggaaaggctcaaccatgttgcttctagaaggcctgaagaggatgagatacaagaagttgaagccttgaatgatgctgtctcctcttcgttttcaagccgctcccttgaggcactaaaatcttgctttgatgtttgtggtgttgatgatccgagcccaactgctactgattcaagagcgcaaccaagtgtcggaactttacctttccagcagttgcaaaaattggagcattgtacaagtggcgactgcaatggtgaaagcttggaaagaagcgtttctgtacctacgaatctggtcactagtggataccacaagcattcaagtggttctcttatacctgagcaagttctttctccctacttgagcagtgatttggaaagggatggatttcgtcagataaacttaagcagcaggaactgtagt

SEQ ID NO: 279643 - DNA, 402 bp, Zea mays
acccacgcgtccgcccacgcgtcccgcgacaaccactgagccgagcgggggtggatatggcagcggtcgccgcccaccaccacctccacccctcctccgtcgctgcccgaactccaacacttggccgacgccaccgtttctcgtcgcttcctcgcgccgcgcggccgtcctcccaaggccgtttcagcttccgagccgcgacccgcgtcctcacgcgcgccggaagcactggcgccagcagcgccgcctcgcccgccgcgacgaccgcgtcgtcgttgtcgctggaggagctgcgcgggggctgcaccacctggacgtggcgagggatgcgcgtgaactacctcgccagacgacaggggccgcccgtactgctcgtccacgggatcggcgcctccgtcgcgc

SEQ ID NO: 279644 - DNA, 489 bp, Zea mays
accacgcgtccgcccacgcgtccgctgcgatcaaaccgcacgcaagcgaaccacagcgtgctcgccatctcactgactgtgacgacggcaacaagccagtgagcagctcgccatggcagcagtgtccaccgcgccggcgctcgaaggccgcatcgcgctcgtcaccggcggctcccggggcatcggccgcgaggtgtcgtcccacctcgccgcgctcggcgcgcgtgtcgtggtcaactacgccaccaacccggccaaggccgaggagctcgtcgcggagctcgcctcgcgcggcctccgcgccgtggccgtgcgcgcggacgtctccgatccggacgccgtgcgcgcgctcttcgaccgcgccgaggaggccttcgggtccccgccccacgtagtgtcgcctgcgcgggcatcatggacgccaagtaccccgcgctggtcgacactgccgtcgaggacttcgtcgacacgttcgcggtgaacacgcgc

SEQ ID NO: 279645 - DNA, 391 bp, Zea mays
accacgcgtccactggaacgggaaggacggcgagttcaagctgcaggtgcaccgcagcgtggctctggtgaacaagtcgtccgcgttcctcactgacgacaacctcgtgccggagtcgtggtgggtggagcggaacaaggggatggtcatcggagaaaccgggctgtggcagctcgaaccgcctggcgaggagcccgtaccgccgttcgtgaccgggaaggtcatcgatgacgacgaccatgtcgctgccaccaccaccactactactaccacggctagtaaggagacgaagacaccggtcaaggataagaatcggttcgggactcagcttttctcggcatgctttagaggggtcaatcagtctgtcgataactgaatggttgaatgtttg

SEQ ID NO: 279646 - DNA, 442 bp, Zea mays
accacgcatccgatccgatcgatccactgcacctcgcgagcgatagggcaactcccctgcacgaatccactgctcctcgtccctgcgccgccgccgctcgacggagtcggcctcatcgccgctcggaatcaagtctcccccccaacgcacacacatgctcgccagatcccctccgtctccaccgccgtggtcgagcaagtgggtcaagtcgctggtggccctcaaggtggccgagaaggcggcgggacataagggtggccataggtaccatctcaggtggagctagccggtcgtgtccacggcgagcgctagcgagcgcagtgcgctggcgtccgacgcttctgcggcttcgactgactcgtattcgttgaaacaaactgaagcagcgctattagggatcagcgaggttgaggaagtccagctggaagttgctcgcctcggt

SEQ ID NO: 279647 - DNA, 409 bp, Zea mays
cggacggtccgccgccgagcggcacggcgatgtcggtggggaccaagctcaagaagctcagctacaactcggtggtggagatcgtgctgcagaacccggcggccgtcccgacggagaaccacccgatccacctccacggcttcaacttcttcgtgctggcgcaggggatgggtaccttcgccccgggaagcgtggcctacaacctggtggacccggtggcccgcaacaccatcgccgtgcctggcggtggctgggctgtcatacgcttcgtcgccaacaatccaggcatgtggttctttcactgccacctggacccgcacgtgcctatgggcctgggcatggtgttccaggtggacagcgggacgacgcccggctccacgctccctacgccgccgggggattgggtggg

SEQ ID NO: 279648 - DNA, 744 bp, Zea mays
cgtcgccttccatgtcgagatcaccagcctccctttgccgcctcgacatggcgaagaacgccgaggtggtcgagagctagaccagctccttttaccactgctcctcccattggggtgaagccgtgggtcggggcgtggtcccgaggtcaggcagcgatggcgaggatgaagagatccgatggtgcgagcagcggttcgagagggaggatgtcgtgccctacgaccgcgacgttgacagggatcccgtgcttgtcggtggcgctgccaaggactggagtaaatgctacgtaggttgtgaatttggtttttttctgccagtaagacacctgatgctacttttggaattgcaccagatccttctgtagagggtatcctcggatcaatggaatcatctcacgtgggttcagagaataatattgatgtggctcgagggagagggtacaagattgtgatgacaaccagcctttcttcagacgtaccagttggctacttttcatgggctgaatatgatatcatggcacctgtgcctccaaagactgaagaagctcttgctgcagcctttatttctaactgtggggcacgaaactttcgtttgcaagcccttgagatgcttgaaaacttggatgtcaaaatagattcatatggtagctgtcatcagaaccgtgaccgcaaagtggacaaagtggacactttgaagcgctacagactcagcttggcatttgagacttctaatgaggaggatta

SEQ ID NO: 279649 - DNA, 420 bp, Zea mays
agtgtttgttgatgagttcagctgcataggatgcaagaactgtgcgaacgtgtgttctaaggtcttcgaaatcgaggaagatttcgggcgggcaagagtttatgaccaatcaggcagcacagaactgattcaagaagctattgatagttgcccagttgactgcattcactggacttcagctgcgcaagctgtcgctccttgaggatgaaatgcgcagagtggagagagtaaatgttggattaatgcttgctgggatgggaggctcaattgatgtgtttcggatggcaagttcacgctgggagaaaagacaagccaaagtcctggagaaggtcagaaggcggatgagccaagatgattccagaaagggtggctcatggagtgacatctggggggcaccaacaagatacgagaagaacgaag

SEQ ID NO: 279650 - DNA, 414 bp, Zea mays
agaataatcaggaaaagggagagggcttttatagatagtgaaggaactaatgatgacttgctaggcttattggttgagtcaaacatgagggaatcaaatgggaatgcaaaactcggaatgactaccgaagatataatcgaggaatgcaagttattttactttgcaggtatggagacaacatcagtcctgcttacatggacgttaattctgctaagcatgcaccctgaatggcaagagcaggcaagagaagaagttttaaaccactttgggatgggtacaccagactttgataacttgaaccgcctgaagattgtaaccatgattttatatgaggtccttaggttgtacccaccagtagttttcctatccagaagaacctacaaggaaatggagctcggtggcatcaaatatcct

SEQ ID NO: 279651 - DNA, 425 bp, Zea mays
gcgctttcgcgtttgggaccagccgtgccgtgtgccggtctgcagccatttcagggcgaagatgcaagctgagaaagcggacaagacatggcggctcctggtgaagaaggtcgaggagggctcgagcgctggtcagctcggccaacaggcaggtgccggaggttgtggctatgtcgtgggtgaagtacagcagcagcaaatgggcgcgaaactgagatactcccggtccggcatgcatggtgtagccttctgcaaattttttttgcgttgttggactatgaatgcaatccgacgattgccatgcaaacgaggtcatgaggtctgtctgaaacaaaaataaaaatgtaggcagagtcgattcttgccagatagatttagtggttattcttttggagagatataaggagaatatagtgctgttgtat

SEQ ID NO: 279652 - DNA, 432 bp, Zea mays
  unsure (1)..(432): unsure at all n locations
gcaccgcaaattattatgttagaactgcaaattcttttgggatgtanggtgacaaggagttccgactttttctaccttttctaggcccgcatgagctaccccaagtgattctataaaacagccagccacccatatttgtgcaggattacattacatatgtacacaattttctgtgtatatacacacacggattcgacaagtatcttcatttccaaatgtcctcttcccttcttccgagtacctgaatcacaccggcaatggctgcgccgatgatggaccaagtcaccccggccagaacgatcttcatttcaaagctgttgacgactccaagagcgatggcgccgccaacatgctcctgaatgccgctgccacctccggccacctgctccccgttgtaactcacgaaccccgccgcgacgatccccaatagca

SEQ ID NO: 279653 - DNA, 565 bp, Zea mays
ctgtttcaagaaaaaaagaatgcgccatcgctggggatgggtacgatgatcaagatcgtcgaacgacgaagggcaccgaggtgttcgtcagcgggctgccaatgtcgaccacggaaagcatgctcctctctcatctccacaccgtgcagtagctgctgcccgtagcatgtaatgcaatggaataagttatcaaggcaactaacactaaacatagttcttgggctccttggcagcgtcgaggcatggtatctgcccacgccattgtcagggcctcctgcgggtacccatgctcgacctacttcatcgaagatgtggtatggacaaatatacatgccactttccagatgaagtgaagagaccaaatgtggatgtcaatcaatctctagatgaaggaatgaaaggaaggagctaagttattgcactggatgtacggggtctagaaaaggtgtcactttgatgccatttattagtgctgttgtacaaaagaaaaggttgaattgatgaattcatgggctaccttataaaataaaactatattgaattcatgtgatcttgtgattttatg

SEQ ID NO: 279654 - DNA, 506 bp, Zea mays
cccacgcgtccgtttcaggaaggattcgggcgtatgttcttattaggctcgtacaagtccaagtcctggtactaggagaacgattttaatcacactaacctgtacagaaaattggtgatgcttatacaataaaaaatggtaacacccatagcttgcatacagttacattgcataattacattcggcatgcttgcagagaacccatgacagagtgcttgctgtcaactgtcgcctacaaaggttactgccccaggattcgagatcctgagcttttgatgttctctagaaattctttcctttttggcttgaagaggagattgttgtagatgaaaagccatgcaaccaatatcccgactagttcaaagagaagaggaaggaccgggagcttgtcgatgatctcaatgaggttgaccgaagcccataatgcagctactgcggcaaagcctataccagctagggcaaaaatgtcttccgcggtactgatagagctcgcgacgtatttcact

SEQ ID NO: 279655 - DNA, 817 bp, Zea mays
  unsure (1)..(817): unsure at all n locations
cccacggcctcgcccacgcgtcaacngacgcgtgggttttttttttttgaacgaacatgtggccatgttattgagagaatctggggaacggcccccagtaaaggattacagactccaccagattgaggatcccatctaaaggaatgaactgagaaatcaactgaagagaacagcactacgtacgacaatatgcatctacatataaagttattaaaacccataaaaaaaagaagtctaagtggaaaaggtagagctttacaacttgcacatgggagatcatgcgtgaccactaaaaaaactccaattcaagataatctgagcctttctcagcggctgatgtagccttctggcttgatgaagctacagaacgagggatctcaactggcttggggatatcaggtggagtggcacacctgattaatgcccaattaacaccttcaaagaacgggtgctgttttatttctgtggctccacgcttatacgctaatcgatgctgaggttccttgatgagcaatcccctaataagatcccttgcagcaaaactcactacaggtgattctgggaaccttaagggttgtccaactacgttgaacaatgtcgccctattcccagaacctttgaatggtgtcttgccgaagagaagctcatacaagaatatgccaaatgtccaccagtctacagcacttccatgcccctcgccctttataatttcaggtgccaagtactcatgggtgccaacaaaagacatagaccttgaatctgtcggctctgcaacaagctcagcaagtggtctgacctgatttgccaagtctcaaaa

SEQ ID NO: 279656 - DNA, 736 bp, Zea mays
cgttgagctcaggcgcgtgtcagacggcggtttcgtcatcaagatgcgcgacggcaggcacctgagatgcgtccagaacaacccccgggtgctgaggctccgggactccgcgccgcaccacgcgatcgtgctcaagatggaagacggcagcgaccttctgctccccatcatcgtcatggagacgccaagcatcatgcttctggctgcgcttcggaacatccgaattccaaggccaaccatctacaatgtggtgctggagatgactacaaggatgggatatgaggtgcgtttggtgcggatcacagaaatggtccatgacgcatactattctcgactatatctcgcaaaggttgggaatgaccaagacactatcagtttcgacctcaagccatcggatgctatcaacattgctttccgctgcaaggtccctatacaagtgaacaggcgtatcgcgtataacaacggattgaaagtcctacagccaaaggcggccgggagttatttaggctccgacgacattcaaatcacaaggcttgacaggcctgacgaccagcattgcagcgaggcccaagagttcgatctggtccggaacatgctcattgctgccgtagaagaacgctacaaggatgctgctcaatacagagaccaactttccatgttgcggtcaaagaaaaagaacgcgatatagccagatgggtgcaaagcttcaacttgttagagcttgatgggggtgtac

SEQ ID NO: 279657 - DNA, 415 bp, Zea mays
accacgcgtccgcagtgctcgcatggccgcctgccaagtccctccaatactccctgtggccgcgtcgagctcgcccaatcctcccagcttctccctgtgctcgcgtcctgactttgcccagcacctcgtcaagctcctccatgccggcgtccctgcttctcttctctgcgcccatggccgagcggctcctcccacggcgcgccgagctccagctcggattcgagccgtcttcaccgtccacgcgacccctgtttctccttggctgaaactctttcccatggccgtggttctccaagcttccctgccggtgcccattttcttggtcgcgagcaagctctcgcgcacgcctggcttgttcgtgcgctcgctccagcggattcctctacgtcagggccctgctcgaccgtgcgccctc

SEQ ID NO: 279658 - DNA, 412 bp, Zea mays
cgcgggacttgatcagctctttgctcaaatctcaagtgtttggtgccattatcgcggtggtgagctgtgcctggggagttacaacccatggaggagccaagggtgttggcgagtctacaacatctgccgtagttgtttccttggttggaatcttcattgcagactttgctctctcgtgcctgttcttccagggtgctggtgattcgctcaagtatgcaatgggttgaggtgggtcagtgcagaggaagctttttcctttctaggaggatagcatagtcttgtacattaaaaagagtggtgcactggattctagtaggtgaacattgcaacttctgccacagtccaggtgacatgcatagttgtttccccttgatacctacgacaatcattacctttgttgtactgaactgct

SEQ ID NO: 279659 - DNA, 526 bp, Zea mays
cccgcgccgtcgaggtggacgcgccttccgccggcgcaccggagccggaggaggcggaggagccgtccgtcgacttcgcgttcgtcagctcgcggctgctgccggtcgggactccggccgtgcactaccggacggcgcgcggcgggcagaagctcagggacatcatgctcgacggctacatcgacctatacgggccctacgataaggtggcggcttgggtcgacgatggcggctctgggactgcacggggaatgacggttgagcgtgggtagacaaaaccagaacgagaaatgggaattaggggcgagtcccgactcccgagcggctggcaccgaggcgaagctcaatgtgacaaggtcgacgacaggagatcaacagcgatggcgaccgtggcggccctactgcgtgctgggtggggaaaccgacaacgagagtgcaaatgacgagtggggttcgctggagttccgggtcatcaccctaaatcccatgaaggctttgttcaattctaccccaaatccataatgga

SEQ ID NO: 279660 - DNA, 508 bp, Zea mays
ctttcccagcagcggctaacccccaccagtccgctagtgctacatgctctccatccaatccatccatgatgcatcctccttcgcattgctgggccttagcatactgtcaggctaccagcaagcgaagtagctagccatgctcggcctccccgccgcgcccccggccgccgcagcaccgccgaacccgaagggcaaggggcgatgcagcgccgccccgccaccagcgatgacaggccgggtgtctctggctgtccctgcggcggctgtctcgctctcgctcttcctctggtccagtccagtgaacgccggcatcctgtccggtttctcgggactggagtcgactcccggccccgacctcccccggctcgagttcctggagaaatggaatgcggagaaccagaagaagtacaccgagttcgataacaggttcaagaagtccaaggtgctgcacgacctgctcgagaagagcaggaagaacaaagagaagaacgagaggatgatccaggac

SEQ ID NO: 279661 - DNA, 471 bp, Zea mays
accacgcgtccgcccacgcgtccgcggacgcgtgggggagatccgcccggcggggcagagcatcaacgtctccgtcaacatgttcttcaccttctgcatcgcgcaggccttcctcaccatgctctgccacttcaagttcggcctcttctacttcttcgccggctgggtcgtcatcatgaccgtcttcatcgccttcttcctgcccgagaccaagaacgtgcccatcgaggagatggtgcttgtctggaagtcacactggttcatggaaaaggttcatcgccgacgaggacgtgcacgtcggcattggcaacaaccacccggccaaaaacggcagcgacaccaagggggccgacgcgtgaacgtgatctcaacatctatattccatctacagtcacaactgaaatgtacatttaggcttccattgttccatcaactagtagctacatgtcctcctagtaaagtaccagtgtt

SEQ ID NO: 279662 - DNA, 416 bp, Zea mays
ctgattccgaggaatgaaggagcttcagttcgatccttttttttgtggggggcaaggaaacgtggtccatacatcttatcagtgcaagtttgtgatcatgtgatacatgaagcatatacgtgtacgtatttcaccagagtacctgcaccggtgagcaaaatgatctcctacttgcatcaccattagagcagtggatatgatctcatacttgcgcgttgcactagtagggttgtggatacttaggatccatcattgcaaactctgatacaaaccagtgtaagctgagctgcatggattgcagatctgtatacctacggctcatgcagctataccgtcctggattgtaccacacaatcaatattatcaaatgtaagatacgacttggagggaagcttataaagacttccccgtgaatg

SEQ ID NO: 279663 - DNA, 492 bp, Zea mays
cccacgcgtccgttttgttgagagatacaaaaatttgagttccttcaacgaaactgagctcgcgaatctgcataaggaattgagggctcatattctacggggggttaaaaaagaagtttaaaaatccttaactcccaaaaatcaaaaggattcaacttgttaaaatgtcacccctcaaaaaccattacaacaattggattttaaaccggaattttcaaaatctgaataaaggtgttcgtggaaatcaggtatcacttcttaacattgttgttgaattgaagaaatgctgcaaccatccattcttgtttgaaagtgccgatcatggttatggtggagatagcatcggtgatcggaataaagttgaacgtattgttatgagtagtggtaaactgtcttgttggacaaactattggtgagactgcgggagcactaaccatcgtgtgcttatattctcacagatggttaagcatgttggacatccttgcagaatac

SEQ ID NO: 279664 - DNA, 416 bp, Zea mays
cccacgcgaccggcgagcggccgctcgcgatctagaactaggctcgagcttccaccgtctccctccgcttccccgtgcggcggtgccgggtcgcgccgtgccatggcgcccgccttctcggtctcgtgcgcgcccggatcctcgcgcccgctggccgccagccccggccccagcgtcgtcgtcgtcgcctcctcccaacttcccgcgtcgtcgcggagcagcgaacgcaggagagcaccaggcctcgcgctcgccgcggccccgggtgtcggcggtagggatggcggtggcaggtggagagcaggcatctcgtccttccccttcctgccgccgttcttcacagggaacaagggggagaaggacgctgagaaggcgatgaggctcaaggaggagctcctcgacgccattgcaccgct

SEQ ID NO: 279665 - DNA, 483 bp, Zea mays
accacgcgtccgcgcccagcacctggtggaggaggttcttttcagagctgcgaacaaagcagggatggacttccacgaactgatcgagatcccacacggcgaccggcggcggtaccacgacgacgtatctgtcattgttatatccttggagggcaggatctggaggtcatgcgtgtaaaataggtcggccatactagattagagaaagaaacgtatatatctgtagagagagaggttcttggaggcctactccattactcccagctgctcctgtacaatatcaacgaagcaccactgggtgggcttgggatctcggcgcgtccaagttgaatcacgatgagaagatgcgtccccctggagcgcagtgccgtataagatgttcatgtaaaagaagatctgttcaactactgataactaaaatagcgaccaattggtcaagtttttttttgacctttttttgggggcatcctctgtgttcatacc

SEQ ID NO: 279666 - DNA, 590 bp, Zea mays
cccactcgtttgtccacgcgtccgaatttctgtcaacctcaagattttccttcagaggataagaaggtgaacaagaagctgacagccaagctgaccctatactcaggatgtgttgtgccttctggtggtgaaaccgtctctttaagcaactgaactgctttaagtataacagaagagctcagtgattttccctttagaaaatcctctaccttgctagctctgatggcatggtcagctccataagcaccgaacaccaagcatatatcctccatgatgttcttccctgaagctgcatcagttgaagtccttgccaagagagcagcattgacatatgaagcagcattgccaaatggccgaggcgctgcccggaatgtctcaaaggtgatgccatctcaatcccactttgggatgaatatgctcatcagcagggtcctagaatcacatggagactgctgcaagaactcctccaaagtaaggcacaacctttttggaagccgtctggattgtgactgttgtacctgcagccagtagcacagttgctatgtctgactcgaatggcaacctctgcgccatgattatgttgccaccta

SEQ ID NO: 279667 - DNA, 385 bp, Zea mays
tcgacgcgcccgtccgccaccgcctctcatcacaaagagctagccaagcatgctccttgaccaaaagctagataggcaaccatgtcggaggagaagcaccaccacctattccaccaccacaagaaggacgaggagcagcccaccggccggcgagtactcagagaccgtggccaccgaggcggtgaccaccggcgacggtgagaacgactacgaggggtacaagaaggagcacaagcacaagcagcacctcggcgaggccggcgctatcggcgctggcgccttccggctgtacgacaagcacgaggggaagaaggaccccgagcacgcgcacaggcacaagatcgaggaggagctccccgccacagcggccgtgggcgccggcggg

SEQ ID NO: 279668 - DNA, 721 bp, Zea mays
ggttctagtagctcttctggaagtgatacagatgccaaagctgctcaacaaaacagcgtgtcaaaggaaaaaattctacctgtggatggcctgggtcatgaaaaggattcactggacacattaaatttaccagagcaaagtacagaccctgtctctgtttctgcttatggtgagggggggtatgtatctgagaaggtctcccctgagaagcaaatccgagctgcccttctgagaagccgctttgctgatacgattctgaaggctcgcgaaaaggctcttgatcagactaccaaaaaggatcctgagaagcttcgacgcgagagggaggaacttgagaggttacaaagacaagaatttccattacagagagagctcggttgcaagctgaggctaaagctgcagaggatgcctgcaagagggctgaagaagcagcagctgctgaggctgctgcagaagctaaacgacaaagagatattgagagagaagcagctcggaaagctttgcaagagatggagagaactgttgacatcaacggagggagtcactttctgaaagaccttgaaatgcttagaggtatcacatgcgaagagatgcccaacttggttggtgaagggagccctgggtttcaactgggaagcagcaacgccctagcaaagctcgggctgtacatggaagatgacgaagatgacgaggagggcgattggcagatgcacagtggtgg

SEQ ID NO: 279669 - DNA, 492 bp, Zea mays
ggctattcaaccttggcgtgctggggatctgggcggggatgatcggcgggaccgccgtccagacgctcgtcctggccatcatgacagtccgctgcgactgggaaaaggaggccttgatcgcgagcacgcgcatgggcaaactgtcggaagttcggtgatggcaggatctggtgctgcacatctgaacgagcgcccgtgatttttaagctctggcgggatcgtgtgttcccgcatgttagtttcgccaaattttgcctcgtggaaaagcaacgcaaggtgctcaggaatcagggacacaggtcgccggggcagctcttgaagacgacggaggaggggcttggtgtggctatgatggttttggtgcttttgcttatgggctttatggtggtaacttcaaatcaaatagcttgactgtggaccgttgatctggatgtgttttatcatatattacttcatagaacctaataataaaatttaattgttttggattat

SEQ ID NO: 279670 - DNA, 551 bp, Zea mays
gttcgacgtgctgaacgacggggcccccgtggactcctacgtggtggacgacgccggcgtgctgagccgcgtcaccaagtccgacgtcaagcggcttgcccgcgacctcgaggcccgcaagaacatccgcctcaacttcatcaccgtccgcaagctcacgagcaaggctgacgcgttcgagtacgcggaccaagtcctggagaagtggtaccccacgattgaggagggcaacaacaagggcatcgtggtgctcgtcacaagccagaaggagggcgccgtcaccggggggcccgccttcatccaggccgtcggcgaccagattctcgacgccaccgtgtctgagaacctcccagtcctcgcgaccgacgagaagtacaacgaggcgatcttgagcacggcgaagcggctggcggcggcgatcgacgggctgccggacactggtggcccgtcgttcaaggagaacaagcgggagtccaacttcaagaccacagaagagaccgaggagaagcgcgggcagttcaagctcgtcgtcggcgggctgctcgtcatca

SEQ ID NO: 279671 - DNA, 489 bp, Zea mays
gtcgaccaggcgtccgcccaagcgtacgctgcgtttcagcatcctggggttgtttcatttctcgcattggattgtttccttttctttggagttgcagttcttacagtttctcaagcatcacagatagcaaggaacattacaacaaatgagatggcaaattccatgagatatgcatatctcagaggcccaggtggcagattcaggaacccgtatgatcatgggattcgcaagaactgctctgacttcttgttaaatggatacaatgaggacactgaacggctagaccagacattgcacactgatgaggagatgggaatgatacagatgacaagagcggtttcgcagaatggtgacaatcatttacatcatggtaatggcacggagcatagttgcgctgattcacaggcaagcccaaaacctcatagccaagtgggttcgcctcagtgttgtgatcacagtaagaggactgataggacactgttgggccta

SEQ ID NO: 279672 - DNA, 460 bp, Zea mays
gcgactcggcctggctcctcgcggtcccggcctcgtgcgccagcctcgccgaggtccgccacgcggtcgcggacgccgtggacgacttcctccgccatcagctggtcccggaggacgacgccctcgcggccacgccgtcgtcgccttccagcgaagacggcaacacctctgatggcggggagtcctcctctgattcctctccgcccaccggggcctcgccgttcgaatttgatgtgttcaatgacatgagctgggacctgcactacgcgagcttggcgcagggattgctcgtggagccaccgtccgcggtcacggcgttcatggacgaaggcttcgccgatgtgccgctctggagctactagagactgaaattttccgtttctttgcttggcctgtggcgcctaattttggcagtgtaaaacggttacttcttttggtaatgagatggaacaagtttgcg

SEQ ID NO: 279673 - DNA, 417 bp, Zea mays
cccaagcgtccgcggacgcgtggcaagaaacacaactgcaaaagcgaggatcggagcactccgatccttaattccttcttggattctcttctactctagagctctgctagaccgatctccagttaagtttcagacacatggagagcaacgcctcgtccaactgcgccaccgtgccgcagccgccgccgtcgacagggaagctgatcacgattctgagcatcgatggtggcggcatccgcggcctcatcccagcctccatcatcgcgcacctcgaggccaagctgcaggagctggacggcccagatgctcggatcgccgactacttcgacgtgatcgccgggacgagcaccggcgcccttctcacgtcgatgctggcggccccggaccagaacaacggccgctgttcttcgcaaagga

SEQ ID NO: 279674 - DNA, 386 bp, Zea mays
ttttatttatttttttttttgaacaaaaatgaggcagacattatggagaacaaaactttgacgatgaacaaattaaaacaaacccctatttgtgttggagagaaaaactatatgtacaaggtatgtacgggcactaaaaaccaatgtcagattgcctatgtaagcttcggttgggtgatcctctgtggcatggagcacatgcaaccacaccagaagcagcaagtcaccacattatttaccttgcagttccatccaccagcaatggccaaccgcagtttattgcatcttcatcaacgaatttgactggttaaggaatggggagaaaggggaaggggtccattactagaatttaaacttcatcgtttcaactatgaatgcctttacat

SEQ ID NO: 279675 - DNA, 257 bp, Zea mays
gaagtaatcatataatccctctattacaaattataaaatgttttggcttttctagatatattgtttttctatgtatccagacataatgcatatctaaatgcataccaaaagttatctgtctagaaaagtcaaaacgtcctatacttggaacagaaggagtagatatgacaaaaagagcatgcaagtgatgttcttacagaagaatatatatttcatggcaagctagtacctaaacttcagatggagtctttgcatcg

SEQ ID NO: 279676 - DNA, 438 bp, Zea mays
cccacgcgtccgcagaatatgcaaggtattgtgggatcgaggcactagaaccattgggaatatatcttcctggtgacataaactacccaggaggacccctttttgatcccttgggcctgtccaaggatcccgtggcatttgaagatctcaaggtgaaagaaatcaagaacggtcgccttgcgatggtagcatggtttggattttacatccaggcggctgtcacaggcaagggccctgtacagaacctggttgaacacttgtccgacccactaaataacaatatattgtcctcccgccactaaatgaaaatatgcaagagtggcacgaaccatagcaacgggtgtatattgtattagcgtttacagttttacactaatgggttctgaaaattggctattatatttatttagatagacatttaacggtgattagtgatct

SEQ ID NO: 279677 - DNA, 597 bp, Zea mays
cagaagataacgaggaaaatggccagcccatggatgatgattatgaagatcaagttccagattactcaataggctattctaccggctcgaggcaccatgtaatgatgtccatgatggaccatgatagtgacgaggaggatgaagatgctgaaggtgatgagaatgtggaagaagatgcagaccttgcagttgacgatgccgatgttgagatggacgaagatgatgaaattggtgatgatggagaggatggtggcgttggaggggagatgaatgcggatgaggatccggatgctacttcatattcatccgattacagcgactaagaaagcagaaataagggaaccttatcccagattcctccctcggcatggaatgcatgtagtaccgagtaggcattcccccccgttgtgagccaaaagggagcttagatgcttaggttcgaaggagcgaggaactgttttttaggcaccgcaggttttaatagaatttctgacgcattcgacgaagtgtttggttgtaccgtggtagttgtgttactggggaattccccgagttattatacaatgtgttaagtcaaaaaaaaaaaaaaaaaagaaa

SEQ ID NO: 279678 - DNA, 466 bp, Zea mays
  unsure (1)..(466): unsure at all n locations
agcgtcatgtgagagaaagcggatcggccgggcccggaccgccgtggccagcancanncagcagcacaggagttggggggaggcggcgccgctagagccgccgccgctagctaccccaaaagaaacccctctctctctctgtggttgtaagtagagtagcctgttgctggcctcttccacttagtatagaggtcaaacctctctccatgcacgacagagctttttcttcgtttccttttaatatcttttttactgtttctaatgataatgagatacgcacgcgcgtttacctgtagtgatgttcaccgcgtctacgcccgccggctacttcaagaaattttgtactatgggctaggacaaatagatatacgtatatggctagctagtagttttctctgtctagagaaaggcaaatgcgtattttgtatctccttattagtatatattactcctgcctgaccccacc

SEQ ID NO: 279679 - DNA, 1025 bp, Zea mays
cggacgcgtgggtgacaaggccgaggcaaagaagagcgagaagcccaaggacgccggtaaggcggcggagccagccgccgtgacgacggagaggtcgctgcctgcgccgccggcgccggcgccaatgcccgcgtacgagcaggagttccgccacccatactacgccccgcagccggtggtgagctaccacgcgtcgcagccgagctcgagcgtgtcgtacacgtacttcgcgccgcagacgcagccggcgtactccatgcaacaggcacagccgcacccacaggcggcggcctcctactccgtgcagccgacaccgccggcgtactactccgcgcaggagctgcagccgcagcagccggcgaagcagtggtcgccgtcgtacctgtacatgccgtacccgcacgccgcggcgccggagccttactaccagcaggactactacggcccgcccgggatgcacgcgtcgcctatgcacgactcgtcgtaccgcatcttcgacgacgagaaccccaactcctgcagcgtcatgtgagaggagagcggatcggcgcggcccgggccgccgtggccagcagcagcagcaacaggtagttggggggaggcggcgccggtaccgcaatagccaatagagaaccctctctctctgtctctctctctctgtggttgtaagtagagtagcctgttgctttgctggcctcttccacttagtatagaggtcaaacctctctccatgcacgagcacgacagagctttttcttcgtttccttttaatatcttttttttactgtttctaatgataatgagatacgcacgcgcgtttacctgtagtgatgttcaccgcgtctacgccggccggctgcttcaagaaattttgtactatgggctatccggcaaatacatatacataacaggctatacatgtacggctggtagacagagaaaggcaaaggcgtatttgtatctctttggtatgtactcctgcccgagaaagaagagagaagagaagcaaaggcgtgtttgcagag

SEQ ID NO: 279680 - DNA, 245 bp, Zea mays
gcgcgccattgccacaccgtgctacagcttgcagtatacaagagcctatctccatgactgtgattacgggactatatacagaaccgaattgaacgccatggcaacaacagttttcctgtctaatgttgttgtaaatcgcgactgctacctatccttcctgctgagcctatatatgtttctattgctaaaaaaacgaacgttattgtataatatgatcgatgtggagacatcatcctctatggcgt

SEQ ID NO: 279681 - DNA, 423 bp, Zea mays
tagcgtcggattccaggtcgcccacgcgtccgatcatacacaagcatcaaagcagtaagataagcattgctgtcattattgatcaagtaacacatgcactgaagaatgtgatatcgcccaaaggagatgatggtgcaaacttttcctatggcagcgcagagatagaaaagatggtggctactctgataggaagagtaagcagcatggctgaaagatctagcaaagacaatgttatgagttcccgatcactctctcatgaaaagtctgaactcactttgcgactcgagcatctagttcatgtctgcagtgacgtactagatggaaaagctaaccatgaaaggctcactgatgaagtttgcttgatcctaaagtggaaggtgagacgatgccttttgtgtcctgaatgaagtagacattgtggag

SEQ ID NO: 279682 - DNA, 534 bp, Zea mays
cacacgcgtccgcgcctgcttctcccccctcctgcctcttcgtgctgcttcctggtggggaagggaaggagaaggagaaggctgtgtgcgtcctgcgccgataacgcgatggtgtccattgtcaccgaggtatgggcgctcgctggatgcggcccagcgtccaaggcggcggcggtagcggtagcggcgcaggagttgccggcgcagcatccttctcctgccgcagcgggaggagggaaggccaagaagagagccgtgccagtgtcgttcagaggcgtcagcagcggcggtggccaggaccaccagcgtgaggccgccgccgtcgtcgtcgggcggcggcgcggcctcgccgtcgtgcgcgctcgccgccgtcgccgcctcgttctccgcccgcgctgaccgccccgtgcgggcgcttgtcctcgaggaagacaacgacatctagctgctggagcgcgtgaaggaggacaggaagaagcggctgcataagcagggcatcatcagctcctccggcgccgagaccgggtatttgca

SEQ ID NO: 279683 - DNA, 564 bp, Zea mays
gcgctacctggcgggacgcgtccgcccacgctccgtgtggatgcttgccggttgggttatagtggagggtgctgccgccggagaggaaatcgagcgatacagcagcaagcacggcacacccatccacgaccgtagtatgcccggcaagcaaacatctccggcagccatggcgtccactgtaacagccgccaatagcagccatggaagcgccctgcgtacccgtaccgcctccccaaggccggtcgcgggctggagctgcagacgcacgctttccacgcctgcacaccaccaccacgcgcggccgtcacccagagctcgggttgtcgccgtccgagccgccggcactcagcgggcgacctggttgcccggactggacccgcccccatacctcgacggcacactaccaggtgacttcggcttcgaccctctgggcctccgcgaggagcccgaagccctgaagtggtacgttcacgccgagctcgtgcactgccggttcgccatggcaggggtccccggcatccttttcactgacttgctccgcgtatcagggaacacgatctcccc

SEQ ID NO: 279684 - DNA, 743 bp, Zea mays
ggcaagaaggtgattgaccgcggtgagtttgttgatgagcccaagccacaacgttcagaacactgtgtatctctacttgccgagctcgacacattcagcaaccaacaagtccagtcaccttcaccatcaaatatgaaagagcttgccaagaggacactgaaagcataccttaatgtccggcgaggcgtcgagcagctgatgagcaagtacactgtgaaagcatgtgggtactgctctgaggtccatgttggtccgtggggccacaatgtgaagctctgtggggctttcaagcaccagtggcgggatggcaagcatggatggcaggacgcggtggttgatgaggtcatcccgcccaactacgtgtggcatgtccctgaccccagtggctctcctctcagatcctctctcaggagtttctatggcaaagctccagctgtcgtagagctgtgtgtgcaggctggggctgaaatacctgacgagtatcgggccatgatgaggactgacattgtcatcccggactctgtggaagctcggatggctgcataacaacaatgttctgagcttctacgactactatcctgcagttcttgtccagagtacagattccaaccaaatgtgccgctttctgggcatgctgtgatggtgggtctcttagccctgtggtaattactcaaggagcagcagatgcatagtttgtataatataattagcttagctaaatcatgatcgtttgggatttaaag

SEQ ID NO: 279685 - DNA, 681 bp, Zea mays
gtggtgtagctgatcaacaacgaggaagctaaggcaggagctacacgacgtggagaagctcaccgaggagaggctggacgaggtgctggccgcgtacctgagagacttcgacgccggcgaggtgggggcgcgcgggtggccggtggacttctcggcctacaaggtggccaaggtggccatgaacgcgtacacgaggatcctagcgaggagccacccggggctgcgcgtcaactgcgcgcaccccggctacgtgagcaccgacatgaccgtccacaccggacctctcacgcccgagcaaggcgcggccaacgtcgtgaaggtggcgctgctgccggagggcggcccgaccggcgcgtacttcgcgttgggagaggaggcgtcctttgtgtgacgaaagcaccgtcgtcgttaagttcgtcgttgttcgccaactccctgttagtcgatttctaaatcgacgtacaatgaaatacatcatcgctgcaaactcacaaatgaagacaagggagccttgtagcaaaaaaaaaaagaagtggacagaataatgaataagcatgtcaaatatctcttgagtatctatttgttcaagtatgaatgactttgttcaagtatcaaagattgtgagtggaaccaaattaagcagggctttgtgcaaaaagaaataagctaaaagactacgag

SEQ ID NO: 279686 - DNA, 391 bp, Zea mays
  unsure (1)..(391): unsure at all n locations
cttctcgctaaaagtggctccacaggtgaacttagcgatcgtcttgctaaaagtggttgtacaggtgatcgcttgaaggaaactcaggttcaagaaggacacatgagtatccgagaaaaaactcctcaaatcctggaatagcctcgatggttccagacggcgaacgaaccgggtgaggaaaagaacccaccggcctgctgtccattgctcctagaagcatcgcgtcgtggatcggctttcgccgtgctccacctcggcggcctcatgccccgtagccccgactccccatctgccgcctccacctcatgggccgccgggtccacccttcgcctccagacttggcgacatctttaccgtggtggcgacgagctccgncttctgcaccccctcc

SEQ ID NO: 279687 - DNA, 506 bp, Zea mays
gacccaggcctctacatcaagtcaacttgatcgcttctcctcgtctcctcatcctctcttccgacactccttccttcttctcacccgtcctagtccccttcaacccccctctttgacaaagacaacaaaccatggctgctgctcccagtgtgaggacgtttactcgggccgaggttttgaatgccgaggctctgaatgagggcaagaaggatgccgaggcacccttcttgatgatcatcgacaacaaggtgtacgatgtccgcgagttcgtccctgatcatcccggtggaagtgtgattctcacgcacgttggcaaggacggcactgacgtctttgacacttttcaccccgacgctgcttgggagactcttgccaacttttacgtcggtgatattgacgagagcgaccgcgatatcaagaatgatgactttgcggccgaggtccgcaagctgcgtaccttgttccagtctcttggttactacgattcttccaaggcatactacgcc

SEQ ID NO: 279688 - DNA, 466 bp, Zea mays
gacacacgcaccttcaccaccttggacaccttcatcagcaccctcaacgagctctactgcagcacacttgcagcacactgtagcacacatacaccaccagcaaacactcttgacgacacttcctccttcacgacattcatcatgacccattccacatcacacagcaagaggcgcaccaggaccgcacactcgaggaaaccatggtcctggctgggcttgaccacagctgccctcttcatgacctcgctccctctcctggccgccgcagcgccgtcatcacggctggtcaagcgcgccccggtcgagtacattgccgactcggaaccgacgatcgagctcacgtttgaggccaatgactcgtactaccttcaagccctgaccctcaaccaatgtcagaaccagctcgtcctgcccgagaacgggacgcatggccgctcttactacgccatcgacacgccagagattg

SEQ ID NO: 279689 - DNA, 475 bp, Zea mays
gtcgacccaagcctctgtactgcgtcatatcacagccctgcttccttctctcactctctcccactttcttccactctctctctctctcgcaagcccttcagcgccacatagcactcacaatggagcacatcgagcattcccagttgcacaccgaccccgtctaccgcttccagtacgtggccaagttcatgaactttggcgatgaggacatccaagccatccagggtgccgcagagctcatcaagcccctggtacccgtcgttgtcgatgccgtctacgccaagctccatcagttcgacatcacctgggacgtcatggccaagcgccacgagggatacacgcccaaggacgcaaaggtcattgagaagtccagcgagcttaccgaggacgctgagcaaatcaaattccgcaaggacatgctgagcaagtactttgccaagctgggtgacaaccctacgacgagcgcatggtcaag

SEQ ID NO: 279690 - DNA, 817 bp, Zea mays
cgacccgaccctctacagtaagtcagtgttacagcatgatcggaaactttgacaacgccttcttccgtggtgttctggacgctccctctgtcggctcggccaagatccccgacattgtctttatgctgttccagggtatgtttgcggccttgaccccagcactggctatcggtgctgctgctgagcgtggtcgcatcctccccacgctggtctttatctttctctggaccacctttgtgtacgactttatcgcctgctggacctggtcggccaatggctggagctttgttatgggcggcctcgactttgccggtggcacccctgttcatatttcctcgggcggtgctgccttggcctacgctcttgtcctcggcagacgctctggcgaccacaaggatttccgccctcacgccatgagcaacgtcgtcatcggcacttgcttcatccgggtccgctggtttggattcaacggtggatctgctctttccgccaacttgcgcgccgccatggcctgcgtcgtcactaatctcgcggcctcggtcggtggcatcacatgggtccttctcgactaccgccacgatcgcaagctgtcagtccttggattctgctcgggtgctgttgctggattggtctctatcacccctggctccggctacgtttctcctgcatcaagtgttgccattggattcttgggcgcctgtgcttgcaacatggcagttcgcctgaagcactacttgaagtacgaccatgcccttgaagtccttggcgttcacggtgtgggtggaatcgtcggaaactcctgaacggtgtctttgcc

SEQ ID NO: 279691 - DNA, 500 bp, Zea mays
cacacgaccggtactcgttctcgggcccaagaccccactaagcgtcggacgacctttttttttttttttggagttagaatgctatgaattccaaaccagagaagattcaaataaaacagagactaaaaaggctgttcaaacagtaataattcttgcacatgaacactaaaccagaacgataacaggaaacaaagatacagtcagtactcagtagtttgagggcacctacggaaagcaagtaatactacagagggtagacgttccagtgcttaatgatgaaacatcatcagtacaagcaaacgtgtttttcatcatacaccgtatcactttcacaagtggctgcagtcattccgcagcataaggagattgacttcgagaagcagcatcaactttgcgcagaggagcagggctaccaggagatggggacctctcattgctacgcctttcaggagacatctccttagaaggagaggccttttgcaaagcaaggcttcttgggc

SEQ ID NO: 279692 - DNA, 640 bp, Zea mays
cacacgcgtccgcccacgcgtccgggctcacgatcatctctcggaacgggtcgcgcgcgatcgagaacgaagccgagctggtgcgcgccgctgcgggcgccgggttccgcgtcgccgtgctccagccacgccaggacacggagctcgccaggatgtaccgcgccctaaacgcctctgacgtcatggtgggcgtgcacggcgcggccatgacgcacttcctgttcatgcgcccgggctcggtgttcattcaggtggtgccgcttggcaccgactgggccgccgagacgtactacggcgagcccgcgcggcggctgggcctacgccacttgccgtacagaatcctggcgtccgagagctcgatttacaggaagtacgccaacgacgacccggtgctgactgacccggataccgtgaacgctaagggatggcaggtaaccaagcaggtttatctggacggccagaacggccgcctggacatggcacggttccgccgccggttgcgccaggcgtatgaccactgggcgcacgccaccgtgcgggattgggcgtggaacagcggatataccactgaagcgtgggcgtcacatagtgatttttttttcattttttcacggtggaggatattttcaattggtttttt

SEQ ID NO: 279693 - DNA, 437 bp, Zea mays
acggatcctgtgttctcagaagagattgttcggaaggccatgaaggacaatggggataatggagcagattcattagttgagcttcttcttacttaccaggaactaggcaatgacctcaaagtggataacggcttcgcttctggttgtgccccccaaactgctgacgatagtgatgatgacgacactctggaaatctgggatgatgaggatgctggtggtgggagaagcaccagggttgctaactctgttgatgattctgaagacgaggatttcttaaatgagatgtcacagaaggacgagaaagttgattccttagttaaaatggggtttcctgaagacgaggctgcactggctattaccagatgcgggccggatgcatctatttctgttctggtggattccatatatgcttcacagaccgcatgagatggttactg

SEQ ID NO: 279694 - DNA, 998 bp, Zea mays
aaattctccctcgttgtcttaccgtgtcgttgttgccgggttttcttggcgagcgacggagccacagaaatggagtgcaatacgggcgcctaattttagctgcggggaggggagcgaaccctgggcagccactcgccggcctccaagaaaccgtcgccattttttcatccgagtgccgccgattttgatttcattattgtctgtcttcgtggggaaccaattcggttttgtttcggaagaagggagaggaggatgcagtgggcaggtctgagatcgcaggcgccggttcccacggcggcgtggacggggccgaggccaagaaccgcgaggtgcccgcaggttagattccccacagcgcgccgggcgctggtggcgtcggcagcggcctcggacgctaattcgagctcgaattcgccggggaaggacgaggagggggaggaggtggtgcgaagggagaaggaggagaaggcggtcgcgtcgcttctgatgagaagccagaagtacgccatgctaaagcagcagctcgccgtggccgcccaatttgaggattacaaggaagcagcgaggttgagggactcgctgaggtccttcgaggagaaggagcctgtgttgtgcctccgccggttgatgaagaaggccattgaggaggagaggtttgaggatgctgctaaatacagagatgaattaaagattttggctccacactccctcctcaaatgttctagcgatgcaactactttggggataagagttcaagtcaggagtgtctatattgaaagccggagccagccattgaaagggcaattcttttttgcttatagaattagaattacgaatagttctcagcgccctgttcagcttctcaaaaggcactggattgttacagatggaaatggaaggacagaaaacatttggggagttggagtagtgggagaacaacctgtcatattcccgaagactggttttgagtactcttctgcatgcccattgagcactcc

SEQ ID NO: 279695 - DNA, 585 bp, Zea mays
cagacgcgtgggcggacgcgtggggcgcacagggcgtgagaacctcaagaaactatttgcagcttggtacgagaggaggcaaatgaggaagatatactcgccgcttctggaaggaatcttggctttctaccttggcttcgaatggatccagaccgacaatatcctggcacctatgatcacccacggcatatactccaccgttgttcttggccatgggctctggaagatccacgaccaccggagaaggctacggcagcggattcagaaggtcaggagtgaagggagtagctctgcagacgacacattgtaactgcagcatgtagatcggcgtggtctactgctggatagctagctgctgattgcacgcgcgtactgggtgatcgatcgatctaccgatcagtcaaaaaaccagaggcgtacgtctcacaagttttgatctacttaatatcaacaagataggtataagattgggcaaaaaaatatatgtaatgcatgtagtcatgtaacgtagataccatgtgttcatatatggatacatatatgcaggctgtaatccatatagggaaaaaaaaaaaaaaaaaagga

SEQ ID NO: 279696 - DNA, 413 bp, Zea mays
cccacgcgtccgcagcatgcatggcaaaaggagcagcagccttcggcatcgtgcaagtgcacttattctgaatgcacacgtgcgaaactggcacgtgcgggttgcatcattgtactgctacgccattgtctcgagcatggaccacgccagcagctgcagcttgggatggagaagcgaaaggggtcagtgattgtgcttaggtttttcatctctctcctaatcttttttgtgtaactggagcaggaaatgctgaaacctcaagcttctgtccaaacgatgtactcctatttagtattattgattgattgagaggccgatcgataacaaatgaacaaatagaacactgttcatgacgcagtgcttttttccctgcgtcactgcgtgcttttgcgtgaaaaaaaacagcaaagaaa

SEQ ID NO: 279697 - DNA, 1361 bp, Zea mays
ttgtatgttccattagcacagactgaagcgcaactagaggatacagccatccattggtagtacacagggtcccacccacaagagaggcatggcggccacatcgtccctgaagagcagccttctcctcccgtctaccatctccgacttcagtggcgcagccgcagccgtctccatctcaacgcagaagaggagatcacggggggcgagggtgcaggtctcagcggctgcggactccaagaacattctggtcatgggggggactaggttcatcggggtcttcctgtccaggctccttgtcaaggagggccaccaggtcacattgttcaccaggggaaaggcacccataactcagcagctgccaggggagtccgacgcggagtacgcagacttctcctccaaggttctgcacttgaaaggtgacaggcaggacttcgaattcgtgaagacaagcttggctgccaatggatacgatgtggtttacgacatcaatggacgtgaggctgtgcaagttgagcccataattgaggccttgcctaacctgcaacagtacatctattgctcatcggcaggagtgtacctgaaatctgacattcttccgcactgtgaggttgacgcggtggaccccaagagccgtcacaagggcaagctggagacggagagcctgctgacctcgcgcggcgtgaactggacgtccatcaggcccgtgtacatctacggcccgctcaactacaaccccgtcgaggagtggtttttccaccgcctcaaggccggccgccccatccccatccccggcgccggcaaccagatcacgcagctcggccatgtcaaggatttggcaagagccttcaacctggtgctcgggaaccccaaggcgagcaagcagatcttcaacatctccggggccaagtatgtcaccttcgacggccttgcgcgggcatgcgcaaaggctggagggttccctgagccggagctcgtccactacaacccaaaggaattcgacttcggcaagaagaaggccttcccattcagagaccagcacttctttgcgtctgtggagaaggcgacgagcgaactcgggtggacgccggagtttgacctcgtcgaggggctcaccaactcgtacaacctcgacttcggccgcggcacgttccggaaggaggcggacttcaccacagacgacatgatcctcgacaagaagcttgccaccgtttgatgcatgtctcgggctagctgtacgtacgtacgttgctgagcggataaactatgtaggaatatgttgagcgggccggtgacgcgattagagaagggataaatgataccaaatcaaaatttgttgttaagtaaagtgagctcttagcttc

SEQ ID NO: 279698 - DNA, 437 bp, Zea mays
cggacgcgtgggttaatacaaaggtcactgatggatagatgtattggcaacctcatatcgaaagcccataatcccaacataattgactatgcggcgggtttttctcttatcagaacttgataacttctattgcacgccattgtaatcgcttaatttaatcacgcttcaaactacataaccagaagcaagtacaaaatcgtcgtcgaactaaccttgccaactcaacgccgccacagaacagatacagagagatcgaggcctgtcagattcaattttcgagtccaggcacctgcatgcgccggttggccaccgacttcttgccgccgaggaactcgtcggggacgaccttgagctgcttgcgcttcttggactcggcgatcttctggatcgtctttgggttggtgaccctctgcagtttggtgcccgtgcggagcacg

SEQ ID NO: 279699 - DNA, 450 bp, Zea mays
atgtttctggagataccaagcacgagtgcagcaatggcgcatcccatgcctcccctctcagcatcacagagcacaatcaccaccgttctgaagatccttccaaaacctcctgctgctccggagagcagaagcaataattgtgcttttggggccaaattcgacagtaggagggcacttctatgcggcttggtcgctgctgctgctgctgctggcaccatgctgggcgctgacatcgctggtgctgcttcgaagaggcggcctccaccgccagcgccggcagaggcgaagaaagacccgaacgtcagcggagtgcaggctaaagtgcttgctagcacgaagaggaaggacgccatgaaggaagctgtggccaacctgaggaaaaaaggtaagccggttaataattgaaggccagaaccattgacccttgatcaagaaatgtaacttattgtt

SEQ ID NO: 279700 - DNA, 340 bp, Zea mays
cccacgcgtccgcgcttcgccttcacccgttcgccgtgcggccgagctctctctagctccgccgcttgctagtcgccttcctcccaaatggcgaccgccatgcggggcagcagcctcctgcggttcggtttccgccatccttcctgcctcctcttccagtcccctcggtgtcctgccccgagcctgggtctgaacctggccgttggccgcaccgggcttatacgcctccgatgctcggcggccggggccggcgacgccggtggcaagaaggtgtcagctcggctggctctgacgcagcaggtgctgcggaacgccgaggagcgcgccgcgtcagcgggtt

SEQ ID NO: 279701 - DNA, 721 bp, Zea mays
cggacgcgtgggggaaagtgtttttctgttattcttggtggagatcaagtcccaaatggaaaaccttcccctgacatatttttggaggctgcaaagaggcttggtgcaaatccatcgtcttgcttggttatagaagattctgtcgttggagtcaagggtgccaaggcttctggggcaaaggcagttgcagtaccatcacttcaaaatcagaggaaccactattacattgctgatgtcatcctatattcgcttttggactttcaacctgagatgtggggtcttcctccatttgaagatcgcattcaaggtgttctgccaattgatcccttactttcaaatgcccggataagtggtaaaattttgaacaacattcattgggtaatttcagatgactgtgcctacgagtatattccctgaccaaatatcagtaatttttttgggttgggccaagtccaaagtgcatggattctccaaggtgatcgtagctactgggtgggacttctcacagcagaccgtcgagagagtgatgcatgtacattttcttgattgctctggcacggttgaaacagagcctgtgaagctgctcataattggttacatccggaagctccaaagtgcagatgatatattgcaagcattaagcgtaactgacgaagacaggagaattgcaagggatgcattggatctcccaactttctctgaatatgctaatgaccttcat

SEQ ID NO: 279702 - DNA, 564 bp, Zea mays
cgtgcgcttcggcatgttcatcagcacctgcaagaggctgaggatcatgaaagggtctgaagcgagatgtctcggctcggccaagaacaactgatgatgaggcgtctatcgcatgcttgtgctgtgcgtgcgtgcatgcgccagcaaattcttttgttcttttggggtcttatttcttctccaaggcgtccctgcatgggtgtgggcgtgtggtgttgagtattatgtaccttctcccctagcattgtctgtgccaacaatggagcagcagctagcagcaaaccagagacatggcgaggagaaagatgaagctgcttgcttggaacgagggggagagagagagagaggaaagctttgtgcatgcgtggaatgatgtgtggtcgctttgttctttttcttttgtgcccctagtaggggtgtgcgtgtgtgtgtgtgtgtgtgtttagcaagacatgcaaaaggagtggagagtcgagttgaatctccatgatgcgtggttgtacaaagccaaagatcactcttctttcttgtctatcagtctattgtctaaaaaaaaaacgaaaa

SEQ ID NO: 279703 - DNA, 384 bp, Zea mays
ttcacgcgtccgcttctccaaggcgtccctgcatgggtgtgggcgtgtggtgttgagtattatgtaccttctcccctagcattgtctgtgccaacaatggagcagcagctagcagcaaaccagagacatggcgaggcgaaagatgaagctgcttgcttggaaggagagagagagagagagagagagagagagagagagagagagagggaagctttgtgcatgcgtggaatgatgtgtggtcgctttgttctttttcttttgtgccccttgtaaggggtgtgtgtgtgctgtgtttagcaagacatgcaaaaggagtggagagtcgagttgaatctccatgatgcgtggttgtacaaagccaaagatcactcttctttcttgtct

SEQ ID NO: 279704 - DNA, 664 bp, Zea mays
cctgccccaagcctccgcttgcggaagccgcggcctactccgcgtgccgagatctgcagcgtccaggcccccgccgtggcatctccgccgcagccgcgccatggccgtctacgaaggctggcactctgctgccgcaggcgcagacaccgatggaggcgctccagctcctcacgtgcccccgtcgctgctcgttttctcaggcgggacagcatttaacggtgttgttgaagaattgaagaaagtcactactcgagtcgcgcacgtgctccctgtttctgatgatggtggaagcacagctgagattgtgcgtgtgcttggcgggcctgctgtgggagacataagatcaagatgtttgaggttgtctgatgaaagtactgcagaagctctttctgttcgaaaattgcttgggcatcgtttgcctattgatccttcggaggcaaagctggaatggtaccagattgtagaaggagaccacactttatgggagggagtctctcgtccatacagggaaacaattcgtgcctttttggtctactttcacagtgagatacttcgacggtcagctgaaatgttttgcttcaccaatggcagcattggaaaattcctttttgctggggcactcatatttctttcagtttcttttttgctgtttattttttttgtt

SEQ ID NO: 279705 - DNA, 541 bp, Zea mays
tcggcattcggctcgagattataaaccgtttagctttggtcttttctatcggactgtgatttagccaatgttcagctactagtacaagctgttacggtaatccatctcactgccccgttcttagaacgaatatgtgctggagctcctctcgtgacgctcttctctcccggcgctggagctcccctatcaagtcttgtccgacggcgctccggggcgctcctctccctggtcccggcggtgctcctcttcctgatgttgatgattactcggcccagccagcagtgcttccccgccagcagtgcttccccgccagtgcttcctcgctcctggctgtgcttccccgcgaccggttatcgttccctgagacgctcggtctcgctcccgacctcaacaatggagaccccgccaggagcgatgacgtcggcaccggctgttgtcatccccgatgacaaccagggtgcgttcttaggttgaacagttaccgtgttgttgtgctagaccctatacattattcattactacacattgtgtcagattcgta

SEQ ID NO: 279706 - DNA, 694 bp, Zea mays
ttcttctgtccactgacaccaaatgaggtgggcatttttctgcgtgctatgggctatcctgaatccacgtggatataccttgcagcaggtgaaatttatggtggtgaaaagtatatatcaaaattgagatcatacttcccaaatttggttagcaaggacatgctagcaacagaagaagagcttgcgaaattcagtaatcatgcttctcaagttgctgcccttgattacataatcgcagttgaaagtgatgtgtttattccatcacactctggcaatatggcaaaagctgtagaaggccatcgtcgatttctagggcatcgtaaaactatcactcctgacaggaaaggattggcggaactctttgatttactggaaaaaggggatctcacggaaggtcctaagctgtcggcacttgttactgacatgcacaagtacagacaaggggctccaaggaagaggtatggctccttgccaggaagcaagggcagagcacggcttaggactgaggaatctttttacgagaacccgtttcctgagtgcatctgtttgactgggaggtcctgatgtatagctttgcatgatgatgacacggtgcacccatcattggaggtgtgctagtgcttcagtctggccattggagctctaccggtactttgtgatgaaaaagctgatctggactcaaggcacaagtagt

SEQ ID NO: 279707 - DNA, 484 bp, Zea mays
atgagcccaccgtccaggagttcgcatcgagcagctcgacgccgttatcctgggcagtctggtacgcggaccacgacgtgatatagatgaggtacgcatcgacctgctcgatgcgcccaccgtccaggagttcgcggcggcgtggggcggcgatgccaacgaggtgaagaccgtcacgtaccccatcttcctcaggattggcactgtcaggtcagagtgagctgcacgggcaaatgaaacttgacaaactatggatacactacggacgcgccgacgattgatgatcgatcatctaggaatcgatgcgtagaacctttttgaagaatgttctattcgactgcagctgtttgttcctcacaactgtacttcaaattccaatgcatgcactattctgttcgactttccatctttgtgtcttcctgatagtgtaaatttcaatatctatactgtgatgacaaaatatccacaataaaagagaaaagaa

SEQ ID NO: 279708 - DNA, 408 bp, Zea mays
ggaaaattttgatccggttcagatcgctcaggcatatgagaaaaacggagcagcatgccttagtgttcttacagatgaaaagtactttcagggaagtttttacaacttggaggctatacgcaatgctggagtccagtgccctcttctgtgcaaagagttcattattgatgcttggcaactttactatgcacggtccaagggtgcagatgctgttcttctaatagctgctgtattacctgaccgcgatatcaaatacatgttgaaaatttgcaaaatacttgggatggctgctttagttgaggttcatgacgatagagaaatggaccgtgttttagggattgatggtgtacagctcatcggcatcaataaccgtaatctcgagacatttgaagttgatattacaaacac

SEQ ID NO: 279709 - DNA, 513 bp, Zea mays
cccacgcgtccggctccacctctccccggcgccacgaaggccgcccctcccgacgctgaggcggcggccggcgccgaagccccacttctccgctcccagtcgtggggctgctgtcggtggtacctcattctattccgccggccgaatccctcgcccccgccgccgcgccgccgcggctccagaggctggggcggcggcatccggtcctcctgaccccagccctctctccgcggaggccgaggccgaacgcgccaagctggctcacgttagcaaaaagctagagaacacagcacggcatttcaagaatgtgggcaccctggggttctggtcccagttggtgtgtacggtcgtttcggccgggatcctgtcgttctctgcggtcgctacagggaatgtcacagctcccttcacattcagtgcgactgcggttggcatcgtcgtggccttcatctgcgtttttcgggcatttggttacattcgcctttctgaaaggcttaagagaacagcaaatga

SEQ ID NO: 279710 - DNA, 501 bp, Zea mays
gcctcagcacgacgggattgcgcccacacgcgacgccaaacgaaacagctagccagcccccattcttctccggctccggtgcattccgtgtcctgtcctgtcctgtcctgatggaagcagcaatggctgccacgtcctccctactccttgcctccggctccaggaggtggccagcaaccttgcctccttccccctggccccagcagcagcgtctggttattttctgcctcgctgcaagaacgaggccgctggacagcaagaggggtagctggaggcgctcttccagtgccaccggcggccggtcgaccgccgtctcgtcgtcgtcagaaagatgggttcgcgaccctgcaggagacggtgactggcgccacatccgctacaaggtcgcgcgccctggggcgatcgagagagtctcggtaactgcagtatccatccattgcctccacacgacacaccccctgtctggcactggcactcacgttcgactctcccacaggagga

SEQ ID NO: 279711 - DNA, 308 bp, Zea mays
caaaaacgccacgccgcgagactcccacgcggtccgcccccgcgtcgtctggcctcgcgatggccgccgccgccgactacgaccgcgcgcaccgcccctacgcggctcccgcccccgccggtgagtacgaccgcccctaccgcaacgaggtcgtgccctacggtgaccgccgcatcgacatcatcgtcaagccgcccgcgaggtcgccgccgccggtatccaccaggggcggcgggggaggggtggggtcggcgtggtgcttcagcgatccggagatgaagaggccgcggccggtggccagctacaag

SEQ ID NO: 279712 - DNA, 405 bp, Zea mays
cgcattcatgaccttcttcggaatttgtggcttgctcctcggctctgtcccatgcttcctcaagggatgcgttttcgtgatggatgccttcgtcgagtactaccggcacggcggagggaaggtcatcctcctgctggtggaagccattgagatgtttctcattgcaacggtcacgtttgtcttggggacgggcttgtacgagctcttcatcagtaacatggactccttttacgggtccaacctcctcggcctgttcagccttccggaacgggccaagtgggttgaaatcaagtcggtaaatgatctcaagacaaagctgggccatgtcattgtcaagggtcctctggttggcatccttcgagaaagagcaagaaggtgaccaccaaatcctgtgctgacctcttg

SEQ ID NO: 279713 - DNA, 670 bp, Zea mays
cggacaatcgcgcccaggctgcattagctcgccttgaagctcttgagagcgataatggtggggtcgaggtggtagatcttaatgatgatgagtacggatccacggatgaagaagaccctgttctcatgcaaaaaaagcagtccaagatcatgaaacgtaaaacaaggcaagggaaagctttggagaagagggcagcaagatcactcatggatgtgctacaagaagcaaatttggagtccgttcctcctcatgtgccaacatattcaagggctgctgtgggtccaccgagcacttcatctcgacgccactactgctcagtttgcggtagctctgcaacctacacatgcgtgaggtgtgggacgcggttctgttcatgccgctgtcaagtcatacacaatgatacacgctgcctgaagtttgtggcttgatcggctggatatgtataagctacatttgatgtatgtccacatcctaatggctgttcatatgtgctctgatcagtatgatatacttgctgactatgtatcctactctgtaggtgggggtttggtaagttgtagacaaccattttctcagtagtgtactgcagttgcaccgaccacttttgttttgttttcccagaaatgttgtgcgagctcgagttatgcagtagagctgaaagtagctcttg

SEQ ID NO: 279714 - DNA, 660 bp, Zea mays
  unsure (1)..(660): unsure at all n locations
ttatgtccaaacaacgtattacaccctcatcgtatacgccatgatgagtttccaatggacagctgccaagttcttctggttcttcttcatttcctacttctccttcctctacttcacctactatggcatgatgactgtctcaatctccccaaaccatgaggttgcatccatcttcgccgcagctttctattctctgttcaacctcttctcaggcttcttcattccaagaccggttagttgtttcttcaatcacctttaccgtgatccttttctgtaggattaaaaagaatgcttatgttgntttttctctattcttatttcagagaattcccagatggtggatctggtactactggatttgcccattggcatggacagtgtatgggctcatcgtgacacaatacggagacctggaagacctcatctcagtccctggagaaagtgagcagacgataagctactatgtaacacatcattttggataccacagggattttctgccggtcattgcgccggttctggtactctttgcagtattcttcgcgttcttgtacgcagtctgcatcaagaaactgaacttccagcaacgataagaacaagatatggcagcaaaagctcttgagagtttttttggaacattgccgtgtatatagggtattt

SEQ ID NO: 279715 - DNA, 713 bp, Zea mays
ggcggcagacggcgacgttaggaagatgatggagattctgggaaggcagagaaagataaggaggataagaaggctaaagagaaggatggatcagagttgaagggttcaagtggtgagaaacaagagaaaatcaaagataagaaagagacaggagatggcaaagatgtgggggaggaagagaaacgcaagaagataggaaacaaagacaaagataagaaggataaaaaggccaaagaaaaggatgtatcggaaccaaagggtgacaaggatgaagatggtaagaagaaagaggccgatggcgatgaagacgaagaaggtaagaaggaggacaaggaaaagaaagagaagaagaggaaacacaagggtgcaaaggagaagacgattgatccggtgaagctgaaggcaaaactggagaagattgatgccaaattgcatgacctacaggccaagagagaagacatcctgaggcagctgaaagagctggaagaaggcggcaagggaaacgcgaatgaagaggagcctgcacatgtgcaggaggacaaagggaaggatgttgtgcctgcacagatactggaacaggttggagagagcaaggtcgaggaacagaatcctgttgccacagcctgatcttgtggagatcctgtagcggttcatgtaacaataactctgatctggttttgcgcacatgcattacacagtgtaaaggaatgcag

SEQ ID NO: 279716 - DNA, 389 bp, Zea mays
gtcccacgcgtctaggcaggctcgtgctgcccgctcacgtctggcgtctgggagcctccgattctgagagcagcccatggcgcggggcgccacgtcgtccgagcactctcccagccacctcgttttgtccgagccagcagctgcgccaggccggtgccgggagcctcgcggcggcggcggcggggccggctcatggtggtgcgggccggtgggccgcccagcaccaacgcgctcatcctcgccttcgtgcttccgctctccctcttcgtcggcacgctcgtcaccgccgcccgcgtcgccgacgacctcgacgaccgcttcctgagggagatggagatagaccgtgcgatactggatgagaacgaggcgtccgacgaggacggtgccgg

SEQ ID NO: 279717 - DNA, 540 bp, Zea mays
aaaaaaaaaaaagaaaggaaggaaaattaaaaataaaaaaaaatataaatagaaaagataaaaaaataaaagtaataaagaagaaagaaaaaaagagaatagaaaaaatagtaaaatagataagaagaaaaagataagattaaaaaaagtagaaaaagaaaagggaattaaaaaagaaaaataaaaatataaaagataaaagtataataaaaataaaaaaggaaattaaataataagaatataataatagaaaaaataaaaaaacaaacaaaaagaaaagataaatatatagtatttccaattaatgataaatagtcgtcatacgactcaggctcaaggcacaggctcaagctcaggttcaaccacaggttcactaacttcttccctcatgtcaggcgaaatgttgccataaaccacttcgacgggcgctgctcttcttatggttcctaccttcgcatacttggcggcgaacttgtactcccagtcattcaaggcgccgagctccattggcgttagaccagatatatcaccattcagatc

SEQ ID NO: 279718 - DNA, 458 bp, Zea mays
cccacgcgtccgcccacgcgtccgcccacgcgtccgcggacgcgtgggcggacgcgtgggcgagttcgagatcgcgagcggccgctcttttgtctcgtttggacaagaatgacatgtacatatccagcacttcaatcctactacagagtacacatctactattggtttaaatttagacactattctttctgaatatccacgcaacaagtacgagcctatgaggcttttcattatttcgaaattctgactacctctggaacattataagcagtgtgccgccctccatttcatcttcctacccgaactgatgtctttgtgtttttcctattcatggtgcatcgtcgtcatgcggctcaggctcgggctcaggctcaagctcaggttcaaccacaggttcactaacttcttccctcatttcaggcgaaatgttgccataaaccacttcgacgggcgctgct

SEQ ID NO: 279719 - DNA, 685 bp, Zea mays
cctcacgcgtccgcccacgcgtccgcccacgcgtccgcgcgtcaaaaaaaatgggtacgcatcaataaataggagcttgggaagttgccaaggcctccgattttgccaatgcgacggtgaaatcccgcacctacctccttcctctctcaccgaggaccctcgcaccaagaactgagcgagaagagaggtagagaggcaagcgcacgagagtttctgctcctagtctcgtctcgccccgcctccgtctcctttccctctctggttctctctctgcgattctcgtcgcattggttccgttccctcacgaaaggcggtagctttctgtcttccctaatctatctagataatggcgaccacgacgtcagcgaccaccgccgcagcagcagccgccaccaccgccaagccgcgggggtcgtcgtcggccctctgccagagggtggccggcggcggcaggcggcgctccggggtggtgcggtgcgacgccgccggcgtggaggcccaggcgcaggccgtggcaaaggcggccagcgtcgccgccctgagcagttctgatatccgccgaccggacatgaggagagagtaccatactgtgatggctcagtgtcacacagacgtgagatgcggcaactgctgtgcgagactgtgcccggctatcagactactgctgacatatgagagcgtgtct

SEQ ID NO: 279720 - DNA, 498 bp, Zea mays
ggcgcacggccacgtccctccctccccagctctcctctcctcctccagtactccacaccgcacccctcctggacgtcgccggccgcattaacaccaagaacagaagagaggaagagacaccgcaaccgcattaccatgagagagagctaggggggcctggcctgctgcccctgcatcgtctgaccctgaagatggcggcagcagcatccatggcggcccgtagccgcgcgctcgttgcgagccggaggaggatgggtggcccgccgcgtctcttggtcgtcagctgcgacgccaggacagcggatgcctactgctccctggccgcaaagattttgggacctcccacgaccttcaatgcagcgaagctcaaggtggagttcgccggggaggagctccggcctcctttccccagagcctacactctgacccactgcgacttgacggcgaacctgacgctgggcgtgatgagtagcgagcagctgcgcaagtccacgctgc

SEQ ID NO: 279721 - DNA, 519 bp, Zea mays
ggagcactcatgcacggaaatggagatctggggtctgagttctacgaaacactagctaagatggcaccaaccaaagaagaagaactgaaattaaaaggttataatggcgatatatcaaaacttgatccagcagaacgctttctgaaagatgtacttgatgttccttttgccttcaaaagagtagacgcaatgttgtacagagcaaactttggcgctgaagtgaattatttaaagaaatcttttggaacgctagaggcagcttgtacagatttaaggagcagcaagctattcctgaagttgctagacgcagtgctcaagactgggaaccgcatgaacgacggaactaaccgaggcgaggcgagggccttcaaactcgacacccttctaaagcttgcagacatcaagtcgacggatggaaaaacgacagtgctccatttcgtggttcaagagatcatccgatccgaaggcttgggttccgatcaagcagcagcagcagcagcgaatcctggaagcaacagc

SEQ ID NO: 279722 - DNA, 438 bp, Zea mays
aaaagaacagttgatccatcacctcgctcctaatattaccaccaaccaagccaagaacaagtgtttgagttcgcagttgaccccccacctgcagctgcaatgcaaactctctaacaaagagaggtcgagatgctgctctctttccctatcctcactactacaatatgtactaacaccaatttgccctgttctacaacctcaaatcttcctaagtagtaggcaggaggctagcagtagtacggtaaatacaacatgaatgaaacaaagcagcaatctttttcggcagcgttactgtaactgtactacaagcagttccacacagtatacggcggtcatctctgcaccatggcgtcggcacgcccgtcctcgagcctccagctggtgctccggctcctcgacccacggctggaggcggtgctgtggtcagacgccacgtcg

SEQ ID NO: 279723 - DNA, 388 bp, Zea mays
tcgtgggtcgacgcaagactctaaagtgagtcgtaagattcttggcagccataccaatccgggaactacaggcggacatcaagaaaggactgatggcatcaaccccattgcaccaccgcctccagattgagttccagtacacccagtcgtccccaaaagagactgcatcagccactcagcttcttaccatggaggccccctttgagttctcatggcctgagccaccgccaacaatggaagtcacactaacacctgccgtctctgttgtgtagcttgtcaccctggtggccaagaacccaaagacatgagacaacggcctgccctgatgttcggcatggagaacccttttttccttggttccctgcgtgaagggggagcctagatgaag

SEQ ID NO: 279724 - DNA, 445 bp, Zea mays
tcgcgggtcgacgcaagcctctacaatcagtcaactgggattggcccgtcggcagaacaagtgcacgcgggaccgggcaacatttcccgctgcagccagcaagcagagggggcgacgatatatagccacgggcggccgttgctggatccggcatcttcctcgatcggcaagacgataggatggggttccacctgctggcgttcgtggcggcgaggggcctcatgcaggcgttcaacctgtcggcgccgctcagcctccggctgccgctcgcgcgccacctgccggaggccctcgccgtcctgtacggcgtgctcgccgcgcaagccgcgtggctcaacggcgccctggcgcgcggcgccgcctggagccacagccggagccggggcggcgtccacgagtacgtccgccacgccatgctcagcgtctacgactgagaccacggcgg

SEQ ID NO: 279725 - DNA, 420 bp, Zea mays
gcgacatggcgcccgccgcccggtggtccacgtcccctgtgctcttcctcctgctgctgctcgcggcggccacggcgacgacgacgacgacgaccactacagcaaagcatgagcatccgtcgccgacgccgtggccggagcgtttccacgcggtgctgttcacgaacctgaccaactacacggaagcctccacgggcccgccgctgcgcgtgacggacctctactacgactggccgcggcggcggaacctgaacctggtgcggcaccagctgtcggccgacccgctgtacgacgtggagtggaacaacggcaccggcttctacttcgactccaaggcgtgccgcgtggagcagttccccgtgggcgtgctgccgccgtggtggctctccggcggcggcgccgagtacgtgggccgccgcg

SEQ ID NO: 279726 - DNA, 568 bp, Zea mays
gaatgagtcgcttgacattaggtgcctccaaggtatggcttcagatgagaaaaggaacctatattttgtgtcaacaaatgcaacgtccacatttcgttccatagtttcaagttatcctggacggttgactcttgtcacaatacagtgcccaaatcctgacttcaacaaagagcaaaataggtggagaatggtgcgaagaatgctcattgaagctatcgtcgaccttcttcataccaatggacaggtttatctgcagtcagatgtggagtccgttctgctcgtgatgaaagagcagttcctctcctacagcaagggtcagcttgtcacggacggcgatggtggcaactgcatcgataacccgttcggcgtggtatccgactgggagcgccatgtcctcgctcgcggagctcccatgtacagggcgatgttaaagaaaatgtgattccatttcctccgttctgaggtctgaacattgcattgttttgtcaccatggctgcttcggacatggacaacgttcatggattcactcggttagataaaactctcttcttttcggagaaaacatca

SEQ ID NO: 279727 - DNA, 606 bp, Zea mays
  unsure (1)..(606): unsure at all n locations
gctccgtgtcctctcgtctcgtgtgactgacgaccaggtgggagggccataaggcctttagcgcggcggcggcaatggcgcccacggcctgcctccggacccccttcttccccgcccgtgcccgatccaccaacgccaccccgttctcgccacaccgccgcttttctctcaaatgcagcgcctccaacggtgacaactccaaccccaactccatctccatctctcccacctcgccgcctcggctaacggtgtcggacggcgtcgagtctgtggacgttaacgggttgcgtcgcccgccagcgcccgcctccgtccccgccgcccgcgatccccactggctgcctcgtccgctcacaagtgcggacgtcatggaggtggacgggaaggggctcaaggttgcttaccagggttgtgctggagcgtacagcgaggcagcagcaaagaaggcgtacccgaattgtgagactgtgccctgtgagcacttcgacactgcatttcaggctgttcaaaactgggtagctgatanggccgtactgccacttgagaattcattgggaggtagcatacataggaattatgatcttttgcttcggcatagtttgcaca

SEQ ID NO: 279728 - DNA, 585 bp, Zea mays
gaaagttgcacggaacggtgaatggggtgaccatgtgacgctgcaggctgctgctgacaagtatggagtaaaaatcttcgtgatgacatcgttcaaggatacttgctacatcgagatcctgcctaaggttcagaagtccaacaaagtgatactgttgagcttctgggcggaggtgcactacaactccatacatccgcagaacgatgctccgaggtcgcagacgaccaagaggagaagatggtggccgttctcgcagcaccaccaccattgatggcgggttcagctctcttggggctggatggatgttcaggatcaggtggtggtcccggtcccggccatcgtccagatgatactacaagggacgttcgacattatgattaatatatatatacccagagcggagcagaaagacctgataagggaattagttgggatgaatgaaatggaataaacatgggatgggatgggaatcgtcgtcccgtatatagtttagagtggaggccggtgagcgccaactcaaactctttgtattgttgtttatatctacaaattttgccggaatgaggctacaattattggggaaaa

SEQ ID NO: 279729 - DNA, 421 bp, Zea mays
ctagactgcagtctgcagtggccactggatgagaaaactaagatgagttccttgcagacccaacatgcagcgagtgaagacgcatccgtttgatcaaagcagagttcaattctctgctgtctttatattaagtcttgctgccatgatgctgagacttgttacttccgagagcagtctttgtgtttgatatccttcctgttgggtctgcaaaagtccagcctttgggtgatgctagtttcagagagtacagcaattccttcatcgttgtcatgctcacgtgagttggatccactactgagggatcctgttgagaagaaactaagcctgaagaggaaatgtgactgcagtggctaccgagctcagggaatgccaggaacaggcttgcttcactggaactgttgctggctcaggagatagaagc

SEQ ID NO: 279730 - DNA, 447 bp, Zea mays
gggtcgacgcaagcctctaaaatgcgtacgtattaaaaaggagcagcttcgattcgagatcgcggcgccatcgaccatgctgcgcaagaatcgccgcgaagccgtgacggcgacagtgctcgtggccgtatcagtcctggcgaccctggcgcgcaccgacggcgccctctgcgacaagtccgacaaggcagccttgcttgccgtgaagtcggcgctgggcaacccaccggcgctctccggctggaactccaccgtggcctgctgctcctgggagggcatctcctgcaacgccaccaccggccgcgtcaccgacctgaccgtcttcgcgctcaacatctcggcgccggtcccggccgccatcgccaacctcaacgcgctgcagagcgtcaacctgggctacaaacagctgtaccggagcatcccggcgttcctgggccgcgcgcgctg

SEQ ID NO: 279731 - DNA, 429 bp, Zea mays
cccgcgcgtcggcgcaagtctcgagactgtcatcttctcgtcaatggcttcatttggacaaaggagagctcatccgaattttgttgcccccgccgaatttgcacatgcatggctccaggtgtgtgcagtgattcttccctttatgaaagttcccgcttcggcgcatgacccatgggcaaaaggtttcacaccactggtttatgagagcagagaaattttggtacaagtagttctgtatttgttatttattgcattcgccacgcatcgtccaaatgagacggatgctatatttcagttctgatgatggccactggttaactagagtcacctgtcttgtatggatccccacttttcagacgccggtaaatttgtatgatttgcgaaaaaaaactagatggatgtgagcgaaaaaaaaaagggcggccgctc

SEQ ID NO: 279732 - DNA, 575 bp, Zea mays
caaaagtcattgcagacttgcaagcttccctcccctactatcaggcggatcatatccatccacttactacgctgctaggctgctacgaacaaagggcctcctaattaagacgggcgtcgttggcttcaaatactggtctctcccctgtccaaaagtctctcgaatctccaccctggttctgcaccggttccagaattttctcccatttacagggtctccccgtttctgtccggcggttctgccgttccactgcttttgatttcggagtgtgagcttacatcttgctggacaataaagattggattttaagcgatttggggggtgcttgcctgatctccccctgcgaggtactgccgggggattggatttcggggaagttttggtggtttgagattcggcttggccggagcaggaatgacgatcgacatgtccattcccgggagctccgggctgctgaaccgctgcggggaagagggacatgaagttcttcagcaaccccttcgtgcttgcgctcaccggcgctgcaggaatcggtggattcctctttggctacgatacaggtgtcatatctggag

SEQ ID NO: 279733 - DNA, 520 bp, Zea mays
gttctagatcgcgagcagtcgcccgcgtgtggccgccctttttttttttttttttttttttattcaatatcatcagattcatattattaatgacatcatcaaagtacacattaataaggaggagccgtcagccgtgtaatatataacagaggagccgtagcatgaactccaagaccaattgagtactattagaacatcaccgtataccgtcaccgggcagccaacagatagacccagatagatgagaacaattgccaaaggatacaagttgccctaccttagtagagaggtaaaactcggcgccgccgccaccgacgccgagtggccatggccaccatcagtcgtcctcaacagcaaggtgagcggcaggaggcagctctatggcacgccgccctacagctacgcgccgtccggccgagaggcgcatgcagcttcccattgccaagacacacacgctcccagataagatgacgaccgccgtcgtccatgcatgcatgatgacgacatgataagctgctgc

SEQ ID NO: 279734 - DNA, 442 bp, Zea mays
tcgcgggtcgacgcaagcctctgaaaactgagtcgttgtctacaagttccccatggacacccagcctgggctggtgagacaggaggtggggtccaagaagctcatcgcgctggggcttcagatcacccccatggagaagatcatcagggatgccgtcgagagcctcaagagccgaggccacatctcctgaatcctgatggatggcaggatgggtagtgcttgtcatgcgtcaggccgtacgtcatggaccttgctaagttgctagcgtggcttgtgtaactagttgtaataaataatgatgtcaccaaacgacgacgacgacgaacctgagaaggaaaactgagctaatagctcgattttcagttcttaatcacgaagtttcaggtaccgaactggattggattctttgtcgcagatgaggcctagagacacacgctgaacg

SEQ ID NO: 279735 - DNA, 774 bp, Zea mays
gcctgatgccaatgtcattatcaaaaggcttcgagaatctgaaggattggaatttgggaacagtgtttactggattagctttggcaatgagtacgctgaaaagaaattccctgcatccagaccgtttggtatcaagtacaagtttcacttagaggatgctgttgattgcccagaatgggttgttccattccatctcttcaaattattggcagaggagtatgatctcgagctggttctgatgaagaacttccatgaatttgtacacgagtacttgcaaaaaccagagttcgccgagctgatgcggaggctgggtgccctcggtgatggaaggcaggaccaaagtacactgtcacaagatgagtgggaggtttcctatctctatctcgcgtttgtcctgcggaagcgaggccaaccgcctacccaacgaagagccagcaacgcaaacagagggaaaatgtttctcaccgagggtgacatcgaggttctcggtgtataagcatgagtatattctggaagggcttgctaacagcttaccgattatatgctccacagaccacatagcataaaagaaagttgtaacattagtggctcacctgctactccatccgtttataaataaatgacaacgttgacttttttttaaaaaaaattgaccactagtcttatttaaaaaagttatcatttactttttgtaatttgttttatcacttaagttagtttgtgcttgacttaaaattttacattttgaataaatattttaaaatgaatattttg

SEQ ID NO: 279736 - DNA, 387 bp, Zea mays
tcgtgggtcgacgcaagactctacagtgacgtcgtgactaacgcgtggccaagtccgtctccgtgaagacgctcgccctgttcggcaaatccaaggtcaagaccgcgccggcgaagaaggctgctgcgcccaagcccaagccgaaggttgaggatggtatcttcggcacgtccggcgggatcggtttcaccaaggagaacgagctgttcgtcggccgcgttgccatgcttggctttgccgcatcgctacttggagaggccattaccgggaagggcatccttgcgcagctgaacctggagacgggcatccccatctacgaggcggagcccctcctcctgttcttcatcctcttcaccctccttggcgccatcggcgctctcggagacc

SEQ ID NO: 279737 - DNA, 605 bp, Zea mays
ggaggacattattttgatttcaacagtttggtccaataaagatgggaaagtaggctctctgattctgagagaatcaacgtggctttcacaagagccaagtatcttgccctagactccctagtatagtgaagtcacatttaaaacactcttccactgcatttttagttcagtaattgctatatttctgcccgtggagcccagtactgcctttggatccttggaaatggaaccactttactggctagcaattcaatatgggctgatttagtccgtgattcaaaaaggcgcagatgtttctttgatgcttttaaggataaggacttagcagaagtagtcatgtttgcaactaagcctgagcaatggaatcgaagagaacaggtccgtcctggtggtgccatcaggagccttctaatctcgttcgagtgctgctgccctgaaaccggtttctaaaagatcctggagtgagcaatataggatgagtgaagtaataccatagtgtgctgccctgaaaccggtttctaaaagatcctggagtgagcaatataggatgagtgaagtaataccatagtgtgcttgaaagatatacttgtttggattttctggct

SEQ ID NO: 279738 - DNA, 898 bp, Zea mays
cagacacttgggcggctgcaaccgcgagatgaggaggatgaaggcggaggccgacgacgggctccggctggacgtcctcgaccacaactacctccccagggtgatgccccacttcctcgcctggaagcagcagtacagtaggttttcgttccaacgtcgcgcaggggagccattcctgtactggatgggtccgcggccccgggtctgcctcttcgactacgagtcggtaaggcaagttcttttcaacaagtccggccatttcttcaaggacgacgcccacccgactatcctggcaatgatgggcaaagggctggtcctggtggaaggcaccgactgggtgcgccatcggagggtggtcaacccagccttcgccatggacaagctcaagatgatgacggagacgatggtcagctgtgctgagccactgatcaagcggtgggaacagctcgtagcagccagcagatccagcgaggacggtgggaggggagaagtgcaagtggagttcagcaagcagttccaggacctgacggcggacgttatcgcccacaccggtttcggaagcagctacaaggagggcaaagaggtgttccatacgcagaagcagctcctggcgctcgccatggcgactctcctcaacgtgcagctgccaggattcaagtatctccctaccaagaacaacaggctaaagtgggcgctagaaaagaagatgaagacaacgctcatggcgatcatacagttgcgggtggcatccaatggaaggagtagtggatacggaaacgacctgctcggcctgatgctcgaggcctggctcacagcggaacgaggaggaggggaacgggacgagttgagcctgaccatggacgatatcatagacgagtgcaagacattcttcttcgca

SEQ ID NO: 279739 - DNA, 844 bp, Zea mays
ttctgtcttcccattaggaggttcatctgatctcccacagccacaaacaagcaatagcactgatagaaggaaagcttcaacgattaatagaaccgccaaagggcaatatgcgaaattgagtccaagggtgcctacttctcaaccccttgtttcttgtgacaggagatcatatggaaggaatgatgatagcagcaacaaccaaaaatctagttcactgctggtcactgagagctcaaccagaagacagcagctgccaaggaatagtagcgtaagtatgcaaaagaacaaaaattccactagcccaaaattactacagagaaaacttgatccagagcggagggctagaccacctattccttctgctgagtctaacaaatgccaaaggcaatctggagataggaacaatgcagaaacagtgtcaccccgaagcaaattcagaaggaaacttgtgcgcccacaagaaggtgatgatggcatgcccagtggattgaacaacaggacaaggagcctgtaccagcatggcaatgatatgtccacaaggtcagatggcagtataactgttgcttcagagctggatattataagcaatgacagatctacgggagttgatattcctaactttgagcaaggcattggaactccatccggaaggaacccacaaagagtggaaacctcatatgatgcaagcaaggacgtgccatctgtagacccttcagctggtatttccggaacggcccagtccagtgtctgtgttggactcttcatttgatcatgaggatttgttcccgagcagcaggaatccaaattcacttgctgttgatgacgagcgtcaaacattaggtga

SEQ ID NO: 279740 - DNA, 482 bp, Zea mays
tgcacacacgttctgcccacgcgtccgcccacgcgtccgcccacgcgtccgaatccacactccacaagcagccatggcgccacccatcacgtccctgtcgtctctcatggcgtccagcccaatcccgacgccgccaccgccgctcccgaagaccagcggcagagcgctctccgtcgcgccctgcggctccgcgtcgtcctcgtcgccgtccacttcctcgactcctcatccggtggcggcgtcggcgggcaggagggggctgctggcgctgggcgccgggttcctggcctcggccgcgctgctgtccccggcgggcgacgccggcgccacgcgcatcgagtactacgcgacggtcggggacaagatgtgcgacctgagcctcgtcaagtccggcctcgcgtactgcgacgtcgaggtcggcaccggcgtctagcccccgcgcggcgagctcatcaatgtgcactacaccgcgagatttcccg

SEQ ID NO: 279741 - DNA, 262 bp, Zea mays
tgaactagtctgatgataatgtcttgcagcaactgcatcaagtagagtgagacgcaaatggcgctcccccagtgtcattcttcatggcacatgtcatcacaatagctatacatgtgatgttttctgttaaaaagaataaatgatgcaaatcatgaatttttttcgagcagtctgatgtgtactgaattgcaaatgtacaatttgaactgcatggatctgttgaaataaacggagtgcccatttgatcaacaacaaaaaaaca

SEQ ID NO: 279742 - DNA, 843 bp, Zea mays
caatcgatcggcatcaaaggttgacaaagaaggagatttgacgctcgaagacttggatgatgctactgcagaagctgtagatcaagacaaaacgaccagcaaaaagaagaagagctcccacaagaaacatacgaatactcatgataatgacaatatagacaagaatggagaggccgatgtgggagatcatccggggagtagtaacacagaaaacgaacagatgcccgaatcaagacctaaaagatcaaaaaggctgatgaagagcattactgatgacaaggaactagctgctgctgcggatcatgagaaaccggtaaatgaagcggaaaatcactgagcccatgattatgatagagaagaggttcaaggtgatgagaacactccagcctaatccactgacagaagatgagaacaccaagatgctaaatgacaagacaagtaatttagtatgctgaacttgggaggagacttctactgactgaaggcatgggaatcatacggaaagcagcgaaatcgggtgattaagccgtcagtgcggtgggcagtgacaataagctgacaggggttgccttttagaggcgagggttatcctgcagaggttagcaatgcagtccgcatctgcagtattcattgtgctggctgtgaccatatatgtacataagcatggaggatgatccatgaccagcacacatagaaataattttgtgtaaagagggtaatctttactgatcatagttttggtgttgataattaaagcaacggaacagggctgaaaaatagcagccgtggggttgaaacgtgtttgatcatgtctgaccgtaatgagatatttcattagcgcgt

SEQ ID NO: 279743 - DNA, 935 bp, Zea mays
ctcgctcaccccgtctcctctccccgctcagctccgctccgctcccggatatacgcgatcttcccgttcccgggcacgcgcactaaagatgcctccagccttcgccgccgcaccttcctcctcgatgtaagcgtctgagcgccgaaccactggccctcaaagcccttgtactctgtactgctggtgcttgtaaaatatgtatatatatatttcagatgtggcgttcgcatcccaactgtgcgccgtttcgaagcgcaaagcacggtttccacgcccagatttctgcgtaatcgggtggcagcaaaaacacggtctacatcagcttggtccttgaaggctggcttgtgggattctctcagatctggccttttgaagaataatagcagtacagagacagtagagccaccaccagcaccacttgaagaggaagagcctttgcctgtggaaatagtactcctagaaagaacactacctgatggaagcacagagcaaattttattttcttcagccggagatgttgatgtatatgatctccaagccttatgcgataaggtaggatggccacgcaggcctctttcaaagatagcagactcattaagaaatagctacttggctgctacactatattcaatgattagatcttcagaaacagggggagaagagaagaaacagctcattgggatggcacgagcaacctcagaccatgccttcaatgcaacgatttgggatgtccttgttgatccttcataccagggtcagggtcttggtagagcactcatggagaaagtaattcgtactttgctccagcgagacatcaacaacattacactgtttgcggataacaaagttatagatttctacaagaacctggggttcgaagttgatcctcaaggcatcaagggcatgttctggtaccccagattttagcaccagca

SEQ ID NO: 279744 - DNA, 748 bp, Zea mays
  unsure (1)..(748): unsure at all n locations
agcctcttcctcacctgcgtgggcatggaccggttccgggtcgtcgagaccgtcaggacgaagccctacgcggtcgcacgggtccaggtctttcgggaccgtgaccacagccaccaccaccaccatcgcgacctgatgcagcaggtggcccggcacctcgggaacgtggccgcgctcgcggacaagctgggccagaagccgccgccgccgctgccgtaccgccagggcgaccggcggctgcacaccgccgcctcgctctcgttcctcgtcgcgcgcctgttcgtcgacgaccgccgggagcagcaggcgctgctgcggatggacgacgccgcgcagcggctggcgcgggagggggagtacctggagcgcaggagcaagtacctggcggccttggcggcgatcaaggacgcgttccagcactcgtcctgcaacgagaagtagatcgcggacctgtacattttcaagggtagaagaactgtacaagttccctggtgaggtctgaccgtctgttaatacctaagggtttgatagtgagttggtctgtttttgtatgttggtttagccttggtgttcctggaaaagatgggacgatgatctaagctctaaaaaatataagagggcaatagcaaccgactatatgttgctgtggattgcttagctacacagctctgtgctgctgacatttgcagccttttggctgcactctgtgtattttataacgagactatccgggataatctntctagtg

SEQ ID NO: 279745 - DNA, 582 bp, Zea mays
gtcatcagataatattgattttgaagttctccgtggactgacaaattcattacttgctgctaagaagccagatgaggcagttgatataattctgttatgccgtcgaaagttgaatgaaaagagtcaaacaggactagcagatttggaggctacaaatgacaatggtcgccaaaagcctcaagatattgacccgatccaagttgacctgcttttagggaaggcttattccgattggggtcatatcagtgatgctatttctgtctacgataagctaataactgatcatcctgaagacttccgtggttatttagcaaagggaatcatattaaaggaaaatggtaaagcaggtgatgcagaaagaatgtttattcaggcaaaattcttcgccccggaggcagcgaaggcactagttgatcgctatgcgcaaagatagtcgataagagattgaatggtgttgttttaaaccaatgagatcattcggattccagaaaaacgatcaacatgtttggaacgtcttgtatgatagcaacattatgggatctgggacattttgaattgtattgttttagaacaggcctgacg

SEQ ID NO: 279746 - DNA, 900 bp, Zea mays
acgcggacgcgtgggcggacgcgtgggcggacgcgtgggcggacgcgtggggaaaaattaaccggccagccctggagctgcttctcggctcttccaacatcccctgcttgctaccgttcagttcagtcttcagttatccgagtgaccgtggatcagccatgcctgcgcttctagtgaacaccgtctcggtctcccccgccgcctcaaggctaggctcctcgcggcccgccacggcacggcgagcagcaagcgctcgccacggccacaggtgccgagccgaagcatccggcagctcgtgggtgtcggactacgacctgtacgagctgctgggcgtggagcggtcctcgccgcagtcggagatcaaggcggcgtaccggtcgctgcagaagcggtgccacccggacgtggccggcgccgccggcggccacgacatggccgtcgtcctcaacgaggtgtacgcgctgctctccgacccggacgcgcgcctggcctacgaccaggagcaggcgcgccgctccgagttcgccggctacacgggccgcccgctctactcctcctgggtcggcgccgagtccgagcgccgggcggtgttcgtcgacgaggtgcgctgcgtcggctgcctcaagtgcgcgctccacgcgtcccggaccttcgccgtcgagtccgtctacggccgcgcccgcgccgtcgcgcagtgggccgacgacgaggacaggatcgtcgacgccatcaacacctgccccgtcgactgcatctcgatggtggagaggtcggacctggcggctctcgagttcttgatgtccaagcaaccgcgcggcagagtccgcgtctccgaaggcaacgcggtgggagctcgcgcgcccaacatcttcaacgaagtcgccaagttcaagaaaaggt

SEQ ID NO: 279747 - DNA, 445 bp, Zea mays
gtccacgcaagcctctacagtaagtcgtataaggcagtttttcttcaacaacgaggggcagatctggcgcagtgttgagttgtgggttttcaaaccagcctcttcgcatttagggaggaagatttgcatctgtttatctctttctcatacctcatttacgtgggagcctcgatctgcctttttaacgtgagcccgcgttgctcacctttggcgccgccactcccgttcttaaagatcaatcagctgtaattttttctctgatggccactggccacggtagcgttcatattcttccgattagcaattgtatgtagaggagagttgtgatggaaagcatgtgtgtgtttgccatgacgacgctgtaaaaacctgaaacacttatttctaggggggtttccactccaaaatggaagtggagagatgtgtcctgataattggtgccgtt

SEQ ID NO: 279748 - DNA, 632 bp, Zea mays
cgacttcatcttcgacttcttcaaagccgaggtgctgtcggcgctcatctacagagtgaggaactcgccgcctgacagatacgcttgtttggtggctgaagaagctgaggcaggcgaccagccgtcaaaggcaccatatgagaagatcgtcggggttgtggattgcacggtgcaggacgaagacggcatcctaaagcaccttcgaggaggcgcggatgaatacctctacgtgtcaggaattgcagtcttgccaccattcaggaggaggaaggtacggaccgcactgctgaaggcctgcgaggcactggggctccaatggaggcacgtgttcatggttctgagggcgtacgaggatgacgacggcgctcgaggcctctactccaaggcagggtacagggtcgtgtcaagggattccagacttgggtctcctgggtggggaggaggaggcgagttgtcatggtaaaggagctgccggttcacgatgatcagattggacatcaatgacgccggcacggttttgttgaatatgtgtgtgcgtgtgtgtgtgtcaccagctaatgtgtactgtttcttgtccatattcgcggcatcatgcatgtgaggagagacagttgcatatcttcccaccaaac

SEQ ID NO: 279749 - DNA, 926 bp, Zea mays
cccacgcgtccgcccacgcgtccgccagtagggtgggcattgccgaggcagagaactttatagtggataactgcaagagcatatattttgcaggacatgagagcacagctgttacagctgcgtggtgtctaatgctccttggactgcacccagaatggcagaatcgagtacgagaagaggtgcatgaagtctgcagaggccagccagtagactcacggtcacttcagaagatgaaaaatttgacaatggtgatccaggaaaccttgaggttgtacccagcaggtgcctttgtttcaaggcaggccctccaggaactgaagctcggtggcgtacatataccaaaaggtgtcaacatctacatccctgtctccacaatgcatcttgacccagagctatgggggcctgatgtgaaagagttcaacccagagcgcttctctgatgttcgaccccagctacattcatacttgccatttggtgctggggcccgaacctgcctagggcagggatttgctatggctgagctcaagatccttcatctctctcatcgtctccaagtttgttttgaagctctcaccacactaccagcattctccaacactgaaactcattgtggagccagaacttggtgtagacctcaccttaacgaaagtgcaaagtgtctgtactaagaggggcactgcaatttagtcatacaatgtcatggaatgaaacctgtgctatggtgaatgcagcttcccctgcggagaggggacaatttgtacagagacagctcatactatctacgcatgatcttttcaatgtgcatgattatagtaagaaatggtgccaaatgatccaatcatttataccaacattgtatgggaaaactatacagctattaaatttagtaatgaaacgaaatatattggaacattattaaggtgttc

SEQ ID NO: 279750 - DNA, 564 bp, Zea mays
gacctgcccgtgctggagttcctgtcccggccgctgcgcaaggaacggccacggcgtattcggcggcgggtgggagcgccccgggaacgtgtttgcggcggcgaagaacttcgccaggagactggagagggagaagcagcgggaggagctggaacgggatcagccctccgggggcctcgacggggacgcaggccgcgaggcggagacggaggcccaggccgaggcgaggcgcagcgcgtgggaggagctcaggtggaagcccctgcttgatccttggaatgggctgataggtggccgttgaccctgcaggaggttgaagagaagctcagcgctggaagctgaacccgtaacatctgcagctgcagaaatagtggatgtgccaaggacaaaatagcacctttgtggccgtgggttatcaaacagtaggtgtcgtcgtaactcgtaaatgatcatgtgtaattacagattacataactcgtgtaggaatagtagtcaaatatatgtgtgtagatgttggcatattgcacaggattatgtcccctttatatatatggtggttaatgg

SEQ ID NO: 279751 - DNA, 296 bp, Zea mays
cctcagtgtcacagctcacaagagcccgtcgtcagtcgtcagtcgtcacactagctcgtcagaacctagaaggacgcggcagtagtacacgtacgtacgcatggctccctccgtgatggccacatggcgccgtcggccaccgccgccgtcactactccattccaaaggctcgtgtccgccgccggactccccgtcgcctggtcctggtgctgctgctccaccgccggcggcttccgcgacgtcgtccgcagcggcgaaaggatcatcaggcgcatgcaggacacgtgtggccgggt

SEQ ID NO: 279752 - DNA, 461 bp, Zea mays
  unsure (1)..(461): unsure at all n locations
cccacgcgtccgaatcgttggacggggccgggaaagcgaaacaagccacgctaagcaagatgcaccgaaaccctcgcgccgtcatccgcgccgccgtctccctcacccgccggccccccgccgttcctgccgcggaggctctccaaaccctgcctaaagcgacgccctcgcctgcgcttggggcgtggcggccagaccaggcggtggggcctttgggtagcgtcaccgccgccgcgccttctcctcctccgcggcagagtatggcaaggatgtggacgaggtgaaccgcaagttcgcggaggcgcgggaggagatcgaggcggccatggagagcaaggagacggtctacttcaacgaggaggcctccatcgcgcgtgacgccngcaacgaggcgctcgctgctttcgacgcgcttttagcgcgcctcncgcccaccgacgccgacgcgctccgccgctcca

SEQ ID NO: 279753 - DNA, 597 bp, Zea mays
tgcacacgacgttctgctacgtcgtgctggaggcgcagtaccagtcgtccgtaaccgccgccgtgcagcagctcaacgccgacccgcgccgcgccgccgcgttcgaggtcgtgggctacctcgtcgaggagctccgcgacgaggacacctacgccaccttctgcgccgacctcgccgacgccaacgtcttcatcgactcgcttcccgtcggctcctacatcgacgtcaagggcccgcttggccacgtggagtacaccggccgcggcagcttcgtcatcaacggcaagcagcgccatgcgagccgcctcgccatgatctgcggcggaagtgggatcacgcccatgtaccagatcatccaggcggtgctgcgcgagcagccggaggaccacacggagatgcacctcgtgtacgccaaccggacggaggacgacatcctcctccgcgacgagctcgaccggtgggcggccgagtacccggacaagctcaacgtgtggtacgtcatcgaccatgtaaagctcccggatgaggggtggaactacagcattgggttcgtcacggacgccgtcctgcgggagcaccgttcccgaaggtggggaa

SEQ ID NO: 279754 - DNA, 688 bp, Zea mays
gctcgatgaaatctgtagtatagagttgaagcatcgttcgatcccgtcgatcgttcgatcccgtcgtcttcatcgtcgtagcaccacctcgacagcaatgcaccgattgtcaaacttcacctcgctgctcttccagcctcatgcctgtggttgcacgccttgtgcctcgcgtttgatctgcttgacgcgagcatgccttcgacgacatctactttgttgtgtttgtcatttgtgtgctactcgactcaggggagcgggtctgctctcttttggcttttggttatgtttatgggcaaggtggtgaagaagagagatgggcgcccatctctcgccagatgctcaagaaaaggtttgaaccgtagatcatcgtcgtctctcatctgttaagtcgattcagttatggtaagctgatttgtttttaccgttagttggattggttagttatattgtggcgatgctttgggaagaatacctttcttatttttttggtgtgttatatgttgccataaggtgtttgcagtaatatttcctatgcaatagttgtgtcatgtgttgttagacttgtatgcaaggcacgattaaattaataatgtaagaagtgggattagcatttttgaaattgtctagccggtagtacttttagtgttacttgagagaatccttattacaggatgatgatgatcccttg

SEQ ID NO: 279755 - DNA, 503 bp, Zea mays
acacacgcgtccgcggacgcgtgtgcaacatacacacaagcacaacaaagctaagaagctccgtagctaaattcagatattacaaacacaaaagcggagtgcagaaccaaaatggctgcctcgaccgttccttctcgttgcttttctagcattggtcacttctcaggccattgcctctgatcctagcccgctccaagacttctgtgttgccgacaaagactctccggtgaaggtgaatggatttgtttgcaaggaccctatggctgtgaacgctgacgacttcttcaaggctgcaaaacttgatcagccaagggacaccaccaaaagcaaggtgggatccaacgttactttgatcaatgtcatgcagctgcctggactcaacacgttgggcatctcgttggctcgcattgactacgcacccctaggtcagaatcctccacacacacacccacgtgccacggagatcctcaccgtgcttgaagggacactctacgttggatttg

SEQ ID NO: 279756 - DNA, 378 bp, Zea mays
  unsure (1)..(378): unsure at all n locations
ccaaaagagtccaggcccaagctatctgtctttcctatcaagaagtggatgagccgggccaagcgtgctaagtgattctcttttattagcatggggccttcctttgtattcacaactntagaatgagtaaagattcaggaagaggatcattcttttcgttcatgaaatctcagcgtcggatatctagagatctctcgaccagcttttgtttacatttttttaggaattcaggcaattccatgtttagtttaatccagaaaattttcagcaaaaatgtgacgatatatataactgtgcaaatctagtacccttaatagtagtagatctcttaaatggttcttagtgttaccataagatacataatatatttatcatgag

SEQ ID NO: 279757 - DNA, 588 bp, Zea mays
ggccaccgtctccatcgtgacgtcgtgctgcgtcttcggcctgccatggctggcgccgtgtcggccgtgccccacgacgggtccactttcgtcgccggacgggacctgccacgcgctgaaccgtttccggcggttccactgcccaaagggccactacaacgatctcgccagcctgttcctcaacatcaacgacgacgcgatccgcaacctctactccaccggcaccaacgacgtgtaccacccggtttccatggtcatcttcttcgtggcgtcctacgcgctcggcgtgctcagttacggcgttgtggcgccgtccgggcttttcgtccccatcatcctcacgggcgccacctacggccgcctcgtggcaatgctgctcgggggccgctccggcctcgaccacggcctcgtcgccatcctcggctccgcgtcattcctcggcgggacgctccggatgacggtgtccgtgtgcgtcatcatcctcgagctcaccaacaacctgctactgctgccgctcgtcatgctcgtgctgctcatctccaagacggtcgccgactccttcaactccagcatctacgatctcatcct

SEQ ID NO: 279758 - DNA, 529 bp, Zea mays
caacagaacattgaacaattctcgatgtcgcaaatcgaaaaggcgaccgacaacttccactcaagaaatttcatcggaggaggaggttatggcccagtctacaagggaaaagtgggcagcacatcagtggctattaagctgctgaagcctcgtggtagacaaggtttctcagagtatcagcaagaggtggtggtgctgagcaaattggagcacccacacatcgtgaggctgattggcgtgtgcccggagtcgtgcggcctggtgtacgagcacctccccaacggcacgctcaaggacaggctctccaagggcctcctgtggaaggaccgcgtcaggatcctcggcgagctgcgctctgcgctggcgtacctccactccaggcggccccacgccatcatccacgccgacgtgaagctgaccaacatcctcctggacgccggcaacgcgagccggctgggggacttcgggacggcgcgggcggtgcacgtgaagccgctggaggaggagaccatcggccgccgcacgaacc

SEQ ID NO: 279759 - DNA, 553 bp, Zea mays
taccttgagtccttccaaccgcctctcccccaatccctcccaccaccaccaccattctttccgttctgttgtactaccctgtacaatctgcttctgctccgtgcaggctctagttgagaggcttgtgtgtgttatgagagttgtgctgcttctttggttgttaacgtgcctcacctgatctagattagtagactgttagttctactgctgccttgctgttacatatttacagtgttcgcttctgtgggggttacaattgcttactcgcttactccgggtttggatgctaaatgggcttcaatgtacaaagccattatttcaattattgcactggtaccatataaactaaccacctgtcagttgcacttcccgtagtttcactgtcaagatcactccttgtggagtgattgagctataatatatataaaaaaaagcatacaggatattggtgtactcaagatcaagacccccaaccgcagcagtcctgggactcattaccatagatgatagcttgttggcatttgaaaggctttaattactcccttctccattt

SEQ ID NO: 279760 - DNA, 480 bp, Zea mays
  unsure (1)..(480): unsure at all n locations
cccacgcgtccgtagtttcgtccctgcttcctgcctacagcgtcgtgcgtatgatacttcttcctaatcattcgcgtgcaccgacaaacaagagagcaggtctccaaaactattgcccccagagatcttgtatcaggagagggtaaataaagtttttgggaagcactctacatggatgctcgatcacttcattgccgtcttcaatctcattgccatggctcatctgtcgccttgtcacgtggacgtttcatgtcgtcggtaacaatgagatggtgttaggcgtcaagttgtcttctctacccgatcgtcggcaaggaacaaaccgagaggaaagattattatccggacgtactctccggacttncgcgcgcctatacgagcanngcattcacgcaagtggacggcgcggtgaactggacctggcatggcggctctgcaatggatcaggacagccctagctagctagctcctcgggagaga

SEQ ID NO: 279761 - DNA, 661 bp, Zea mays
aaatatctccgtgctgtcgtgcagggcatcagcaaaggcgtggtagtggacagcctcctgtcgtcgatggtgaggacggggaagccgccggacttcgtgctgtgcatcggcgacgaccggtcggacgaggacatgttcgagagcatcgtgtgcccggcctccaacagcggcgtgaagctgccggccagcagcgaggtgttcgcgtgcacggtgggcaagaagccgagcatggccaggtactacctggacgacacggtggacgtggtcaagatgctggacggcctggccagcgcgccgtcgcagcagcggcccaggccggcggtgcagctgcgggtctcgttcgaaggctcgctctgagggggaagaggagaacacacagcgctagtagcagcagtaaacagcaaacatcgagcaaggataaccagtggtgatgaacacaacgagattcagcagacggcgtggtgtaggattgattagctgcagtttacaggatcgacattttttttgctttcttctacattactaccccaaatctttcgtgcctgtatatgcccgcatggtaatatgcaaagaataacgtttcgaccaccaaccaaaccaccattgtacatgtagttgacgatgacgacgagatcagaaaaggagaagtggggaaaatgat

SEQ ID NO: 279762 - DNA, 429 bp, Zea mays
attggatttccagaaggccccgatcgatcgaccgaggcggcgaatcatccgtccactcgctggcctcatcacctccccgtgcgcagccgtcgtcgtcctctcctcccttatcgatcgggttccggttccggccgctcaactcttctagtcttcttccttcctttccttcctttctcccccgtcccgctctggcctcctgcgtcctgctgccctgtgattgaagcaggcaacggccggctgttgggacggtagataaatagtaaatcggttgatactactgctgctgctgctattaaccgctcgggctggccggggcccccctcctcctcctgttgcttcgattccatcacacatcagcttggtgcattcgtcttcctgcttcctccttgcttcgtctctcttcagttcagttctcccttggagcgagga

SEQ ID NO: 279763 - DNA, 508 bp, Zea mays
ccacgcgtccgcgacctgggcaaagatcagaagagaacgcggaagtgatggccatggatccaagcgtcgaggcgcgccagagcgaggaggcggcggaggccttcttccgcgcggcgccgccgctccgtttgaccgcgaccgtctcgccgccagcctcgccgatttcctcgcccgccactccgccgggggtggtggagtggtgtgcgtcacctccggcggcactacggtgcccctggagcagcgttgcgtgcgctacatcgacaattttagctccggccagcgcggtgccgcctccaccgagtattttcttaaggccggctacgctgtcatcttcatccatcgccgtgggagcaagcagccttactgtaggtttcttccagaggattcctttctcgatctttttgagctcggggaagactcagagatccaagttccacagtctcattcatcggtggtcaaggcagcaattagcaatttacggaaggcaatcgatgaatgcttcctctca

SEQ ID NO: 279764 - DNA, 375 bp, Zea mays
aaaccggggcggacgcgtgggccctcatcatgtatctgatgtcttgacgacacatatggcacaacggatgtggggtacgcccctgataagatctacacgcttccttgctgacccatgcaaacctgaggagcacatctgttcgtcctgctgggcgttttcctagtctaggtggcctaccctggatttgtgaatataatgtcgtgcccctccaaattatgctcttgatggcctggcacaaatagcttagctgaagtcatgaactaacgtagagttattttttgtgtgctttgcgcatatctctgtccatcatgtagagcacagggtttactgcacataggttaaagatttggacattttctgaaaaacagcgcgaga

SEQ ID NO: 279765 - DNA, 645 bp, Zea mays
gcatctgcaagctccaccagtcacagccacacggcggaaaaacgaaccgaggaacaatccgggttctgcaggaacccactccaactgtgcggcgcgtccaaaaatacaaaaggcaagcgagcgagctccaagttcggctgctccaatttcactcggcatggctcctcaggcgtgggtcgtggcggagaacggcgaggacctccaacaacccagggaattcctgccgctctctaagcttgaagatgttggcgtgttgtattggcatttggaccctaagaagtctgaaagcgaggaggaactagcaaaaatccgcagagacagaggctacagttacatggatcttattgagatatgtcccgacaaactggaaaactatgaggagaaggtgaagaacttcttctgtgagcacatgcacgctgacgaagagatccgctattgcttggagggcagcgggtactttgacgtccgcgacaaagatgacaagtggattcgaattcggataagagaaggagacatgatcatcctaccagctggaatttatcatcggttcaccctcgacagcgctaaatacacgaagctcatgaggcttttcattggggaaccagtctggaccgcgttaaaccgccctcaggaggaccacccggc

SEQ ID NO: 279766 - DNA, 848 bp, Zea mays
tgcactggcagcggcgtctactattactacatgagcgggagatatgagggggattgggtcgacggcaagtacgacggcttcggcgtcgagacctgggccagaggtagccggtaccggggccagtaccggcagggactcaggcatggctacggcgtgtacaggttctacactggggatgtgtatgccggggagtggtcaaacggccagagccatgggtatggcgtgcacacctgtgaggacggtagccggtatgttggggagttcaagaggggcgtcaagcatggtctcggccactaccatttcaggaatggtgacacctacgcgggagagtactttgctgatacgatgcacggctttggcatctacagctttgccaatggccatagatatgagggagcatggcatgagggtagaacgcagggtttaggcatgtatagtttcaggaatggagagacacaagctgggcactggcaaaatggagttcttgatactttaagcacacagaacttcatccctggatcacctattgctgtgaaccattccaaggtcctcaatgcagtgcaggaagcgagaagagctgcagagaaggcctatgacatcccaagagttgatgataaggtgaacagggcggttgcagcagctaataaagcagccaatgcagccagggtggctgccgtgaaggctgcacaaaagcgcatccccagtaatggtgacgatctaccactgtcagtagtgtgacaatgaagccaatatatgttggcatggagctgcttcgcgatgccatcgcatcaccaattgcccgacataaccttcaacttcccagtaggtgaagccactgctcgtccatc

SEQ ID NO: 279767 - DNA, 566 bp, Zea mays
ccagaatttgctgatgcagacgaagaaaagctgtatgattttcttaatattgagctagaaagtgatttaaatctgaaaagaatgcggcactatgaagtagtttatctaattcatgaggaccgtgttgaagaagttgaaaatgttgtatcaaaagtacacgattttatcagggagaagaaaggaaggatatggaggcttaacaattgggggctgcgcaggcttgcttacaaaataaagaaagcaacacatgccaattacattttaatgaactttgagatagagtcaagatacatcaatgacttcaagaccctgctagacaaggatgagaggatcatcagacatctggttatgaaacgggatgaggcaattactgaagattgccctcccccaccagtttttcacactctgcgagctcaacaatattttgatgatgaatatgaagatgagggggaagaggaagaggatgaggatgctaggagtgagccaaagtctgccaattatgatgaggatgatgttgaagctgatgatgagcctgaaattatttatgtcgatgaagctgatgagga

SEQ ID NO: 279768 - DNA, 535 bp, Zea mays
tcttcgcgtccgcccacgcgtccgcccacgcgtccgagccgctccccccaacaaacatccctaatccgtgaccgtggacacgccgggagctccatcgcgcgaatagattggggggattcaatagaggctacgcggggattggtcgcgctcgagatctcagcaccctcgcgcctgaaatctttctattgttgtcgtggttcaggtgatgagatcttggggagcgcgactcgctcggtcctgagatgctggcgggctacggcggcggtggccgcagcgtccatctctcctcccacaaggacctcctcctcggccgctgcggccggagcttcctcttcggcaacacgtggtttctcctctccacttacccggcgcgcctcctgcacaccacggaccgtcgcgctccctccgctttcggcgccgccatcaaccgggtcccctgcgtgcggtcgcactgcacggggcagggcctgctgcagagaggcagcaattgtcatggctgcctgcggctatgttcttaggcgagctgagctgggtg

SEQ ID NO: 279769 - DNA, 435 bp, Zea mays
cttgctcttctcctccggcctcctcggtcctcgctcacccgaaccagcaaccctaatccgtggccgcggacccgccgcaagctccatcgcgcgaatagattggggattcagtcgaggctacgcgggaactggtcgcgctcgagatcttagcctccgcacctgaaaccattggctccattgctattgctgtcgtggttcaggtgatgaaatcttggggagcccgcctcgctcggtcctaagatgctggcgagctacggaggtggtggccgcggcgtccatctctcctcccacaaggacatcctcctcggtcgcggcggccggagcttcctcttgggcaacacgtggtttctcctctccacctacccggcgcgcctcctgcacaccacgggacgccgcgcgcccgccgctttccttggcgcgatcaaccggccccct

SEQ ID NO: 279770 - DNA, 443 bp, Zea mays
acaggagcacgggggcaacccctgatcattttgacatccgacatcatatggtttcagggttcatgaagtttgtcatcagggattaaatacatcatcactgatctgagaaacaaataatgaatggccacgtgtcagtggggggtgatcagcttatgcaaacctacaccaacagaagggggttgcacttcaccccccaacaatttctaactcctacaccgactaaattactagcccattgttaacggggaacattcactaggcctatcagctgtcaggttgttaataaatacgtgagctgagctactacaacatacaaggcccaccgacacaagcagctggagatttgccccgagctgcggccaataactcggaaaactagaagctgtcagtaatggttaaatttccttctgtgccggctgtaatccgatacgtatctgaatgtc

SEQ ID NO: 279771 - DNA, 485 bp, Zea mays
caacggcgctccaactgcactactgcagccaggctttttgcttgcttccgcgggctccgcgtccgcgtgcgataggctcaatatcctcgccagcggatcccttccttgcgaggccggaactgagctgccgccggcgctatggcgagcggcggcctggcggctgcgtcggaagtcgccgtcgttttcctcatccgccctgtccttgccatcgccttcgtcttcaccctcatcctcctcagctggtacgtggcgtggaggacggtgctggtgcacgtgccgctggtgcaggagatcgccggcctgcgcccgaaaaagccctctaaacccaagccagccaaccgcgggcgcttcgccaagttctaccagaaccaggccgaagccgcacaaaggaacagcaaatcagaaggggcatcatcttaagagaaatccgtcaccaccttgtaatgagtacctgccgcagactttattatgcagttctaattaga

SEQ ID NO: 279772 - DNA, 574 bp, Zea mays
acgggctcggcggtgcccaagttcggcgactgggacgccaacccggcgtcggcggacggctacacgcacatcttcaacaaggtgagggaggagaagcagacgacccacgcggggaagccagcggcgtacggcaaggacggcatgcgtaccaacggccccaagcagcacgacgacgacggctacgtctcatcgaaattctcgtgctttgggtggtgcaagtagagagcgattgcctgatgaatggtgacgatggatggatggatgcagacgctggttcctctgggtctggggatgtaagtctggagaacggggggcatgaaacgatctccatgatctttcctgtggtagattttcacgtcaatttatgaagtgagacatagagttgctgtcatgttagaagtaagcattccattgttgcgttggttcttccgtattgaattgaatttacagtacatgtatcatgtatgtacgattgtacgcaggattggactctgaactccgaggtgaatatatgtgtgtttgtttggtgtccaaaaaaaaagacgaacaacaagatcaaaacttacctacacct

SEQ ID NO: 279773 - DNA, 415 bp, Zea mays
ggtgaacatctacccgttcatcagcctgttcctgaacgacgacttccccgtggacttcgccttcttcgacggcggcgccgcgccgctggtggacccgggcagcggcgtgtcgtacaccaacgtgttcgacgccaacttcgacaccctggtggcggcgctcaagtcggtggggcacggcgacatgcccgtcgtggtgggcgaggtcggctggcccaccgacggcgacaagcacgccaccaacgcgtacgcgcagcggttctacaacggcctgctgaggcggctggcggcgaacgccggcacgcccgcgcggccgaaccagtacattgaggtgtacctgttcgggctcctggacgaggacgtcaagagcgtggcgccgggcaacttcgagcggcactggggcatcctccggtacgac

SEQ ID NO: 279774 - DNA, 487 bp, Zea mays
tgatcctgtcgggcgggcagcaggaccgtggcgcgcggacgagcccgacggcgaggaggacgacgactacaagcacatggacggacgcgatgtgccgtgtgtacagcaacgcgcccagggaattcaccatcatcgacaggggcaggaggaactccgtttgcttgcacaggaaggggttcgaggagctgtacgtcttcagccccggatcccagtaccagtggtacggcaagtatgcctacgtggtcgtagggcctgccatgctggagcctgtgatgctcgagccccggagacacgtggcggggggctcagtacctgcgcaaccccaatctttaggcatgctagcagctgggagaattgatgaccctggacacatcacatgttcccgtacgtgtatccagatcatcagatgaggtcaggcgagatgcaaaattggcaaccacaatggtctacagatgttggaaatgctgtccatagcgaaatgctgatg

SEQ ID NO: 279775 - DNA, 644 bp, Zea mays
tgatcccatgaccctgctcgaggaaataactcagaatgggatatctctaagatgtttgtgttaatgacctagagcctccagcttttgaggtgttgccctcacttaagaggttgaagaaacgaattattgcagctggccgggatgattatagtgctgtttttatgtcaggaagtggaagcacaattgttggtattggttcaccggatcctcctgcattcgtgtatgacgatgaagactacaaggatgtttttgtgtcagaggcttgcttgctcactcgcgacgagaacgagtggtacagggaaccaatctcggccaatgccacgtctggcaaagaaggtttgcaagcctcggttgctgactgatttaagtcaggttctgtatcagttttgtgactattatacagatacaggatttgatcaacgcctcgacatggtaggaaagaacactacggtataggcggggattgttcacaagacaatctggttctggaatggaccattttcagtatagcaactattgatttgagcaacagccagactaatggttccaggagaaatttatcccgtagatgtataaggatcaaatgaacgagggaaaatgactttctccgtgaatttttaacaatacaagcacacgtagtttcg

SEQ ID NO: 279776 - DNA, 409 bp, Zea mays
cccacgcgtccgacattacatgctcgggttatctcttgtcaacagccaaagattatcagaaggaataaaatcactggagaagtccttggagcttggaaggggtgcacatcctgcaagctacatggttgaagagatatggcaggagctttctaaagcaaaatacatcgaatgggagagcttatcaagagaccgaacttgtcaactgcaaaagctgaaggtagcatgtaaagaggccctaacgagttacaacagccttgataacccagccgcaggtgcgccagtagaacagctaaatgagctcgaggaagttttcaagaaggctgcaaagactgatactccagcagaagtacctgaccatctcggttgcaaaatcacacttgatatcttcagagacccggtgatcacccga

SEQ ID NO: 279777 - DNA, 426 bp, Zea mays
ggaaagcactcagtctcggcctgtaggattttggcagggtttctctcaactgttgaacaaccaaggcaatacaagggagccatcccctaatttacagaatactaatggaactttgcgcaaagaagaagcaaatgaggatgccaaatgattcagacccctaccattgtttcggggacaatttatcagtagatcacggcgttacaatttaccagatagtcccagggctttgtttctttgccctcacatctgctgtaaaaattataactttggccacagacaaactgcataactttgtacataaactgaatgcttcctaaatatttgttcccttatatagttatatgtgaattgtatgaagctcaaggaaagatgtttcattccacagaatgtgatagttgaaagcatctgcatttcaaaaagataaaa

SEQ ID NO: 279778 - DNA, 499 bp, Zea mays
ccaacagcagcagcagtctcctcaggcaccacagcaatcacccacatcagcaggattcttccagtcatcagcaggcatggggttcttcccaccagtgcaggtgcaacattctccgtctgcccaacgccaatgactcaacggtggcatggcattcatcgggctaataatggcagcactttgtgctaacttctgtacattaaccaataatcacctagcgtcgagcttatacgtggctgatcctgcaagagaggcgcaggaccgttgtcacggttagaaaaaaaaactgtagaataggcttttgtgatgactctcgttttggtcagagttgtttaactcttccttgttctgtgtagtagttagatgttgtgtctctgtcccccgttttgctttgattctcctgaggcaaaagaaagtggcactggaattgttgcccactgaatcactgatcgtgctgtcattgacatgatgtaaactgcaaacacttgttctattgttgttt

SEQ ID NO: 279779 - DNA, 494 bp, Zea mays
ccaaaccaccgtagcttgttggctcctgctcctgcttgcttgttggacgctgaatctccccaagactttggctgcgaatctcgcttccggcacctggcagcagcgccgaccgctcctcttcttcaatgtgtcgcgcccttcctctgctcgctgtaaacagtcgacctccctcggctccctccttgcttctctctccctcagatttgtctgcgccgttggtgcttcgtcttgcccaaccgccctggcctctgctcgaattttgcagcgccgagctcccatgattcccatggtgctcgccctcaagctcgctctctggcgcccctgtgctcgacgcccagcggaggccccttccctgcgccgctctttctctcctggtgttttcttcctgctcgcgcctatctccctcgtgtgagcgcccaaccgtgctccccatgcgcaccgcgctcttctgtccggactaccagcatccaactccagtcttctcaccactgaag

SEQ ID NO: 279780 - DNA, 959 bp, Zea mays
accacgcgtccggagaagacaaacaagaagtttagtgttgccttagctaacactgaagcttctttgcacgcagtgatgaaagaacttgaaagggagaggaaatataaaggaagacttgagaagatctgcaacgagctcatcagaggcattgatgaggacaaagctgtggtgcaggcactgaagagggaaaccgagaaggcacaacaagagctccagaaagagcgtgaaatgcttcaacttgcagacgagtggcgtgaacaaagggttcagatgaagctgctagaagcacggcttcagtttgaggagaaaaatgcagctgttaatcagctgcgcgatgaactccaagcttatctggatactaagaaagagcaggaaccaatgaacgatccaatgcaactgtcccacgcgtctgaaaatggcgccaccgcagctgatgatgtagtccctgacagaaatggtggaaacttcagcgaagacgactcatcggaaggcagtgacatacactcgattgagctgaacgtcgatggcgtcaacaggacctacacctggagctacactccttcctcgaaaggcaggcagaggagcgcatcgaggcatgaatcgttttcggatagagggatggacggcgtgaactcgtggcgtttagagcaaagctttcggggcatggatgaggagctggagggagactgggcagaagggtgtagcaacggaatactgaccatggatcacgacgaggagaggtatctggcaatcaagaatctcagagagcagatgctggccgggtcagggttcatcctatcacaaggtagagaaaatgctgaaagagagtgttgtggcttgtaagataaactgcatatgaagagaattttaaagtaatgtgtcatatgggtcgctgtttgatgctaagatccagctgttcgagaattttaaagttatgttccatgattttgaggttttgt

SEQ ID NO: 279781 - DNA, 462 bp, Zea mays
cttctctccccagattcactcaccgtccgtccgtccagggagccatggcagcagcagcagcagcctgcatctgtctgcagctctctctcccaagcaaccattcttcctctgcatgtcctccagcatacaggaagcgtgtcgcgctagccccagggagaggaaaccgtcttctctgcactgcatctggcgcctcttcttcttcttctgtggtggtgaccaaggagcaggaggaaggatctcctgagcccgaaatctttagctacaaagacgaccccaacttcaggggctgcaagggctgcggcagggacgagcttcagaggggctgcaatggacaaggccggatccagggcggcatagccgccgtcccgggcttcggctggtggcccatcaaggcgtaccggccgtgccccggcttcgtcgcgtccggcggccgctaccggcgccagggccaaagcatggacg

SEQ ID NO: 279782 - DNA, 557 bp, Zea mays
actaggctaggctgattgagcggcaactcgcgccgtgtgcccgtgtcgcaacgtgaaccttggggggcccggatgctcatcgattgggtacggggaagcggaggagctggggcccttcctggtgcagaagggcaagccggagctcagatggaacaactactcctggaacacagaggccaaccttatgttcctggagtccccggtgggcgtcgggttctcctacacaaacacgagctccgacctgctgcagctcggtgacaagatcaccgctgacgacgcttacaaattcctgctcaactggttcaagaggttcccgcagtacaagtcacacgatttctacatcgccggcgagagctacgccgggcactacgtcccgcagctgtcggagaagatcttcgacggcaacagggcgggggccaaggagagccacgtcaacttgaagggcctgatggtcgggaacgcgctcatggacgacgagacggaccagacgggcatgatcgactacgcctgggaccacgccgtcatctccgaccgggtgtacggcgacgtcaaggcca

SEQ ID NO: 279783 - DNA, 458 bp, Zea mays
attcccgggcgcgctgttgtattcaccatcctctcctgcaagctggagggatcaccgctcgtggaggcgcagaatgataaattctcagcttccatggcgaatagggttttctgcagcagcaagtcgcaagattcgacccttcaacaacttacatcagatactacaatagaggttgcaattgatataccttttccatttcgagcaataccggttgaagccattgaatcaagtggcaggcaagtgcttgaacagttactcagagtcatgcttccaagatttctgaagcagcttgttaaagactaccaagcttgggcttctggcgatgcttctaggaaaccacttggcactggtgaaatctgaagctgcccagtgtctccattacgcatgatagtttgatcgtagaattcagttattgccccgttgtgttgtatagcaatcctgccaaaacaatgggcatg

SEQ ID NO: 279784 - DNA, 691 bp, Zea mays
attgagctcgagctctaccgcatcttccaggccatagacgtcgagcacaacggatgcatcctccccgaggagctctgggacgcgctcatcaaggctggtatagagattaatgatgaagagctggcaagatttgttgagcatgtggataaggacaacaatgggattattacttttgaagaatggagagattttcttctactgtaccccaatgaggcgaccattgagaacatttatcatcactgggaaagagtctgccttgttgatataggtgaacaggctgctataccagaaggcataagtaaacatgtcaatgcaagcaaatatcttattgctggagggattgctggtgcagcatctcgtactgcaactgctcctctggatcgcctcaaagtgatcatgcaagtacaaacaacacgtacttcagtcatgcatgcaattaaagatatctggactaaaggtggcatgctgggattttttagagggaatggattgaatgttgtaaaagttgctccagaaagtgcaatcagattttatgcctatgaaatgttaaaagaatatattatgaagagaaaaggagaaaataagagtgaagttggtgcttctgaacgtctcattgctggtggtttagcaggtgcagtggctcaaacagcaatttatcctatagagttagtaaagactcgtctacagactt

SEQ ID NO: 279785 - DNA, 466 bp, Zea mays
cggacgcgtgagcggacgcgtgggcggacgcgtgggcggacgcgtgggcggacgcgtgggcggacgcgcgcccggccccgccccgttccattacaacaaaagatcgtgctagtaagcaatacgctcaatttgagtttgaggtcgatttctggagcattcgagttcttttccagtaaacttttcaggtttaagcgcggattgatggcagagctgctgtagatttggagcattttggggttggttttttgcgatttgaggatcgaatcgggctggtacaaccgcgctcacgtgcatatataaggcgaattggcggtttgttggctacaattgttcggttcttatcttgaagggtggtgcgaattggaggattcttcccgaaatcgagaaggtgtaggccaaattcgcaaggaagctgcagctatccgcgtgagaaggctgcctctcacaaattctcggtcggtgccat

SEQ ID NO: 279786 - DNA, 403 bp, Zea mays
ctagcgtttgggcccatgattcttgtcaccgtctcctttttcgctgttttatacgtgtactttggaccgagttttgtacacgatgcaagcaagacgccggtgtcgccgccaccgtacattgatccatacgagctactggaggacgagaggctcagccggccctccccagatgtgttctgaacatgaacagtgcaagaaccagtgcataattgattacaagaaatagtcatacatagcccaaaacttatcttttttactagacgtatagttgtaaatgcaactataaccatagactgttataatcacttaatcagaagttttagcaaaaaaaaaaaaaaaaaaagggcggccgctcgcgatctagaaccccacgcgtccgcccacgcgtccgcccacgcgtccg

SEQ ID NO: 279787 - DNA, 456 bp, Zea mays
agtaaaaacagtactggattttaacttccgaagtgtgaatgatctactaaggcttgtgcgaatttcaatggagtccatcagctgctgacgtgttcagaatctgagaaagtgccacccgttggaagttcctgttggatgtttaatccaattaacttttcttgatgaagtagcatgaaactgaatagttcaacagtgaacagtgtaaaagcataggtcttctcatttgagcttgctggtcaatttgtacagagactgatcgtggaattcttccttctttcttattttgatggcacccagttagtatacaaagttgcatatccacttggatgatttagttagtgaggccacaggttaagatgagctttgcactgctcaatgctcgtaatagttttgaggaagaaggatgctcttgcgcatgcagttgatgattcatttgagcagtgcaaaatggtgtgt

SEQ ID NO: 279788 - DNA, 665 bp, Zea mays
gtgacactttcctcgcgttgcctcccttctggcggcggccatcgcctcccccgcatcggtcgtcgctcctcaccgagacccatttgaaaatgatgaggagccagctatggatgcatcatttgaagttatggatggagaaatcagtgaaccagaatttatcacgggtgtctcaacatctaatgaatggactgatttccgcaataatcttgctcaggggatgtataatagatatagagctaggtctaataactaaggacatgaaccaatcagagagctcaagtgttgctcggggaagagggaaaaacaaaaggatctggacttattatgaggatgaggagttaattaaagcactatatgagatatctttagatccaaagtggaaaagcgagggaggttttaagaatgggtattgttctgttctagaaaatgaactcaaagcaaggctaccagggtgtggtctcagtgctattccacacattgagtctagagtgaggcattttaggaccaagtatggttctattgaggtcatgcttgctaagagtggttttaatcagatgacgatgcttttcgcgcttcctgagactcttaggagagaattcatcctgaacatgattgcagatgaagctcaaaggaagtgacttgtcaaattatcaatgaagaatgtc

SEQ ID NO: 279789 - DNA, 423 bp, Zea mays
cccacgcgtccgtaaggttgctattatcttgttgatgctggttacacaaatgcaaatggtttcttagcaccatatcgaggacagaggtatcatctaggaggtttcactactcaaaacccaccacatagtgctgaggagtacttcaacttgtgccatgctagagctaggaatattgttgagagggcatttggaaggctcaagggtcggtgggcaattttaagagacccatttgaaaatgatgaggagccagctatggatgcatcatttgaagttatggatggagaaatcagtgaaccagaatttatcacaggtgtctcaacatctaatgaatggactgatttccgcaataatcttgctcaggggatgtataatagatatagagctaggtctaataactaaggacatgaaccaattagagagctc

SEQ ID NO: 279790 - DNA, 1105 bp, Zea mays
cctacgcgtccgatggagcatgaccttaagggtgtcatggaggcgatgaagcaaccatatagccaaagtgaggtcaaatgtttgatgcttcagctgctagagggcgtgaagtatcttcatgacaattgggtacttcacagggatctcaagacatcaaatctcctcttgaataaccgcggtgagttgaaaatatgtgactttggactctctcgtcaatatggcagcctgctaaagccttacacccaaccagttgtgactttgtggtacagggctccggaactactattaggagcaaaggagtattcgactgctatcgatatgtggtcattaggttgcataatggcagaactcttgtcaaaagagccactcttcactgggaagtctgagatagatcaacttgataagatatttagaatactcggcacacccaatgaggagcggtggcatggttgttccaaattgcctggcttcaaaggcaacttcgtaaagcgaccgtacaatagattaagggacaaatttccagctgtatccttcacgggaggcttgaccttgtcagaagctgggtttgacctgctaaataggttgctggcatatgaccctgagaagcgcatatctgctgctgatgccttgaaccatgagtggttccgtgaagttcctctgcccaagatgaaggaattcatgccaacttttcctgctctgaatgaacaggacaggaggatcaagagatacatgaagagccctgaccccctggtggagcaacagatgaaagaacaagggagcataggagatcatggcctttttgactgatctgaaagcagacaagtcttgctgcaaatgacagtttttgagtgagtaaacatgttgcaaggtctaagagatcaaaggggaacagaaattttacttaagttccatgcagctagtgttcaaatggcagggttagctctctacgagaactgtcatattctagcctatcatcattataagttgcagatgtaatgcagttcgtctaaaaggtttggccttgcgtacaccaagtttcacctctgatacttgtaaagtattataaactgttgacttgtaatcagtaatcaatgagatattagtg

SEQ ID NO: 279791 - DNA, 582 bp, Zea mays
cccacgcgtccttcggacacggaggacgaccttgttcccgcgccgccactggaattagagcgcggcgggcccgcccccgtccgcggacgcggtggacgcccgcgccgccgcatcgacctccgcggcgagctcgtgatcccaccgggcttcggccgcgaggaggcggaaccggacgcgggaaaggggcgcgcgcgcggggacgccaggaggaggaacttcggcgtcgagatggatcaggcgccggccaatgcgggccggaacgggaacggagcgctcgcggacgcggagtcgaggaagaagtccgaggaggcggaggcggacgcgaagcggaaggcggaggaggccgaggcgaggaggaagaaggaggaggaggagagggacgccgagctggctgcgtactaccaggaacagtgggcgaacgaggatgagggagctgccgacgctgccgcggccgagacggccccgctgtatgaggcgtcgggactacggtgcggtgtaaccgataaccccgggtggggtgagttcgctgctctcaaccttgttttgcttcatattccttattccattcagatgtactaacat

SEQ ID NO: 279792 - DNA, 412 bp, Zea mays
gaaccagggtttaatcattttctttgtgaagttcgagccgattataattttagaaggagatttggtgctgaagtcgaagctagcagcccctttattcctcgtcgtcaagccacgccgcgtcgcgacatgcccgtcgatcccgacgatctatctcccagatgtgtgccacttgtgttgagctccaaaacccctgtcgagctcttctcctgaaagccgccttcgagcacaatccctgtcatgtgttcgatgggaagtctgaaccaaggctcatcgtcgttctacgattatcaaatcattcgggtcatggtaagtcgatgagttattcagaatagttcaattgttgaaaaaattaatgtgctagtgtgatgctcactagttgctcgataaattacgcgagtcacggaactctcgt

SEQ ID NO: 279793 - DNA, 659 bp, Zea mays
  unsure (1)..(659): unsure at all n locations
atacaaattactgtcgagcaaacaacccagagcgtttagagagacagaagccagggagaaggagcggaagagccgccgcggtggaagccaggacacgggaaagctttggacgctaccaattcagcgaataacctacgggggtgcgtggaattgagcaaaccctccgccgccgaaccaccatccgctgtgagcagtgcacgctagcgtccgattcctgggctcggctcaccgccaccggcatcaagcgccggcatcgctagggtttcacgcccccatccccccagggcgccgtcgatcccggtcggccatctcccggtgcgcacgtggtaactgatcgttaatttcatcgatcgatcggtgccatgganggacgcagctccaagcaggcaggcgcgggcgtggtggcccacctccacgacgacctccttgtggagatcctctcccgcgtccccgccaagtccatctgccggttcaagtgcgtgtccaaggcctggctcgacctcattgccggtcccgaccaccgtaagaagctacgccaacccatgcagggactcatctacatgaatccagagaaagaccgccacagcttcagcttcctggacctgccactgacagtaggatccgtgcctctggacgttgccgaccctgcaggcttcatc

SEQ ID NO: 279794 - DNA, 527 bp, Zea mays
gctgatgtagggctcctctcgtcgacctggatggtaccttataaaccactgtcgggcaaacaacccagagcgtttagagagagagaagccagggagaaggaggaagagccgccgcggtgatttggcgtttcctggtcctcggcagggttctcaggggagtcgtcaggacacgggcaagctttgtacgctaccaattcagcgaataaccgacgggggtgcgtggaattgctcaccggagcaaaccctccgccgccgaaccaccatccgcctgagcagcgcacgctagcgtccggttcctggacgcacgccgtgaactcgaagtccaccgctctgtgagcatcaagcgccggcatcgctagggtttcacgcccccatccccccagggcgccgtcgatcccggtcggccatctcccggtgcctggtaactgatcgttaatttcatcgatgggtgccatggaggaccgcagctccaagcaggcaggcgcgggcttggtggcccacctccacgacgaccttcttgtggagat

SEQ ID NO: 279795 - DNA, 493 bp, Zea mays
gcttttaacattctctgtaggttatgtattggagaagagtcgcggacagaattcagatgctgaagtcagcaattttacatcccgagctgaattccagagcataacctactggaatcacgatacagcgccatcagcagaggattccctcccgaggtgcttccattggcttaccgtcgctaatgcgatgcatagagcagtgactgctgaagacctgactaacatggcagcaatgcagaatcaggacaagtagattcgttctataacgaagccatgcaatttcgatttggtgaaccatctcgacaaaggatcttgtaacaaccaacatgttatttgaacgcatccagtaggtaatgtttaggctttggggtaagatgcttcaggagatccttgttcagtagcatctgaaaatgtctgggtaatttagattgggacctgtatcagactatcagttatctccaatattgtgaaaaagtgcccctgttgcctttgtgtt

SEQ ID NO: 279796 - DNA, 634 bp, Zea mays
accggccggaattcggttgcccacgcgttcgttgcgcgtgggcggacgcgtgggcggcgccctcgcctccctgtcactccctcgtcccccgccccatccacgccgcgtcgccctccgcctccaaataaagtaaacgcgggtgacaggaggcctccaccgaatccccctgcgcccttcaacccgtcgccgccccgcacgatcccctccgccttcttcgccgccggcctccggaccgcgcagctccccggagccgacaaggacccggcgccatggggttctgggaggcttttcttaactggctccgcagcctcttcttcaagcaagagatggagctttccttgatagggctccaaaatgctgggaaaacgtcacttgtgaactctattgctactggaggctttagtgaggatatgatccctactgtaggattcaatatgagaaaagttacgaaaggaaatgtgacgataaagttgtgggatcttggaggccaaccaagattccgcagcatgtgggagagatactgccgtgcggtttctgcaattgtgtatgttgttgacgcggcagatcgagaaaacatggccattgcaaagggggaactccatgaccttttgagcaagccatctttgaccgggat

SEQ ID NO: 279797 - DNA, 388 bp, Zea mays
agaactctcagaaagtatgtctgctgataaacgtgaggtccaatctctttctgcacaatatgatgagagatgcacgaaggttggccatgtggcaccaaagctaacaatggatgaggctactttccgtgacatccacgagaagaagttggaaatttatatcgccagagttaagctgcagagaggggatgatagcgatgagaagtttcaggagcgggctaataggagacagtcagatcctgaggagcttgtgacatcattgactgagcagtgcaagagatatgggttgagagctaagccaactactttagtggagcttccttttggttggcaacctggaattcaagagacagcttatgcatgggatgaagaatgggataattttggagat

SEQ ID NO: 279798 - DNA, 405 bp, Zea mays
cctctcctctttccccatccgtccaatcgaccgggctgctctgctgcctctccggcgccattgacgagcaagagaatcctccggcacctggtccgtcgcgtgccgtgcccacccgctaaggccagggcgccccgacttgagctcaccgcgtcgaactcgaaccgctgctgttcctcggggcagggtcgtcgaggatgccggagcactcagagaacgcggcggcggacctgatgggcaacatcatggagaccatcgcggagaacctcccgaggcagaagtccgtgcggttcgacgacggcgacggctcctccatctccgagcaggccaagaagctgttcggcggcggcgagagcaggaagaagtcggtacaccacgtgctgggcggcggcaaatccgccgacgtgc

SEQ ID NO: 279799 - DNA, 324 bp, Zea mays
gctctgctgcctctccggcgccattgacgagcaagagagtcctcatcctccggcacctggtccgtcgcgtgccgtgcccacccgctaaggccagggcgccccgactcgagctcaccgcgccgaactcgagccgctgctgttcctcggcaagctcatcgcttccctagtttcctccggtcagtttatgcaaaagcaagccccttttcagctcgtttttggccggccggccggtcgctggtccgttgctttagccttttgtgcgtcctgaataaagaatccgccgtggaggtggacaataacgttccagaggctgagctgttcaga

SEQ ID NO: 279800 - DNA, 546 bp, Zea mays
cacacgcgtccggcgccgtcccgcgcaacatcctggagcagatcatctgggacaaggaggtggaggtggcccagcgcaaggccaggacgccgctgtgcgaggtgaaggcgtccgccgcgctcgcgccgccgcccatggacttcgtcggcgcgctgcgcgccgcgtgccgtcgcaacgccgtccccgcgctcgtcgccgaggtcaagaaggcgtcgcccagcaagggcctcctcagggaccacttcgacccggtggagattgctcgcacctacgagaagaacggcgcggcgtgcctgagcatcctgaccgacgagaagcacttccaggggagctttgagaacctagaggccgtgcgcagctccggtgtaaactgccctctgctctgcaaggagttcgtcatcgacgcctggcagatctactacgcgcgctcgaaaggcgcggacgcggtcctcctgatcgcggccgtgctgccggacatcgacatcacctacttcctccgcgtctgcaagagccttgggatgacagctctcgtcgaggttcatgatg

SEQ ID NO: 279801 - DNA, 1355 bp, Zea mays
caagctttcaccaaaattgatgaaaatgtatcctttaatttggacagtccgaagtacagcaatttagtaaccccggttagaattcactcgtttagttctacgctggggttgcggcagagagaacgaactggattagttccagcttctttgcatctatcatcattcaaatctgctgagtacttcggagctatgagaagcatcctgaaggacccaatgccaaatatgcgaaggtcctgttctcaaaggtctcctgggacgatagagaaattaaatgttgttcttgcacgtaaacccacatatatctcatctacttcaaatattatcaatgatggggcacggctactgttaccccagactggatatgaacatgatgtcgttgttgcagtatacgaggatgagcccaccagtattatatcatatgccatgacatcagaagaatatgtagaacaagtaacacacagactgaattccagtttgagtttttctcatcaaccaaatactaatgggattagcagccatggacttgaggcgtcctctccatctcaaggagaccatttgcattccaagggaactcattttaagttatccttcgatgatgactcaccgatttctccagataaaacaaagttctctgtgatttgctattttgcaaagcattttgctgcgctgagaaagaaatgctgtcccaaagatattgattacatacgttctctaagtcgctgcaagagatggaacgcgcagggtggaaaaagcaatgtttactttgcaaagacactggatgaaaggttcataatcaaacaagtcacgagaacagagctggagtcttttgtagagtttgctcctcagtacttcaagtatttaatggaatccttggcttctggtagcccaacctgcctggccaaaatagtagggttatatcaggttggcgtcaagagcttgaaaactgggaaggaagtgaggatggatctgatggtgatggaaaatgttttctttgaaaggaagatatctcgggtgtatgacctaaagggttcattgcgctcacgctacacggctggggacagcaaagtcctcttggatgcaaacctcatagaggcattgcatacgaagcctatatttttggggagcaaggcaaaacgaagattggaaagagctgtctggaatgatacttcattccttgcgttggcggatgtgatggactactctctccttgttggcatcgacgaggagaagaaagagctcgtcatcggcatcatcgactacttgcgccaatacacctgggacaagcagctggagacgtgggtgaaggcctcgggcattcttggtggccccaagaacgaatcccccaccgtcatatc

SEQ ID NO: 279802 - DNA, 538 bp, Zea mays
tctgggtctgggatttccacgagcagcgcaacggcgttcgttccttcgattcttctaatctcctaacccaggtgcgcatggtatggccggcctgatcagcttgcgcgccggtccgaggagttcaccgtcacttgcccggtcgtcgtccgcctgggcatcaccaccggcttcacaggtggcggttcgtttgccaagcccactgtttcgctgtgccaaacttcgtaggagccgtagtctactggcagcagcactggagatctctaaggacggttccgccgcggttctggccaacagcctgccttcccaaggggctatcgagacgttgcggaatgccgatgcggtgtgtttcgacgttgatagcaccgtcatcctggacgagggcattgacgagcttgctgatttctgcggggcggggaaagctgttgctgaatggacagcaaaggccatgacagggactgttccttttgaggaggcgctggcagccaggttgtctttaatcaagccatctctcttccaggtggaggagtgcctggagaag

SEQ ID NO: 279803 - DNA, 652 bp, Zea mays
tagacgtgtcgccacgccagcggtccagcgttggcatccgtcctgcaagcctgcaacccaaccttgaaccttgcctgttcttcttcgatttattagcccagcgttctccctctctcgtgggcgtggcgacgacttggaggccatcgctgccgccctacgccaggtgcccagatcatctgcggccccttcgccggcgacgaccaccatccatcagaaatagggtcaagcgcttgaacttacagcgagatggaaaatgatagaaggcaacttggtcagatcgatccaagaagagcccgctttccttgctgcgtagtatggactccaataccattcatcacttggttggtgccctttatcggtcacattggcatctgcagagaagacggtgtaattctggacttctctggtccacattttgtatcagttgacaattttgcattcggagctgttgcgcgctacattcaagtaaactgcgatgagtgctataagcttattgaacctgaaggagatgccacgtgggacggcgcgctgaagaaaggcacgcaggagttccaaaacaggaactacaacctgttcacctgcaactgccactcctttgtcgcaaacaatctgaacaggctgttttattccggccacgacgaatggaatgtgg

SEQ ID NO: 279804 - DNA, 856 bp, Zea mays
gaagtttgaagctgatacaaagtattggaaacagctcatttcagaagtatatttcaatgacttcccacttaattggtcaagcatttgcaatgtaatggacatgaatgctgggtttggagggtttgccgcagcactcattgatcaacctttatgggttatgaatgctgtgccaattggtcaaccagataccttgccacttattttcaacagaggtttgattggggcatatcatgactggtgcgaatctttcagcacctaccctcgtacctatgatcttctccacatgagtaatctcattggaaatcttacaaacaggtgtgacctcatcgacgtggtggttgaaatcgacagaatactgagacctggaagatggtttgtgttgaaagacacgttagagatgataaagaagatacgcccaatcctgaagtctctgcactatgaaattgtcgtcgtgaaacagcaatttcttgtggctacaaagagtttctggcgtcctggcaaaccagcttccacatcagggtgacatatagatcgtactttcaagggagtcttcaacaaccaacgattctattgattctttgagacctgatcaaactaattctttctacaacacagtctatgtagattattacctgtataagtatagaaaatacatatggtaagttgaggtaataccccttttttttgccaaagcataataacaaggatgttatagacttatgcagtagtaggcaagttttgacaaatacatacaaagggaagggatcatgaaacgtgttgtgtatacttgctcgttgataacttttgtaaaaggagtttgaaataaccttgtactcagtactcatcatggttaagc

SEQ ID NO: 279805 - DNA, 971 bp, Zea mays
ttccactgcacttccatgggttcctgacactactgctgctgtagccttgagattgttagacttggatgcttccatctcatacacccttcatccaaagttgggttcaaataaggagcaagaatctggagatttcatgaaacttccaccgagatatccttctatgaataagggcaaacaagaaatagaacagttcaggcctattggttttgatcaacaggatggaacgttgctacctaacagcaatggtcgtagaggtcggggaaggggaggtagaggaggcagcaggggaggtagatctcgtggtcgtggtggtagggttcccagaggtattggcagctcttccaggattcagttcagggatgacaatagtatgctctatgggagagccccacgaaagaatgcacgtggtggccgcggccgtggacgtggacgtggacgtggacttcgaactgttagacctcggcaaccatccgagctcagtgccagatcaattccaaaggcaaacctattgggcagttttagcatgttaagtaagacaaatcacactggcactacgcattctcccgagagctcaggtgcagaagagtgggcctttgagaggagggaatatgtgaaggatgatgagaacaatttggtctctcaatccgatgagtctgaggaaaatgtcgaacctatgaatgaggaatatggtgagcatatttcaggctatccaagagacaattccgactccagacccgtacagatgatgggtgatgggagcgacgataatgatgaggatgctgaaggagatgagggtgaggaagatggagaggactatgaagctgaagatcctggtgatgaggatgatgacgttgagatggatggggatgatgatgtcgaggtggatgaggatgatgacattgagatggatgaggatgatgacattgaagatggtgatgacgacgacggtggagatggagcagccaacggag

SEQ ID NO: 279806 - DNA, 443 bp, Zea mays
aggcgaacatcatcacgcgcagcggcgtccagtattaggcgagcagcaggtacccgaggatcagcctcctcaagtcggacgacgacttcgacgtgctcatggagaggcttgaagatcttgtcgatgccgacaagtacgacgattccaacggttcgagctcaatgtagcaacggtaatccacggaagttcggaagcttggggcggtttagatccacctctctaaattttaagaacactctagctcacattgtatgaggtgggctaaattaaaatgcatatgatcagctaggcgctgattgttctgcgaatgtagtggaacagtcaactagaagttgactgtgttcccacaataaaactacctatattggattggcgcaaattatgcggtcagtatatcattccatatttatagtacaacttacagtttgttggattatttggtt

SEQ ID NO: 279807 - DNA, 444 bp, Zea mays
cacacgcgtccggtctggaagtcactcgctgtgcgtttggtgctgttcctaagacgctgcagcctgacgaactcctatgtaaagaccttggtttggctcctccggcaaagaagagaaggctgaaaattaagaagacgtaacgttggtgctgttccaaagatgacgtaacgtttaagatgagcaatgcttcgcctcatgtacagcacaatgtggtagacatttttactatttttcttctcaaaagagacattatcatacagtccggactccggtgggatttctaatggaggtttaatgcttcttttgactatttattactgggacgtgtgaactggggattagcacattgtaaattggtgtgctagcagctagcttagagagctaaggattctttgaatagtgctgtaattgtgtgagccgattaatggatcgtaatgaactgtg

SEQ ID NO: 279808 - DNA, 606 bp, Zea mays
gcaagtgaggtggtcaggagggagatggggcttgaatggatgctcaagccagcaagcagcagccaaactgagggcaccggtgttcgtaaggttgataatgtcgagaaggatgaatctgcacatgaagagattatgcgaccgaacccaaaggaacttaacccataccttaaagataatggaaccggatacccagaagaatcaaccccatcaaatgctggcagtcagttgcttgcatcctctgttgtgggtgatggaggtgccagctggagacttaaagctttgaagcgtgcaaaggagcaagctgctcgcgaaggaagaaaacttgaggaggttgttgaagagagatggagctcattaggcgacttagctgtttcagtatcagcatcaagagctgcccattcacatgctcatttgcatgccattagaggcagaaaatctggtaatgctgacaactcagaagaacgtgttaaaagaaatccagagggtcagctggatggtagcagtggcagacgtgaatatctacgggatgtttcttctcagcaccatgccatgagaaaaccaaaacctgattctgtcccatggaaaaagagaagacagaatatatct

SEQ ID NO: 279809 - DNA, 382 bp, Zea mays
acctggagggactccaccaggggaaagatctaggttctggaggagctcactgctatcttgatctttcccctggagggaccccgccagggaggaaagatctagggttgtcttgagatcggcatgccatccaagacgcatcgagacgacgcagagtcaaagcgaggtgaagattgagtttgggaaaccacaactagggctacactacacctactactaaagcatgaatgataaagaaggtaaacggattggttcgatcggaatgtgtacatgggtactcaatcggctgtacccctttatattatatggggaggtctagactcgttactaggcgagatccaactgatttccatggatatgttaggataatcatgtgtgggataaa

SEQ ID NO: 279810 - DNA, 1616 bp, Zea mays
  unsure (1)..(1616): unsure at all n locations
actgtatgctagtattatttgaagactgggacttgtaaatttggttccaattgcaaatatcaccatcctaagcaagatggatctgtgcagtctgttatattaaacaacaatggattccctctacgtccgggtgagaaagaatgctcctactatatgaagactgggcaatgcaagtttggttctacatgtaaatttcatcatccagaatttggtggtattccggtaacccctggcatatatccagcattacaatcagcatctgtgccctccccccttacatatgcttcaaattggcaaatgggaaggtcacccgcagttcctggatcatatataccaggctcatacactccaatggtgctcccatctggaatggttccattgcaaggatggagcccttatccggcaccggtaaatcctgtggcatcaggtggagcacaacaaactgttcaagctggaccattatatggtataggacaccatggatcttccactgcaattgcttatggtggtacatacttgccatattcttcctcagctggacaatcgagcaataatcatcaagaacatggatttcctgagcgaccagggcagcctgagtgtcaatattatatgaggactggcgattgcaaatttggaactacgtgtaaatataaccatcctcgagattggagcactcctaagtccaattacatgttcagccatctatgccttccacttcgtccgggtgctcagccttgtgcgtactatgcccaaaatggatattgcagatatggagttgcatgcaaatatgatcactcaatgggtacactaggctacagttcatctgctttgccactatctgacatgccaattgctccctatcctattggcttctctgttgccacattggctccatcttcgtcttccccagaatatatttcaactaaagatccatctatcaatcatgtagtatcaccagtggcaggacccgcgcctgttggagcaatcttgccaaaaggggtattccatcatgataccattatgcaaactcagactcctacaagtgccggcagttcgagccctggtggtgggcgctgattttattgagctggtgggagtgatcctctcatcataaattttctatcacttgacacagttctgataggcctctccaatgtgaataagctgtggtctctgtagagaagctgcggcgagggtgggtttctttaccatcagaataagagagcattgataggtcacacgcaagctcgattcactagcaattttgggttgttccgttcatgtccaaaacgggaaaaaagaaggtttttgaatgtcaggttccgtagagcatattgggcgccttggtggggctcaggtccataccctcggtaaataattctcaggcaagaaaattttcgttgttatcaagaaaattttcacatgcagagttactgggttcctccacctttcaatttttctctttccttttgttttctgtatttcgtcatactgggagcaaggcgcattgtaatggataaaaaatgcttaattgaagagatcttgctgtcaatactgaaatggctctattcacgagcccgacttgccccttaaaaaaaaaaaaaaaaaaaaaanaa

SEQ ID NO: 279811 - DNA, 738 bp, Zea mays
gtttcccccctcccaagaagataagcaaacgaatttcagaatctcttaaagacaaaaaaaagttcaaaagtgaagcttgactcggtggtgaacagatctgttttgtatttgtcaacaaccactaggttaacataatctctaattcgtataaatcaagtgctgtcactgtcagcggcctcttcatcaggaagtatcaagcggaggtcctcgttgtctctgtagacttgaaccaaagctgcagccttgtacgcgaggaaacccatcatccctggaagaacctcaaaactgaaaaagctattttggaagtgatgtgataaagctgacaatccataaatcacggcaggactagctctttcatctccaaggcttatgattcctgccgtgatttatggattgtcagctttatcacatcactttcaaaatagctttttcagttttgaggttcttccagggatgatgggtttcctcgcgtacaaggctgcagctttggttcaagtctacagagataacgaggacctccgcttgatacttcctgatgaagaggccgctgacagtgacagcacttgatttatacgaattagagaatgcgagttgtgtttctgcagctctttgtaggtggatcacgtgcatcatgcctttagggaagccccttggaggcctggacaggcctcagttggcattgcacactcttctttgttcatcatggacacatgctacgctaatggatttgagaaggtc

SEQ ID NO: 279812 - DNA, 529 bp, Zea mays
gacaggttgcctgttttatggatcaaccagctcagcaagctcacaaagttgaatttggaggtaaccagattaatgcaagatgacataagttttcttggcaagctaccaacgctaagcattctgcgcctctgtgtcaatctgcctgaagatggcctgctccgtttttgtgtttttatcaatggatttgagcagcgctcttatcagaagctcaaggtacttgagcttgcttgcaggtccagcttccatgtgacatttggatcagaaacaatgaaaaaccttgatctgctgaaaattgactgctgcagtgggtggttagatcagctttctggcctgcttcatctatctgaactcaaggaagtctggctgaagggctcctacgaggatacactgaagcatggtctggaggaccagcttgcagcccacccaaacaatcctgtgctgaagctggaggaagaagcgccacgtcagtacaacctgatggatgctaacctctggaatgccattgtcttcctgtcacacattaccgttt

SEQ ID NO: 279813 - DNA, 336 bp, Zea mays
tctacgcgtccgggctgcccaaagccacctggaccgccagggcttcttatacccccatcccaacgcccaggccacaccagcgctgcgagctctctcctcgtagtcgtagcggagtcccagcccctcacgccctcccgatcgcgctcgtcggcgccctgtcgactcgagcccgcttctgggccgatcgacagcgagagcgagagtgagcgcagcggcgcgccgaggagagctctttcggtgctgtataacgacgacgacagcacgcggcagatagcacataacggcgcgcgatgtgcgacacggcggctgtcgctgctccgccgtatatgggcgttt

SEQ ID NO: 279814 - DNA, 439 bp, Zea mays
agcaatgtagggataacgagctgtcaaatattgagataattgtagccgacatcagcaagtttgagatggagcgctcttttgacaggatcgtatctatagagatgtttgagcacatgaaaaactacaagtcacttcttaagaagatatccaggtggatgaaagaggatggcctactattcgttcacctcttctgccacaaagcatttccatatcactttgaggataaaaacgatgatgactggatcacgaggtatttcttcactggaggaacaatgccaactgcaaacctacttcaaaactttcagggaggatgtaccggtggtaaatcattggcttgccattggaacccattaggctaaaactaccaaggattggcaaaaacgtatggccaaaaccatcatttcattagggctgatttccaaggaaacttatggaaagg

SEQ ID NO: 279815 - DNA, 407 bp, Zea mays
gcaggataagtctaagctcacggggttggccttcggtcctagttatcagcctgccccttcagcaaaaggaaagccatccaagttgcataaaaggaaacatcagattggttctctgtactttgacatgaagtcaaaggagatggagcttgcggagaggcgttctaagggcattcttacgaaagcagaaactcaagcaaaatatggctggtgaggagggatgtaaaagaactcaagatacctgtgtgggagtgggagctgtagaattgagatgcgtgaatttttgttgcacattttgttgtaagagttacggacttcgtaagttcaatcctgaacaaatagttcaataatgagtcaatatttttaaacttgtgttacccattaagaatcacgctcacattcaattgatg

SEQ ID NO: 279816 - DNA, 375 bp, Zea mays
cagattggttttctgtacttcgacatgaagtcgaaggagatggagcttgcagagaggcgctccaaaggcatccttacgaaagcagaaactcaagcaaaatatggctggtgagcatgtaagaaaaactcaggatacctatatgggatctgttgatttgaattggccgcggttttgttgcaactgttatggactttgtaaacccaatgcagaacacatagttcgatgatcagtcaattattgagccaacacttgtgttacccagctttcctttctctacttctactctgtttactctcaacttgtattgtgatgttggtatgaataggagtacatgtttaaaagaacgctggtaatgtactagtatgtcactgtccc

SEQ ID NO: 279817 - DNA, 495 bp, Zea mays
gtcacgagtcttgcactctttactgatttgaggatgtccagtccctccagtagcttggactctgactctagagagggggtccttgtggaactgatgtccgtcccgtctctgctggcatgctacatgttggttccatctatagttcagcaagaggaagaggctatttgattgttccggacatctggttcggacttggagagtcttctctgtatagcaaggtagtcgcaccattgttctgctgactaattgggggttgaatgcaaagtctgaagccgcatgtcatggttcgagatccaattttgttttgatagacatactgtgaaattcattgtgccggtaaagctatatgaagacaaaatggggggatggaatgcaacctgtacataccattctttgctggttggggcaggcgatgtacgaacattcatatgcagcagtgttactgctcgaatctggagttaaacatgggcagtaatgctaggcatttatcaaact

SEQ ID NO: 279818 - DNA, 423 bp, Zea mays
  unsure (1)..(423): unsure at all n locations
accacgcgtccggaaatcaccaatgaattagaggaactacagaggaagctgaaggaaatcgaagctaataaggatttagtggagggagaaaacagtaagcttcagtctgagattctcacagcacaggagaaatatagacagtctgaagcagaggttaagtgcattaaacaagtagtgtgttcagtggtggaggcgaaggaggcagctgcaagggcatctgaagctgagaaggcagaaatcatggaggaaatggacaaccttaagaggacaatcgaggagatcaaggccaacagggatttggtagagagtcagaaccaggagcctcggtcaaagagttcgagtgcagagcaagagcggacccaagtttaaggagagacttagagcggcaggacgtgaactggggcagnataggaggccaagcag

SEQ ID NO: 279819 - DNA, 544 bp, Zea mays
cagcaaacccgtgaagccgagagtgaagaaggggacaagtcagatttgtcatttgtcgcaccccccgtgactccaggccaatctgatctgcctcaacgagatatctacgctgctatctagagacagccgtgacgagttccggtcgagcgaggagcaaccaacaacatggcactctcgtttaggctggtcgccggcgttcttctggtcctggcattagctctgctctcttcgagcgcggaggagaggagcgccgggcgcgctgccactgtcagcgcgatgggctcagatcacgatcagacgtcggaagctccggtgccgccgttgaggcctcttggctcgaggaaaccggtggcggctccgccaccgccgaggccggcacatccacgggcgagtataaggccatttcctccacctcgtccgtcacagccgcagccgcagccgcagccgccgccggcaacaccacgctcgtaggtgtaggctgtgtacgtctaggcagccggcaagctctagccctctaggtctacagacgtgagaaaatggtttg

SEQ ID NO: 279820 - DNA, 254 bp, Zea mays
accacgcgtccggttctagatcgcgagcggtcgcccttttttttttttttttttttgagggattgagggggcattcctttaacaaaatccaaacaattcttaatttgcaatacatcactatcagcaagttcaacgaattccacaaaaaattggtaagatacagcatgatgttgctaattgtttcaaaaaaaacactgctttctcatccgcacgttcatgccgatgtgaattttaaggggcgggggggggggggg

SEQ ID NO: 279821 - DNA, 320 bp, Zea mays
gaacgcgtggtgcgacccgggattccctcgcgcttctctgtgtccccttcctccggcctgaggggaggaccccgcagatcccatcgaaattcacggccggcctaacccaagccggtcctccccgactcccggcgacgtccgtgtgccccctgttctcgcccctccaacccttcatgatgcttagataatatacagtgctgggttttagcactgttttgagtttttaaattgagctaaggcttcagtgttagtcttgaaagatgaacggttcaagtggttcccaagggcatcatgtcagtggagagaagaacaagtgtgtc

SEQ ID NO: 279822 - DNA, 413 bp, Zea mays
  unsure (1)..(413): unsure at all n locations
gcaagattggtaacaataacatctttgctaataatactctatttgctggtcacgtaattgttgaagattggactcacaccgcacggggcggttgttgtccatcaattttgtcctattgggtcatactccttttcttggcggaggccccgtggttgcacaagatgtgccaaaggtacatgagggttgcaggtgatagagcagaactcccttggcctaaatattgaaggccccaggcccattggattccccaacaaaaaggtccttaggttaaggaaagcttatcanaaattatttatgccaactataactagcaagagtagctttgaagacagactggctgaattggagcaggaagttgagctgtcggaatctcctgctgtgtcctgcatggtcgaatcgatccgcatgtcgtt

SEQ ID NO: 279823 - DNA, 476 bp, Zea mays
agatcgacaagctgcctccgctccagttcccgccgcaagggcaggacctcgtcgcccatctcccgccgtccatggtggcgcccttcgccaacgttgcagccgaccgggccgccgccgccgctgccgccgcgaacgcgtcggccgcgatggccgatggcggcaaacgccactgccacggaggcatcaaagggctcatgggcatgggcctcaacaattctatcggcctcgccaacgccaccatgccgctggctcacggcttgtactacacgcccggtgagtcttggaccaatggcggcaatgccgccgtccatgatcatcaggtgagccacggcggcacctcgcctcagacggtggctcaccactcgccgttctcgtctctgctgtctcttgctgctccggggccccagctcgtcttctactcgccggaaggcggccgcttcgccatgaaagaagccaccgatcatcagttcgctgtt

SEQ ID NO: 279824 - DNA, 576 bp, Zea mays
gagactccatatcaacaagtagcatattttttactaagaagaagagaagggaagattcatatttttctggcttgccaatctccattatcgaatcatggtaccaacgtgatggctatgtgaaatcaatggctgacctaattgaaaaagagctatctgccttttccaatcctgaagaggtaatgatattcttcagtgcacatggtgtgccacttacctatgttcaggatgctggagatccttacagagatcagatggaggattgtattgctttgatcatgggggagttaagatcaagaggaatcttaaatggtcacactttggcgtaccagagtcgggtggggccagttcaatggctgaagccatatactgatgaagttttagtagaacttggtcagaacggtgtgaagagcctcctggctgttccagtaagcttcgtgagcgagcacattgagacactggaagaaatagacatggagtacaaggagttggctctggaatcaggcattgagaactggggccgggtccctgctcttggatgcacttcgacgttcatctccgacttgcagatgcggttgt

SEQ ID NO: 279825 - DNA, 614 bp, Zea mays
attttactcaccaagcagcagtatagacattgggcatggtgttgtagctatgaaaggaacccagcagacccttaaatacactcagcaagggttgaacctgtgtgttgactattcagttatgccattttacaaagctggaccggtgatggatcttgttcacaaaatagtggggtaccttgattatcgaacaactctgaacaagaggcaaatggaaaatctggttgatgagcttaaaggccgacgtgtaaccgtgattcatcggaggactaatcagaagtacacagtgcaaggcttgacacccttacctgccagccagatgacctttgtggatgctgaatccggacaaacaaagtgtcttgtggagtattatgctcagaaacatggcattgtgattgagtatcagatgctgccatgcttggatttgagcaagagcaaggacaaaccgaatcatgtcccaattgagctctgcactcttcttgaaggacagaaggtttccaaaagcaaacttggataagaattctggcaggatactaaaaggaaaggctctaattcctgcatccaatcggaggaaagagattctagacttggtgaatgcttcggatggaccttgcaga

SEQ ID NO: 279826 - DNA, 1407 bp, Zea mays
aaaggaacagaaataaggtgtacaagaggaacagaaactctttggttggatcgtatatctgcaaaggttactgccttggcaggcaatacaaatttctgggctgttggctgtgaagatggttacctgcaggtttacacaaaatgtggaagacgagccatgccggcaatgatgatgggatctgcagctgtttttatagactgtgatgactgctggaaattgcttcttgtcacaagaagaggtttaatgtatatatgggacctccataacaggacctgcattttgcaggactcattggctgctttgggtgcatctccagatgagtcatcagcaaagcatgcaggtgcagtaaaggttatatctgccacattctcaagatgtggttctcccttagttgtccttgccagccgtcatgcttttctttttgacatgagcctgaagtgctggttaaggattgctgatgattgttttccagcatcaaattttgctagctcgtttagtttcccacaaggtggggagctaggcaagttgcagattgacataggcaagttcatggcgagaaagcctatttggagcagggttacagatgatgggttgcagacacgtgcccatctggagaaccaacttgcctcttctttggctttgaagtctgcacaggagtaccgtcaatgcctcctatcttatgtacgatttttagcaagagaagcagatgaatctcgtttacgtgaagtttgtgagagcttcctaggtcctccgatgggcatggttggttcggcatcacctactgatcccaaaaatctagcgtgggaccctgatgttcttggaatgaagaagcacaaacttcttaaagaagatatacttccttcgatggcgtcgaaccggaaagtgcagcggctgctcaacgagttcatggacctcctgttagaatatgaaacggatgtcacactgataccgcaacctggaacagaaggcaatgggcatggcaatgacaaggtgatgacctcgtagctacccttgacatgctcagtacagttgctggagagtggagactcaccttccgggtaggtgtgtaggattagtttggcgcggattcggagtgtccaattggagaggtgcttatgtgaatcagttagttgtgcatgtagctggtagactatttattaaggtgaccctgacccccggcaaaaagggaaagggaaggggaaaaaactgtaacgctgagtgtaacagtagaaatggaagcgaggttcgcctggtgattattgtgtcagtgtcagcagtctgtaaaaggacggatgaactcgtgtcctttttcattccaaggcagtattggccttgatagttttttagttgagggctgtgtttattctcctcggaaaaaaaaaaaaacaaaaaaaaaaaaaagaaggg

SEQ ID NO: 279827 - DNA, 592 bp, Zea mays
cccacgcgtccgcccacgcgtccgcccacgcgtccgcccacgcgtccgcggacgcgtgggcgactaggagagagcctggtgacatactacaaccaaccccttattgctggtttgttgtcattcgtggctaggacactgaactcatactggggaacacagcaatgggttgatcttgcgcggtacactgggttacagagaagcgaggaaaagcctcctgctgaggccactatgccacctgattcagcacatttggagggttgtacgacggaaggacatgattttgatgacagcagcaataacaccaacaaatcgactggtccgagctagtgatttgattacttcacagtggctgcagatcacatggcctattttcatagacaatgaaagtggctgccttcctgctcttgggatcacaaggaagcggaaatttgaggaaatattagtcacaaaaatttgttcagattctttttcagcgttaccacaagagtgcacatacagttctcgtttctattcgttagagtaagtattgttttgtacaatctacatctgtaagaactgcagcacctaaaggatgttcagcaatgagggcttt

SEQ ID NO: 279828 - DNA, 442 bp, Zea mays
atcaaatttgaggaggcttctggtgaccctgctcgtgttcaagttctgtatgagcgagctgtttcagagcttcctgtttcaagtgatatatggatgggatatacaagttacctggatagaaccctgaaggtgccttctgtagtcagaagtgtttattacagagccacaagaaattgtacatgggttggtgagttatgggtccattatttgttgtctttggagcgtattcgtgcttctgaagaagagctgcagcatgtatttgaacgggcaatacaatgtaccttttcaaccatacaagagtatttcaatatttatcttactcgagttcatggtttaagacggaggatttctgatggcttggattttcaactgattaggcagacattaacggatgctgcagaatttctctcatctcaactgagtaccacggagttactgcgct

SEQ ID NO: 279829 - DNA, 711 bp, Zea mays
tgcttcccgtttaagagatataaaactaaactatccagcattatattggtctacaagaatgcgaattgctcttggcgctgcctgtggtttggagtaccttcatgagcactgcaatcccaagatcatccaccgtgatgtcaaggctgcaaatgtcctgcttgatgggaactttgaagcagtggtaggagattttgggctggcgaagatggtagacatagggaggaatacagtaacaacaggggttcgtggaactatgggccacgtagctcctgagtacataaagacaggaaggccatcagtgaagacagatatctttggttatggtgtcatgctgttagagattgtgacaggagagcgtgcaattgcattccatcctgaccgtagaagaagcaggcgagatcctgctcactgatcaggtcaagctatggatggaagaagggcgactactcgacctagtggatcgcaatctaggtggcgtctacaaccttgaagagctggagaaggttacccagatagcacttctctgcactcacatggatcctgaacaacgccctacaatgtctgaggtggtgcagatgctggaaggagagattgtcccagcagagcggtgggaggagtggcagctggctgagctccaacgacgacaacagcatgagatgaggcaacacggcagactattcaacttcagtgaaaagtctcagaacatccagg

SEQ ID NO: 279830 - DNA, 404 bp, Zea mays
ctcagattcagaagccttcaacttcaaatccttgcattttgaagttttctgactcttgaggatggaggctattcttgaaagaccgaagtacgagtgcttgctgtttgatcttgatgacactctgtaccccttcagtgctggcatcaatctagcttgtcgcaaaaacatacaagattacatgcggcaccacctgcatattgaagaaagccaagttgcagacatgtgcctggacctgtacaaggaatatggcaccacaatggctggccttaaggcattaggctacgaatttgacaacgatgagttccatgcaactgttcatggtaccttgccatatcacaacctgaggcctgaccctgttttgaggaccctcctactttcaattccacagagaaaaatagtgttca

SEQ ID NO: 279831 - DNA, 394 bp, Zea mays
cttcttgcttctctctctggtctccttcaagccggagcccgatgccaaccccgcgccgccaccggaggacacgagcgagatcgatgtgtacttcaaccccaagccgttcgaagtccgctgcgtgatcctgcttcttccttggctcacgcactcagttttcctggtgccgatgcccatggccgcgccctccctgctccatttctcatgtgcgcgcgctcggctccagtcctgccgcgagcgccctgctcggtctccatcttcggcgcgaagcaccctgtggccgcgcggctactcctccaagtagagctccgtccatggccgccggtcgagctcctcccagccgaagcccctgctcccagcaaacgacaccatgtgcaaatgccttgctgctgct

SEQ ID NO: 279832 - DNA, 352 bp, Zea mays
cccaagaagtacattcctggaaccaagatggtattccctggactgaaaaagccacaggaacgtgctgatctcattgcatacctgaagaatgccactgtctgacgaggatgctgctgtggctctaaagatgaagagcagcgattctcttttttgcagttaaaataatgacacgaatttactttaatttgacagactggataatcaagaaagctaagaactccaggtagttctgtaacggttttgtctattgctgggggtaaacaccacccttgaagagcttttgattagtggttgaaatgtgacatccccataatacgtttgacctgacgagcatttaaacacacgtttgggc

SEQ ID NO: 279833 - DNA, 634 bp, Zea mays
gttcagcttccaaaaaggcaaagcagagcccgcaagcggagaggctacagaagggtatgggtcacctccgcggcctcaccgccgcgcggctcctcgcggcggccttcctgctctccgttgccgtcccggccgccagagcccaggaagaaaccgagcacgaggaggagttcagctacgtcgtcggcgacgagaacgggccggagcactggggcagcatcaaggcggagtggggcaactgcagcgccgggcggatgcagtcccccatcgacctctcccacgagcgcgtctcgctggtgcggtccctcggctacctcacccactcctaccgccccgccgaggccgccatcgccaaccgcggccacgacatcatggtgaggttcaagggcgacgccggcttcctggtgatcaacggcacggcgtactacctgaagcagatgcactggcactcgcccaccgagcacaccgtcgacggccgcaggtacgacatggagctgcacctggtgcacgagagctcggcgaacaaggcggcggtgatcggcatgctctacgagatcggcgccgaggacccgttcctgcaagcgctggagccgtccatccaccggatcgccgacagcaggaccgggaggaggccatc

SEQ ID NO: 279834 - DNA, 877 bp, Zea mays
ggaagaactcgagctgcatactgctgtgcagactgcagtacagcgttcaagagaattgaatggggtcaagaaagggtctttcttttttggcaatccctggaaatacttacgttattaggaacggatggcatctctgtagctgcgctgcagtgtatctacatcaatatggcaatgcttgtctggacccgaatgctacatctacatgtaaatgcagagttgcaggtagatagcaacccctctcccctgagatgccaactccgactcctgtcctactgtgtggactgatctggacagcaagcaatattcaatcagcagtcaattcctaggatgtcgtaaggagatgagctcgccagacagtccatcacactgcaggcttgattgcatcttcacaggacgtggacttgtgggcacatgctccacgggcaacggttcggcatcctcctggcgttcttgtggctggcagcagccgcgaggatctgtgtggagccctgcgctgggctcgttgcaagatatgccagcctctcatcctcagactggaggacgagggcggggttccctctccaggctttttccatgatgttacaggcttacagcattcagagtgcatgttacactcacggccctatcagcacatgctgtgggcagccggtgatgataggatcagatgctcatatctcctgcggttttctgtctaccgcatttggattggatttggaccccccctgtactgtacttcctccttgctcccctgctgcttggcgctttgtccatgtgcctggttggaattgctactatacttttttggagggcaattgtttcaccggaacatgtagcgtggacgtgtggtaataaccattgaattgatgcctttactgtc

SEQ ID NO: 279835 - DNA, 447 bp, Zea mays
cccactcgttcgcacatcaacaacaaaaagatggcagcgccacctctcggcctcgcttgcagggtcgccggcgccttcaccaccccggccgtggcgcattccggcttcctcccccgacaccttgcccgtggtctcctcccttcaaagagatggagcggggtggtgaggatgggggcggtggtcggaggaggaaaggagggagaagatgacgaggagctgagacagaccaaggagcaggctgccgccaggaggcggtgggaagccctgattagggagcagaaaattaaaacccttacaccgagggaagctggctatacgttcaaactgacggacaaggttcttttggatgttaggccttcaaacgagcgtcaaaaggcttgggtgaaaggctctacctggattcctatatttgatgtggatgcatccgttgatctgggcggacttaac

SEQ ID NO: 279836 - DNA, 593 bp, Zea mays
  unsure (1)..(593): unsure at all n locations
ccaaacttgttttgatgatcagcttctagggagccgtatcaagaatgaaattattgagaagaggcagttagttcgtgctctattgaataatgaggataacaagccatcttcatatgagcctttgccttccatgtgcgtggcttgcggagctctctacttttgaagtctggataaccatgccaaaatgggcagcacaggttttgaaacatcttgcgccagaaatctcctacagaagcttggttgcacttggaattgcttgggtaaatggtacaccagtgtcctcatttgataggcaggatgcagaccggcttcttttcttttgctctaaccagtgcggagatcaagctattcaaaatggctcatatgctcatgtatccagctggtcagcaccccttaccaaggatagaaccactggaagtctcgagtcaaaacagatgtcatttggtgcaaaaggagttgtaggggataatacgatctccctatcatcattgaaaccaaggttaaagcctgcaacaatgagaccccttcnccactctcgcaagcaacaaatgcatccctttatggggtttcctcagtccatcattcacgatgct

SEQ ID NO: 279837 - DNA, 418 bp, Zea mays
cacgcatagacacggtagcagtagcgggcgctcgaatctcaccggccccatctctaggctctagctccatcactcggagaagataagacccagagtgtcgcctggtccatctccaatccagcaaggcgggcagacgagccgagagtgagacaaccatggcgtctctggccctccgccccgtcatcccggccaccaccgcttcatccaggaccctcacgatcgtcgttggctcccgctcctgccacgctgccacactccaccgtggctttcgctcgcggcgcctcatcacctgcaaggcggagccgagcggcggcaacagcaccctcgagctgggcgcaggggccgcagggctggcatcgagcgcggtcgtggcgtggtccctctacacgctgaacacgaccgcgtgcggcctgcctcc

SEQ ID NO: 279838 - DNA, 601 bp, Zea mays
gtcggaagctctcaaggacatggctattgctgagctgagcaagggactaaagagacaggacgagaggttgagcagtatggagaaacaacttgagcagaagaatctagaagtgaaaagactacataacgagcgcacagaagcattgtccgcacagttcgctgcagaggcaacacttcgaaggatccactcttctaaaaaagctgaggaatcagttccattcgacgccatcatagcgcccttggagtcagacataagaaaatacagacatgagattgcagtgctacaagatgacaagaaggcactagaacgacatctaaagttgaaggaggtggcgcttgttcaagcaggcaacattttgcacaccgcgcttgaaagggcactcatagtagaggatgttcagaatcagaacattgaattgaagaagcatatggagatataccatgaagagaataaattgttagagaaggctaacagacagaaggtgctagaggttgagaagctcacacaaacaattaatgagcttgaagagtccattctcgcaaccggtgaggttgccaatgtggtccacttctaccagaatcaagctacaaagttgaatgag

SEQ ID NO: 279839 - DNA, 582 bp, Zea mays
  unsure (1)..(582): unsure at all n locations
cgttctcttttgcggacgcgtgggcggacgcgtgggttccttctctctcccaccctcctcactagctctatctagctgagtgaactgaacagctcactggctcgtcttagctaagctcagctgtaaagctaaggttcggagtagctagcgtggtggccggagagtgtagcgagcggcgttcagctcaccgggggctgctgggtgagtgagggagctagcgtcgtcgtgagagcgctccacgatgattacggggacggacttctaccacgtcatgacggccgtggtgccgctgtacgtggcgatgatcctggcctacgggtcggtgcggtggtggcgcatcttctcgccggaccagtgctccgggatcaaccgcttcgtggcgctcttcgcggtgccgctgctgtccttccacttcatctccaccaacaacccctacaccatgaacctgcgcttcatcgccgccgacacgctgcagaagctcatggtgctggccatgctcaccgcgtggagccacctcagccgccggggcagcctggagtggaccatcacgctcttctccctctccacgctgcncaacacgct

SEQ ID NO: 279840 - DNA, 900 bp, Zea mays
atcgcaggagcagaaaagaaaccaatttttttttgttttctcttacagaagagaacaaacaaaggcttgagagcggtgtacagctagcgcctgcgtcttgacgatacgcgttagcaagtagcaagactcaagactcaagagggatcccttagcaaaaccggtctcgcaaagggacacaattccctaggaaccgcacaaaagcttcctgcaatccggcggctttggcgttgaacctccccccttgatcagtagtagaatcggctgctaaagatttctatttttatttttttctcggttcggaaggtgccgtgcggcgagcgaaataaatcgctgcggcgagaatcctgtggagatgagttgcgttaggtggcaggaccactcataaattctgcctgttcattcagatctgctccgtgctgtgcttcttctgctgctgccttgcagcgaccagcgagaagaaatccattcgctaggccggcccacccacccacgatagcggttgtggtcactcatgcgtcgtcgccggagtccaatctcgccgctcggcgtttcttgacttttctggtcggagtttccatttcctcctggaggagattatttctttctcctctttcaccccgagaatctcgtctcgggtcgcgctggtttgattcctcctcgcctgagtccaccgctttcgcttccagtggagaagcttgtccgtgaagcagcgctcgtctcctgcttaagatttcttccttctgccttggtttctttgctcgcgcccgccgatttgcttgctgccctgtccacactcctccgttcgtgtctcgcggctttccgcactcgttttcccggtctcggatttcgttaccaatgggcaacgcgttcgcgtgcatgccgcgcaaggagcagcgaggc

SEQ ID NO: 279841 - DNA, 498 bp, Zea mays
gtggctggttccttcggacttccctctgaacgacgacgagttcggccagagcagcgctgagagctacggcaacatgctgcagaacaaggctttcggtggtggtacggaccgatctttggttggcaacagactccctccctatgtgtacctccacctggacggcaactatggtttccacgacaaactcttcttctgcgaggacgaccagcagttcctgcgaggtgttccgtggctggtcatgaggacggacatgtacttcgtgccgtccctgttcctcgttccagctttccaggacgagctcggcaggctgtttcctgagaaagacaccgtcttccatcacttggcgcgctatcttttccatccgacaaatggcgtctggtattcggttacaagatgcttcaggtcctacctggccaaagcggaaaaaagggtcggaattcagatcaggatatatgaaaccaaaggtatattgcagagaaatggcccgttcccacacat

SEQ ID NO: 279842 - DNA, 428 bp, Zea mays
gggaagctatcttactaaagcagataagtgggtacaaatcaaggccaagcaagacgaagacaaatttgcagcaaggctgcattctttcagtggcaattctgtgaagcccaaaggttcaaagtcatcatgtgagaaaattgaaatggcgagatctcttaatctaatcggtgcaccttggaagaacaaagctttaagatctgatgagcacagacctgtggtccgtccagaagtaattctctgtgttgaaatttatcagaagacatatgcctctgttaagtcccaggaacttcttttgctgggaagccaattccttactgatctgagggacaacatttattgtttgactgataaggtgatgaaggtggctgggcaacacgatcattctgggtattttcttattgaggacacgttctacaatgatacgagac

SEQ ID NO: 279843 - DNA, 417 bp, Zea mays
ctgaatggcgacatcctccttcccatcaaatctctcctctccatttgcatctcctcctcgtgcgccccgtgcccccatcaaatcgcctcgccccgtgccccctgctcaaaaccctagccctgccgcagccgtcctccatggctgcggatttccgcacccctgaccgcctcctgcccgccgcaactgaggagccgacgaccccgcagggccaccctcccaatccggtgctcagcacccccaccgtccccgacgccacccacgatggcctccgcttctggcagtacatgctcgccggctccgtcgccggcgtcgtcgagcacacggcgatgttccccgtcgacaccctcaagacccacatgcaggccagcacgccgccctgccgcccgacgctatctctgagggcggccttgcgtaacg

SEQ ID NO: 279844 - DNA, 711 bp, Zea mays
atcctgcggaagaagtttctaacgggctacatcccaccaccgcacgatgtcggcagcggcgcgagtgctgccgaagcgcggtgaccttcgtgacgggcaacgccaagaagctggaggaggtccgcgccatcctcgggtcttccgtcccattccagtcgctcaagctcgacctgcctgaactgcaaggggagccagagtacatatccaaagagaaagcacgaatcgctgcatctcaggtgaatgggcctgtactggtggaggacacctgcctatgttttaatgcgctcaaaggcctaccaggaccctacataaagtggtttcttgagaagattgggcatgaaggtttaaataatctgttaaaagcttatgaagataaatcagcgtttgctatgtgcatcttctctcttgctcttggacctggagaggaaccaatcacatttgttggcaaaactgcgggaaagatcgtgcctgctagaggccctaattattttgggtgggatcctgtgttccagccagatggttttgaacaaacatatgctgagatgcccaagtcagtgaagaacgacatatctcacagagggaaagctcttgctctggtgaaagaacacttcgcatctgctagctatacagttcagagcaacgactcagcttaaagttgacttggatcctagacgatgaactgcattctggaatgaaactgactctacttta

SEQ ID NO: 279845 - DNA, 752 bp, Zea mays
  unsure (1)..(752): unsure at all n locations
ggaaatttaatatggtcaacaggtctctctcgaaattaaagcaggtgatcgagtctgttcaaggctccgatgcggcatttaatctcacatctatcacaggtcctcttcctatacctgttggcccttcaccagagtctctcaatgtagagaaattaactcaaagtaaagtggcagaactttcgaatcttgctgttgatgttgacagagattctttgcagaagtcgcttgaaaatgatgaccattttgatatagtcatggcccagcagggatttatagacaataacaatgacgctcagcttgaagctgacaaagcttctcactcgagaagttcatctggagagggcagcataaattcacgcacttcagaaggctcatgccagggaagtccagcaaaccaaacatttgtttgcaagccaatcgcttcaacgttcgcagaacctcaacttaatccagaggagttcaacaaagagcctttccaagaaccacaactaccactttccaggatgctcattgaagattctggtagctccaaagatttgaagaatctcttcacttcaacatcggaccaaccatttttggcccctcccaacaacttggtgccaatgaagcattcagggtctgtaacgataaaggcgagttttaaggaagatattgtgaggttccgtttcccatgctcaggtggtgttattgtattgaaagaggaggtancgaagaggctaaggatggatgttggcacgttcgatatcaagtat

SEQ ID NO: 279846 - DNA, 389 bp, Zea mays
ttgttcgcgtgggtttcgatctgtctaaagatgatgtgacacatactggcaaaatactaactactgatgatgcattaatggggttagattatgatcctggaaatggattaggagctactaatggagaaaatgactatgaatcgggtctgctggaatctgatcctgttaagcatcacaatacttactgcccatgggtgaacgggaatgttgcagcggctcgctgctacaacatcgcctccagctcaagtagttcagcgccctctggttggcagctaacaatagatgcagtcgacacgtaccaatcacttggtcaagcccaaaatcaaataatgcaatctgattctgcagcttcattatatatgcaggatgaccaaataactcataaccgc

SEQ ID NO: 279847 - DNA, 618 bp, Zea mays
cccacgcgtccgagtgtgtgatgggatgacttatgaagagataaagaaaatcatgcccgaggaatttgagtcacgaaagaaggacaagctaagataccgctacccccgtggagaatcttacctcgatgtgatacagaggctggaacccgtcatcatcgagctagaacgccagcgtgcaccagtggttgtcatatctcatcaggctgtactgcgagcactgtatgcatatttcgcggaccgtcctttgagagaagttccagagatagagatgccactacacaccataatcgagatacaaatgggcgtcacgggtgtggaagagaagaggtacaaactcatggactgaatgaatacataaaagcagctggttggctgtttcatacagcaagtacacataacacagaagccttttcccttctctctctctccacacggtgttcagtgtaatttctttggaaaaaagacatgttgaacattgtaaaggaaaaactaataaggaactgtaaaaatggcatgcttactgtaacgaataaggaatacagactgggggtctccaatgcttattcagaaacatattccgtcaaagaacatagcgaaatgctgcagaagaaacgcccg

SEQ ID NO: 279848 - DNA, 416 bp, Zea mays
  unsure (1)..(416): unsure at all n locations
ggaggctcatcaatcgcgactaattctcgcagtcgcagagacaagcaatcatcagacatgagaacccaggcgctgttcttcctcgcactcgcacttctcggcgccgtgctcgcgcagtccagcaacaggcaccaccaccactaccaccacgcccatgtccaaggcaaagggcagggagccggaggaggaggaggggagctggcgagccgggcgaaggcggcggcgcgcgcgtggccgtgctgtgacagctgcggcgggtgcaccagatcggagccgccgcggtgccagtgcctggacgcggcgccccgcgggtgccacccggcctgcagggactgcgtcaagtccagcctcagcgccgnaccgccgggtgttacagttgcatggacgcgtccccaactttctgcagcgccgctgca

SEQ ID NO: 279849 - DNA, 509 bp, Zea mays
  unsure (1)..(509): unsure at all n locations
gtagaattcacaagaatgtcaaacttgcggagaaagtanncagacaagtctttaagctggaacctgagaacacagggtactatgttcttcttgccaacatctatgctgaggctgagagatgggaggctgtcaagaagctcaagaacaagattggtggtcgagggctccgtgagaacactggctacagttggatcgaggtcagaggcaaggttcatgtctttattgcacataaccggaatcacccagactggaacaggattgcagagtttctggatgatgttgccagaaggatgcggcaagaaggccatgatcctaagaaaaagtatgctctgatgggtgccgatgatgcagtgcatgacgaggcactatgtgggcacagctcaaagctccccgtcccattcggtgtgctgaatttaccggagggacggccaattcgtgtgacaaaaaactcaaaagtctgcagccactgccatgaggctgccaagttcatatcgaagatgtgcaacaga

SEQ ID NO: 279850 - DNA, 472 bp, Zea mays
gctgcagcgtgccggtacggaattggagtttcgacccacacgtacgagcacttgttctctcaaccaacggggcgcgcacacgcacactgccaacgaggcaccaagaaggcaggaagggatggagtactgctaccagtacaacagcgtcagcaacgcggagaaggagaagaggccgccgctgaggaggggcggcgtcaagctccagatcgtgaagaccctcagcaacctcgtcgtggcgcccagcaacggcagcgactccaagcaagcggaccgcaacagcttcacaagggagcgaagctacaactgaaacgaactgtatcttcagtatttggatacagatgtcgaccttgtgtctgaagaactccgctttgggactcgagaggttttcttagcttgttggacttccttgtttgcttggtccactagtgatgaaatggaactgtatgataagttcgttctaaaaaaaaattat

SEQ ID NO: 279851 - DNA, 870 bp, Zea mays
cggacagctgcaacctgatcctgacgatcatgttggtgactcaaacatcaatgcgctgcacagggctgaagaaccagtgcgagccctctgttcacgactccagaagtccattaagatgcttcggttgcacagcaacacctgtagcaggcagagtctgctattcaaactctctttaagattatcaagaatgttatagagcatccaaatgacattaagtatacgcagcattgcgtaagtccaatccacatttccaaaggagcttagcaaactataaagctgcaatggaggttcttgaattgattggtttctgcgaggatgtaatctcagatgaggttgggcgtgctgagacttacctggtattgaaaaggaatgatcctggattgctatggctggcaaagtcctcccttgaggtctctctggcttgataaaatttgatacatcattcatggttgctatttttcgtcgtgaatatatttgattgtttgtacaagagagctagctattggcatgcaccattctcctgtatggggactgttgtatacttgcatatgaatacccaagaatgtaatgccacattcaactttctgctctttgtttgcgttatctgtgccttcgtcttggatggctttcactcccatagtcccatgtgatgcacaacaatgtaccgagtttgactgattcatgagttcattgtacttgaatttccagattatgctgcgtttgaagcagacagaaggagcatttttttttcactgcgagtttcctatattccatctcttctgctcttgataagcagacacttggtatttgtaatgcaattttttccagtgttgcttgggactaaaaaaaaaaaaaaagggcggccgctct

SEQ ID NO: 279852 - DNA, 752 bp, Zea mays
aggacgcgtgggctgaggtaccattcactgttgatggaccgaatggagttcttcgacatctcgaacacctgatagagaccaagggatttgctctggtttgcgttgctgaaggagcaggacaggaatactttcaaaagtcaaatgcaactgatgcatcagggaacatggttcttagtgacattggtgtgcaccttcagcagaagatcaagtcccattttaaggacataggagtccattctgatgtcaagtatattgatccaacatacatgctccgcgctgtgcgagccaatgcatccgatgccatcctgtgcaccgtgcttggtcagaatgctgttcatggtgcctttgcgggttttagcggcatcacaaccggggtgtgcaacacacacaaatgtgtacttgccgataccggaagtgatcaaatccacgaggtttattgatccaaacagtcggatgtggcaccggtgcctgacctcaaccgggcaaccagacttccattgatcaattattaaggaagcttgtagtagcatccgagtgtaaaggaaggttgtgtatagtatagcgaaagggacctaattgctttgtcaggccttgtctagcagcatatggttctgcaaaacattgttttgcattgtagataggctaagtttgaaataagaggtgagataggcaggatagccttagtatggcaaaatgatcatcttgaaggattcatgagtgaatgatagctaataccctatttacgcttgatc

SEQ ID NO: 279853 - DNA, 387 bp, Zea mays
accacgcgtccgcggacgcgtgggcctcacttcgcagtggcagttgtgaagagatcatgattcaagtttggcatcgccaattctttacccttctcaatcttgatagtgatagcggatgattcttgttcccgtgttgctcacgtgtttattggttctccagagcgcaagcaaccccatgtgttttaggctgtacccaaaccccattagcaattttgtaggcaagataagaaaaaaaaaacatatgctggggaaaaaagtcctttcccctggcattattttgtaagcaaatttttttagctccctttgttatgcgaaccatgattatccagatgtgtaatttgagtcgtaattcgttactggtatgccaaggacgccaattttctcttt

SEQ ID NO: 279854 - DNA, 321 bp, Zea mays
tagacatactcgagccgctcgcttccgctggcaagaaattgatctcatgccaagagcgattgctttgcatggacgtggtgatcctattgtgctgatttgcctcgctcatgtcaccaacttcaatgttggttcctttatctggtggtgttatttatgtttgattggtgaccctgagcgtattttggctgttagagcagcgttaaattcaacgtagcaacgatgggtggaatctgcgatagtttggtcttgtgtagagtttgaattaaaagttgttacttggctgattgttccaaaaaataattgacaaacgccatggtcttc

SEQ ID NO: 279855 - DNA, 600 bp, Zea mays
  unsure (1)..(600): unsure at all n locations
aatacttcagtctagacactagatacagtaagccttagcgcaccaacagaggatacttcaactatgtctgcctcgcggagctcctctcccaactccatgtcacagtggagccagaaagagaacaagatgtttgaagaggcactcgcctactatggcgagggcacacccaaccggtgggacaaggtgtccagcgccatgggaggcatcaagtctgccgaggaggtgcgctgccactatgaaaatcttgattacgacgtcaagatgattgagtcaggcaatgtgccgtaccccaagtacaagacacagggattctggacccgaggttaaaaaaatgttggaggctcaaagaggcagaaaacaaagctctacggatccaagaaggaaccaaaggaaatccagctctggttggagaataaaatgatgaaccagtgtgtatatgtcaatatgtgtatagtatagtttatgatcaagtttatgtctgtctacctgtggttgtaggatcctagtgtacataagattgataaccacatgtattcaattgtcccttgaactaaagttatgganggtgtaaagtctaaaagtcatgtatttatgcanact

SEQ ID NO: 279856 - DNA, 1320 bp, Zea mays
tctgtagtgacagcagcaaaagtcgatcaccagatgtgtttgcatcaccagtgtctcaggataaaactggatacagtggagctattgtaaaatcaagcaatgagctagcaaaaactacacctgctggggagtaccttacgtctgcactaatggattttgatcctgaccagtttgagggatttgcagcaatagctgatggtgctaataagcttttgatgctggtcttggctgcagttatcaaagctggtgcagctagggagcatgagatacttgccgagatccgtgatgctgtgttttcattcattcgaaagatggaaccgaaaaaagttatggatactatgttagtttcaagagtcaagatattatacatcagatctttgcttgctaaatcacctgaactacagtccatcaaggtctctccagttgagcgtttcttggagaaatcaaatactggtcgaagtagaagttctagtaggggaagtagtcctggcagatctcctgttcaccaccatggttatggttcccgaactgcgcttgttgatgaacatgtgcatggtttcaaggtgaacattaaacaggaaaagaaatcaaaattctcctcaattgttctgaagcttcgtggtatcgaggaggagacatggagacagcatgttactggagggaagctccgcgaaattactgaggaagctaaggccttttcaattggaaacaaggctttagctgctctctttgttcacacgccagctggtgaattacagcgccaaattcgtgcatggcttgctgaaaactttgagtttctatctgtaactggtgcggatgctgctggaggagccgcaggacagcttgaactgctgtcaaccgctattatggatggttggatggctggtcttggtacggcgcagccccctaccactgatgctttaggccagcttttatcagaatacacaaagcgtgtttacacatctcaactacaacacttgaaggacatagctggcacattggcaacggaggaggctgatgatcctgcacatgttagtaaactccgctctgctctggagtctgtggatcacaaaaggagaaagatcatgcaacaaatgcgaactgacactgccttgttaacaaaagaagaaggtggctcaccaattcgcaatcctcctactgccgcggaggatgcacgattagcatctctcatatctctagataacatcttgaagcaagtcaaggaagtaattagacaaagctctacaggacctatgagaaaatcaaaaaggaaagctttgctagagtcattggatgacctcttgacacagatgccctctc

SEQ ID NO: 279857 - DNA, 313 bp, Zea mays
ggactagttcaggtgatttagcaagcaaagatctgatgtataatatcttgactcttgaaactaacatagtatccatagtcaagatattatacatcagatctttgcttgctaaatcacctgaactacagtccatcaaggtctctccagttgagcgtttcttggagaaatcaaatactggtcgaagtagaagttctagtaggggaagtagtcttggcagatctcctgttcaccaccatggttatggttcccgaactgcgcttgttgatgaacatgtgcatggtttcaaggtgaacattaaacaggaaaagaaatc

SEQ ID NO: 279858 - DNA, 528 bp, Zea mays
gtttcgttggattatcagttagactgtcttgattatggcaatgagaaatggcaacatgctgaccttgactatgaaacattcaaacagcttcagagtgaaagaggtgaaagtattctcacgtttgccatagacatgacactgaaatcaaccaaagccttggtgcagccaagtaacatgccagatggccttaacttttggaggtcgaagttactatgggcctcgcgtgtgctaccaatgccacttgttgggctactcgtcatcactgggctgtgtctgccagtggaaaagcaagatgggtttccagagctggaggcattgtccaggctagattttggagctgcactgaagattttcttggcaaagcaactgacatctgaattcacagctgtgcctacacccgttgaggagaaatcagttatcattggggagaggaacagagttgctgccgagaagatccgggaagcaataaacggtgggtacaagagaatagcggtcctctacggcggcggacacatgccagacctggga

SEQ ID NO: 279859 - DNA, 492 bp, Zea mays
gcaatctttccatgttggaaagaaccacaatttccgtgtgccaacctgtgatcgtagcccgggtaaagtaagcacaggttatcattctgacttgaacagccaagtattgcaaagtaggcaccccgatccgggagcccaaagggcccggcattgtgaggtcaatgcagctgggagcagcacggagtgtatgtttacagggaggcgctactacaccggagctcagctgccgccgaatctcccaagaacaaaatctgtacccctgaatgctgtcgacgcctgaaatgctttcttgccatgtaaatttttatagagtgtacatttgttttggttccttttgtatccattatgaaacatcgttgttgggcaggagagactggatgtggattctggctgagctgtttgtaaattttccatcttgtgaatccagagaggttaggctgtacaagtgcaatctacatcatttgccttcatatagcaaagagcctttctttc

SEQ ID NO: 279860 - DNA, 462 bp, Zea mays
ggagcagagagaagcgcaggagaggggaccgctgaccaccgagggagccgggcaagatgttcgacagtctgctcaactccaagttctacaacaaatgcaagcacgcgatcaagtgcacccggacccggctggatctgctgcggcggaagaagcaagcgatggtcaagttcctcaagaaggacgtcgctgacctcctcaccagcggccttgaatcgcacgccttcgcacggatggaagggctgatcattgagatgaaccaagcatcgtgctatgatacaatagaagagtactgcgaatatattgtgaagcagctcaaccacatgcagaaagagaggtaactgttggttcttcaagtgatgcagtcttgtttggatagctataacattatttttcttgttcttttgtgctcaaggcatgccatactcctgttctcatgcatatgtcgcgtttaagattgaaaat

SEQ ID NO: 279861 - DNA, 413 bp, Zea mays
ataggaataggagcgggggagtccgaggataggcaactcattgcttctgaatctctctctcctcgtcgcgacgagatcctctgcatctctacttccccggggaagtagctgctggcgtgtgtatctgactctcctcatcccgagttcttcactttcacgcatggtcgccgtgaagcagctcaccggccctgccagacccgctcacacgtgcgctgctcatgctcaccagctgctcagtgctcgatacgatcaccgtggcgcgtctcaagctgaattaccggaccggatttcgccatccaacgcttccacgttctgcacgagcatgtactcgtcgtcggcggcggattcctccaagtcgtgccggcaggcaggcgctctgccgttcctggcccatcctcctaaacgtgagcagc

SEQ ID NO: 279862 - DNA, 397 bp, Zea mays
gaacagttgaagctactagcgtgtagctagggaagagaagcgcgcgagtagctagcagacgtacgtaggcagaagcctagctgggtttgaagggccccgatcgatgatcccctacgcgactgcggcggaggcggagggagcactggggcgcaccatgacgtgggctgagacagcatggtacgagtactcggcggtgatgccagattcctggctgcactgccacaccacatttatcctgttcgtcatctacagcatcgccccgctgcccctgctactcctagagcagttcgctccgtccgtcgtgctgccgtacaagctgcagccccgggtacggctgcccccggcagcctccctcagctgctacatggacgcggcctgcatctttccgctcgccgtt

SEQ ID NO: 279863 - DNA, 387 bp, Zea mays
cccacgcgtccgaaaaaagatgaaaaccaaacgaacatacacagatacgagcacagcagcaacgatatccaaagctagcagctcatcagataggcaaacaccaagaagctaagctagcgcgccatgcagacgccgaccatgtcgacgtccatggccaccacggcgccagcgaagccccccgcgccgccgcggcaatgctgcaggtacctcctcctcccctccaccggccaccgccggagcgtggcggcatggtctgccaaaaagaagaacccgtggctggacccgttcgacgatgggcccgacgaggagttcgattaccagggcatgttctccggcgggaagcaggaggaagacccgctgccgcccgaggaccctgagaatccgtac

SEQ ID NO: 279864 - DNA, 417 bp, Zea mays
agcttgcatcataaacaagtcaacgttcgattacatcgacagtaatgcagcgcgggctctggcttatgagtatctcaggttttcgcccagacaccctttcacatccgacatccgggcatggatgtcgttacttttcctgtgcaaaggggcgaacaccattgaggtgtttggtatcgagctagatttctgtgacgccgcgaagtcagagaaagaaatcttgtggctcctagacatgcttgattggaaatagaagttccttatcccctttggggtttgacacatgttaagcctgttcatggttagtcgttcctttcctgttggaccatgttcgctactactgaactacataatctcctgagaaaatgtaataaatgtcacctgctactccattttgctaacaaggcgaggttattttgt

SEQ ID NO: 279865 - DNA, 623 bp, Zea mays
tccacgcgtccggttcattgcccgcatcagatggaagggcgccccgatctgcctcacctccatcaatgaggtgtctgcctttcttgcatggagacgccaaagagaaggaaccagtcactaagtcggcctctgtacggtccatgaacacacatcaacggagcgtgatgtccgctccggttcagacttcacctccttgaatgtttccgacatgagcgccgagtcgataaggaggacgcagtaccccagcttcactgaccgcccgtctaacctgagggtgttctcctttgctgaattgaagagtgccaccctcaacttcagccggtctctcatggttggcgagggtggctttggctgtgtgtacaggggtgtcatcaagacctccgacgaaccgaacgaacgaatcgagatcgctgttaagcagttgaatcgtaaaggacttcaggggcagaaggagtggttaacagagatgaatgtgcttggaattgtggaccatccaaacctagttaaacttataggctactgtgctgatgatgatgagaggggagtacaacggcttttagtgtacgaatatatgcctaatggaagtgtggatgatcacttgtcgagtaggtcaacttctactc

SEQ ID NO: 279866 - DNA, 555 bp, Zea mays
cataccatccatactcactactactactagctactcatcgaccaatctccacgtgcatcgttccacagcttgcagcgcggcttgttgacagttgacacacacacacacagaggagagagagagagagagagagaagtcaattgagagggacgacagagtgagttagcttgcattggacaaagagagccaaaccagaaccaaaagcaagcaaggagacattgttacttaatggagcgcgtgatgaagatcgcgtcggagcgcgcggtggtggtgttcactctgagcagctgctgcatgtgccacacggtgactaggctgatggcggacctgggcgtgaacgcgctggtgcacgagctggacagcgaccccaggggcaaggacatggagcgcgcgctgctcaagatgctgggagggaggggccccgtcgtccccgccgtcttcataggcggcaagcttgtcggcggaactaacagggtcatgtcgctccacctcgccggcgagctcgtgcccatgctcaagagcgccggtgcgctctggttgtagagagagacctgc

SEQ ID NO: 279867 - DNA, 479 bp, Zea mays
actagttctagatcgcgagcggccgctcgccggccatatagtccacacagcaggcagagagttcgagagctagctagagagagagagagagggacaacgactaaggcaagctagcgccccgtgggcggacgcgtgggccgtgtgatgcagctggcgtcggagcgtgcggtggttgtgttcacgctgagcagctgctgcatgtgccacacggtgacgcagctgatggcggacctgagcgtgaacgcgctggtgcacgagctggacagcgaccccaggggcaaggacatggagcgcgcgctgctcaagatgctgggagggagggcgcccgctgtccccgccgtcttcatcggcggcaagctcgtcggcggcaccaacaatgtcatgtcgctccacctcggcggagagctcgtgcccatgctcatgaacgctggcgccctctgggtctagacaccagggcatcgcgcgcgcgcgtactcgtc

SEQ ID NO: 279868 - DNA, 337 bp, Zea mays
acagccttatctccccgcccagcccctctctctggcgagcttgacctggcatccggctcgagcggtcctcctccgctgccaatcgttggaccttgcccctgctgcgacgtcggcggctccccacaccctctcctccctggctcctgagcttcaaccttggggcttgtgccctctctgctcgccggcgacctgcgtcttctccagccaagccatagccaagctcctctccatagccgacgcccttgccctcctgctcgccatggctggccatcggatgccgcacagcaacctcgccgtttccgagcccgagcccgccatggagctcacggcgcctcct

SEQ ID NO: 279869 - DNA, 658 bp, Zea mays
  unsure (1)..(658): unsure at all n locations
aaanccggtcgtgtcggcgcccgcggcggcaggtcgattccgtgttggtcgcagacttgtaggcaccttcggctcccctcctgccggatgccaatggcctggtcaagcctgttaaaaggcatgtgtggtacgtaatgagagactatttatgattggtggacatgagggagactttatgactaaaccaggatcacctgtttttaaatgttggtggaactacagagaagcatgccatcaccaagaagctgattcttgttggtgaagtcttcccttttgatttggaaccattgacctggtcagtcattgggcgcatgcctttccgaatcaagacatccttatctaggtactgactactgagaggggaggggggctctgttttacttctgggcagcgagatcatgggcctgacaatccagctccaaagaaagttgttgggagtctgggactatgtggagaacgaggctgcacttgtgatggcagaagttgtgacagtttatttcccctaaaaattgtagatttgcatctgatttcctgttcaacagctaggttcctttcagagaagagagttgcttgttttgattcccacatccggaatctgaaagtcagagatgtctccaacaaccagaagatatggacgtaagcaactaccaaagatcat

SEQ ID NO: 279870 - DNA, 922 bp, Zea mays
gatgcacgaatcgctagggtttcactttactcgtggacgttgctattccattctctactttattattttgtcacaacattagcatttttgcattcttacccacagtgaaatatatgtaatcttttccttcccatttagaacatgcacacggtaaggaagcaatgctatgcttgtttttgcagaaccccgaccacatccgtgctgttttggcatgctgctgcttctgtagcttctgcatcactagatgtctctgaagaacatgagaatgtctccagaccagcagcctttccagcttcaaatctcgctctcctctcaacagcctctcgcaccctctgcgcaaactcttcatcagaaccagtcagcatgtaacgcagcttcatgttgatcctgttcaccaccaaagttcggtgccgaggctctatcctgtcctccagggagtaactgaagaaccttggaaactcaatgagatctttcagtggccgcaccattacacgcctcaagtactggtattttggtctcaggatatccacattgtacctgagaagcgttgggaagtcggcaatcatctgacccagcacaaagtggtagatgcccagcgaccggaagtacttgacactaacttctagcttatgtgcgatactacagcccaagagctgtggatccaaggcgataacctttccgatgtcatcctgttttactccacctttcgtcagcaggaatataaccactgggcgtattttcttgtacaagctataagttaatacgaggaggaaacttcgcatgcacattgccgattgcatcactcctcacaccaatatcaattaaaaactgcacctttggtgcaatcactgtctccaaatcaagacagaatattgcaggttggaccatcaacattcgcttcatgccatcccgtgaaatgtta

SEQ ID NO: 279871 - DNA, 426 bp, Zea mays
tatccttcttccttcgctccctctcattcatccaacactactccaagtttaatttcccacaccaaacctcagctcccaccgatcggctccatcaacctaacaatccctcgcttgttagcccgcgcgcgtgtgtcgtgtgcgctgcgtgcgtcccatggctcagcctcgcgtgcacccaaacgcggcggcggcggcgggtgacctggagatgggcggcaacggcggcgtgttcccgccgctgccagttcgcgggcagcccgcctccgtgaaccagcagcagctcggcggcggcccccacacctgggtgggcaacgacgccaacacgctgctggtggtggccacgctgatcaccacgctcacctaccagctcggcaccagcatccccggcggctactggcagcatgacacgacggcggcgtcgaggga

SEQ ID NO: 279872 - DNA, 942 bp, Zea mays
tgctttaattcatagttgaagacaggcacagggcgagaccgccgccatggacactgagaccgaggggaaggcggcggcggtcgaggagatgagggagtggtgcgtcgctctccccaaggtggagctccacgcccacctcaacggctccgtccgcaactccaccctcctagaacttgcaaaacagctaggcgacaaaggaatcattgtttttgaagatgttaaggatgtgatcatgaagagtgatagatctcttccagagtgtttcaagctttttgatctgtttcatatacttacaactgatcatgatacagtaacaaggattgctaaggaggttgtagaagattttgctgcagagaatgttgtatatttggaaataagaacaacacctaagaacaatgaggcaaaggggatgaccaagaggtcttacatggatgctgttattaaaggtctgaaagcagttgaagatgttgatgtcgaattatttggttctaatttcagaacgaatgaaacactaagttctaagcttttggatggtgacacaaagaaaaagaagatatatgttaggctccttcttagtattgatcgccgcgagacaacttcggctgcattggataccgttaatctagccatggaaatgatggaccaaggtgtcataggcattgacctttctggcaatccagttgtgggggaatgggaaacatacctgcctgccctacaacatgctaaaaatctgggaatccccgttacaatccactgtggagaggtggcgaaccggaaggaaatccaagcagtgctggacttttgccctcagaggctgggtcatgtatgctgtctgaatgatgtagaatggaagaagctcaagtctctgatgattccggtaaacttatttgcatccatacatgtctgcggtcaattaggaggtgctccttccctagagcttca

SEQ ID NO: 279873 - DNA, 621 bp, Zea mays
ggtgccttcaggagtccccaggaggctttcttctccacttccctgggagtcaagttcactgggacactggaccacagcaagggatttgttttctgtccctccagcatatatatttggagcgattctgcctgcttttatggttgcaggactttacttctttgatcacagcgtagtgtcacagttggcacagcaaaaagagtataatttgaagaagccttctgcctaccactatgacactttggtccttggattcgtggtcctgctctgcggtttgcttggtatccctccatctaatggagtgcttcctcagtctcccatgcacacaaaaagtcttgctgtccttaagaggcagttgctaagcaaaaagatggttgatactgccaaggagagcataggaggaagtgctaccagtttggaaatatatggcaagatggaagaagttttcatcaaaatggatagcgaacagaatactgattctgttgacagggagttgaagaacttcaaggatgctgttctgcaagaaggcgacgaagaagggagattggctagagaatttgaccctcgcaaacatatagaagcccacttgcctgtccgagtgaacgaacagagactgagcaatct

SEQ ID NO: 279874 - DNA, 255 bp, Zea mays
cttatgggggagtccagcagtgagctaattgctttcaagactgaaatgaagaaggtgttcaaaatgacagacttagggacactatcatactatctgggtatagaagtgcaccaaggcgacaaagggatcagcctttgtcaaacttcctatgtgaaaaagttgctagaaaaggtcggactgagccagtgcaacccatgttcaactccaatggaagctaagctgaaactgtccaaggacagtgattcttctcgagtt

SEQ ID NO: 279875 - DNA, 742 bp, Zea mays
gggtcgacgcaagcctctacacagacgcgtgctaacgcgtccgcccacgcgtccgcctaaaagggtcctgcccaaattgtggcgagcaggtatttgcatttgtcaagattgaaaaaaccgtgagagcacctcatcgagcagaatgccatgtctgtcagtgccctttggagtaccgcacgaaaattgagaaatcttcgtcagggcctagaagaagttgggtctacggccgggtttatctagtgaagcaagggcatcctgaaacggaaatggataaatgaaaaattctaattgattgagactgctgagggaagtttagataatcccatgagatggcactcttctggtcgactgaaacatttttcagatgccacttattttgatcagaagggcttactgtgtacgaatcatttgaaagatttgatccagccaagtgctttgtaatacagatacatttctgagatgtccagacgctgcagatgaaccccatgctgcattgtattcttttctgttttctctttagatgaatccatgatacagtttggatgaagaactactgaagaggctacgaaggtgccattgctatcaggagggagggtcactgaaaggctcacaggagggagggtcactgaaaggctcacactctgcaccaaacatgtttaatcatttgatcaaagatgcccacactcagcatgtatacagacttgctcaaatgtgatgtgttatacaagtgtgtgtgtgtgta

SEQ ID NO: 279876 - DNA, 497 bp, Zea mays
cgaagtgataagccaccgcccaccgccgctggcatgagcccgatggcgctgctcacaccactgcccattccccttctctcgccgtattgccaacgcgtctcgtctccgtcgcttctggcggccggggcagttatcagacctctcatttgtctttccccccacaatcaccgccaccacgatgcactctacccctctgtccccaatgtgtggccacgccaccggcgccgccgcaggggcgcagttgcttccgtcgaccaggaggagtctagtgcctcggaaaccgcagtcgctcccgaggcagacctggggccaccggtatcctctgatgcggctgccgaggacggggtcgcgacttctgcccagccggcggaggcgagcccggaggacctggagaacatccgcgaaattaaaagggtactggagctgctgaagaagaacagagacatgacctttggcgaggttaagcttaccatcatgattgaggacctagagatata

SEQ ID NO: 279877 - DNA, 571 bp, Zea mays
gaaatgacaagtttggcagagttcttgatccagacgagccttttaggttgtttctacgggatcgagagacgacagagttcttgacagcgaaagaggagaaacagatgttcagtcaaatacaggcacggcttctttttctatcatcatttaattgcccttgtagtaggttaattaaattgattactggctgaatcagaagtatatacatatattttgcacagaatcttatgaagctggagggggctcagcgtaacctgcaagctcagtgtggtcgtgaaccaacagttgaagagtgggctcaagccgtaggaatgagctgcagggagctgcaatcctgtgtgcgcaccggaagacggtgccgagagaagatggcccgctccaacttccgccttgtgatacatgttgctaggaaatatgaaggatgtggccttgacattcaggacctggttcaggatggatgctgtgggttgatgaaaacctttgagaagttcaacccgagcaagggatgcagattcccgacctacgcgtactggtggatacgccagtcgatcaaaaagtccatcttcaagaa

SEQ ID NO: 279878 - DNA, 886 bp, Zea mays
agcttgccagggagggagtccatgaattccagcagaagcctcctctcttcgcccctctttgctagctcgtctccaaacttcaggagcagtgcttccgtctcctcctccccatccccatcccgcaccacagttccaatgatacatgacaccagcagcagcagagcatccacggcgtgccactactcgccgtcgcttgtggcagaggagcagcttcacggctccaatgacaccttgaccttgaagggcgagatggccttgctcgagttgcttctaggcatggctctggaccagcacgttgacggcaggaagctcattacccaacaggaggctgaggatagtgatttcgagagctatttgagagaagcaacaagccgagtgctttaccagccaacattcatgtacggagcttctgaatttattagcagtgaagaggatgatgatgattctatttcggagagctcttcagcatcattggccaaaccagctggtggattgtatcttggcaagctgacagaggaaccacagttggatgtaccacagcctcaccgtcgcagtgtggatccaaaccattcgtatgatcaagtgtttattagatccactcggttactggagaggagatccaagaaacgcaacggcggccacagggctttggataatggtgtggcgtgcagtggtgtgaactcaaagagaaaagacaagtttggcagagttcttgatccagacgagccttttaggttgtttctacgggatcgagagacgacagagttcttgacagcgaaagaggagaaacagatgttcagtcaaatacagaatcttatgaagctggagggggctcagcgtaacctgcagctcagtgtggtcgtgaaccaacagttgaagagtgggc

SEQ ID NO: 279879 - DNA, 518 bp, Zea mays
aatgagtaccagctcactgtcaaagacaggcctgagggtcaatttgttagatttgattcaacagaatgtatggttgtttgtagttgtaagaagtttgaattcatgggtcttctttgttgccatgtattgaaaattcttgatctcagaaatattaaagaacttccacgacactatatcctgaaaagatggagaaaagacgctcaaagtgaatctccagagaactatggttttgctgccatagatgaagatcctaagttttcattgtcaaaacggtacaacgcattataccggaatttgtataaaattgcagcaaaagcttcagaaagcgttgaagcttatgcattcctggagaaccaatatgaacagcttgttgaacaagtggaagtacttctgcaagcaaagttgcatgataaatcttccttaagtaccacctgaaaggcattcagccaatatgcttaatagtgaggtcaacagcagtgaacatcgtagagcaacctgttagaaaattaaaaatgtag

SEQ ID NO: 279880 - DNA, 1078 bp, Zea mays
acccacgcgtccggcaatggccaacaccacatgcctccgctcccgcctcctcgtcctcccaccgccaccggcgccccgcaccgtcgtgtcctttcgtctccgcccatgcgctactacgatctcctcgtcctcccgaaagaggagaccccgtctcgcggcacgggcggcgccgcccggcggcgctgtggccccggcgtcggccgcgtcgaaggaggatgaccagggggagatgggcagcggcgggggcctctctgcggatgatgcagagaggctgtgtcagtttctgcgggccgacctgccgcacctgttcgacgacgtcggcatcgaccggtccgcgtacgatgaccgcgtgcggttccgcgaccctatcacccgccacgacaccatcgacggctacctcttcaacatccgcctcctcaagctcctcttccgccccgacttctacctccacgccgtcaagcagacagggccgtacgagctcaccacgaggtggaccatggtgatgaagtttatgctccttccctggaagccggagctggtcttcactggcttgtcgatcatgggcgtcaacccgaagaatctcaagttcaacagccatgtggatctttgggattcgatacaaaacaacgagtacttctcttctgaaggactatgggatgttttcaaacagctacggatttacaagacccctgacatagaaacaccaaattaccttattctaaagaggactgcacattatgaggttaggagttatgcgccattcttagtggttgaagcaaaaggtgataaactgacaggatcgtcgggcttcaacaatgtaaccggatatatatttggcaataatgcttcatctgaaaagattccgatgactacacctgtcttcactcaagcttctgacaacacactttcagatgtatccatccagatagttctgccaatgaacaaagacttggacagtttaccagctccaaatacagcagttactttgcggaaggtagaaggaggcattgctgcagtgaaaaaattcagtggacgaccaaaagaagaaattgtgctccagaaggacaaggatctgcgc

SEQ ID NO: 279881 - DNA, 641 bp, Zea mays
gctgtaggccgagtacttccgccatctcctcaagcccgtgacgtagctcccctctgctctccacctgctgctgaataaacttacagccttagttttttctccatagcaactgaagtgggagaacatcccagtcgttcatcgggactttccgctggtagttctgtccggtggttgttttaatttattcatcatgggggacaaggtgaatccctggtgccattggcctaatcctcaatggaaattcaacactgagagttctgccggcaatctgcacccacctgatgtcgggcttgctaatgccgattcggtggcattgcctgcataccaccttaacgcagttgctgcacctatgccatttttcgcagcatcgtcgattgctgagagacctcttccaataatgggcccgagacacgtcacgacgttggcaccaagtttcgaatcgcctgcaccgtgtccctcgcgtaagagaccttcagtcctctaccagaaggaaactcatggtcccaccgcagctcctttgcggaggagcaaggggccactggatcctgtgccggagctccaaggtagcaacgagaccaacgtaaccgacgttggagcagaagaaacccgaggtgttcacgagaacacagacgagatcgatg

SEQ ID NO: 279882 - DNA, 973 bp, Zea mays
atttcattattactatctctatagtgcagctttgagcaaaaacatgagccatggcgattggtaaacttgccaaagtaccactaggctgctctttcgaaacatagttaaatgtccattttaattcccgtaacccatgtgtactgtaacctttttatttttcaataaagtgcgggcccactgtacataattttgactcctcgatttctgtgttttgctgtcacctaacgctcattggtctttgcagcacaactggggagagagatcctgtcacctctgctctgcttattattcttggcagaaaggtgtcacttgatatagctcaagtcgttagatggaaaactagcccagcagctgaggttttgcctactgtacgctatgctgcttcatttgcaggttatggcttttatggagaagttatcagggacagcgaaaagtaccggtggatgggtcctgcacgttatgacttttctggaacaatggtctttctgaagcacaggtcatatggggcaaaggttgcttttctcgatactccatacactcattcgcttacagcatcagcacaggatgatataactggagcacaaccactacaatctcgttggaagaaacctcgcaaaataatctgcagaacaaattgctttgtatgcaaagaggcttcaacatctggacaaaatccagaagatgttgcagacaactccagaacaatatgcgagaaccagaagtgggtctggtccgaagacatttcctcagcgtcggtgcagctgtcatttcatgtcgtaacgaaagagcccctgatggcctggtagctgacgcacacctttcggatggttttcttcatctcttgctcataagagactgccctcttcccctttacttgtggtgagcgaaatgttgctctcttgctgagctcatgatccaatctcttctgactccaggcatctaacacaatttaccaagaagggttcagatcccc

SEQ ID NO: 279883 - DNA, 311 bp, Zea mays
agcgcgacagaccgagctcatcgcgcgcaagatgcgccgcctcaccgggttcgtcaacctcaatgtcgacaacgtcgtggacgcgtcactcctcgcccggttccttcgtccgcaagggaacgaagaatcccaagttaaccaacttaaccgtcaagggccagctcgccgcgctccagaaccgcgtcgactccatcgaccaccagaccgcccacgtccacggacacccgcaccactgagcatccgatccaaaacctctggactctggtgcaaatgcaccggaaccggactacaccggaggcgaagcgcgccat

SEQ ID NO: 279884 - DNA, 366 bp, Zea mays
accacgcgtccgcaaagtttggttccactacgttggcgctcctcctcctttgtagggagatactctgaaggtgaatcccggtacaaactgcagagccccaaagtgaaagcagctgtgaaggaatacacccaaatttctgcaaagtatggcatttctccagtgaccttagcgattgcatttgtcttgagacatccccttgtggcatcggctgttttcggtgcgactaaattgtggcagcttgatgaagttcttcaggcaactacagtccatctttgtgaggaaattgttgctgagatcaatgatgtacatgcaagataccctaacccttgcccataaaattttgcaaaaaaatctttatttagcatc

SEQ ID NO: 279885 - DNA, 698 bp, Zea mays
  unsure (1)..(698): unsure at all n locations
aatataatgatatccttgcaatcgtgtgcaggttgcgctacgnaaattcaagtggaaggtctgccatagtcctcctgacaccaatattgcttttatagtggacagaagaaacatcatcttcgtggtaggccgcaacggtcgcctctaccagtacaataggatcacagagctctggcacaggccctaacatttacctccttgtccccagggaaggccgtgcgtccatcgcctcacatatcgtgctccccagggacgcccgtgcggccatcaccgctgtccctggccggctccctgttcatggtgtccgagaacgggggacctggtggagtaccacttcagcccaaaggacagatgggagtgtctggagcactggacgccccactgggacatgagtatcgtcggcgccccgggcccgtgcttcgacggctcccagctgttcgtggccggctccgacggggcacgtgtaccggcggcacatgcaggggagcacgtgcaggtggacgagccacgggcacccgccgtcggagccggccgccgttgacgaacagagctgcgccacaccggacacgggcgccggcgcgcactacgccgacgggttcagggggagctgcgacgggaaggtggcagccgtgcggccggtgccgttctcggagcacgccgtggtcttcgagctgcgagatggcaaacggcggagctgc

SEQ ID NO: 279886 - DNA, 805 bp, Zea mays
gacgcgagaccaagacaaaagcagccagcggaaaagaggggaacctctcatcccatcccaccagttccccaattccatttctccatccatgacagctcgccatttccccacctgttcctacgctaccgccacctaaaaaaattccaggcactatccatttcaatcttgctcaaaggtcatttcattccggccggtgccttttttaggccgattggagggaaggctggtctgtgttttgttttcctgctgcctcttgggcgagttgaatttgggcgcctcttgctccaggcagtattttatcgagctagagtctggtacccggcgattcttgcttggtccaggcgccaaggcgaggaattgggcctagctccagctcaaatctgtgccttgttgcagacagaaggatttctgcatgggcgaccataactaagatgtgagattgggtggcgtcagctcggctggtgggtgattcttggtgcgtacacagacacatccctggaggcttgagctgatttggcgaggaggacagtgcaggagagagatgtctttcaggagcctgattcaggacatgaaggacgagttcgggagcatctcgcggcacagcctgcggtcccggtctcaccgctccgccgggaacgcggcgcgggcggtggccgcgggaccgtcggaggcgatggatcagagctgctggtcgcagctgccccccgagctcctgcgggaggtgctggtgagaatcgaggcatcggagagctggtggccagcgcgcaaggacgtggtgtcaggcgccggcgtctgccggacctgg

SEQ ID NO: 279887 - DNA, 647 bp, Zea mays
cccatgcgtgcgcccacgcgtccgaaacgctgtgtgctttgtgccgcttgtggcgtcctcaccgaacctccgctccctcaagatactgcgggtgctccggcgcctgggacctgccattggaggtcatcgctgcacgtgctcctggccttgttgagcttcaccttgagaagctacaggttggcgaccgtgggcttgcggcgctttccgcctgtgccaatctggaagttctgttccttgtcaagacccctgagtgcactgattcaggcatcatcagtgttgccgagaagtgccacaaactccgcaaactgcatgtggatgggtggcgcacaaacaggattggggatttcggactcatggctgtggcacgaggatgtccagatctgcaggagctcgttttgataggggtcaaccccaccgtgctgagccttcggatgcttggtgagcactgccggttgctggaacggctggcactttgcgggtgtgaaactgtgggggatgctgagatcatttgcttggctgagcgatgggctgcgctcaagaagctctgcatcaatggttgccccgtgtcagatcctgggatggaagcactacatggggggtgccccggtttagtcgacgtgaatctgaagagatgtcgtggagtgtca

SEQ ID NO: 279888 - DNA, 709 bp, Zea mays
ggcatctcaaaattctagtgatcctcgaaactttgagctaaaactggaatacatcaaggctttacctactggtcaagaaacagacttcatattggtgtcatgttcaggttctggaattgaatctaacagaagagaacaagttctcaaagccaagaaggctggagaagatgcactgcggaggtcaggccttggatatacaatcgtgcgcccgggtcctctgcaggaagaacctggtggccagcgcgcgctgatcttcgatcaagggaacagaatctcccagggtatcagctgtgctgatgtggctgatatctgtgtcaaggcactgcatgattccactgcgagaaacaaaagtttcgatgtatgctacgagtacgtcagtgaccaagggaacgagctttacgaacttgtggctcatctgccagacaaggctaacaactatctcgcaccagcactgtccgttctaaagaagaacacctgattgatgcgccccatcagactcggacatgtaatatacgagtcatacgacgtgtatattttctcctcctgtaaagccatacgtttttcctatacaagccttgtgtctttcacatggtatgccgtttggcccttctgtaaagatcattgcacagaccgactccaggaaacaaaattttatttttgcaatattgcattgaatgataagttctcctgtccccactccttttcttct

SEQ ID NO: 279889 - DNA, 622 bp, Zea mays
ggactcgccgcttcatattcgggagggactcaagccggatctagctgccaaggattctcttctgcgcaggggtttcgttccgtccgaagaataatctgtttcgctgctgctggagcttgagcaagcaaagctgtttcccgcgcccgcgcctggccctgccggcgaaactgctgttttctttcttctgctacatggtggatggctctcaaagcctcacgccggttactttcactgaggttttagctctggtttatttgatgtccataggttttcttcctttgcttgtgatctcaacacatccatcactatgattcatttgtgtgtgatacatattgcaacttcagttaaaatccaaaaaaaaaaaaaaaaaaaaaaaaaaaaaaaaaaaaaaaaaaaaaaaaaaaaaaaaaaaaaaaaaaaaaaaaaaaaaaaaaaaaaaaaaaaaaaaaaaaaaaaaaaaaaaaaaaagaaaaaaaaaaacaaaaaaaaaaaaaaaaaaaaaaaagggggggccccccaaagggttcaaactttatttaccgggaaagtaaaggctaaaccccttcaaaggggccccaaaagtgaatttaagggggccgcgtttaaaagaccgcggaacggg

SEQ ID NO: 279890 - DNA, 574 bp, Zea mays
atttcttccaaaatgatcacatgttctaaagatgcatattatttggcagtactttcaaggttttctgtcaaggttgatggtgtgaaatgcttcacatttgacgaaatggctgtggcaacaagggattttgatatttcagctcaagttggtcaagggggttatggaaaagtttacagaggaaatttagctgatggaacaacagtggcaatcaaacgtgcacatgaagattctctgcaaggttcaaaggagttctgcacagaaatagaattgctgtcaagattacatcatcgcaatttggttgctcttgttggctattgtgatgaagaagacgagcagatgctggtttatgagttcatgcccaatggtaccctacgtgatcatctttctgctaagactgaaagacctctgagctttgggcagagggtccatattgcacttggagctgcgaaaggacttctatatctacataccgagggaaatcctcctatatttcatcgtgatgttaacgccagcaatagtcttctagattccaagtttgtagcagaggtggctgactttggtctttcaaagcttg

SEQ ID NO: 279891 - DNA, 439 bp, Zea mays
cccacgcgtccgcgctgcttctctctccctctgctcgctctccccagccgaagcgcccgtcttccctggtctcccatggcgtcggtcgctcctccctgagctcgcccctgcgcgctctgctcccttccccacggcgcgccctctccctctcgtttctctgctggccgccgctcctgctcgttcttctggcagccacgcgaagccagcttctcatacatccgcgcctactgcctgctcggcgcccatctccctgctgccactctcccttgacgcccgcctgctcccttcgccgcgcgctcctcagctcgacgcccggtgctcctccatggcgctcggcttcttcctcctaaagtcccttcgtcgccatgtcacctttgctatttccatttcttccttctccgtactttctgttttgactttgaagctggtcggtttctac

SEQ ID NO: 279892 - DNA, 743 bp, Zea mays
cccacgcgtccgcggacgcgtggccatgatggcggaggttctaataagtaaccttatgattggaaattgcagtgataggttgtgtgtacgtgtctcccgtctgtgaaaattttatgatcccgaggatgagtataagcttttccatgctcatatggtcctcatcgacgaggaggtacgcgacctgcttactacatgaagcaagctgcataccagatcaaagaaattttaatatggggctggcagtgctcatgctcaaatataccctccactcactgacgttttcaaacctctgataaaggagggcaatgtctacaatgtctcctacattcagatcaagaaagctaatgggatgtacaagcctgttgacaacgatatcatgatcggtttcacaaaatggatcctatgctgcctcgacaaacccgcggtttgaacacgttgacagatgacggcttagcttctgtggatggacatcttggtcgcttttgtagatggaatgtttggttggcttttgtagacagaattaggctgcccttgtgattgtgtaacgcttatgagcatggttgtgtggactgtgtcggccaaagtatacctcccaatgccttgtatatatcacatgcttagctgtctatccccaactaggtcgcctgataatagacttcgatcatgtcatgctattctataacaattttcgctgtaacttgcctaatcgtcatactatggtacacgcttaaatttggtgctcc

SEQ ID NO: 279893 - DNA, 649 bp, Zea mays
ggtcaggttcccaggatgcacaatacttggggcggattttggagtattctctggatatggttcgcaagctctctgctgctgcaaaggaggtatgagatgaagaaaaaccatgataaattattgagtgaattgtctacgaattctgaagttaacggcgatggcatcaactcatttgtcattgctgttatcaagggccttcgtttcatcctggaagaaataaaggaactgaaagcagaagtgagtaaagcacgtatccagatgatgcaacagatcataaaagagtcggctggggttgagtacctgcagaaggcttttgctgatcgctatggacctcctgagacggcaccagcttctcttcccctaactctgcaatggattttgacatcgaagaacattgcggaagaagaatggagtgaacattcagactgtctttcagtaatgccagcagcagggcaggctcctgctcttgttccggtactccgatctggtcatggagctccagtagggcaaccatctccttctgcaggagacacctctggtcaaccagagtgcaagggtgagaagcttgacaagctaataaaggatggcctgttgcaactcattagtagtgtggagggcttgcaattgcagtcaactcctgaaagttttc

SEQ ID NO: 279894 - DNA, 827 bp, Zea mays
tttcttatctcggccgtgaccaccatgacgccggggtccttcgtgcaccaccaccggcagcagtcgccgccggccgcgcagcagcacttcgtcggcatcccgctccaggtccaggcgccgccgcagtcgggctacaacctgtggaccccggccatggctggcggcgccgcggacatgtcgccgcaggggcaggcgcagactcccggcgccgcgggtgctgctggggtcagcgccgtgctcagcctgtcgtcccgcgaggcgccgccggtcaccgtggccgcggtggccgcctgcaccgacgagggcaagtacctgggcgtgtcggccacgccgcaggggcggggggtcatgagctccaagtacctcaaggccgcgcaggagctgctcgacgaggtggtcagcgtcagcaagggcgtcgaggacgctaagaccggccgctgccgccgcgaccaagagcctggccgcggtgaagaagaaggaggactcggagggcgcgtcaggtggcggcaccgacgacggtgccggcgcaaagagcggcggtggtgccgcgccagagatgtccacggcggagcggcaggagatgcagatgaagaagagcaagcttctcaacatgcttgacgaggtggagcagcggtaccggcagtaccacgggcagatgcaggcggtgtcgtcgtcgttcgaggcggcggcgggggccgggtcggcgcggacgtacacggcgctggcgctgcgcaccatctcgcggcagttccggtgtctgcgggacgcgatcgcgtcgcaggtgcgcgcggcgagccgggcgctgggccaggacgcggacgccgccg

SEQ ID NO: 279895 - DNA, 817 bp, Zea mays
  unsure (1)..(817): unsure at all n locations
gtggtgnggtaggacctccctgcattggtgatttcagagacaggagcttcactgacacttgctcttgctgagaatggagacctgtttgctgatgtctggtagattgggttgaaatgcttggatggatggtgctcggctatgggagttgaagtccgtgagttgctctggaagctgctcggtgtctgggggtacaactcgatgtcatctgcacttgctctgcttggtggataagagggcttgtactgcgaattcccgcaagaccgagggtacctatggtgtccggtatcagcacttatgacactgtttctgctactgaggctatcactgtctgcctcatactggttgcgggtattgatcggtttcagcacggacgaagaggctctggctttcgctgctgctttcatggcctcatttgaatcgagcttcgcaagcttccacgcactgatgcggactggccgtttaggatgggttttggttctttccattgggtctgtggtatcaggatcaacagttgaaggaactcggccaggctccaggtgtgggatgatttcgtcctggtcaataaagatacgtgggggagtgcaccatgcgcctttgtagtgccgtgcaaacgagctcccactaaaagctgttggtgcagaactcattggagaagatgccaagctttgttggtcatcattgacagaaggtccaggaggttcactctgagccctcatggccacaacatattcataagttgttatgcccttccggattaatatcatatggaagaaaaatagttctcctagtggtactgaagcaagcattgaaagagctg

SEQ ID NO: 279896 - DNA, 396 bp, Zea mays
  unsure (1)..(396): unsure at all n locations
cccacgcgtccgcgccaagggtgtcggtgtcggtgtggctgtgtcggccacggccagctagagctgtgacctgggagtgggagggttggtgcctataggatcgtcatggacaccatcgaggagtgcggcgacggaggccgccacctgctgctgggcctcggcaccaggatactcgtcggcgtgccggacaactcccgcggctgctccgagctgctgtcgtgggcgatcggcgccgtcgccaagcccagcgactccgtcgtcgccgtgcacgtcctcggagggatggggaggaagcggaggctgcagaaggccaacgccttcgtcatctacatgctcggcgaattcgtcaaagcttgtgatggcaancagattaatttgggggccaacgtgatatgc

SEQ ID NO: 279897 - DNA, 457 bp, Zea mays
cctccgcccgcccgcgacccataagccgaaagcccgaaaccagaggcgggtagggttctagctgcaggcgacggccatggccgcctccgccgccgccccggcgctgcttcgacgcctcttctgcagctctattccagcctcctcctccgtactgcgcgctaccttttgctcctccgccggcttcggctcgtcttctccgtcctccatattcggcgacgccaccgaggtcgccaacgtgccaccgctcaccacgcccaacctcttcgtcagtggcctttcaaggttaacgacagatgagaagctccagggtgcatttgctcctttcgggaggctccttgaagcaaaagtggtgacggatagagtttctgggaggtcaaagggtttcggtttcgtgagatatgccgccatagaagaggccgagagagcgcggcaggagatgaacgccaagttcctggat

SEQ ID NO: 279898 - DNA, 866 bp, Zea mays
cggacgcgtggcgtgacgcgtgggcggacgcgtgggggcagcagcacgagccgtccccgtatggcctggcgttccggcagaccccaacgatactggaacatgcggacgacgtaaacgccttgctgaacaaaggcatggccgcggacagccgcttcctcatgccaattgtgctgagggagtgcggcgagacgtttcgtgggatcgactcgttggttgacgtcggtggtggccatggtggcgccgccgccaccatcgccgccgccttcccccacctcaagtgcagcgtgcttgacctcccgcacgttgtcgccggtgctccgtctgatggcaacgtgcagttcgtcgcaggcaatatgtttgagagtattccacctgcaaccgctgttttcctcaagaaaactctacatgactggggtgacgatgagtgtgtcaagatattgaagaattgcaagcaagccatatctccacgggatgcaggagggaaggtaataatcttggacgtggtagttggatataaacagtcaaacataaagcatcaagagacacaagttatgtttgatttgtatatgatggcggttaacggagttgagcgtgacgagcaagagtggaagaagatcttcactgaagctggattcaaagactacaaaattctacccgtcattggtgatgtatcggtcatcatcgaggtctatccttgaatgctttgtgaacaaaggcctccataataaactgaagaccatgaaggtgttgatagtatattatgaattgttatttgtcctgtacacttgattctttgcgtatttgtaatgacaagttgagtaattgtgtttttgttacaaaaaaaaaaaaaaaagggcgctgttcgc

SEQ ID NO: 279899 - DNA, 477 bp, Zea mays
atccaaggccgacgtcttgatgcacaggctcaacgtgatgtttccaagttcggctccggaggtccggtccttgtccattccaagatcccttggcatgcctaggtgatctcccctcagtccttgttgcttgaacactgcaagctgaagcatagctcactactcagcggaagtaaacaaaacgtgagacgaaaccagtggaggacagggtgtccgctcatcctcgcgtgaggtaggactaggatgtgtgcgatttgtttttttaattatgcaatccatgttgggataaaaaatgtagcagggattagttttataaagaaaaaaaattaaattactccccttgcatatgtatgatgtccatatgcccttctaaagtataagtgttgtttagttcattttatccctctatctatttgaattggtttttagtttaagttttctggttagtagttgatgccacaacttaacctaggaaatata

SEQ ID NO: 279900 - DNA, 482 bp, Zea mays
ttcctacgcgtccgcagctgcgcgcgcccgtggacttgtcctgccatggaaggcctcatcccgttcatctacagggccgtcgtgcggtacaggaaggaggaagggcgggtctccctcggcgacctcttcttcgacgagccctcctcgccgacgtcctacttccgtctcccgggcggcgccgactccggccggtaccagcaggtgacgtcgagcgacctgttgtcgtcccacacgactacgtcgacggccagctccggtgcagccggcgtggcgcgacgacgctctccgatgaggtgcccgtcgcaccgccggcgcccggtctccccggacccgtgactcgatcgtgaagtgaagctagccgcccgtgaggcaaaaaaagaaaagcaagcgaaggtttgtttgctcatggcctcacgtagcagatggagcgtgtggtatacgtagtatgaggatgatgctgagtaattgtgaatattagcctc

SEQ ID NO: 279901 - DNA, 1438 bp, Zea mays
ttctcccacgcgtccgcttcctttcgaagaaaagtagatcttcgaaggttggtgtaaggtttgataaaaaaattctgggaggaaacgatcttggaggcaattgcgaagttgaccatggtttgttttgtccagttgattctttatgcctcgacattccaggatgggaggttacatccaaacatccattagatgtgatatttgagtttatctctgaagaaattcggcatggcccttttatcctttttctgaaggacacggagaaaatttgtggcaataatgattactatcatggtctgaaaagcaagctaaaacatttcccagctggtgcttttataattggatctcaaatccagcctgacaatcgcaaagagaaggcaaatggtagttctccttttctttcgaagttcccatacagccaaactatacttgacctcgcattacaggacattgatgcgataaatggtaataataaagaaacttcaaaggcagcgaagcatttaatcaaacttttcccaaataaagtgatactcgaggcaccacaagatgaaatggagctttcacggtggaaccagatgttaaaccgagatattgaagtccttaaaggaaatgcaaacatttcaaaaatgcgctcttttctaacaagggttggtttggaatgcactgatcttgaggcgatattggtcaaggatcgcgttcttacaaatgagtgtattgataaaataattggttttgctttgagccatcaacttaagaactgtacaaatccagacccccctttgagtaatgtgcagtttgttctatccagcgaaagccttaagcatggtattgacatgttggaaagtatccagtctggctcgaagacagcactaaaaggaaatcactgaaggatattgctacggaaaatgagtttgaaaagaggcttcttgcagatgttatccctccacatgaaatcggtgttacctttgaggacattggagctttagaaagtgtcaaagatactctgaaggagttagtgatgcttcctttgcaaagacctgaactttttaaccgaggacaacttatgaagccatgtaaaggaattttactttttggcccacctggtacggggaagacaatgctggctaaggctgtggcaactgaggctggtgctaatttcataaacatatcgatgtcaagcatctcttcaaagtggcttggtgaaggagaaaaatttgtgaaagctgtgttttcactggcaagtaaaattgctccaagtgtaatttttgtggacgaggttgatggcatgttgggaaggcgggagaaccctggagaacatgaagccatgcggaagatgaaaaatgagtttatggtgaactgggatggtctgagaacaagggagaaagaacgtgtattagtacttgctgcaactaacaagccatttgatcttgatgaggctgtt

SEQ ID NO: 279902 - DNA, 568 bp, Zea mays
acatcctgcatgggtgaagatggttgggccttcagcagccacaaaaaaagtatatgccctagctggcttgttggtgctctgtgattctcagaagcactgaattgtgaataccatcaaaagaggcatcaatttaccggcaggttattttaccagtcacaatgatgcttcctggaatcaaaataactatcttccgaacaaatcatggaaccttcaatcctataatatcttcatacagaaatcagaactgaactgaaggttatgagcaaggatgaactgtgttccggccgtcccgttatatgaattgtgtcaagggtaataacaatattagtttggatggagcaggaacaagcattgctgcattggaaacaatctggaatgctttgggctttaaatcccgtaccgtttttaggtaggattaagctcatgtaacacagcaaacttttcacttagatgcactatgaatcaagtgaatcgtaggaaacggattctcgtgctgaagggagggatgactccagaatttactcttaaggcacgagtaaaaaagttatccatgtcaatcttcctcgtt

SEQ ID NO: 279903 - DNA, 685 bp, Zea mays
cagggtctgaagagcctgacaaacatagaacccactcggagaagcgaaggcacaagaaaactcataagcataagaaacagtatgatgatagttccgagtctgattctgagccagatggcaaagacgcaaagaggaggaggaggaaggaagagaagaggctaagaaaagaggaaagacgtcgaagacgtgaagaacgacaccgcagaagggcagaacgccatgccagcaaacgaaaattaaagaacaccgatactgttactatgccttcagactctgagaaggatcgggattctgattcagatggtgatgttaggaaaagagtttcaaacgctggaagagaagagtctgatcagaagaaactagaaattgaactccgtgagaaggcccttgaatctcttagagcaaagaaagccgtcaacaactagactgagaatttttttgtgacacatttgagtttctattttcaagtggaagtgtccttatatgatactatttaatgttctgtgtgtttatgtggcagttgatctgatgattcctgagctgtttacttgatgcagctgaattcaggcttagcagccagttatctggtaatgtttgcttctacagatttgtacgcgaaccataaccctgaaaaggatatgttttgttaaaaaaaaaaaaaaaaaaaaaaaaaaaaaaaaaaaaa

SEQ ID NO: 279904 - DNA, 458 bp, Zea mays
cggctcgagtgaaaatagaaactcaaatggaagtgtccttatatgatactatttaatgttctgtgtgtttatgtggcagttgatctgatgattcctgagctgtttacttgatgcagctgaattcaggcttagcagccagttatctgattagctccatgtgcacaagctttttatgttcctcaggatgatatgatcaacgcctcaacaaaaacaagttggtaacatattgattggaaaattctgctaaagcattccttcttagtttcaggtttgtgcagcagtcaatatatctgattaataggttctcatcagaaaacaatttcaagcactcgataatttacgatgcctagggggctagactgatattaatcattactttcagtaacttatttatgatattgactgaagaaaaagaaaccctgtgccaccttctttcacatatggaatcagcaaaccag

SEQ ID NO: 279905 - DNA, 777 bp, Zea mays
cccacgcgtccggtggaaaccatgctgtttctggactcaagttccgcatattgagggagtttttgcagctcggatacagtgttctgctctctgatatcgatatcattttcttccagaatccatttgattatctttacagagattctgacgtagaatcaatgagcgatggccacaacaacatgacagcttatggattcaacgatgtgttcgatgagccttcaatgggctgggcaagatatgcacatacaatgcgcatatgggtttataattctggattcttcttcataaggccgacgattccttcgattgagcttcttgacagggttgcttatcgcctttctcacgagcccaaatcatgggaccaagcagttttcaatgaggagctgttttttccctcacatcctggttatgaaggtcttcatgcatccaaaagaaccatggatatctacctcttcatgaacagtaaagttctcttcaagacggtgaggaaagatgcttatctgcggaatttgaagccggtggttgtgcatttgaactaccatccagataagtcggatcgcatgaaagcagtgattgaattttatgttaacgggaaacagaatgcccttgaacgcttccctgatggatcagaatgataggcaccagcttttgtagaacagaaaaatgataccctagtatctagtcgtcttgaaactgtgcgcgattatattgacttatacatgcattgtcattataaatcctgtgtgcttcagatgcaaacattcactgagcatgaaa

SEQ ID NO: 279906 - DNA, 533 bp, Zea mays
cggcgacggcgccgcgcacggccagaagaagcccgtcttctccgcgcgccgctcctccatcctcggcgccggcacgggcgccgccgccgtcctcgtcgacctcctcgcccccggcgccgccggggagttccgcgtcgacggctccttcccgcgccgctgctgccgcgtcgtggcctccgccagggcctgggccgcgcccgtcgccaaggaggaggaggaggaggaggaggacgtggtggtggcggacgtcaggcggaaggtggacgaggacgcgcacgtcatgatgggccgggacgtcttcgtgctctgggtgcgcgccggcttcgacgccgccttcgccatggggatcgtgctcgttctcgaccgggtcaccggggacgacgtcgacggcgacctgcgggaggacctcctcgaggccgccacatcgccggcgtaacacgccggaccgacctcctgccgctcgcgtgctccgcgtggggcgtggcttcagtacaattccacaaaccattttctcaatggttcttcgatgtact

SEQ ID NO: 279907 - DNA, 391 bp, Zea mays
gtctggcctcgtcgtcctctggacgacttttcccccgtcttccacaaccccgagtccccaacccaccacggcgttgcggaatccacctgcaactgcaagcccacgaaatcgagccgagccccgacgccaccaaatcgtgtggcctcggagatcgagcagggtctggaagaaccaggggagagaccgtcagaagaggaggaccagcagcaggcaggcggtggtggcgaagtcgtcggcgtcggcggccggggtatctacgatgataacccggtcgaagctggtggagcagctgctcgactaccagatccgatcgcagcacaagcgtgacgttatcggagctatatcatggggcttgttgtgttgttttctgataatatcatcgtgcatgacg

SEQ ID NO: 279908 - DNA, 467 bp, Zea mays
cccacgcgtccggaacgataagctgattgaatcacagagggtgaccagagatgagaattctcggctgagagagctgctgaagcatgcggtgggcgaagctaatgtagcaagagaatcgctggagattgccagagtggagaattctcgccttaacgaagagatgtttaagacagagagtaccttgcagagtatcaaccaagaatatgaatccctcaagatcagcgaggcagccgcacagagtagcattaaagaattgaaggatatgattgatgctatgttcagttctgagtcgaccaaaacgtcagcagaagcatcacctcgtgaggccaagggaagcaagatgaaggaaacttctgtggcagcagatcatgtgtattccgatgtcgaaagatctactcgtgctggacgacataaaaaaccctggaaagcagtcaaagaagacaattctcagaaaatttggtgaaata

SEQ ID NO: 279909 - DNA, 681 bp, Zea mays
taagtagaagtaaagccgcaggacgttagcaagggtcgtgctgtcgacaagctgattcaagcactggccaacaacaacgggaaggcacaggatttcctgatgtgcgtcggcaacgacagatctgacgaggacatgttcgaatgcatcaacggtatggacctccaacgatgtctcatcgaccacagtaccggaggtgtttgcctgttcggtcggccagaagcccagcaaagcaaaatactatgtggacgacaccagcgaagtgatcagattgctcagggatgcaacccgcttctcatcgtcgcagcggagggaggacgtcaacgccagccgcgggcgtgtgaccttcagagacgcactcgattacgtggactaggcaccagcagcaattcttagttactcgaaatgattagctgcggagcttgtaaattccgctgtcttctgtctcccaatggttttcgttctagagaattgtagtgtagccgacatcgacatggatcgtcgtcaccagtacacgaacagcggaaatgtgagttgaagttcgccgtttcgaggctcaggtgatatgtgtaggcaattttttggtagggaatagtaattggtacatttatagaattgtcaattgtttttcttctaccgctgataaccctatagcttcgctaaattaatattattgtttcactt

SEQ ID NO: 279910 - DNA, 601 bp, Zea mays
aaaagcgactaaactgggcaaggcgggtcaccattgctgtacaggctgctaggggaattgagtacttgcatggctatgcttgccctcctgtaattcaccgggacatcaagtcgtcaaacatactgattgatgaggatcacaatgcccgtgttgctgactttggtctgtctatattgggtcctgcagatagcggtaccccactgtccgagctgccagcagggactcttggctaccttgaccctgagtactaccgtctccactacttgactacaaaatctgatgtctacagcttcggggttgttctcctggagatactaagcggcaggaaagcgatcgacatgcagttcgaggaggggaacattgttgaatgggcagtgcctctgatcaaagcaggggacatttttgccatccttgatccagtcttatctcctccctcagaccttagaggccctcaagaagattgcttccgtggcatgtaagtgtgtcagaatgcgaggtaaagatcggccttccatggataaggtgacgacagctctagagcacgcccttgcactgctgatgggcagccctgcatcgagcagccattctaccgaccgaggtg

SEQ ID NO: 279911 - DNA, 681 bp, Zea mays
gttaatgttccaccgttcgggtgtgctgattgttaaggcacagatctgggacaccgcaggccaggaaatatgacgagagacgggcgttgacagctaaacactccgtctgttgaatgttgatcccttcaacatttcccctattttaacatttattattattattaaccaatcgaatcaactgcacctcttgaccgcttctactccaccgcctgctgctccgctagtcttcttcaaccttgtgatgcttcagccccccgcccctggtattgatcgctcagcacaaagcgtcgtacttggataggagaaaacaattctagacagtcgacagagagagagaaaaaaaaaatagagaactgagagatcgaggacaaagggggagaggagatgtctcggggcggtaccacggggagctgggccagaggatcgattacgtcttcaaggtggtgctcatcggtgactccgctgtgggcaagtcgcagctgctcgcgcgcttcgcccgcaaccagttcaacctcgactccaaggccaccatcggagtcgagttccagacccgcaccctcaacatcgacgcccgcaacgtcaaggcacagatctgggacaccgcatgccaggaaaggtaccgagcagtaacaagtgcctactacaggggtgcagttggggctatgttagtatatgacataa

SEQ ID NO: 279912 - DNA, 407 bp, Zea mays
aaaactctagctatggcgcatgtccaattcacagattgcacgaccactgccaaggatatgcatattttctggtctaactggcgaggagatgatgatgttcatcaacgccttcccagaaaccgggctggaagcagctgcctttgctgcgcttgtccctaacagtgcagagaaggttctcggcgaagtgatcgaggaaataatgggagaccatgagatgctgacaggaaaggactccagatgagaagaatttgaagcacggacatgcctatcatgaaaattgtcactttgcattctgatatatggcatctaaatctgattcaaattgccgcaacaggaagctgggtatggaaaagactggttaagatagtgttgcacaagaaacatcagtttaatttttcctctgataa

SEQ ID NO: 279913 - DNA, 537 bp, Zea mays
actcgttggcttcgtacggatgatcctccactccggcaagtatgaaagtggcgatcggctgtgtcctgaacatgagaaggcgattctggaacgtttgcttccataccatccacaatataatgagaaaattgggtgtggtattgactacatcacggtagggttacatccagaattcgaaaactcaaggtgtttattcatacttaggaaggatggcgagcagatcgatttttcgttctggaagtgcgtcaaaggtctcattcggcaaaagtaccccatgtacgcggacagtttcattctcaggcatttccgcaagacacaagactactgaagtagttgctcgtacggctgtttcagtgttatatttttctgtgtaattgattttgtcctgtccctttcatatcatgcgattctagcatttgttacgtggagtttttcattaagcatattattccatgcaacataaatagatataggtttgtcgcttgcagatgaaattgtagcgcgccatttagttactacatttctaattgtgagtcg

SEQ ID NO: 279914 - DNA, 635 bp, Zea mays
gttgttgctcatggcgtgtcttgggcttttgcctttcctggagctgttgcgaactggacaatgcagtttgctgcaaggataaccggtactgctgccctcatgactatcctgtttgtgatacaggtcgcgggcagtgtctcaaggccagcggcaacttctctgctatagaaggaatcaggaggaaacagtctttctctaaagctccctcgtggactggctggctggagttgatggaccaatgagcgtataatcagacatggatagtagcttcatgcaagttgtgcgatccgtaggtcggtcattggccttgttccagtgccctgccacattcctgtacgcctactgcccgctgcgttgcaccgaaatgcccttattttctctttattattgaaccctatggtgtaaagtttcacgattgtacatgtatgtcacacttgtattggcctatgcattagacgtctccattagtttacctatatgatcatctaaaatattgttttgcagtttttatactgtagagtgaagtttgaatataaaaatgaggatggtgctggatatagccttataggcgcgccctgcagattaggtgccgcggttgagcttttgagggccaggccgcatatatattaatacag

SEQ ID NO: 279915 - DNA, 722 bp, Zea mays
atcaaatttacaagatgttccaagagaaaacacctctgatgatttagctccgaaagtggtttgttgccaacaaaagcttttggaaaacacaggagatgattcctgtaaaactttagaggtggttcaagattcaggcgatatattgtctgcgactccacgtggtcttcagatggcacacaatctatacccctatgacaacaaattggataaaccagatttgaagaaggaagcttttgctgatcaatcttcagctcttgggaatcctttaaaagattttgttattccagagcaatcttacatctggcagggtagctttgaggtatcaggacatggaaactcccctgaaatgttcgatgggtttcaagcttacttgtctacttgcgcctcgtccaaagttcgtgaagtaggtgaacaattacctgacaaaattcagctggcagaagtcccacggcattcctcatggccactgcaatttaatgaagtaaatccaactgaagataatattgctctttttttctttgctaaagatgttgaaagttatgaaagggcatatggtaaactcttggataacatgcttcttggtgatttgtctcttaaagcaaatattggtggcactgaacttctcattttcccatccaataaattgccagagaggattcaacgttggaatggtttacctttcttttggggcattttttatgccccgaaagcaagtagtccac

SEQ ID NO: 279916 - DNA, 739 bp, Zea mays
gtcctagattcaggggtcgaggacgcgtccgagacaaatcactggaaagtatgtgtgacctcaaaagattgcataggaataccttggggaaagagaaagatggaagcagggttgaaaagagaaagaaaaaatcaactaagcaagagaaacattcaagaaatgttaaacaagcggttttgccccagacagctgacccggtttttgttgatccaccaaatcaagatcaatattttgctgcagaagatattgcatcaaaccaatctgttggtagacctttcttctaccagggatatcccatgactgttgtttcaacaagccagattcaggggcatactaatatgcattctgagcctcagtgtgcatctcaggaatattctgcttatggcacagttcagccaccatcacaatttggtggtggaagaaatttctgaaaggtgtagtgtcattgacatgtgaatatctgaagctcatatcagttctactgattgttgtatgtgaatgacttgttcatttaggcagtagacacccaacctagcaacagaagaaacaggttgctctcttccattttgtgaatgtactgattgtaaatctgttgtccacttaactgtatggaatatggaagcatcatgttgtaggaaactaaataagaatttgtttttgaagtctgtaccatttatatgctagctaaacaaaccagtgagcacttttttagacttcaaaaataaaaaaaaaataaaaa

SEQ ID NO: 279917 - DNA, 388 bp, Zea mays
ttttgacttctgacttgagctcttttttttttttttttttttccaaactggttttggctggtccaatggcgtggtgttgtcattcttggaagaattcgggtggccagagggcaaggaaatagcttgttgaacggcgaagcgctcccgacagggtggatctggtcttgccggagaccaatctggttaggcatcgttcatgtcacacatgtctagctacgagagtggcgcattgccttctgcagttcgtcaagtgcgtttgtgtgttcttgtttgcttttagttgcgactaggctgtagatccttcttgtatcccaacaatatatgtactgctactgtaccggccccggcctcttgtttaatctgcaatgctcattgtataaaaaaggaa

SEQ ID NO: 279918 - DNA, 536 bp, Zea mays
  unsure (1)..(536): unsure at all n locations
cataccattccgaattcgtacgctttgctgatgaggcaaaatcaaacagagtcatggcgagcctcaaggcatctggattacttcatgccgcagggatagcaacttccctgacaaacacgagccaacaatgggatttcccgaatggatgggccccactgcagcatcttatagctgaggggctgctgttttctggatcagaggccaaaaaaccagctgaggacattgctacgaggtgggtgagaacgaactacgccgcttacaaagcaacgggtgcgatgcatgagaagtacgatgttgaggcttgtggagaatctggaggcggtggagaatacaagccccagactggttttggctggtccaatggcgtggttgttgtcattcttggaagaattcgggtggccagagggcaaggaaatagcttgttgagcggcgaagcgctcacgaagnggtggatctggcttcgcggagagcaatctggttaggcatcgctcatgtaacactcggagctacgagagtggcgcattgccttttgagac

SEQ ID NO: 279919 - DNA, 474 bp, Zea mays
  unsure (1)..(474): unsure at all n locations
aggacgcgtgggcggacgcgtgggcggacgcgtgggcggacgcgtgggggacttcaagaacttcatcagcctctgcctacagaagaacccggtgaaccgtccgtccgcgatgcggctgctgcagcacccgttcgtggcccagccgcagccgcagcccctggccgccccgccgtcatgatggctcgccgaaatccacaattcatgaccgatttgattgattgattgcttcccgtcgtggtacaactgaacgcggcgggcggattgatctctcaccttgtcgcctgacctttggggtggatggatggttggttgcatgattggttgtggatggccatgagatgcggtacctagagacgtccctcctaatcctagctaggcatgcaagtggctcaggacaagccgctaacccgncaggctgaccgcacctcgccgcaacgacccgcatccgcataccccgacggcgtactggagctc

SEQ ID NO: 279920 - DNA, 558 bp, Zea mays
gactggtctgatggaggcttatgtcctcgggaagcagtatcgtaaggctgaagcagtcttccgtaggatgcaaacatcaggccctcaaccatcacctgtgacatatcacattattttgaaatctttagttgagggtgacaaatataaggtagctgaagctatatttgaagaccttcttaatgaaaaaagaacttcttttaaaccagaccagaagatgtttcacatgatgatttatatgtacaagagagctggtgactatgcccaggctcgtaagctatttgcacacatgtcggagagaggaattccactatctacagtcacttttaatagcttggtgtcatttgcgacacaatacaaggaagtttcaaatatttaggatcagatgcaaagagctggtctgaaaccatatgttgtgagctaatccccgctcagcaaagcttatcggaaacccaggacggaataacaggcattggaggtttttgaagagatgcttgatgctgcagtcaggcccacacgcacatcatacaacattttgcttgatgcatttgccagatccgg

SEQ ID NO: 279921 - DNA, 488 bp, Zea mays
cccacgcgtccgcggacgcgtggcgacctggtccacaaggtccgcatacccctttcccccgcgccctttatccctgcacccagcagttcggttgacgagcaccacaagtattcgtgctgctttggtctttgcgtcctggagcattaatttcccttctgatttgggtagaggatgatgcttctcgccaagctcggggcgccgagcgttccagggaagcgtcgagttgaagaagatgctataagttgcagaatagaaacataccatggttgtgtcatggacagaaggaaactgctgttggtccctgcgattagtatggccattgcctcctttcagtacacttttgtcaagggaatagcaaaagctgaatttgctgatatgcctgcacttcgcggtaaagattatggaaagacaaaaatgcggtatccagattacactgaaacggaatcaggcctccagtacaaggacttgcgggttggtgatgggccttc

SEQ ID NO: 279922 - DNA, 547 bp, Zea mays
ctttttcttcctttcccatcctttccacccatccacaccgccaccaccggctacctccaccaccagtccatctcctccgcagcgtctaaagccctatccggatatccccactcgccgaagcccggacacatggccagcttcggcgtcgacacccgcccggccgccgcggcctccggcggcggcgtgggcgtggcggcgacgagggagggcgcgctctcgtttctctcccgcgggctgcgggaggacctccgtctcatccgcgcgcgggccggggagctcgagaccttcctcagcgcgccggtgccggaacccgagctgttcgcgcgcctccgtcgcgcctactcctcctcggcgtcctcttcgcggacgcggctcgacctgtccgccatcgggaaggcgttcgaggccgacgcgtggaggggcgccaggactgccaggtggaggtgggaggcggagacggaggcggaggagtgggagccagtcaggatggtcaaggcgcacctcagcgagctcgagcggaggaggctggcccagtcgcccagcgaca

SEQ ID NO: 279923 - DNA, 637 bp, Zea mays
cccacgcgtccgcgttctgcgagaaggcaagcgtgggctgcttggttgcgccaacgctgtcgattgggtccgtgctccttcagcaagcggctatacaggcctcgttccactacagcaacgttgagattgtggaatcgagaccaaacccatcggatcttccatcgcaagatgcaatccagattgcaaacaacatatcagaccttggtcagatatacaacagggaagatatggattccagcagtccagccagaggccagctgctcggggaagacggagtgcgcgtgcacagcatggttctccctggtctcgtctccagcacgtcgatcaacttctctggcgcaggagagatgtacaccttacggcatgacgttgcgaatgttcagtgcctgatgccaggactgatcctggcgatacggaaggtggtgcggttcaagaacttgatttatgggctagagaagttcttgtagtgaacaacagacaaccaatgcaaaacatcgacaggcaacaggcaacgcagatatcatctgacgtcgcaacaaccaaaacgacagagatttggaaaataaaggctgcacagaagacgtctggggttttgtgtgcaccaggctgcgcagagaacgtctgtcattttgtgtgc

SEQ ID NO: 279924 - DNA, 278 bp, Zea mays
cacattccacgcaatggcgtcctctcctctggcaccaaccaggacctgctcggccctagtgcccaagctgccccgccgcccctcgctcccatccccgtgtaggtctccccgccgcagtgcgcggtggccgcgcttggcgtcagtcagagcgactccgggcagcagctggaccgcggcagcgacggaggagcagtaggagcggaagaggtgcctgagatgcggcggctcttaccgagacgaggagaaccacccgaccgcctgcgcttccatggccacgt

SEQ ID NO: 279925 - DNA, 630 bp, Zea mays
ggaaggccgcgcaaatacggacctgatggcaccatgaggcaacaacaacaacagcaacaggccgcgtcatcgcagcagcagcagcagcagctcgtcgctacacaaccgaggatatgttctctatcatcgggtcccgacatgctcggcagctccggtatggaggaccccgcgcagaagaagcggcgcggccggccgccgggcaccggcaagaagcaccagccctcgacctcacaaggcaacgcgttcgccggttcggctggaacgaacttcactccgcacatcatcacggcgtctccttcagaggacgtggcggcgaagatcgttgcgttcgccagccagtcgtcaaaggcggtgtgcgtcctctcggcgatgggttccgtctccagggccgtcctccgccacccggccgacggctctcccatggcgagggttcacgcgtcgccgcagccgtacaacaacagccctgccatctacgaggggttctacgagatcatgagcctaaccggctcgtacaacctggccgagggctcacaacaagaacagggccagggccagccgagcggcgggctcagcgtcacgctctgcagccctgagaggaatgtgatcggaggtgttttgggcggcccactg

SEQ ID NO: 279926 - DNA, 561 bp, Zea mays
cacacgcgtccgcggctctatggcgaccgcccctgccgaggagccgaccgacgggcgaacggggagggaggcgatggcggcggcttgggggcagaaggccctgggggctctgccgcagctggtgaagtcgctgcggagtgatcccgtctccggcagcgcacgacacaggcgccttccgtctctcaggaggaccttctcgttgtacgatcagatcaacctcatcgacagcgtcccggaagacgagctccgattccagtcgtatgatgacactggattcaaaattaacaatgtaaaatatgaaggcagtgtattgattgtagagaacaagataatgacatgggcacccaaaacgttctcagagataactcctgaaagtttatcaatcttcaaagttgtgcaccctatcccagagatctttattcttggttgcggaagacacgtccagctggtcagtcctgagctgcggatgttcattcggtcaactggaatgaaactagaagcagttgatccgaggaatgcagcttcaacatataatatcctgaacgaggagggcaggccggt

SEQ ID NO: 279927 - DNA, 348 bp, Zea mays
cccacgcgtccggagaaggagatgagagagaaggaattgagcatgggtcttcgggatttggtcgtggacactgacgacggtggcaatgccaatcgctccaaggagaacggtagcagcggagggcccagggtagtgcgcaggaatgtcgtcaatggcccaaccacgcctgctaggtaatggctttctagagcttgcagtgtgcttggtggaagaagcagtgccgcagtgcatcaatctgtgtgacaaaagcaaataaagatctgttgtccttttctcgcttatacctgtttaagctgtctattgtattctgttgagaaatcaatcacatctatactttgtttctgctag

SEQ ID NO: 279928 - DNA, 532 bp, Zea mays
cgcccaggagccttatcctccatctgtcgacatgctcatcttctctccttcgtccgttcagccggcgcaagattttcctgtgtcttagttgttctcatcctctccttagccgccgtacctactgcgtgatatttttgccgccgcccctgttcgctttatatgcgcgctatgcgtgctcgtgcggcagattgctcggctgtttcgggcagatgctggggcactcgattccctagcgcccagacttccttcttctccctgaagctcgcctagctcggccgtcctccaagtttcgcccagcccagtcgttcctcctatgctcggcgccggatttctgctcgcccggctctgctccttcgcggcggcagcttgtgaccaggatgtcagtattcctgtaggcgacctggagttgggggacgacaggagagcaggaactgatgaagtgatgggccggcgaacaaggaagcccaatagcaaatgggccggtgccgagttggttcgttgaagggtgggccggcgcttaatagctggttgt

SEQ ID NO: 279929 - DNA, 802 bp, Zea mays
acgctgcagtacggtccgaagctccgggtcgacaacgcgtccgcttggagctctcctttgctgtgttctggccagctcaagaaccactgcatctgccccctataatcagtaccttgggctgccgtattcagtgaagatttcttccttgccctcaaattctagtcaaagttcactgtttgagtgtgcagtccttgtgtactgctggtataaccctctctgcagcctaggtttgccctgtcccagaacccttctccccatggactagatgcgctcactgacacactcctttcccatgcttacatattctgtaatttggggctagttattttggtgcgccgccgtgcgcttaaattccagccaagactctttgcatatgcgaggtgttcctgatgttcttaagtctacacagctccctccctagccaccaaaatttggtctgtacagaggctgggcacaccatcaactgttgttgtggtgaccactccggtcagtttgccgccttgccgtggccggagcgattcaagaagggtcgtgccgtcgtgatctagcactgcggacagcctccacgctggccgagcaactcgcgctttctccagccgtcttcacacgagcgccaaagtcttgaagtggtgtttgaaggaggagtctactccagtggttgctgatcaagtggaggagccatctatctgggtattggatagagggatctgaagcctcttctctgcaacaaaggtaatcaggagtgttctaggtgtctctgtggctggaagatgcttctagtcttgaaggaggattagttagg

SEQ ID NO: 279930 - DNA, 470 bp, Zea mays
atttcccagtgttccaatgatagctttaactgcaactgcaacaagtaaggtccaaatggatttaatggagatgctccacatcccgagatgcatcaagtttgtcagcacagttaacaggcccaaccttttttataaggtgtctgagaaatcgccagttggaaaggttgtcattgatgagatcacaaagtttataagtgaatcatacccaaataatgagtctggaattatatactgcttttcaaggaaggaatgtgaacaggttgcaaaagaactgcgcgaaaggggtatttcagcagattattatcatgcagacatggatatcgttaatcgtgagaaaattcatatgcggatcgacacacaagggatgtgattgggactggccgtcgccgtaaatcttcgcctcgcctctacatcttggacaccttgcgtcatccttcacaccatatcactacaactcatgtgcttgctgc

SEQ ID NO: 279931 - DNA, 507 bp, Zea mays
aactggttggattgcacagcttggtgggctacaatgtcgtaacttcccggcgacgcaatgttggcaaggtgcgtggtttcacatttgacatcagctcaggtgctatggagtctctcgagcttgactcttttgggctttcgattgtcccttctagcttggtaagcacgtactgtttatttgtcgaagacgtgctggatatagtctctgatacagtcgtggtgcatgaagacgccgtctcacgggttcaacggttaacacagggcattttgggcactcaaaacatccacgggcctggtggtgagattgacgagtacggtagatttggggggaggggaagggggaggaggaggagagcaaatggccagggaaagtccggtggccgagaactccgcagcgaaccgaagcatccggaggatgaatgggacctgtcgatgggctacagacacagattcgccatgacagcattcagtctagtggtattgtattgccagacaagtacatgcattg

SEQ ID NO: 279932 - DNA, 399 bp, Zea mays
cggacgcgtgggcggacgcgtggggaaagcgtagagctagtcagagagagagagagagagagagagagagagagagggcgaggcggggggcgggaggatggctttgctgcagagccagagcctgccaggcattggctgctgcagcagcagcatcgtcttggcacgagcgagggtgcagcagtgtctggcagcggcgtcgcactcacaggcgcccctcctgcaggccaatggcggcagggcgggcctcccctcctcctcctcgatccttaaggctggcaatgcgatcagcttcagccggcggagaaggagagacctgcgcgtcgtcgcggaggcggccacggcggggacggccaatgtcacgccggcctcgtctggcggcgtcagcctcagcgacgtgct

SEQ ID NO: 279933 - DNA, 646 bp, Zea mays
cgcttctatccacaaaccccagccgcagcgtccgtgtaccagtgatgttgccactgcccaccgtgggcgtgggggcggtcgccgcgtcgccggccaccgccgcaggggtagcggcgcccataaggtttcgtccgctccgcctcgtcgcgagtcgagccagcactaccccttcttctccctctacgtccagctcggctatatccagcgcgtcaccagcggggcattcccgcgagcacctgtcgggcagggacggctccccatcgaagaccagcaagccccgggtgttcttcctcgacgtcaaccctctatgcttccgcggctcccaacgtagcctcggcgccttcgcgcgctggctggccctcttcttcgcacacgtcagcatccgtgaccccgtcgtcgctgttttggacggggatggagggaacgagtaccggaggcggctgctgccttcgtacaaggcgcatagggctcgcggcgtcggcactggcgctgacacgcgcgtcgtcgacgttctccgccaatgcaatgtcgcggttgtaagagtcgatggatatgaggctgatgatgtggtggctaccttaacagaacaggttttacagaaaggttacagagttgccattgcctcaccggataaagacttcaagca

SEQ ID NO: 279934 - DNA, 447 bp, Zea mays
cccacgcgtccgcagcttcctggtcggcgagtgggaacttgatctcactgttgtgtaactgcttgctgttgtccctcttgcacaacatggtacatggagacatggcatatctttatctactttatatagaaggagcatgctttgccctggtttctcactcttgaacttgcatataagcccattgatgtaaggagagtgcaacttgtcatataaactctttgatgaggttcttgatgatgttctaatctacaaatgtgttagaagatggccggatcctgtgtgactggcaagatttaccatttaaaaactatgcccccggagaatgaggagaattctatccgacttattacacgttctgatgccacatttgagaagagccagaactgagcacctacaacccttttaagttaagcaacacaagttgaatcatgctcccatgtggtttgt

SEQ ID NO: 279935 - DNA, 656 bp, Zea mays
gatccagggcccacctcccaacggcgacaacgcctatgcttacccgccgtccattcatagcgccatgctctccccgtccccatctcatgcccccccgtctccccatccaaatgaaggggtggcgattgttcctcaagggccatatccggatggtggcagttaccaaccttctgagagcgtcgggagggatgtactggatgaggtggagatccgacagctactcattgaccatattggacatcgatgctgttggggaagtcaccctgcccgcacatggaaaattacctccattgaggactgcaatgtctatgttggcaccttggaaaccttcatcgaggaaagatacattattacaaaaaaggagccctttgaaagtgggaatatagatggaagagaaaaaggtcctttgcctggattgtgggaacttgatttgaggtctaagtttcctgtactttttgtaccagagaaagaagtgaccgtcaagattccacattcagatattattgaaaagtgctcagattgtgagggtcgtggagagaaaccatgccctacatgcaatgctggtcaggctcacgggtttataaagcatatcagatgacccagtgtggtgcatgtcatggcagaggtctacttgctcaccaagatggatctgattc

SEQ ID NO: 279936 - DNA, 639 bp, Zea mays
ggtgttgtacaagctgaccacctgcgtgaacgtggtggtgacgttgccgcccaacgagctcgcccactccgtggccgtgatattcagcctcgccgtcgccgcgtactccccgtcgacgccgtccgcggagcgccacacgatgctgcccgccagcttcggcgcgtggtacgcgacgagcccgccgctggtcctggagctcttggggtccagccacaggtggagattggcgtccacgtaccacgaccgctgcgcgttggtcaccgcgaacccgagctcgtgctcctcgccgtccaggaggctgccgaggaagggcgtgagctcgatgtcgtaggtgggcatgttgaaggagccgatgctggtgatggggcgccagatgagcgggttgatgccgccggtgtagatcaccgggaacggccacacggcgcccaccacgtcgccgtcgagcaggacggtgacctcgcggaacggcccgttctgatcgggcgtgttcatgtaccagaactcgtcggcgtcgtgggacgagacgtagacctcgaggacggcgcggtacgcgttgcgcggcaccgacacgcgcgcggactgcacgtcggtgtcgttctggacgacgaaccacagcccgtcgttgagcggcaggctctg

SEQ ID NO: 279937 - DNA, 396 bp, Zea mays
cccacgcgtccgctgatctcaagcctggtcaactaacagatctgaaatcattagctgtcaataacaattcatttgcttatgtcgccgttaagaaatctatccataggtatctcataaaggattctaactatcttacgacagcggtaaataaattcgcgaattatgttaacctttccagttcagagaaagacttgttagaagaaccaacatgtccaaaggttcttggtgatattgttgaatcttgtgttggtgctgtgctttcagattctggcttcaacctgaaccatgtttggaagctaatgctaatgcttcttaaaccaacattgagctttttgtggcttgcacatcgatcctatgagagaactccgagaaacttgtcaatataatggttttgac

SEQ ID NO: 279938 - DNA, 563 bp, Zea mays
ctgatatggtgacctgcgaaaatgtcatggctgcctgtggtcacggtggcctccatggggatgccagagaagttcttgaatatatgaccagagaaggaatggtgcctactgcagatgcctacactggcctggttgaggcccttggccacgcagctatgtatgaggaagcctatgttgctttcaacatgatgactgaaatcggtagcttgccaactcttgagacctacaatgctcttgcatttgcatatgctaggggtgggctcttccaggaggctgaggccatcttttctcggatgagtaacaatgctggcattcagaaaagcaaagactcatttgacgccctcatcgaagcatattgccagggctcccgattggatgatgcagtgaaggcgtacatggagatgcgtaaatccaggtttaatccagatgagcggtcccttgagggagtacttaatgcctactgcatagcaggggtcatagatgagagtaaagaacagtttgaagaacttcaatctagtgtgactatgcccagcgttattgcctattgcatgatgctgtcacta

SEQ ID NO: 279939 - DNA, 431 bp, Zea mays
gtggagagtcatcttggacacttcggttctatgagtccttctttgtggaatgtgtgccagtgattttgtcagatgaagttgagcttcctttccagaatgtgatcgactacagtgaaatctcgataaagtggccgtcgtccaggattggacctgaactccttgagtaccttgaatcaatatcagatgaaaggatcgaggaaatgattggtcatgggcgtgagatgagatgcttgtgggtgtatgcagctgatactgagccgtgctctgccatgagcggtatcctgacggagctgcagaagaaagtgcggcggttccatcaatcgccggaaacgttctggctgcacaacagaacaattgtgaatagagatctgattgagttccacagctggaggacgcctgttccgttgccatgaaccatgtattctgatttc

SEQ ID NO: 279940 - DNA, 647 bp, Zea mays
gcggagaccgccgtctcgagcggcggcggcgacggacggaggaggagcggaagtacacggagtacccggtgacgatcgagaagccgtacgggctcaagttcaccaagggccgcgacggcggcacgtacgtggaggccatccagcccggcgccgcgccgacctgaccggccagttcgaggtgggcgacaaggtgctggccaccagctccgtcttcggggaggagatctggccggcggcggggtacggccagaccatgtactgcatccgccagaggatcggccctctctacatgaagatggagaggaggtttggtaagtgggacggcgccggcgacctcaccgagaaggagatcatcaggttcgagaggaactccggagtggtcagcggcagggtgcgggagatccagctgcaaaactaccagaggaagatggagcagaagatgcagagggaagaggacctccgcatggggctcaagctgtacaaggacgggaagtacgaggaggcgctggagaagttcgagtcggttctggggtcgaagccggagcccagcgaggccgccatcgccagctacaacgtcgcctgcagctactcgaagctgggccgggtagaggtggctcattgggcgctggaggatgcgctcaagtcag

SEQ ID NO: 279941 - DNA, 532 bp, Zea mays
cggacgcgtggggccgcaagctccatcttcctccctgctgcagctcccgagcgccctgccctttgctccagcttgccgcgtgctctagcgtctgtgccgtggagcccctggcgcgggttcttctgcgcccggccatcctctctctccatcaccatggagcttcttttctccagccgcgccctgctcggttccatggccaacgttccccaagctcctccctccagtccagccgcggtgctccctgcgcgcctgctcccgcgcgcgttcctctgctcgtcgcgcccagcgagtctccatggtcaagcacgcgcggatctcctctgagctcgcccccggcctctactccttccagccggtcgagtctcgactgcgctcggcctccagctctattgtcgcgtagctcgccgacgttgcccctgtttccatggctgaccgcactgctcctcaacgccgtcgttctctgtgcccgggcatggggcttcctcgccgtcgcgcgtgctccttatatgatctgctcggccatggacgccac

SEQ ID NO: 279942 - DNA, 362 bp, Zea mays
ccttatccttctcctcgcccgcatttcatttcgttcggcgtccccacacggccacaccggaaaaaagaccccggcaagaacctcgctctccggcgtctccggccaatacccatggaggccaccgcagtgccgagggctctgttcctattcgggacatcgccggcgccgtatcgtatgcgtatgaactgcttgcgcgtagctattggaggagatgtgaggcggcagggggccgtggcagtgtgggcgaagaagaagagggggagggggcgggatagcgagacggaggaacgggtggacacgcacagcttcacccccaagccgggccgaggctgccgggctgttccccgaaggcgttctgctta

SEQ ID NO: 279943 - DNA, 408 bp, Zea mays
gttgctccctcgataaagtttcacgatgcatccatataggactcctgtgcgctcaagacaatccgagttgcaggccactcatgtcaacagttgtgtccatgctggagaacaaagcaacaccactgccaacaccgaagcaacctaaagattttgcacttcgggactacaatcctggaaacgaaggtgtccacagggaattgtccgtaaatgatacaagtctcactatggtggagggccgttagattattgtttttgatactacgatgggggagcacatagcccaccagaaatattcattgaagacagacgtttagtccctattttgtttatgggtatttctgtttagacaaatttagtatcaatttaatctataaaatttactatgcaatttaaaactactcccaaggt

SEQ ID NO: 279944 - DNA, 318 bp, Zea mays
aattgtccgtaaatgatacaagtctcactatggtgcagggccgttaaattattgtttttgatactacgatgggggagcacatagccccccagaaatattcattgaagacttatacgtttagtccctattttgtttatgggtatttctgtttagaaaaatttagtatcaattttgttggaacttgctctccggtgcaagttgatccaacgggggagtgtagcaacgtaaacagggtttttgcccgagatgacaatagctctgttaatctagcctctcaagggcactgtgcaggggtatttataggtatctgagtgcccc

SEQ ID NO: 279945 - DNA, 488 bp, Zea mays
tacatcaggctcacctggagtttttgaaattggcaagtatagtcaagcttcttcaggtgggttctcaatgggccctagtggtggcaacgacaaatcaaacagaagagttgtcagagttaagagaaggaaatgaaataccaatactgttcaagttgctctgagcatttataagactaaggcaatcagcacgtagaactttttgtttcacatcatttgtctgcggtggcaatgacaatgagatgccattcttaaattggtgatcacacttctggcacagtagcagcattggaactagccttttcgcgatacggtcgcccatgacattttgtcgtacggtttgtcacaacaatgctataatgaaatatataggtacttctccaacttgtattaaacatgttcagcgatcaagctgccctttttttgtgcaattggatcctgaaactaaatttcatcctaataataataatttaggcacgccaattattatt

SEQ ID NO: 279946 - DNA, 518 bp, Zea mays
tcccggggccacatacgcgtccgaccacgcgtccgcccacgcgtccacacagacacaggtcacaccgtcacacgcacactgcagcgtggcgcggctactccccgccatggccaccacctccgtcgccgcctcctctccccatccccatctgtcccgcccccgccggcggaactccagcgccacctccagaacctcgatccggggctgcctcctgcccatccgatgctcgtccgcctcgtcgtcgcaaccgccggcaaccggcggcgaggagggagagtcggggcgccggcggctgtcgaagcagtcgtcgtgggaggacagagatgtggagggggacgactacctctaccgcctcgggaaggaggctgacaacttgaacatcaccgttggcgcacggtccggcatcgtcgacgaactcttcgtcggaaacttccatcgggaaagactcggatatcgtgttcgactaccggcagaaggcaactggaacgttcgagtacctgcagggggattactacatc

SEQ ID NO: 279947 - DNA, 452 bp, Zea mays
aacacgcgtccgatgtggggaacgaccatggaaagcgagacatcagcaagcaaccagaaccagcaggcgaggcggatcaaatatgcagagcatggagagagatatagctagagcctagagcgagcaccagcaaaccaaacaagcagaccaccttctccacccggccggccttcgtcttcctccgatccccaggccccagccactccccgtacaagccaaagagaccagtaggtaggcaggcagttcatcgtcgatcgagcaagatgtcggactggggccccgtggtgatcgggctggtgctgttcgtgctgctctcgccggggctgctcgtccagctccccggccgccaccacttggtggagttcggcaacctgaagaccagcgccgtctccatcctcgtccactccatcatctacttcgcgctcatcaacctcctcggcaacggcaaccgg

SEQ ID NO: 279948 - DNA, 500 bp, Zea mays
ccgacagcgcgactgtcgtgcaggccaccgccgaggatggtgatgacgacacctgtccgagcagggatctgcttgtcgacgacattggtgggctcatcagctggagcaggagtccggcggcacccgcctcagcggctgcggccacgtgcagcttccgggcgtcgccggcgttgtccgtgcagcaggacgagatcacggacgctgccatgctgctgatgacgctgtcctgcgggcttgtccggagctgatcgcctgatccacgatctgctacctctacgaaggacgacccagcgcaccgtaggcttttcccagctagcagctagcttgtgcctttgactgttagctagcgttactgttactgctgttaccatcgtcgtctaccgtaatacctgtagtgcttttgtttagcttcttggtgctagtgtgaccacccgtgtcactgttcaagtcatgtgattcgttcgatgagttagagagagagttgctgcctaggtgcgatg

SEQ ID NO: 279949 - DNA, 297 bp, Zea mays
catcttttttatttcagcacagcaaccaacaagcttgagatagtttgaactttggatttccaataacatggtaacctcccatttacaagaatatgcactggcaatgtaaatataagtgttaggtaatgcaaatatttgcatgacagtgcatattcttgtaaatgggaatttaccatgttattggaaatccaaagttcaaactatctcaagcttgttgcatgacagtgcatattcttgtaaatgggaatttaccatgttattggaaatccaaagttcaaactatttcagcacagcaac

SEQ ID NO: 279950 - DNA, 684 bp, Zea mays
gtgtgactagacaactggagacaacttctgggaattaatggatgatacttggtgcgagtgcgcatagcactgtggctaggcgtgaagcagagaatgatgtctttgcaacagaactgttaatatctgagcttggtcacctggtatctgtatctggagatccaatgcaacgacttggagcctatatgcttgaaggaattgttgctagactttcttcctccggcagtatgctatataaatctttgaaatgtaaagaacctacaagctctgagctcatgtcatatatgcatctcctttacgagatctgcccattctacaagtttggttacatgtcagcaaatggtgccattgccgaggctattaagggcgagaactttgttcacataattgatttccaaattgctcaggggagccagtgggttactctgctacaggcccttgctgcaagacctggggggccaccatacattagaatcactggtatagatgactcaaattctgcttatgccagaggaggcgggcttgatatagttgggaggacgttgtgtgatgttgctaattcatgtggtcttccttttgagttcaatgccgttccagctgctagccatgaggttgagcttcagcatcttgctataagacatggggagattattgctgtgaattttgcctatcagctacatcatgttc

SEQ ID NO: 279951 - DNA, 414 bp, Zea mays
cgctacgtagctggaatcgctcgagcttcctttccccgtccagtggcggacgccctagccaggcaccacaggccacagcctgggctgccccactgccccggtcgccgtcgggcaagcgccgtccaacctgtgcgtcaccgcctccgccttcaggttcgcctccagcaggggcgccgcgtggggcattcggctcgtcgtcgacgagagagagtcacttctgccgagggagcagggatggagccggtcgtggggatcgtggtgtcaaacaagatgcagaagtcggtggtggttgcggtggaccgcctcttccactataagatgtacaaccgctatgtcaagcgcacctctaagttcatggcacacgacgacgctgactcctgcaacattggcgaccgggttgtatggtggggattg

SEQ ID NO: 279952 - DNA, 399 bp, Zea mays
acgcctccgcacttctgtcaactccgttcaaacttctggctgctggtccgcttggaatggccactgtcactgctgggatgtactgtgctggcagatacattactgacatacgagtaaggaaggacgtagcaaaagttgaagtggagaaattatcatcgcaccccggtttccaccttgttgaacatgaagaatcagtcaacaagcgatcagaaaaaccaaagaccttgctccctatgaagaggaaaccacaaacgtgactgcgaagcacagcttacgacgatgaacttctcttcccttcaattggtgtcgaattgtggataacttgggatatgataataagatcggtatagatatgtgccttgccaatgtatcataagtggattaggcgcacccctcacc

SEQ ID NO: 279953 - DNA, 397 bp, Zea mays
aacgcgtgggtttcaacaaaagagagcttgttaaagtgtgagaaactttcagtgagcgccttctgcaggcggagacttgcaacagttatggtgaagctcaagtttgcagagcaccttaaggaggctgtgacgtacatcgaacaggggcatgtgcgtgtcggtccagatgcagtcacggacccagcctttcttgtgaccagaaacatggaggacttcatcacctgggtggattcctcaaagatcaagaggaaggtcatggagtacaatgatgcattagaggattatgatgccatgttctgagaaaatcattcggcagaaatttatgtgcccgtcagtagtgtaatcttaagcctgccacaaaggggtcgtttctgaagaaatctgtgggaattgtctt

SEQ ID NO: 279954 - DNA, 414 bp, Zea mays
acccgcgccactaccgcctctcacgacctcctctctttcgcgaccacagcaacaaggaggcggctgctcctctccaccgccaccaccaccattgccgccgccatggccgcttcttcctcctgcaaggtcatcgactcccacctgcacgtctgggccacgccacagcaggccaaggaggagtacccgtacttcccaggccaggaacccacgctgcgtggcgacgccgacttcttactcgagtgtatgagtgaagctggagtggacggggctgttattgttcaacctattaatcatatgtttgatcattcgttggtaactagtgtgttgaacaaatacccatccaagttcgttggttgctgttcttgcgaaatcctgcagacgatgggactgggattaaacaactttgacatctga

SEQ ID NO: 279955 - DNA, 509 bp, Zea mays
gagtcccgggtcgacgcacaagtccaaaaattcacggatttcacaattgctcattatcttagtgggcccctaagaatagttgattctgaaggggttccagcttcaccaggtgatcttctcgcggtagaaatctgcaaccttggcccacttcctggcgacgagtggggttacaccgcaatacttgaaagggagaatggaggtggattcttaactgaccacttccctagcgcaagaaaagccatctggtatttcgaaggaatctacgcatgctccccgcagataccaggtgttcgttttccaggattgactcatcctggtgttgtgggaactgcaccgtcacttgagctcctaaatatatggaatgaaagagagaaaagtttgtctgagacaagcccggagactattaaactgtgtgaagttctacaccagaggccccttgctcatttaccgacccctgaaaattgcttacttgggaaggtccaagaagggactgctgaatggcacataat

SEQ ID NO: 279956 - DNA, 426 bp, Zea mays
aagtccaatccatttctctttctgctgcttgtgatttgttcatgcggtttgtaacgaggacctcacatctggagcatgagaagtttgatgcagcacaatcgcggctaattgagcgaggagaaaaatttggggagatatctttaaaggctcgcaagacaattgcaatgcttagtcaggattttatttatgatgggtgtactatacttgtccatgggtattccagagtagtactggaagttctaaagcttgctgcatccaatcgcaagctcttccgggtactatgcacagagggcaggccagacagaattggtttaaggatgtcagatgaacttgcagcatgtaaggatcgctgttaagggtcgaattgatgtagctggttgcgtagtccattgatgaagttgacatggggttttgttggcgctgatg

SEQ ID NO: 279957 - DNA, 610 bp, Zea mays
gctcgagctcgcagcgacaggcacaggcagcaaggctggtttccttcctcgtcgaacgtctgccgctgctcgcgatggccggacgcggaggaggtagcaagagtagcctgtacgcggcgctgggcgtggccagcgactgctccgacgccgagctgcgcacgcctaccgcaagctcgccatgaaatggcacccggacaagtgcgccggcgcagggagctccggcggcggcgcggacgccgccaaggccaggttccagaagatccagggagcgtacgccggtaactaatccgctttccattttgaatcatactcgactctacgcgttacttttgcttgtaggttgggtagctctttttaagagaattgtcatgtatgtacgtacacgtagtcgtcggcctagtatattttgcagcttgcactttttggtgatgtggtttttaactgacctggccagtcctgtcggaccccaacaagcggatcctgtatgacgtcggggcctacgacggcgaaggcgacgatgacggcgccggggagatcctcggagacattctcgaggccatgagccaggcaggccctgccgccgtaagaactcagtcagcagccgttatcg

SEQ ID NO: 279958 - DNA, 409 bp, Zea mays
tcagcttcttgtccatggcaagcgtgtcgaatgtagatgggtggtggagttcaatcggggaccaattgccgtactcagtcatgtgtatcatgagggttctctcctgggctttaatggccttggctgtggccaaaatgaacgggagacaaggcaccacttgaactccgtgccttgataaacatcgagcatctcgtcgccctcatccatgctgaccatcatcttgtcgtcctcgtccatgctgctgacgcgcaagcgctgctggatgtcagtgttcatgcgcctggcgaatgtgctgtgcgccgcaaacttcctccctgaaacgggctgcgaaattgggaatttggagcgccaggaaacttccgtgattaggtcaactccaagtctccgcttgttgaatcccactaacaga

SEQ ID NO: 279959 - DNA, 395 bp, Zea mays
cggacgcgtgggcaaaagcaacaaacaactcccaaggtccaaagcccacccgtactcatccgcgatccccaaccatggccgtcggcgacgtggagacggcggcgccgctgctgcccccgccggcctctgccctggcggacgagccctccgcgggcccgcccccagacgaccggctcggcatcggctacctcatcttcttcaccctgggcgccggcttcctgctcccctggaacgccttcatcaccgccgtcgactacttcgacttcctctacccgggggcccccgtcgaccgcgtgttctccatatcctacatggtctccgccttactgcccctgctcgtcatcgtgctcttcttccccaattcgagggcccccattcgggtcaacacgggggtc

SEQ ID NO: 279960 - DNA, 635 bp, Zea mays
ccgagaatataacatcaagtaggggtttataacgtcacaggaatacaggatatgcgccacaaattcgtgatattttcaggcacataagacaactggatttttttcctgcttgatgggattattcttccacacacatagccgaaggttttcattgccttgcaatccactgcttcgaccaaggtatggctaaacctatcctcgtccagagttctctgtccgcgcgagctagccactagcttaccgaacgatgatcagtcgaagataacaacaatggggctcctcacgacatgggcgccgccgtcgctccacgcgtacgagccggccacgacctgccttctcgccacgcgtgcgccgctcctccccctgctggccgcctccatctttatcctgaacgccctcttctcgccggcccgcgcgaagcggagccgtctcggcgagaccgtcacggatacgcccgcgggctcggcgacggccaccatcgttccgcgccgcgcccgggccgacgttgggtgaccgtccggcgcacggtcaccgagccgttgagcccgcgcacggccaccggacgggtggttcagctggtgcggcggcggcgggcgcggccggcaggggaccgagcggtccagctgggacccggc

SEQ ID NO: 279961 - DNA, 669 bp, Zea mays
cggacgcgtgggcatagattcatcccttgctaaagctctgatggagtccattaagaatattacaaaacttgacggtgcccaatctacaaaaaaatattcccaacagtgagatgcaatgtagactaactcgcttgccaagtagtcttctgccaggattgaacttgggcatttggaatggtggtcactagtttgttaaagtcgcaaatctgtgggcaaatcggatatctcctgatcctcctcatctgccaagcaaccccacctcttcaatgaacaatgcagcaacacacagccagtcatgctgaataacatgtcatacatctgaggctgtgacctacactctgatggaagcatcaaatgcatgttgtgtaaaacatattcgtcaagttatcgtttttatatacgtaaactgagcaagccccgtgctgatttagggctgttcttggaaaataaagatccaaggtggctgttcctttgcaggtcattcttttgttcaagttgtaatttacaacattctttccatagtgccggatgatgtccctaagtatagcaagtcgaaagggaatgacaagtttggaagtggacgtctggtataatgttgtactaaaacccatccgaaatggtgccaccgcgtagattatcaaagctcccaattggaatacggctcgtggg

SEQ ID NO: 279962 - DNA, 441 bp, Zea mays
agggtcaagcattcatttgactccttaactatacaatagcttccttccaaaacacagatttgtggtgaacagaaatcttgagactggcaggttagccaccattggggacctgaagaccgtcgggattgctcagaattttactatactgatactaaaaaatacagtaactcatattggtaagggcgtaaggcataattcgtttttcgtattcgctcgatcaaggcaacaggacaagggttttgtttttgtcccaggtctcattgtcctagccacgcccataacacaaggtagcattcctcatgttgtatataatatcgtcgtggatgaatgaaacacttttggacttttttttttgcgtacgagattcttaggcaccgtttgtttttggtcagaatgacttcactgagccttccatagaagacaatattcataactggggaa

SEQ ID NO: 279963 - DNA, 598 bp, Zea mays
aaggacgcgtgggtgtttacttaactgccgttctgtcaaagatacaagaaggggggtggttgccgctggctttctcatcactgtttctctgcataatgtacacgtggaactacggaagtgtactgaagtaccagagcgagatgcgcggcaagatatccctggacttcattcttgatctgggagccacacttggcaccgtaagagttccaggcattggactcgtgtacaacgagctggtccagggaatcccatcgatctttggccagctattagtcacacttccagcgatgcactctacaattgtctttgtttgcataaagtatgttcctgtcccttatgtccctcttgaagaaaggttcttgttccgaagggttgggcagaaggactaccacatgttccgcagtgttgcacgctatggttacaaggacgttaggaaagaagaccatggcttctttgagcaacttctggttgagagcctggaaaaatttctcaggagggaagcccaggaaattgcgctggaggcgagcacaatggaggcagagcgtgatgacatatctgttgtatccgaggtgcctcagactcctgcaggtgacgggga

SEQ ID NO: 279964 - DNA, 503 bp, Zea mays
gatgaacatctgcctaaagctcccacagctcggtttttcctcttactgggatggttcttcatcatcacaggagtaatactgcttgttagttcaacccgattgattgcgcgtctacctaggtctgttcagaagtatttgaagagcaacatagagcgcacccacagcatcaggaggcctggttcagcacgagggaaggatcccatcccaacaacaacgatccatacgtcgtcactacacttgcttgcttctccaacaaaggagaaggcctagaaaaatgttggcactagagcaacttcgtttgggcacctcacgtttgccatgttattgattgattgaatggttccgtgaacgtagtctagagtagcatcttaaaagcttgggttggttattcaccatactgccctttataggtctaacagagacttggggaaaaattgctgagtttttatcaaaataaaaaaaaaaaaacaaaaaaaaaaataaaaaaaaaaaaaagggcggcc

SEQ ID NO: 279965 - DNA, 643 bp, Zea mays
cggacgcgtggcggacgcgtgggcaccaaatggcaagcagcgcgggcttttcttcctccttgtacaactcgtccgagaccgttgcgccggcgcagaagtcggcgactgcgctgctgcagaaggccgctcagatgggcgcgacgacgagcagcggcaacgtgaactctctgctcagggggcttggtagcagcgccggcggcaccttgaacgggaggcctgccggagcagcagctgggttcatggccggcgagggatcctcgtcgaggagcacttcccaggccgagaacgagagccagttccgggacctgatgaacacgctcgcagcttccgggagcggagctgctggcacagcgttcagcgggggtttcccgggcatggacgacagcaagctgagcacgagagacttcctcggcgtcggcggcggcgtcctgcggagcatgggtggcgcggcagggctgccgctgcggcacggtgccgcgggcattggcatgggctcattggacacagaaatgaagtaggtgaatcgaaatccgaaacgagcattattatgctccactcttgggctcttgcattgcatgcaaggtaagtagtagcagcctaagcaaacgacctatggaaagatgagaccattttcgcgcaaaat

SEQ ID NO: 279966 - DNA, 430 bp, Zea mays
acacagttcacaaaggtgggggcgaaaacatccatttgttcggtatgggttaccactcatttccttgacagtgtttggtgcagtgggacttgctcaccttatacagggcagcaaagacgtgaccaaggtaaaggaggatatggaatgggaggttgtacagacaacacaagctctaagtcgaacacggccagtggaacgagcctataagcctaagaaactctctctagaggacgaactgaaggctttgcaccagaaggttgacataaacagctacgactacaagcccatcccaagacccagtgagaaataagtgtagatgaagaccgtttgctagtgcgtcgagtggatgtttgtttcttgatactttcgtcgtctcgtcttgtcacaagttttgtatgaatgtacggagctgattcaagtttgaaattag

SEQ ID NO: 279967 - DNA, 594 bp, Zea mays
agacaaggcaatatgcaagatgctggtcgtgttttcaagggaatgggtgacagtggaattgaaccggatagatatacatacatgtcgttgataaatggtcatgttacagctggcaactcgaagcaggcattccaacttcatgacgagatgatccatagagggtttgctcccgatgacaaattttgaggcttgtcagttctgacctattggacataagcaagagaaatgcatgtgttgtgtgtttgacagtgtctttgaaaatcacacctccagaaatttgtgatttcgaagcgtcgaagggacaggtccagaaaaaaggggagattgttaaaattccattacttgggagtgaccgcacgaactatggtaatgttgccatgttgctccaactatgttctaaagattccatggcgtggctaagcaaaactgctgcacaaaaaggaaacagaatttgactggacgtctgaatatcttcccttcagtctgagctccagaccagagtgcaaaaagaaacattgaaccaatggaaaaatgaataaaagaacaatcagtaactacagtgcatgtctgaagattctcatgggcgtgggcatc

SEQ ID NO: 279968 - DNA, 471 bp, Zea mays
ggggaggactgcgctggatctaagtctatgctttggaagggatttcaagtcatatgatcttgcaaagcttgtcaagcttattccagcaaacagaggtgcgtgatttcgctctgccatgaatctgagggaaagaaagtccaaaagttagccaatgcagcagcctcatacgacccatgcatagcttatgaagaagggtccaggagccgcgtgccgccgtgccggtcatcattcattttttttcttggccgccaactcgaacgatctgacagattgctctacaattgcgccgttagatttcagtgtcatggtctgtagcctgttcgacgtgactcgaaaaatgaacctatggatgtacatgcaacagtcctccagctgttgtgttcatttgttttgttcaatatgggccagggccaccaaaacaagatctgaattgtaactgttattaaccttcagcatatgtgtaccccttat

SEQ ID NO: 279969 - DNA, 399 bp, Zea mays
ggccgcgccctgttcctgggacacttccttccacgaaaaaaagcagcagcagcagcataagctctagctacctctactaccgacctggatccactcaacccgctacgctaagctcccctttcccgttcgacaagtgaagagaagaggttattcatccatctgcgctgcagcctgcagagaaggagaaggaggaggcaggcgcttgacatgggcaagtacgtggagctgctggacatgggcgtgcgcatcgccgcgcgcttccactcccactgcccgcagaccgcgcgcctctactaccacccgcccgccggcgggccggcggcccgggggacggccgcaagggcgactccgccaccgccgccgccgccgccgccgtgatgctgaagcagcaggggcaca

SEQ ID NO: 279970 - DNA, 628 bp, Zea mays
cccacgcgtccgctcgctcttcctcctcgcgaaacgacgcggaggaggttgccggtcaggccaccgccgcgcccgcccgcccgccggagacccggtccgcagccaacgcgtgacgtaggggggacacgcagccatggccacttcctcctcgtcgctcacaacgctccactcccgcttcctctctcccaccccttcctcgccctacatggcggcgctgccccgacggcgaagggccggagcgcggtaccctcgcatccgggccattgacctcgaccagaacacgattgtggccatttcggtgggcgtcgtcagcatcgccgtgggaataggtgtccctgtgttctacgagactcaaatcgacaatgccgccaagagggataatacacagccatgcttcccctgcagtggttctggcgcgcaggtatgcaggttttgcagtggaaagggcattgttactgtagtacttggtgcaggcgagactgaagaatcgcagtgtgtcaactgcgagggcatcggctctttgacatgcactacatgccaaggcaccggaatccaaccacgctatcttgaccgcaggagttcaaggatgacgattgatgaaggttttattgccatctttggtagtata

SEQ ID NO: 279971 - DNA, 427 bp, Zea mays
aggacgcgtgggcggacgcgtgggcggctcggcctgggccggctcacgcgcgttcggtgaggaggaccgtcttccagggcagttttgtctattggatgatggggcgcggacaggttagcgacggcgatcgcccgggtggtataacaacagctgctctgcctgccatcagccaaccgctaatctacggggggcttcattagtacgtaaaaggcgcctcacacttggtatacgtaaaagatatactagttattaatacgttaaaggattgagtatacggcacctagatgtttcatttgtacacgattttcattctcttctcgaccatatattaatagtaattaaattagttcgtcaacttattgtgcagcttggtgagcttagcagcagcaagtttgcgcacctggcagtgatgaataatttagcaccc

SEQ ID NO: 279972 - DNA, 407 bp, Zea mays
cgacgcaagcgtctgaagagagtcatatcacgagcggcctccctttttttttttttttttttttttttttttttttttttttttttttttttttttttttttttttctgtaaatcactcttaattccattagctctcgagaattacagcaagacagacagtattacatcgtgctgctgctgctgctgctacagatacacacacagcaggaggagacaggaaggtttcgcgagaccaggctccctccactccccacggattacaggatgagttagtcacattaccacagagtagttaccgagtcttggcagtggtaaaaaggaggggaacaggagagagaggcgaaaattatcaatttcgagggagagaatagcaggatagcacgagaggcacttcatggcggggtgg

SEQ ID NO: 279973 - DNA, 829 bp, Zea mays
gatcgacgggccgtacggcgcgccggcgcaggactacaagcagtacgacatcgtgctgctggtggggctgggcatcggcgccacgcccatgatctccatcatcaaggacatcatcaacaacatgaggcagctggacggcggcggcggcggcgacctggaggctagctcggacgcgtcggcgtcgtcgtcgtcgatggcctcgttccgcacccggcgtgcctacttctactgggtgacccgggagcaggggtccttcgagtggttccgcggcgtgatggacgaggtggcggagacggacaggaagggcgtcatcgagctgcacaactactgcaccagcgtgtacgaggaaggggacgcccggtccgcgctcatcgccatgctccagtcgctcaaccacgccaagcacggcgtcgacgtggtgtccggcacccgcgtcaagacccacttcgccaggcccaactggcgcaacgtctacaagcgcatcgcgctcaaccaccagaaccagcgcgtcggagtgttctactgcggcgccccggtgctgaccaaggagctgcgcgagctggcgcaggacttctcgcggaagaccaacaccaagttcgagttccccaaggagaacttctagctctctctctctatatatatatgtaaggatatggatgggtgtaaagaggggatcggagtagcgcaaagtaggtatttgcttgaccagttgggttgggtgggtcaaaaccccaacagttttttttttaattattattattattcttcttcttcttcatttgctctagagaagaactaatgatcgaaatgccattatttgtacagttcc

SEQ ID NO: 279974 - DNA, 498 bp, Zea mays
gtcataataatatgcatgctcctcaacttaacacagggaaaacaggtcaggaagaaagtgaagggcttcttcaagcgctatcctgatgctcaaacagaattcagaatgtctcgtaggcttacgttggagaagaatggacctatatcactgagctttgtggtgttggcaagtatgctgctgatgcttacgcaatcttctgtgctggaagggcaaacgaagtggttccaaaagatcacaagttagtagattactggaattatgtctgttttgagttaccctcgattcagaaatcgcaggaggctggagtgacggagctgggaaaccttgtcgctaaggtgcacgaagttgctgtcagctgttgacatgggaaaacagtaacgcggtggcaagcgcttttgggtgttcctgcttgcagcttaataatgttattcgctccgttctttttttatctgtcatgttttagttcaaaaatattcgaggactgaggtagtataatat

SEQ ID NO: 279975 - DNA, 289 bp, Zea mays
gacccctggaaggtcatcgtaatatgcatgctcctcaacttaacacagggaaaacaggtcaggaagaaagtgaagggcttcttcaagcgctatcctgatgctcagactgcatatacagctgatcccgaaaagatggcagagtatctagcacctcttggactgcagcgtgtgaaaacaaacagaattcagaaattctctaaggcttacgttggagaagaatggacctatatcactgagctttgtggtgttggcaagtatgctgctgatgcttacgcaatcttctgtgctg

SEQ ID NO: 279976 - DNA, 517 bp, Zea mays
atccttagagggcagatgctgctgcagctcaagatagccacacacacagacagtgacacacttaagagctcgagatctcactctcctcacctcagctctcagagaggaaggacactgcggccgggcgatggcgagcgtggagggcaagagggagacggtgctggtcaccggcgccagcggcttcatcggatcgaccctcgtcggcctcctcctcgaccgcggctacaacgtccacgccagcgtcctcaaccccgatgacaaggcggagacggagcacctggtcgccctgggcgccggcgccggcgaaggccggctgcgcgtcttcccgggcgacctcctcgacggcgccgcgctcatggccgccgcgcggggctgctcgggcgtgttccacctcgccagcccctgcaccgtccaccccgtgagcgacccgcaggggcagatggtggtgccgggggtggaaggcacgctcaacgtcctggcgcgccgccaagggagcccgcaccgtgcggcgggtggt

SEQ ID NO: 279977 - DNA, 511 bp, Zea mays
ctttcaagctcaggtttatattcggccaaatcggcatataccggtttctttcttggagcaacaacttttaaaccctgggaaaggatttggaaatcatgggctccaagtaaatgcaagttcttcatgtggctcgtggcccacgatcgctgctggacagcagaccgactagcaaaaagaggactgcctcaccctcaattttgtatactttgtgatcaagaggaagaaacgataaaccacttgctggtttcctgcgttttctctcgggctgtctggtttcagatgatgaaatctgttgggttgcagcatcttgctcctaaccctgcgtgctcctcctttgaagattggtgggaaggggttgctgcattttctgctggtctagtaaacacagggctgcacaagggcttgaattctttgatcattattggtgcttgggccatctggaatcaccgcaatagctgtgtttttaatggtgtgcagcctagtcaaagcatggtcatcaattgggtcaagg

SEQ ID NO: 279978 - DNA, 522 bp, Zea mays
ctcgcgggtcgacacaagcgtccaaacacacgttctgaccaacgcgtccggtaatgatggataggaactccatctggttttgtcaaggtccagcagccaaaaaactgaatattgatttgccagaaactgaaattgtagaaacacacaggaaccatagtgcaaggatcacttgtctgaggctatttcctctgattgataccccactgtttcgaagtgatacacaaaaaaatgaaaaagcattagtcacttcaagcacagacagaacaatccgtctttgttggaagggctactcacgctgttacaagggccattcagcgcctgtgactgctctggctgacagattgcttatggatggtgaatctaaactacttgcaagtggaggggaagactgcaccattcgtctatggtctatgagtacgagggcgaaaaatcacccagtaatagcaactttcaggggataaaaggcactgtcattttatctgttgctggcaaaatcgtcctgttggtgactgttccaagact

SEQ ID NO: 279979 - DNA, 393 bp, Zea mays
ggtgcttacttccattatgttggaggttttgaacctccccaggcgcttgatatatctcctaatccaggacgaactgacccaatgtatgttgtatgctcgagaaagaaaatagggtaactaaacaatatatttggcaagtgctatcaagaaacaaatagaaggaaaaatacaagaagcaagttgtttggccctgatcgcaggacctattggtgagctgatgtttccgtgagtaatgtagccgacagaaaaaagaaagcaactactacataaactatttatagaagcggcagattcacttcataggttgtagcccctgtctttactaaaagtgtgcttcgtttgaggaatgaagtgatccatcttcttctcaagaaaagatggaaagaggaaaaa

SEQ ID NO: 279980 - DNA, 379 bp, Zea mays
cgtccgaggacgcatgggcgcgacctcgcctagcggccaaaccacgctagagttcgcagttggaagaggggaggaggaagaggacgagatggcgagggatgacgggttcccggtgtgggaagcggcgctgctcgctggcgtggctgccgtcttcgctgcggggctggctggcgtctacatctccatgcctcgctccgactacagcttcctcaagctcccccgcaacctccaggagctccaagtcctcactgtccatctggagggctacagcagtgactacagcatccaggtgctggtgggctactgtgcccttgtcatattcaggcagacgttcatgatcccagggaacattttcaggtccctggctgccgggggccct

SEQ ID NO: 279981 - DNA, 473 bp, Zea mays
agctaatgctagaagctaatcctatttttgggtgctttttcctcctatgattggcatacagacatgcatatggatattgataatatgtattatgaggtactatcttttatcatgtcttatcctgcctagatgttggatgggttttgttataggattatttactttgtggaggattctgctcggcgtgtgaacctctgtctccgcgctctcgcttgactgttgatttgactaatttggttgcttagatgtggctcttattaaaaaccatatgtggataggcttgcactacatacacggtggcatggtaaacgttgtgaccacgctgtgataatgcatggattccatcagttcattttattcgtcaattgatcatggttgtgatctattttgtttagatactctatgatttgaatcttccctcttttttcgttatatttctcccttaactataatgattgtgatgaaactttatt

SEQ ID NO: 279982 - DNA, 785 bp, Zea mays
  unsure (1)..(785): unsure at all n locations
ggtttcaatagaatccgactggctaccaggttggtgctgcccttaagccttaatacagcgtcaactgcaagttcagcaaagtactctttatcctgggaaagaatttttgaactaagggtagtcatagcaatgttcatgagatcagctctgaacttatctgaacatactgtacatgttaaatcagtgctttactttgaactaataaaacaccgttaactggtaatttatcattgctatggtccttcaggctatttgaggagatgccgtcatcgtcatcatcatccttactctctggctccaatactgcgagtgctgagcttcctctaatcccttgcaagctctgcaatggggtggtgattgagcgggtctccaaacaaccagaaaccacgtcgaggaagttctaccggtgcagagccaagaaaacggatgggtcttaatgtgattttttccactggcaagcgagctatgttgttttgttaatcgaggatgggtttgtcagtggtgatcgacgccttgagttgttaatgatcgcacttaatgatcatggcaaagccgttgaatctctaaccaattccatcagagagatgaagaaaaagctgtccgacctggagtcagtgatggaagagctggataacgtgaaaaagtcgatgaaggcagccatggttggacattgaggaaaacaagaaatcgacagctgctgcattgaaactgatggagaatgagatgcanatgctgaaagggtcaactannagtgaacctaggaatatggcactgtgttttctgct

SEQ ID NO: 279983 - DNA, 777 bp, Zea mays
ggatgttcgttgcgacgcgcccgtcgacggcctcgaccgggcgtgcttccgcctccccgcgcacttcttcggcgtctacgacggacacggcggcctccaggtcgccaactactgccgggagagaatccacgaggtactggcagaggagctcaccaaggcagaggaggccgcgtccgacgctgacctgggtggcctcgaccctaacactcagaagcactgggagaaggccttggtgggctgcttcagccgtgttgatgcagaggtgggaggagacgcggcgaccgaagccaagcctgtggctccagacaccgtgggctcaacagcggtggttgcgcttgtctgctcatcgcatgtcatcgttgccaactgtggcgactcgcgagcggtgctctgccggggcaagcagcctgtggcgctttccgtggaccataaaccaaacagggaagatgagtatgcaaggatcgaggcccagggtggcaaggtcatcaattggaatggctatcgagtcctcggtgttctcgccatgtcccggtcaattggggacagatacctgaagccatatattatcccagtccctgaggtcacaattgtcgcccgtgcaaaagatgatgagtgcctaattattgcaagtgatggcctctgggatgtgatgtcaaacgaggaggtatgtgatgctgctcgcaagcgcatactgctgtggcacaagaagaattcagatgcctcatcgtcagcccaaagaagcggtgattcgccagatgaagcggctcaagcagctgc

SEQ ID NO: 279984 - DNA, 425 bp, Zea mays
cacagctgcaaagcatattcgctttccgccaccgcccgatccccacaccgccacccgccgcctctaaccccgctgtcccgtcttgtgctctgacctcaccgctggtcagtgtcagaccgcatggaccccaccgaccagtcgccggaggaggtgtactccgtgtgggcccttccgccggagcccgtccgtgatcgtttccgccgcatcatggagggcctccgcgctgcatacggcggccccgcctttgagccgcacgttaccgtcgtcggtgacttccgcggacgccgctcggaagctgtcaaggtgctccgcgccgccgccgccagcgtccaaccctacactgctcgtgtcacgggggttgcccgtggcagcttcttctaccagtgcgtctacatccttctcgaccccaccgccgaagtggtggg

SEQ ID NO: 279985 - DNA, 479 bp, Zea mays
caaccgcaacgttatccgcatcacccccttccgtagagaacgcggactgaggtgctcagctgaacgccggtcgcctcgcagtggcaagtgcccgagcgatgcagcagataatcagcgcctgcaagctgcctcacacgcaacgggccgccgcgctcctgccgcagaggccatcgctcaggcgccttccagtcccaggaggtgcgccgccgccgcggcgattggtagtcaggaggagatgccaggaagaggataagcagcagcaagaggccgaggagggaagcggccctgacgagcaggagcaggagcagcagaagcgaacgttcctgagcctggaggaggccgggctggtggagatgtccggcctcagcacgcacgagcgtttcctctgccgcctcaccatatcgtctctgaacctgctgagagtgatctcggggcaggagggcgtcccgataagaggagctcaacgccgggcgcgtctg

SEQ ID NO: 279986 - DNA, 563 bp, Zea mays
ctgacacacctcagaagcaagttcggttcttaacactgtcaggtgataaaaagctgttgactccgcaacctcggctaaggacaggatttttctcagttatggactctcaaatgatacctgttgggtgcatccctgaagcatgcacttctgttggtgcagctaaatatgggaggccaattggtttagatgaaagccttaaggtggatttgattgtgattgggtcagtggcagttgatccaagttcaggagcacggttagggaagggagagggatttgcagagctggaatatggaatgcttcgctatatgggagctatagatgattcaaccatgatagtaactactgtgcatgacaagcagttagttgatgacattccagtggagaagctgctagttcatgatgtgccagttgacattatctgcacccctactcaggtcatcttcacgaagactacgatcccaaagccacaagggatttactgggaaaagttatctccagaaaaattgggccaaatccgaattctaagagagctgaagcaacgtatagagcaagagacaggaact

SEQ ID NO: 279987 - DNA, 507 bp, Zea mays
ctccctcaccttctcatcttcggtatgcacttgtacatctgttgtgttgcacggccagagcagcaactcgagtggtcgtccagttcaggccatccgaacccctccaacgacgactgggtcggcgtcttctctccctcgggtttcaggtactcgacggactatggcatgtttaggctctgcatagcgaacacggaggaggactggaggccgggaacggagcagtacaagttcatcgatcgaagcagccctggctcgtcttcctcgcgcaccgtgttctcggctactcgtcgggtggctggtacgagacaatgatgggctcctacggggagccgatgggccgggacgggcttcaagacctctggcagaggtacgatatagcggtcttcggccacatccacggatacgagagcacgtgccccgtctaccaggcaaagagccggtgagtccaagatgatatggatcattacggcgggcggggcggttcaacgcgacgacccatgtcaccgt

SEQ ID NO: 279988 - DNA, 427 bp, Zea mays
  unsure (1)..(427): unsure at all n locations
ggcgagggacaccgtctctggccggatcgtcgctcttaaaaaggtccgcttcgataacctcgagccagaaagcgtcaagtttatggcccgggaaatactgatcctaaggagactcgaccaccccaacatcatcaaattagagggcttggtcacctccaggatgtcatgcagcctttaccttgtcttcgagtacatggagcatgatcttgctggtcttgcggcaagttgtgatgtcaagttcacgttgcctcagataaaatgttacatacagcagctgttgtcagggcttgagcattgtcatgacaataatgtattgcaccgggatatcaaggggtcaaacttgttgttggataataatgggattcttaagattgcggattttgggctggcaacattctttgatccacgacatanacgaccaatgacg

SEQ ID NO: 279989 - DNA, 463 bp, Zea mays
gtcagcggagattatattcagcgggaaagctcagcctggtgtgactgcatcggatgtcaatgtggaagaggtgaggatggtcgtcgacgatggatgtcggaggccttcggcttcaccagtgacaacgtgctgatcaacggaaaagccgccataatcggcttcctcctgctgatcgatttcgagcttctaactggcaagggccttctcaaggggacggggttcttggacttcatctacgcagtttcgggagctttccactgagagtcatatgtgtgtttgttgttcgctccttggtatcaagaatgccatcgaggtgtacttgcctacccttagaaccctaggttttgtcagcgtgcgattcagtcagctgtgcttgtatttgaacatcaccatgcttgtctgtcaagtgaggaagggaccccccaaagtccccaaaaaaaaaaaaaaaaaaaaaaaaaaagaa

SEQ ID NO: 279990 - DNA, 565 bp, Zea mays
ctctcgtgtctccactcgccctcgagctctccctctccgtctccagtcgccgtgagctagggtttggagctaggacgtcgtcggccgggccaggggcgccgccaggaccgcgctcgcggagtccctgcaggtcgccgagcacgccagcaagacctccttctccgccgggaggatgtcggtcaaggacagcaagccgaggcccctgtcgcgtagcctcgatgccgccgcgccaggacaggtcggtttcggttcgccgctgcaactcttcgtctgtctgtcttgttgctcctgggaatcttttttgtgtttgctcatgcggttcctgtgttcttgtttcacttgcaatattcccccatttgtggtttagattcagttctcgccgtgagaataatttggcgctcataattttttcactctctctctcttgtttgctcaaccttggaatttctttcttctggctgctgcaaatgaacctgtcgttccccaaggccatgagtggtgggagaaggggctgcagatgaactcttcgttcagctaccaagcagtattagttccattccatgga

SEQ ID NO: 279991 - DNA, 669 bp, Zea mays
cccacgcgtccggccaggggcgccggcagggccgcgctcgcggagtcccttcaggtcgccgggcacgccagcaagacctccttctccgccgggaggatgtcggtcaaggacagcaagccgaggcccctgtcgcgtacctcgaggccgccgcgccaggacagatgaacctgtcgttccccaaggccatgcggtggtgggagaaggggctgcaccccaacatgcgcgaggtcgagtccgcgcaggacctcgccgactcgctgctcagcgccggcgacaaactcgtggtcgtcgacttcttctccccaggctgcggcggctgccgcgccctccaccccaagatcgcccagttcgccgagaagaacccgggcgtgcagttcctgcaggtgaactacgagacgcacaagtccatgtgctacagcctccgcgtccacgtcctccctttcttcaggttctaccggggagccgagggccgggtcagcagcttcagctgcaccaacgcaacgatcaacaagttcaaggacgcgctcgccaagcacggggctgagaggtgtagcctcgggcctgcgcgggggctggacgagtcggagctcatggccttggctgagaacagggacctgcacttcacctacgacaagccgggcggcctcgtccccctcgcggaagccattg

SEQ ID NO: 279992 - DNA, 434 bp, Zea mays
  unsure (1)..(434): unsure at all n locations
gtcaccctgacgggacggcaagcggcggaggcgctgtcatccgctggtccctttcctttccgcgcgcatggcgagaatcttggccgccgtctggccgatcgttaaaggctgcatcaccggcggcgtgttcggcatcaccatcgccgactggagcgcctcctacgtcaccttgcacggcgcctccatgcaccccaccttcgacccgcagcaggccgaacgcgctctggtagataagcgctgcctccaccgctaccacttctcccgcggcgacgtcgtcgtcttcaggtcgccgagggaccatcgtgaactggtggtgaagaggctgattgcgctgcctggggattggattcagatcccggagaaacaggagatccggcagatcccgcangggcgctgctgggttgaaggtgacaatgccgccaccagctttgact

SEQ ID NO: 279993 - DNA, 732 bp, Zea mays
atttgttgtaatgagccaggtttttgtcgtgagtgctgctgtctttattgtaacaggaccgttgattattcttttggaagttacagctgcataaaatgtgaggtcagttgttggaagagaacttaatatgtgggcattttgcacaccttgaatgtgcatctttgatgttacatggcttggaactgttggaggaagttttggcttggatgtccaataatttatgcaggctctgtgataacaaaaccaacttaatgacacatgtggagaaactcatggaaacatgccaatctcttgaatctagggaccaaatcaaacctatgctgaatttgggcttatgcctcttgcgtggatcaaaacaaatgagagcaagaaacttggagaaccatatgagatcagcaatggaaaagctggaatgtggatttgattttgttgaagtctggaaattggaaggtgacgagggcaggacaacactcaatgcaggagagaattccccaaccaccaatggtgtgactgtgcttggggctcggcaagttcctgaagcgggtgcacttacagggcatcctgatctgatagatccactggttgataatgacttcgagacggttatagaaaaccttccagtgttcattactggagatcagaatgccgcgtctgctaaatttgaggatgagatagatcttgctcttcaagaactgaaaaaatctcaggaagcggatatagcgtggcggagca

SEQ ID NO: 279994 - DNA, 465 bp, Zea mays
tgcgctcgacgtacgcgctggtccacgggtcgtcgagaagagcctggtccgaggtgaagaggccccgcgttggcgcgcacgttgcggtagtagctgaggtcgaaggtgtaggggctgcgcgggtccatctccaccatggtggtgtcgtcggcgagccccggctcgcacatctcccgcagctgcgccgcgtacgccttgttcagcgacgggtcctgccccacgtggccgctgtagttgcacagccggtccgacgcgaacgtggcgccctgcgccctcccgatcgtgtggcttcctgcactgcatgcagtcagggattgttccgtgtgtaccaccgtcgtcgatcgatcagtcgtctagctactttgcttgcaggacgtacgtacgtacgtagttggacagctcattggttgtattgtacctgacaacacgacgacgtccttccagcccaaccccttgaagctgaag

SEQ ID NO: 279995 - DNA, 639 bp, Zea mays
cggacgcgtgggtccggcgtgatgcagcgcccgggacgacttcagcggtcggggtccaagcgcgggctggaacccaccggtggcggcgacgacgacgaccatgcgcccaagcgcccgcgcgtccccgccctcgctagtgtcattgtggaagctctcaagatggacagtttgcagaaactctgttcatcgcttgagcctattctccgaagagttgtaagtgaagaagtagagcgtgctttagccaaactgggtcctgctagaatccaaggaagatcctcccctaaaagaattgaaggccctgatggaagaaatcttcagctccagttcagaagtcagttggctcttccaatcttcactggtggaaaagttgaaggtgagcagggagcagctatacatgtcgtgctgttggatgcaaacactggatgtgttgttacttcaggacccgagtcgtttgcaaaattggatatccttgggcttgagggtgacttcagtaaagacgaagatgaggattggacagaagaagagtttgaaagtaatattgtcaaggagcgtgaagggaagaggcctcttttgacaggcgacctgcaagtgactcttaagaaaggtgttggaacctaggggagcttacattcactgaca

SEQ ID NO: 279996 - DNA, 689 bp, Zea mays
ccgacgtaggcgccgccgctaggacttttctgaggaatagagaagttgcagaattcgtgagtggagcattggctggtgcaatgactaaggctgttcttgctcccttagaaactatcaggacaagaatggttgtaggggtaggatcaaaacatatttttggtagctttgtggagattgttgaacataatggctggcaaggactctgggcaggtaatacaataaatatgctccggattatcccaactcaagcaattgagctcgggacatttgaatgtgtcaaaaggagtatggcctcggcacaagagaaatggaaagaggaaggatgcccaaagatacaactcggcgatttgaaaattgagttgccatttcacttactatcgccgattgcgattggaggtgcggcagctggaatagctagcactttggtgtgtcatcctcttgaggttcttaaggatcgcatgactgtcaaccgtgaggcttatcctagtattgccattgccttcagcaagatctaccgaactgatggcattggtggcctttatgctggcctctgcccaacgttggttggcatgcttccatatagcacatgctactatttcatgtacgagaccatcaagactaactactgccgtgcgcacaagatgaaatctttgagccgtcctgagctgctggttatcggggctctttca

SEQ ID NO: 279997 - DNA, 408 bp, Zea mays
cacattttgaagcgaatcctgcctgctggagtggaggtaccctcttcgtttgagacaattggtcatgttgctcatctgaacatatctgatgacttgctagcatataaagatgtcatagcaaaggttatctatgacaaaaattatccaaggattcagaccgtggtgaataaagtggggacaataacaaatgaatttagagtcccgaagtttgagatcttagcagggaaaaatgatatggttactgaaattaaacaatatggtgcaacattcagacttgattatggtttggtctactggaattcaagactcgagcatgagcatatcagattagtttccctgttcaagaaaggagatgttatatgtgacatgtttgctggtatacgtccattttcaatcacgtctgctcag

SEQ ID NO: 279998 - DNA, 937 bp, Zea mays
tttcactcgtccgaatgtttttccttctgtgctatgctggcgtgaacctgtcatgctttctgcttgacctccttgatgctcctagttggcgccctagatggaaatttcaccattggagcctttcacttgttggggcattgctctgtgttgcgattatgtttctgatctcctggtctttcactgttgtctcccttgcccttgcaagcctcatctattactatgtgagcataaaagggaaggctggagactggggagatgggttcaagagtgcatactttcaattggccctccgaagtctcagatcacttggagcaaaccaagtccatcctaagaattggtaccccattcctctggtattctgccgtccatggggtaaacttccggaaaatgttccttgtcatccaaaacttgcagacttcgctaattgtatgaagaagaagggtcgtggtatgtccatttttgtctcgataattgatggtgattatcatgaactagctgaggatgcaaagactgcctgccgccaactagatgcttatattgactacaaacgctgtgagggtgttgcagagatcattgtagctcctaatatgtctgatggtttccgtagcattgtgcagacaatgggcctaggaaacttaaaaccaagtattgttgtgatgcggtaccctgagatctggcgacgtgagaatttgacacagataccgtcaacatttgtcagcataataaatgattgcattattgctaacaaggcagtagtcattgtgaagggactcgatgagtggcctaatgagtaccagcgacaatacggtactattgacctctactggattgtaagagatggaggattgatgcttcttctgtctcagctcctgctgacaaaggagagttttgagagctgtaagatccaagtattctgcatatctgacgaggatacaga

SEQ ID NO: 279999 - DNA, 386 bp, Zea mays
atttcgtcgacgtcgccgcctgcaacgccacctcgtcctcccgccacggctcccccatcatccgtcaccgacgcccgcctcgacgtcctctgcgcgcgcatcgtcaagtactactccctccgccgattcgtcgccgagaccggccgcgcgcccgaggagtgggaccgcgcgcacgacgccgccatgttccattactcgtccgggatgcaagccatcatggtcgccgtgggagtgtgcgacagagtcagcgtgtttggcttcggcaagtcttccgacgccaagcatcattaccacagcagccagaaggcggagctagacctccacgactacgatgcggagtaggccttctaccacgacctctccgagcgaccgcaggtagtcccgtt

SEQ ID NO: 280000 - DNA, 609 bp, Zea mays
tacaagctacatccggtgacacggggttgtagttttgctgagctcatacgactgttgcagcacatgttgatgacgatcaacatcactccatttgcagcaaccatcaaaggtagcccactttgtgagatggcgcgatacagtttggtgaaccggcttgcgaatccaggcatggctctttttgctacgagtgtacatatttatcagagcaaccgcgttataggagtggacatagaggaggggggcttcaagcatcagcattgtcccaactgataagaatacgcccttttgtttgtttgctcaatacgtcggcttgagctgtttgtgtagtgcgcgagcagctaacctattcgaaacatttaccggactgtgaacacgcccacttcatccatgttggcaccatggtgtaaaatgggaccactcgtggctccaggtttattttatagtgtcttggaaggacgggctgattttgccctcacctggcttgtttcacatagagacaaccaagaaacgtgtgttcattgtttattgagatatggataccaaagcaatgctgaacttttagcatagttttttttaaaagaaagaaaagaaaaaaaggcgggcgctcta

SEQ ID NO: 280001 - DNA, 972 bp, Zea mays
gtttattcagcagcacgaggtgggtggggcagcggcagcggggttctggctaaattattttaatgtctttattatcagagattccagtaatgtgccttgcctcttttatgtgattgcacaaatcgatgaacggaactcatccctggacctccatgtccgggggtgcatgttctaaccttggatatgccagggacatgaatggtaatgttccaattagcactacaaattcctctggaccaagcattggagttagctcgttggtgactgacgccaactcgtcactttccggtggtgcccagttacagccaagtactagcatgaatggtgattcattgatgcgtgttcctgcatcaccaatgtcattttcatccaataacatctctggctcttcagtcattgacggttccatcatgcagcaaagtccaccccaagaacagatgcagaaaaggaggtcttcaagtgtaacatcacaacctgtgatcgatgctggtggtgcattgcatgctcagaagaaatcaaggattgatgtttgtcagggtggtatcacgcaacatcagctgagtcagctactgctccatggccagaattctcttcattaccaggggcaacagaacccacagcttcaagctcttatccagcagcataaactggcacaacttcagcaacggcagcagcagcatttgttgcaaccattttctcagatgcaacaaccccaagttggtattcctcggcagccgcaacttaggccgccactggcacagactggaatgcagctagcgtggtcctgttaggtctcctatcgagaggggcgtttgttctcgcaggatactgcagtatctatttcacaagcgtcatcgcccagagaataaccctataacatactggaggaagcttggtgaagagtactttgcacctcgagcaagagaaaggtggtgtgtctcttcgtatgaaaacagaaggaattcttcagct

SEQ ID NO: 280002 - DNA, 445 bp, Zea mays
gctgctgggagttggcctctgttctgagggacacaaaggagagagttgattctgctggagtaaaactgattgctgttggtgttggcactccagctaaagcccgtattcttgccgagcgcttgccctttccgttggaatacctctatgctgatcctgatcggaaggcgtataatctcttgggtctatattttggtgttggtcgcacgttcttcaatccggccagtgcgaaagtgttttcacggtttgactcccttaaggaggcggtgaagaattatacaatcgaagccaccccagatgacagggcatgtgtcctacaacaggggggaatgtttgtgttcaaaggtaaagagctgttgtacgcaaggaaagacgatggcacaggcgaccatgcacctttggatgacgtgctcaatgtctgctgcaaagttcctgtaacctaacccga

SEQ ID NO: 280003 - DNA, 535 bp, Zea mays
gggttcttcagcctcagccacgacggaggtaaggacggctcaaggaccctagagatagagatcgtatggtccaatacgccatccaacgactgtatgtagcgtacggatgatttacctgacgccaattcttgtactcttggcttccatgtaaatcagcccccccataatcatccgaattcatttatttgtacgtagaaagttaagacacttagataactcgcgccatcattcaattattgaggtcatttccgggattgtggccctgctgctgtaaactgattttgcacccgggtattttttttttgtacaggtgaatttatttcatgtagttatagcttagtgtagattggtggtgagtacggacaagccctagtgacagtaacattgggtgtgatgtgtggcgtgatatttgctcccgtgggtgtgtttccggcacttgtagcctcaggatacacatggctgagcttggcactgttctatttgtcaggcatgtttgtttacctgtttggttctggctacgcaaaacttttttttt

SEQ ID NO: 280004 - DNA, 512 bp, Zea mays
ttttcatctcttcacggcttcaccagcctgcgctctctcctctcagcgcgacgactgggtgggcggggctaccgccgccgccgccgcccgacaccaggtgccgaggttttcgtcggtctcttcgccggcgacgagctccaaccaggtgctagcgcggtacaattttcgagaatttgtggtgttgaactgaacctccatgacacaagctaaacctgcccctagtggcaagaggaactggagcagtggcgggactgccgctggaaggaagaacaaggaaagaggagatgacaaagcaaaaggaatcagggttgctggttggaacaagggcgacaagaagaaagaagacaaagggcgccaagtaagtgcgggatcgaagaggccgtggagtgggggagtgccccgggctggtgtgaagagggctgcgtctgggtttgacaggaggaacaggaagatcgatgatgactcgttggatgatgaatgtggcaaggatgtttcatccttcaaattcaaag

SEQ ID NO: 280005 - DNA, 906 bp, Zea mays
gacggccggtgctgttctactgctcgcataactttccctttccccatcccacgcagcagcgacaagagcaaatcgaagggctaacgactgagcgagtgccactatccctttgcttgccctggagaggagagggtgcgctatgggcgatacagggagcagctccattctggtgcacattctggtggtcgccctatgcctgaccgcctttggcttcgccgtcgccgccgagcgccgccgcagcacgggttcaatagtcacagacagctccaatgccacattttgtgtttatgactccgatattgctactggctacggtgttggtgctttcctgtttcttctctcaggccactcactgctcatgggtgttacaagatgcatgtgcttcggtgcaccacttgcaccaggtggaagcagagcatggtccatcatatacttcgcatcgtcatggatcacatttgcagttgctgaggcctgcctaattgccggagcaacaaagaacgcataccacaccaagtatagggatatggtatatgctggtaactggacctgccaaactctgcgcaaaggagtgtttattgccggagcagtcttcgtggtgttcaccatgattttggacgtctacttctacatgtactattctaaggccactagccaagctacaaaaaggatcagtaagacaactcccagcgttggcatgactggctatgcgtgagccacctaatgaaagtcccggtctgattagaaaataataactatttctttttttgtgtcgtttttgtaccactgcaactatttctatgtttgttctattttcagtaacactgcagtgagtgatttgggatatgacttagtttcagttaaatattttatgcatatatatatatgcctgatgatggattggtttgg

SEQ ID NO: 280006 - DNA, 1103 bp, Zea mays
tcgttctcgtgctcccccgagcagactagaccagcgcgctagcgccagcaaggccaaggcgagggaggggcgatgctcgcccgatctgctacagccgccgccgccgccgggatctggctgtgattaaggatgtcggcgtcgcggagcgggaggatcaggcgggccgggagcgtggcgctcggggactttctgcggcgggaggcgtcggcggagcgggccgcgttgggagggcggcgagcggccctcggtcgcggcggggcaggcctgccgggcgaagaagggcgaggacttcgcgctgctcaagcccgcctgcgagcgacgccccggcgcgccgtccacctccttctccgccttcgccctgttcgacgggcataacgggagcgccgcagcggtgtacgccgaggagcacctcctcgccaacgtgctcggctgcgtcccggccgatctgagcagggacgactggctcgccgcgctcccaagggcgctcgtcgccgggttcgtcaagaccgacaaggattttcaaactaaagctcattcctcggggacaaccgtgacacttgccataattgctggctccgttgtaactgttgcgtccgttggtgactcacgttgtgtccttgatgctgcgggatccatctactatttgtcggctgaccaccgctttgacgctaatgaagaggaggttggacgtgtaaccgaatgcggaggtgaagttggaaggctaaatgtcgtcggtggtgctgagattggtccccttagatgttggccaggtggtttatgcctctcaagatcgattggtgatcaggatgtaggtgaatttattattccggttccttatgtgaagcaaattaagctgtctaatgctggaggccgtcttattatttcaagcgacggtgtttgggatgctttgactgcggaaatggcttttagatgtgcacgggggcttcctcctgaggctgcagccgagcaaattgttaaagaagcagttgaagcaaaaggattgagagatgatacaacttgcattgtcattgacataataccaccagagaaacaaaaatgcactatagaatctccaaaaacgccaggaaaaggcttgtccttct

SEQ ID NO: 280007 - DNA, 432 bp, Zea mays
cggacgcgtgggcgcgagcggccgtccttttttttttgttttatgggtaagggtaatcgtcatatacatgatacatcacactacatatagatagttgggtactcagtactcgatcgtttacatctccagcacataagttgatgatacaaggattcagaaaatagaaatataaacatatatacacaaaagaaacataagctagatcaggcctaaatatcattctgcatgaacggaagcttgcatggtcttccacaagtgcgtggtttcgaattacaagcagacagtacatctgctgctgggcattgcataatatgccggcctgtagcaagtgtgagcgtctctgcagggcttggggcagctgtattattagctctatcacgtcactgatcacacatctcacaggtgccccagcacaggccatggagtcactcc

SEQ ID NO: 280008 - DNA, 769 bp, Zea mays
gcagattttgatttgtgtaagatgctaaaatggagaagaaaagttagagaagataaagcagttacttctccaggcaatgcttgtaaatatgtggctccagaagtcctgcgaaatgaagagtatgataccaaagtggatgtcttctcattcgctctgatacttcaggagatgattgaaggatgccttccttattatgataagaaaaatgatgaaattgagaaggcacataattctaaagaaaggcctccttttcgagctcctccaaagcattatgcacatgggttaagagagttgattgaacagtgctggagcgaaaattctgcagacaggcctgattttagagtaattatcaaccggctgtctgctatccaaaatgagatagctcacagaaaccgttggaaggcgagacctctcaagtgtttcctgagcatcgaaggaatgtggaagaaagatcgcaatgagggcagcaccacccgttcatcacgctcatcgcgatcctatttttaaccaccagcacaagctattgatttcaatcgcaagatcatattggtgattgctagaaaatatactcaaatgtatatcatattttcgttttctaaaactatgaaaaaagatggttctgcaactggttgattctcagctgatcatagttttgattgtatatcaggcatgccccttggccccaacccctgctttggcattcccctgggttgggacaatatggataatgccaacttaattatatttacctaccaatgtgttttgatgt

SEQ ID NO: 280009 - DNA, 645 bp, Zea mays
aggacacgtgggcaagtcgctcatacaggcgttcccgtcgcagtcgctgttcgcgggcggtggcaggggcatgaaggacccgcagacggtgttcgtcgcacgcgccacagggcacgccggggtccgcatcgcgcagaccctgctgcggcacgggtttgccgtgcgcgctggcgtcccggacctagcgtcggcgcaggagctagcgcggctggcggcggcataccggctcatctcccccgcggaagcgcggcggctaaacgcggtagaggcgggcttcggtgaccccgacgcgatagccaagtccatcggccccgccgcgaaggtggtggtcaccgtcggctcggccgagaaagggccagaaggcggaggcgtcaccaccgacgacgcgctccgagtggtgcgggccgcagatctcgccagcgtggcgcacgtcgttgtcgtgtatgacgagggggcggccagcggcggccttggcggcgggggctccacttacaatgtgctcgacggcttcacgtccttcttctccaacctcttctcgcgagagcagcaggcgctgacgctgagccagttcttggccaaggtggcggagaccgatgtcaggtatacactggtgaaggcttcactcaccgacgactatacccctga

SEQ ID NO: 280010 - DNA, 520 bp, Zea mays
gccgctcgggtcgccgcgcccgatgcgccggccagcttccacgtcgagtttcgacagagtggggctaggacaccacagtgcactagtgcttggtgccttaactaagcctagtgatgaatctgtgttgaagaagctttctactaggtggcaaaagaaatttggggaagagattgatcaagatcttttgtatttaatatctgttgaccggatcttgcacatggaagatttcaatgaggatggcatgtgggtagttccatcagactacaccagtgcagaacctgatcctctacgcaattttgctgaaaacatcgtggaggaatttaacaacaaaaatgctgaagacgtccgtaggatatacaacatatatgtcgaatcagatttacaggtggcagacgtgaagatgatatgggttgacaggctaggtttcgatctccacgctcattctgcggaaggcgttttggctgttcgggtcccttttcctatggaggtctccgacgacaagggggtgaaatcctcgttc

SEQ ID NO: 280011 - DNA, 652 bp, Zea mays
tggtactctgacatccctgattggtgctttgtcgagatttatggaaaagaagggaaaaagtacttctcagagtctccttcagtagacgatctttgtcaattccaccagaagtcaccaatttcacatattgcaaaggtcaagacaccaacactctttcttcttggagcgcaagatctcagagttcctgtttctaatggcctgcagtatgcaagggctttgaaggagaggggaatcgaaacgaaaactattatcttcccagaagatatccatggaattgacaagcctcagtctgatttcgaaagcttcgtcaacataggggtttggttcaagaagcacatgggcaaataaacattagtgcttcccattacattcatgatttactttttcattgttactaaatgcctgtaactgggtcaaagtatacgatagcatgatttgcctgtccaatctggtgtttgccaagatggaataattcttgaagacatagaagcccgtgtttgttctagtgtggattctggaataccaactgtagctagtttatgtaataatcttctaataaatgatgtttatgtgttaatgtgaaatggtgggtgcttttgaattgtattcagaacaaaatggcccagctgaccagatcactgctgtttagttc

SEQ ID NO: 280012 - DNA, 400 bp, Zea mays
tggaagggagtcctagcaatcggtctcattcattcatcatccgctggtgacgagctagtgtgcgtcatatacaccatacctgcccaactgagcttcaaagtccagccgtatcgcgtatagtctagagaatgcatatacgcatggtgttttctgatcaggaaccagatcgagaaggtgcaatgggctatcagaaccatgtccgacgacagcggtgaccaatcaggcaacagcactcgcctcttcagcgcgatccgttcattctggaaccagttgtctgccaagctgaagaaagcaaggagagggttgccagtgaagatcctattctttctgatcgggttctactgcgctaccgcgttcgctaccgtcatcgggcaaacgggtgactgggacatattgtcgg

SEQ ID NO: 280013 - DNA, 405 bp, Zea mays
accgtccgctccatccaaccacctcatccctctccgccacgggccgcggccgaccgccggctccgtggcctcgacaccagttgacgaggagcatctctactctacagcgcaaatcggcagatgcttggtcaatatccggcggcggcatatgtcaactctccccttatgcgatggaactgccaactcgccgtgctggtcggagtgctctggatcgaggcttgctgctgcgcgccgtgttgggagggaagctgccgtctcctggcgctgggagaagccggggaccctctgtttgctgacggcaagatctccttccttgggcaggcagtccaggaaggtgcaatgggctatcagaagcatgtccgacgacagcggtgaccagtcatgcaacagcactcgcctcttcag

SEQ ID NO: 280014 - DNA, 403 bp, Zea mays
aacaaaactgatgtggcgacggacaacgaagcaggtcatggcgtcccagccgcagcttctgactctgtggtggatgatggcgcgcatgccgcgaccttggagccggaagaagaatcctccgaccctttcggtttagatggtcttcttgagcacaggcctaagaagacgtctgggagagctcgagagaaggcagtcgcggctctgaacagaaagacggtcgaggaggaagcaaagagggttctcaagtcgcagcgggaggcccttctgaaatgcctggaaatagccgctcggcgctacagaatcccgtggacacagaccgccattgacattttggcgaagcacgcgtacgacgacgcggcccggttcacacggcggcagcgggacgcgatcgctaaggcgttgg

SEQ ID NO: 280015 - DNA, 683 bp, Zea mays
  unsure (1)..(683): unsure at all n locations
ctcgagttagcccatgcttcacaccatgaagctgaagagcacaggcttnggggcaagtatggccaaagagcaggatttgcgggcttgggagaaagagctagaagaggcacaagcagagctaaaccagctcaacgaacaagttgcatccagaaggaatgtggagtccaaagctcatgaaaacgagtgcaaactacttggcctgaaaagtgagctagctgcctatgtggaaaacaaattgaatgaagaggctggaatggttcaggagcaaggttccgacgaagcaaaagaaatcagtaggtcaatcaagcaggctctagcttcaaagaggaaggagcttgctgaatttaaagggaaattagaaaacgcaagaattgaagccaatttagtaagagttgttgtagaatcactcagctcagagcttgatagggagaaagcttcacttgctacattgcagcagactgagggtatggcatgcatcacagttgcttctcgagaagctgagctcgacaggacagagcaagagatagaattggtacataagaaagaagcagaaactcgggaaatgatggcggagcttccaaggatgttgcagcaagcagcccaggaggcagacgatgccaagatggcagctcatttgggacaggaagaactgagaaaggccagggaagaagctgagcgaacta

SEQ ID NO: 280016 - DNA, 404 bp, Zea mays
cttccctgtgcttcctccccgcttccttccgctctaggggtcagccaggcagtccagataagatttgctctggttaggctacctccgcgccgcgctggaactccctcccggtgaggttgttgaaaccgacaaggaacggggacgtggggcccgaggaaggtcacgctgctagtttttttccttcgcgatcgatcccttccgcctccggattcgccctcctcttgttcctccgctgttttctcgatcggttggctggtgactctgcccctgcccctgcccctgccccggccccgattcgggggaatctgattcgccgttgggcgggcgggagagattgggttcttgggtctggtgccggtgcgcccggcgtaatttgggagcagatagaaacacgaaaggggagc

SEQ ID NO: 280017 - DNA, 465 bp, Zea mays
cggacacgtgggcggacgcgtgggtttttttatttatactcttcattgtaaattataagacgctagatataatgttttaattatatacacgatatataaacatatactagtaaacataatatgttaataaaaagataaaagtattttacaatttggagtggaaggagtagcagcagtgcaaaagagatgttaaaggtgccgcttcgtgcagctctatgatggcctacaacaacatccagcgccaagtctggcgcgaaaggcctacgaagcctgcagcccatgagagtccacgatcccaactcatgtgagtggggagtccacgatcccggctcatgtgattgtgggctgcccggatcgcggtccgtttttcatgtgggccgtcttcaatatgggcccgctggtcgctaactggtacctggataacggactcagaccgactgtagcgcgctccggcgactccactcg

SEQ ID NO: 280018 - DNA, 496 bp, Zea mays
ctcgcgggtcaacacacgcctctacactgtttccaatatccttcgcgccgtcgcgctccaggagaagcccggcctcgtcatcctcggcaagcaggcaattgatgatgactgcaaccaaactggacaaatgttagctggattgctcaagtggccacaaggaacctttgcctccaaggttacattggacacagaaaaacaaaaagctactgttgagcgagaagttgatggtggaattgaaaccatctgccttgatctgccagcagtgatcaccacggatttaagacttaaccagccaagatatgcaactttgcccaacataatgaaggcaaaatccaaagttattaagaaagtcgccgctgaagaccttggcgtagatattagatcagacatggaggtgattgaggtcaatgaaccaccaaaacgaaaagcaggggtgattctttcatgtgtcgacgagctccttgacaagttgaaaaatgaagcacgtgtcctttaa

SEQ ID NO: 280019 - DNA, 591 bp, Zea mays
ttttccgcctattcgtccgatcaatgcttatgatgccctcgccttgtaccgtcttgagtacaagtcctctgaccccaaaaagggtgctgctaagtcaaaactggctagtccactgaatgaaatccggcagcgaatgggcaggctgactgcagacagccctgtggaaaacaagcggactgctaggagcaagccaaaggctaaccagaaccagaaggataccaatgcaaatacccgtccacatgttaacactcccaatcaagttaatgctccaaatgcttatcagacaacgcagcatgtgaaccaaatggcattgctgaatggaaacgttgtttatggacctcaccttccacattctgaaagcgtcggctatggacctcatcttccacattctgaaaacgttgtctacggacctcatcttccacattctgaaaacgtcgtctatggacctcaccttccacagggatactcagccgaaggaagcagcttcttttggaacccaagtgacgggacttgaagacgcaggcagcatcatgtagctgctcatgcattgcatggcacttatcaagcaaaaacctctaacatcatcgacca

SEQ ID NO: 280020 - DNA, 336 bp, Zea mays
agcatattggcgttggcatcaccgtcggcattgtgcccattaccatgccgccgctgcccgcggccgacgatttactcattctcgagttcatcgcgagcaaccgccgtatcccccaccccgtgttcaactccttcatcgcctcccaatccccaccctccgccttctcccgcacctcacagcgcctccgaaaagccctagtgctccgcgccctcgacgccgccctctacaccgtgggcgcctcctgctcctccagcctcctcctccacaaggcgcgaaaggtcctcgccgaccccgacgcagccgcctgcttcccccaccagattccttttacaagaa

SEQ ID NO: 280021 - DNA, 402 bp, Zea mays
cattgcaatattgattccactggtaaagtgcatttggacattctgaaggatggctggagtccagctttcactatttctaaggtgttattggccatcaaagacatcatcagcaatccagatccatactccccgcttgtgatgagcatttcacgtcagtatctgactgatagagctaaacacgatgaaacagcagctgagtggacaatgagatttgcaagataggggattctgtttgtatctaagcacgattgaccttgtaaaaaaatcttaatgtggcctgacgcctgaaatggtgaatgttggcaaaggagccatcagccatgtattatttgatgtgagttgtgacataaaggtgtactttatgcttgagtgttctttaatcgctgcttttaggtggagaat

SEQ ID NO: 280022 - DNA, 681 bp, Zea mays
gaagaagacagcaacacaagcttagtcgtcctcgtccccccaatcttcagcccttgttcatcaacaaaccacatggccgcgctcggtcctgcttctgttacctccacgggcttggcgctgcacacccctgcgattcctcatcgtcggcgtcgccacgggaatgcagtggcctgtgcgtcgtcgtctcaacaccagcgaagccttaatggcttggcgatgagttcttcaggcacgaacaatgccttgcccatcaaaggaattaccactacacgggttcctgcagtcggtcgttcggtccctgcagcgaatccgtcgccgtcaggagggaacaacctcccggtgcccaagattcctccgtgggtcaagtgggtggctggcgccgtcatatttgcagtgcccatgtacaggaggttcagagctttagaagacaagatagagaagacggcggaggtggcgatcgaggtgatcgacaaggtggcggaggcgacggagaaggtcgccggcgaggtcgccgacgagttccccggcaacgagagcatcaaggaagcagcctccaggatcaagaaggtcatgcacgtggtcgaggaagacgccgacaaggctgaggccctgatcgagaaggtcgacgagataaagaaagatgtggattcgattgtcgatcctataatcggcaaggttgcc

SEQ ID NO: 280023 - DNA, 486 bp, Zea mays
gagctagccggacgaattcgggcgtgcggcttcgagctctcgcttatatcagcgccgcgcgcgccggccggtggcggcaggagccactaacatccccggcgtttgattctgccagaaccgcggccatggtcgattatatctggtctctctcgatctgatctgagctgagccggctggtggcccgggaaggacgaagtgtgtcgccacctataatttgatgatgtttgtgtcatcatgatcggtggctagcagaataagagatgatcagcggcaacctcaacaatgaagagctggggggcggcgggtgcaccaaggccgaggggccgggcgcggccggcggcgccggcgccgtcgtcgcaaagagtcccgtgctgtcgagctcccggcactggccgccgtcgacggagtcgaggatcgtgcgcgtgtcgcgggtcttcggcggcaaggaccggcacagcaaggtgaggacggtcaaggggctgcgcg

SEQ ID NO: 280024 - DNA, 922 bp, Zea mays
  unsure (1)..(922): unsure at all n locations
agcgcactactcctcggatagccacggcagcagcagcagccatggcttgctccgcgcaccttgtgtcccagagcctctactcgtcccaccgcgccagcccgggcgggcctaggaatctccgttcccagggccgaccgccggcgcgggcgtctccctctgcgaggcctggctcaagggtcagtggctgccggggtgtcagcctgagagtcgccgcgtcgttcgagcagggaaggaggcaagtggaggtctcttatgacccacaagcgaggtttaaccagatagcagaccaaattgacaaggatgctgggatgacacggcttaacctattctcaccttgcaaaattaatgtgttcttgaggataacgggcaagagaccagatgggttccatgacctggcttctctatttcatgtcataagtttgggtgatactatcaaattctcattgtcaccaagtaaaagtagagatcgcctgtcaaccaatgttccaggtgtcccagttgatgaaagcaatttgatcatcaaggcactcaacctttaccgacagaaaactgggactaataacttcttctggatacatcttgataagaaggtcccaactggtgctggtcttggtggtggaagcagtaatgctgcaactgcactatgggccgctaaccagtttgctggctgcatagcttcagagaaggatcttcaagagtggtctggtgagattggatcagatatcccctttttcttttcacgaggagcagcatattgtacaggtagaggagagattgtccaagatatcccaaatcccttgccggaaaatttaccaatggttcttataaagccacctgaagcatgctcaactgctgaagtttacaagcgattcangttggaacaaacaagtcaagctgatcccatgaccctgctcgaggaaat

SEQ ID NO: 280025 - DNA, 379 bp, Zea mays
gggtcgagtccgcgtccgcccacacgtccgcccacgcgtccgtagatctgcagcaacccctcccagaacctctgactttgcttcgcatcgcttcgtttccaagaggagaatgtttctctcccttgcccagtcgcctgcctgcgccgtcgtctccttcccatggaggtcctcgtcccaactcatcccacgggtcccctcccgctgcaccctcgcatgccacgcagcggtgcccaaagtgcccctccccatcgcctcgccggcctccctcggggacgaccctagcaagtgggaccccgccgagtgcgacgctctcctccgcggcggggagcaggtcgcctccgtgctgcaggagatggtcacgctgatggaggacatggag

SEQ ID NO: 280026 - DNA, 710 bp, Zea mays
cccgaggatgctgcggctgcgctggcgtgccgtcctccccccactcccactccctccgctgcctggcttgcttcgccgcctgcctccgcaccggcgcgccctctcgtcctcttccggctctatcccgcttccaccgccggtgatggaggcttcctacaagtttgggccctacaaaatcgacgccagggaggtcttccacgccacgcccctctcctacgccatggtgaatctccgcccgctgctcccgggtcatgttcttgtgtgccccaagcgtgaagtgaaaagattcgccgatctaagttctgatgagattagtgacttatgggttactgcaaaggaagttggtgcacgtcttgagcagtaccacaaagcatcttcacttacctttgctatccaggatggtcctcaagctggccaaacagttgcacatgtccacatccacctcatcccaaggaagaaaggggattttgagaaaaatgatgaaatatatgatgcgattgatgtgaaggagaaagaattgaaggagaagcttgacctggacatcgagaggaaagataggagcatggaagagatggctaatgaggccaatgagtaccgtgctctttttagttagtttctaagctgagctgactgtttgctagaaataaggtttgctacctgttcttcattgttgcagttcagttatggttgcgcactgacattgtgatgat

SEQ ID NO: 280027 - DNA, 664 bp, Zea mays
cccacgcgtccgcttcattggagatgctgcatgttggggctgcggggacaacagagttttggaaggggattggtgtgttgactggactggcattcatatatcgagagaagattgttcggacacgatcatgtggatggatggatggtgttcaagtgccttgcctctcctgtcctgtcttgcccttgccttgggccttggcgtgctcgcattttccgttacttccttttttatactctgtttcgattttgagccgggacattatcttcttcacctgttgatttgttctgttgctttgcgcctacgtgctctcgcagatccctttgggctgtttcacctccgcacgacaccaggagtgagccgagtttggtttggccgggttattcagtttattctttattatgcaattctagtttttgagtctattttgtagtcctcgacttcccaatgtgtgggttgcaggattgggtccgatcagtggagaattcatcatgatgacatgttgcgaggagatggaggcaggtcagtcttctgtcagatccggcggttcattgactttgtcgattggacatggattggtggtttcaggctcaaatgtctccgggtgtggtaccatcagaaccttcgattgagtcttactttaagggcagacaagaaagggtccttg

SEQ ID NO: 280028 - DNA, 666 bp, Zea mays
ctttgggtcagagactctgaaatctttgagggccgtgacatagcagatgagatttcagagcagaagggtgatatactgcaggttgaggacggctttagagggactcttttgtcatcaagtgtttcagcacagctttgtcagggcataacatttagtgaatgagtttcttccgtgagatatatgggtgcatacctgttggcataagctagttaaggtctctagaaggtacctgattgcttcagagggtagtcaatcatgtcagttctagcagccctcgcgaaaagttatgtctatgcttctctccatgctgtcacactaaggatgtcaaatgtatcctcgcttgaggaaaacggaagaaggctcttccttcttccctaatgtaatcgtgacttaggtataccactgggctacggggctgtgatgcctgcatgcttagtgttttttttcctgttgttggccatgcgggaccgtgagggctacgagcgacttgcattgtacgtggtggttgtgcacacatcggcttattgacaggtagattactatgaaagtctcaaggcgatgcagagcattgtgcagttttttcatgccttttattttaccttagatcctaagggtgtgcaatgccatttgatatatatatacctttatgctcactctggtttgctc

SEQ ID NO: 280029 - DNA, 729 bp, Zea mays
cggacgcgtgggggtcgcacacgatccatatcgcctcggtggcgtacaacagcgtgttcctcggcgagttcatgctcccggactgggacatgttccactcgctccaacaggccggacgcgtgggcggctccgcccgcgccatcagcggaggccctgtctacgtcagtgacgcacccggcaagcacaacttcgagctgctgaagaagattgtcttgcccgacggttccattctccgcgcgcgtctgcctggccggccgaccaaggattgcctgttcacggacccggcacgggacggcgtaagcctgctcaagatctggaacatgaacaagttcaccggcgtgctgggcgtgtacaactgccagggcgcggcgtggaactccgtggagaagaagaacaccttccaccagaccggcaccgaggccctgacctgcggcgtcaagggcggcgacgtccacctcatctccgaggccgcgacggacaccgaatgggacggcgactgcgccatgtaccggcatgccgacggcgacctcgtcgtcctcccgcacgacgcggcgttgcccgtctccctcaaagtcctggaacatgacatcctcaccgtgtcacccatcaaggagttggcgcctggtttcaggttcgccccgatcgggctggtggacatgttcaatagccgcggggccgtggaaagcctgacctatcacctcctcgggggcgacggttccaccttgggct

SEQ ID NO: 280030 - DNA, 759 bp, Zea mays
ctcgagccgattcggctcgagcgagagagtggcccttcttcagctgtgcttccatctgccgttcgctcgcttcttcccagagcgaacggcaatcctgttggcagctccaggtcagctgccacgacgacaacggaggaggacggatgtggggtcccgacgtcgagtgacgtcaactcgttgaggtcaacaaggctcgccaacaacagcggcggaagcgagaggagcagtggcagcagcgacatcaacaggagcgtcgcgaggaggggggcaagggggattctgatgccgaagaagatgctgaccaagctctggtctgggaaaacgaacgccggtgagaacagcagctcagacacgtcgcaaagccctgggtccgtcaacaacccggaggaggtgaagtccccccagtcaaggatcccaaggcgctcggtatcctcggcccggaggggtaaccccggtcccaccctagttttgttcttgctcttgatttttgccttccctggagagtagtggcaatctaaaaaatgtggagttactggagtaggtttggtcattgatgatgttttcagccatgttccatgggaactttttacatccaaagaaagtataggttgttataattgatgtaaaaaaaaaaaaaaaaaaaaaaaaaaaaaaaaaaaaaggaaaaaaaaataaaaaaaaagaaagaaaaaaaaaaaaagagaagaaaaacaagaagatcaaaaaaaagaaaggggcggccccccaaagggttcaaag

SEQ ID NO: 280031 - DNA, 821 bp, Zea mays
cggacgcgtgggttttgttcactgtggtgcctggggtggttgtcatggaccgtgatccacggccgcctgggcgcaatgctgtgaaggaagggtgctctcttgtatctctgatggcaactgatgccacaatgctcaagtgctgggaaacagttgcttgtggcagcatggggcgcgctcatcatggtgacatttggtggaaaggtgcttgggggatttctgcattcaattgcgcacgtctacttcatggtggtatggctgctgttctactttgcagcaaggtgtatggaggtgaggctggatggtcgccaatttggactggaggatgttgcagctgctcttgatggatttaggtagtgtctagttgccgcttgccgcctggatcatacatgaagagaggtatatttcatggcccatagtgcttattgatgaaacgctgctggtcttggctaagtagaggtttttgtaggtatcttgatcttctaaatcttgctgagatggtaaatgatttggatgagagagagaacttgacaatgttgtatgtacagctttgccacagagtggtgatctgcttctagtccaccacatggcatacaaagaaaggatgtttggtcccctttgccatggaaggttacaagcaagatacctggtgataggtgttctagctgcaacatgattcgtgaagtttatatacttgtgttgtgccagcaaaatttctctgggttataggtcagaacatgtgacgtgcatccaatcatacgtaataatcccttgttgatgtcgccccccttccagatgccatcttataaccctattagatacgt

SEQ ID NO: 280032 - DNA, 583 bp, Zea mays
ctctcatctgatatttctcatccgtcgtatatctcctggcgcgcgcgttccttgtcttgtcccagcgcccggcagctgcgccctgctccagctcatggcgcgtccctgcccctcccatggcagctccccagctcgatttccctccctagccatggccgcgcccaaatcctctccctccctgttcggattccgccagacctgcgtagctccctggtgtgtcttcctccctgcgcgctcagccagcgtccctgcgcgctccgcggtgctcagctctccagctccggtgcccagctcgccagggccgcgtgtgctccagtgtcgcgctctgctcgcggagttccttcgcggcgttcatctccctgctcagctcgccgcgccgaactgtccagcacctctctgctcctttcgttcctagcgcgtcgagttgagcttgccgatgatgctttggctggtcagcctctgctccagctcgcagttgctgcgttgccgagtccctggccgccgtgccctgtgcgctgtcctccgctcgccgggctgtacggtgctaggatcggaagcaccgtccctcgtttggacagcaacg

SEQ ID NO: 280033 - DNA, 521 bp, Zea mays
  unsure (1)..(521): unsure at all n locations
gtcntgtcccagcgcccggcagctgcgccctgctccagctcatggcgcgtccctgctcctcccatggcagctccccagctcgatttccctccccagccatggccgcgcccagatcctctccctccctgttcggattccgccagacctgcgtagctccctggtgtgtcttcctccctgcgcgctccgcggtgctcagctctccagcgccggtgcccagctcgccagggccgcgtgtgctccagcgtcgcgctctgctcgcggagttccttcgcggcgttcatctccctgctcagctcgccgcgccgaactgtccagcacctctctgctcctttcgttcctagcgcgtcgagttgagcttgccgatgatgctttggctggtcagcctctgctctagctcgcagttgctgcgttgccgagtccctggccgccgtgccctgtgcgctttcctccgctcgccgggctgtacgttgctaggatcggaagcaccgccttcgtttggacagcaacggcgtgcacaaaag

SEQ ID NO: 280034 - DNA, 1081 bp, Zea mays
gtggagaacaaattcagtttgctcgaactgctcaaatatcttctccagctcatgtgggcaaatcacaaaatcctgtaatggacttgagcacaacttttaccagtgttcttcaaaataagtcaagcctcttctcaaaaaacaatgcattgactgattctagtggtctgatccgaagcagccactcagagagaaaggtcccatctgctctgcagaccagggcaccacaccatgggtcacctatatccaatatgagatcaactgtagggggtaagttccccacagtgggccagaatgttgacagtccatttttgaggggggctaaaggtatcagttctagaaaaggagagacgggattcaaagaagggattaaatatgctgatcacgatccactgccctatgtacttgaacttgagttctggtgatacacccaccaaagactaccgaacaagtttgttgaaggccgaggccaacaaaaccacttattttcaaggacaagattctgttggtaaaggagagttccactttggttcacgtgctgtgaagcctttcaacttaaatggaactggcgcaggtcaaaatggcctcgctaagatctcgggatatgctggttttcgtgaggattataaagtaccaactaaggagaacatcttgagctttagcaagaaatcttcagttggtggagcagaagccagcaaaggtgtgtcaaggtggagatccgatgagtctagtgaagaagagagaacaaaccgggagagcggagctcctcttgttactagaaggcgacctagattttcgagaagatgatatatccacatcctcagggatttttttaattgtttgcagctatgccctaatgtgacaacaattgttttaagggaatgtgtatgcgggatgcggctatcatgcataatctacattgccatggccgagatgtagttcaagtgtcactaaggatgctagaaaacaaaatcgagaaggcgtatgcatgtagcattcagagttcagtggctaaattatattttcccaacttttgtgccaaacgccccgtaaatatagtcgtactaatctcgtttcttgggct

SEQ ID NO: 280035 - DNA, 371 bp, Zea mays
cttgagttctggtgatacacccaccaaagactaccgaacaagtttgttgaaggccgaggctaacaaaaccacttattttcaaggacaagattctgttggaaaaggagagttccactttggttcacgtgctgtgaagcctttcaacttaaatggaactggcgcaggtcaaaatggcctcgctaagatctcgggatatgctggttttcgtgaggattataaagtaccaactaaggagaacatcttgaggtaatcatgattctgcactctggtttatggcaatatctttcattgtggtccttgttatctagtgtgaacttggcttcagagttcaaaacataatattattagaatgaagtttctgtgttttcagt

SEQ ID NO: 280036 - DNA, 473 bp, Zea mays
gtggcaccaaagctcgttctcccgaccccgactgtccccaatgcgcagtccgcgaggcctcctcaccgcctccggctaccttgcgggccggcacgctccgtcgccctccgtgtccaccactggccacaactccctactcgctcgcaccttccaaatcctagcccagccggagtccgtccgtctgcagaagcacccggcacccaactccgggatcttagagctgaggctggagcggccggaagtcaagaacgccattaattgggatatgatgaggatgctgcggagcgccatagagaagattcaggccgacacgacggcgaaggtcgtccttgttgcgagctccgtgccgggggctttctctgcaggcgccgatctcaaggcacttcctattccaacaattgctgacattgaaggagctgcccttggtgtgggctagaactggctttggcatgcgatcttcgatatgtggagaa

SEQ ID NO: 280037 - DNA, 605 bp, Zea mays
tctacacgcgtgcgctcgttctcccgaccccgactgaccccattgcgcagtccgcgaggccttctcaccgcctccggctaccttgcgggccggcacgctccgtcggcctccgtgtgcaccactggccacaactccctactcgctcgcaccttccaaatcctagcccagccggagtccgtccgtctccagaagcacccggctcccaactccgggatcttagagctgaggctggagcggccggaagtcaagaacgccattaattgggatatgatgaggatgctgcggagcgccatagagaagattcaggccgacacgacggcgaaggtcgtccttgttgcgagctccgtgccgggggctttctctgcaggcgccgatctcaaggaaaggaggctaatgagttcttctgaccctggggggtatgccagatccttgaggtctacattttcgtcttttgaggcacttcctattccaacaattgctgtcattgaacgagctgcccttggtggtgggctagaactggctttggcgttcgatcttcgaagatgtggagaaaatgctgaacttggactgccagaaacaaaccttgctattatacctggagctgg

SEQ ID NO: 280038 - DNA, 852 bp, Zea mays
aatggcgcccggcgaccgaccaccctctcggggggacttttgctgtccctctggctcttcgccgcaccaccaccaccgcctccctccctctgctcggctcccaaaaaaggcgcggcaccaaaaggcgcgagagagaggcacggggaccgcccgcctcgctcgcctgcgcaccggattcgtcgctgcggcggtggctgcagcggcggcggcccggcggggagatgtcttcgcgctcggggtccacgggcggagggagcacccgcggcggcagcagcgcggggggaggcggccgcggtgccactggccgtgctgctcaggcgggaggtggccagcgagcgcaccgcgtcggagcgcccggagctgcactggggcctcttcagccaggccaagaagggcgaggacttcaccttcctcaagcccgaatgcgagcgcgtccctgacgtcccgtcctcctccttctccgccttcggcctgtttgatgggcataatgggaacggagccgcaatttacaccaaggagaatctcttgaacaacatcttgagcgcggtccctgccgatctgaacagggaagactggcttgctgcactcccaagagcgctggttgctgcattcgtcaaaaccgataaggatttccagactaaagcacgttcttcagggacaactgtgacatttgtcataatagatggattggtcatcactgttgcatcagctggcgattcccgttgtgtactacaagctgaaggttcaatttaccacctatcctctgatcatcggttcgatgcaagccaagaggaggtagattggtttctcctgatgcacgtctcttccccattctcatggcaactctttgct

SEQ ID NO: 280039 - DNA, 415 bp, Zea mays
attgcagatcgtgtatgagctgttcttgaggttcattcagtctcccgagacagacgcgaagctggccaagagatacattgaccacggcttcattgtcaggcttctcgatctctttgactcggaggatcctagggagagggagtacctgaagacgatccttcacaggatatacggcaagttcatggtgcaccgccccttcatcaggaaggcgatcaacaatatcctctaccggtttatattcgagacggagaagcataatggtatcgcagagctgttacagattctggggagtataattaatggctttgctttgccgctcaaggaagagcacaaattgtttctagtccgagcgctgattccgctccacaaaccaaaatgtgttgccatgtaccatcagcaactgtcctactgcgtc

SEQ ID NO: 280040 - DNA, 622 bp, Zea mays
gacatggtggtgatattggcagtggtgtggaatgctggagggggtactaccaaagtctacgtgctacacaaatgggattgtctttaaatattgatatttcagcaactgcattttacaaggctcaaccgattttggaatttgcaattgagtacctcaacatacgtgacacctcaaggcgtttgtctgaccaggatcgcttaaaactgaagaaagtcctcaaaggagcccgtgttgtggcaacacatcgtcgtgatatagccatacattacaagattactgggataacctcacttcccttgaatagtttaacgtatctattcagttttaattgatattctttttcttaattcatgctgcactgttttttaatggcacatgtttaaatattcatgtttgtttatataggtttaatcaagatggggcaagtgtttcagttgtccaatactttaaacaccaatataattacagtttgaaacacattaactggccatgccttcaatctggcaatgatagcaggccgacttatttaccaatggaggtttgcagtatacttgacggtcaacgctattctaggaagctaaatgagcgccaagtcacaagcatcctgaagatggcatgtgag

SEQ ID NO: 280041 - DNA, 534 bp, Zea mays
catatttgggcaaggtcgttttctctctagacatgtacatcaagtcattttggacgtcattgatagagcaatggctgcattttctgctactggaatgaaccctgatagtgtccttccgggcgacgattggttcatggatgtctcccaagaagttgtcagcatgatcagtggaaggggtagagttgctaatggtgacagggaagtaaacagcccaacggcctcagtttcagcgcactccatttcttcgttcaaatcccatggcagctcctagtttgcaagtcggtattctttgtaggcaggtcattgtataataatcattagtatattctttcaacctattcctccactcatttgttttttcttttctttttcagaacttttgtgatagtatagtatagatggataattgtttgacctaggaaaataaatcttttttagtaattttgttttagggggtgtaagatattatttttttcttttttattaatattctcttattttttttttaactattattttaaacacttatttttt

SEQ ID NO: 280042 - DNA, 529 bp, Zea mays
cccacgcgtccggcaaacatcttgatcatgtgaatatgcttggacttagcaagaccacacttagattacgatacctaatcaattggttggtgacctcattactgcagctccggttgcctgattcaggggatggcgagggggtaccccttgtttatatatatggtccaaagatcaaatatgaccgtggagcagcagttgcattcaatataaaggactgcaacactggaacctccctgataaatcctgaaactgtacagaaactggcagaaaaagaaggcctctccttgggcgtcgggttcctaagtcatatacgcctcatagacaaccagaaacatggtgcggttgatgtggggttaagttcttccttgccagcggcaaatggccgtcgtgaaaagaaaaatagcaagaatgctattattgggacccaagtggtcacttgcaatctctggggttccttacaaattttgaggatgtctacaggttgtgggcatttgctgcaaaatttcttgattcatcatttcttgagcaa

SEQ ID NO: 280043 - DNA, 617 bp, Zea mays
cccacgcgtccggtcagcggtgtcgtcacagagttcacgtcggacgacgcgaccacgacgctgctgttccctctgtttgctgaattggccaaggcgatcgatgtgcccccagcgctgctcatggtttctggagcagttggggctcagctttcgtacttgttacctactggatcaccgtcaaacgtaattgggttcagcactggccacattaccatcaaggatctcgtcaccacagggcttcccctgaaacttgtcggaatcgcggctctgacagtcttgatgccaactctaggatcacaggtttttggcacaaacagcaagttctaggagcggaatgcatattggacggttcattcctccaagcccaagttctaggagcggaatgcatattttggaccgttcattcctcgaagcccagttgtatatatgtacagtactttcccttatcttgtatctacggcctagtcaaggttagtgggagggtaagggtatactctttgatctgtacatggtcaaacattgaggattgtatgcaatgctccaatctgtgtgaaaatagctacaggagtgctccttgagagcgaaatgaagtcaaagggagagcaatttacctttcc

SEQ ID NO: 280044 - DNA, 532 bp, Zea mays
cgccgcgccgtgctagcttgctagttgcaagcaccagccgaccaccacacggtagcgcacgcggacaatttaacagcatcaggtttaggccctgctgccgtcgtcgagcgcccgggccaccgcacacctgaaagcaatggagatcgtcgccacgcgctccccggcctgctgcgccgccgtgtccttctcccagtcgtacaggcccaaggcgtccaggccgccgaccacgttctacggcgagtcggtgcgggtgaacacggcgcggccgctctcggcgaggaggcagtccaaggcggccagccgcgcggccctcagtgcccggtgcgagatcggagacagcctggaggagttcctgaccaaggcgacgccggacaagaacctcatcaggctgctcatctgcatgggggacgccagggggacgatcgcagtcaaagtccgcgcagcgtcctgcggcgagagcgcctgtgtcaagtccttcggcgacgagcagctggccgtcgacaggcgcgctaacaggctgctctttgaggct

SEQ ID NO: 280045 - DNA, 566 bp, Zea mays
cccacgcgtccgcccacgcgtccgaagagatgctcctctactagaatctgttggaccacaaaagtgtcatgctttcagcacagatggtgcaaaatttgcaattggtggagaggatggacatctcagaatattccattggccaagcataaaagtgcttttggatgagcccaaagctcataaatccttccgagacatggatatcagcttagactcagagttcttagtttcaacatccattgatggatctgcgagaatatggaagatagatgagggcgcaccactggtcaatttgactcgatcctcggatgagaagatcgagtgctgccgcttttctagggatggcatgaaaccgttcctgttttgcactgttgcaaaaggtcccaaagttgttactgttgtctggaacataagcgattgggagagaattgggtacacaagacttctggggaagcctatctgcacactcttagttagcttggatgggaagtatctggcattgtgagtggatgaaatacttctacttttgaggaagccacgatggtgacttctgtgctgttgatgtgaag

SEQ ID NO: 280046 - DNA, 788 bp, Zea mays
gccttggggctatcgtccagtttatgtgcagctacatcacccttccactctatgcccttgtttctcagatgggttcagaaatgaagcgaacaattttcgacgagcagacagcgaaggccctgaagaaatggcacaaggccgtggtgaagaagaaacaccacaaggattcctcacacaattcttccgagactcctagcactgacacaacaggacctgcaggggaagcgggtgagtggcagcggctgcacgaggtgccggtccggcacctccaccggtacaagaccatcgtgcacgtcggcggcgtgaggagcccgttgtcggacccggactacagcgacacggacgacaccgagccgctgtcgttgcagactaggcacctgataccgccggcgaagcagctggagcctcgacaccgagcgcgcggaggtgcgcgtgaacgtcgtagagacagcggcggcgccaagcgacgtcctccaagacagcttctcgttcccaaggctgcttcctcctcgccatgtgccggacaagttaagtggccagcagtctgcttacttactacagactgtcctatatagagatagtagaatagtagtttcaagttataaggtcgatttggctagttatacaacttttgttatttatttagataaaggctatgtctatatagcaaaagttgtaaaactagaaaaatcaaaatgatttataatttgaattgtagtagtatagtagattagtagtcgaatggaacatgcgttagagccttaacttccaaaaaaaaaaaagggcgg

SEQ ID NO: 280047 - DNA, 378 bp, Zea mays
cccacgcgtccgaaagcctgttactaaactgacaccaatggcgatgagttccgtggccaccgcattccttgtttccccgcccgcgcgtccggtcacttccgcacttctgcaagagagaagggtcaggttcatccagcgacgcgctggatgcggtagattgctactcctacgaccaccctttccgccagcagctgtacagctacatgaagcagcagcaatctctgaatcaggactccgttggtcccagaggagaaggctcggtcgaggtggaggtgccctcgcctggccttgatgaggccaagattgcggagacgatgaaaggagagctccagaatttgaggggaaccggcggtcccgctcattcatgcggcagcatcc

SEQ ID NO: 280048 - DNA, 785 bp, Zea mays
gccgggcctcaagcgcagcacgtccacgccgttcatgaacaccaccgacgtcggcaagcagttcaccatgtccgaggtgcgcaagcacgcgtcgcaggagtcggcgtggatcgccgtgcacggccacgtctacgactgcaccaagttcctcaaggaccacccgggcggcgccgacagcatcctcatcaacgccggcaccgactgcaccgaggagttcgacgccatccactccgacaaggccaaggcgctcctcgacacctaccgcatcggcgagctcatcaccacgggcaccggctacagctccgacaactccgtccacggcggctccgtcctgtcgcacctcgcgcccatccgcgaggccgtcagggcccccgcgctctccaacccgcgcgataagatccactgccgcctcgtcggcaagaaggagctgtcccgcgacgtccgcctcttccgcttctcgctgccgtcgcccgaccaggtgctcggcctccccatcggcaagcacatcttcgtctgcgccagcattgaagggaagctgtgcatgcgggcgtacacgcccacgagcatggtggacgagatcggccacttcgacctcctcgtcaaggtctacttcaagagcgagcatcccaggttccccaacggttggctcatgacccagtacctcgaggcgcgtcccgtcggctcggagatcgacgtcaaaggcgcgcgtgtccacgtggagtccagccgtcgcggcagcttcgtcattaacgccaagcagcgccatgccagccgcctcgccatga

SEQ ID NO: 280049 - DNA, 414 bp, Zea mays
ggactcgaagacgctggtgttcacgtcggactacgccgccgtgtccgcggagcccatctccaacccgcaccactaccagccctacggggagatcttcaccgtaaacatcgacgggtctggcatctcgccggctcacgcacaactccttcgaggaccggacgccgtcgtggacgccgtaccacctcaaggcggacgacgtgggcgagacgctgcaggcctccgggacgtgcgcgttcgacgactgccactggctcaacatcgctgcccggcctgatggcctcatgtgtggcaagcacgcctagttatagtatctgtgggagaaactggactcacgtatataagtgtgctgtgtacatagtgcggtgatgccatcttgtctgcttgcatatgcatactactgaacatatgatgatg

SEQ ID NO: 280050 - DNA, 459 bp, Zea mays
ggaagatgaagctcgtcgaatctggcagcttttcatatctggcgtcttatactgccatagaaacatggttgtccaccgtgacctaaagccggaaaacttgttacttgattcaaagtataatgtaaaacttgcggattttggtctgagcaatgtcatgcatgatggccattttctgaagactagctgtgggagtccgaactatgctgctccagaggtaatatctggtaaactatatgctggacctgaggtcgatgtatggagttgtggggagattctttatgctcttctttgtggaactcttccatttgatgatgagaatattcccaatctgttcaaaaaaattaagggaggtatctacacacttccaagtcatttgtctggtatggccagggatttgatcccacgaatgcttgttgttgagcctatgaagagaatcacaattagggaaattcgggagca

SEQ ID NO: 280051 - DNA, 456 bp, Zea mays
acgttggaagtggccaatgctgcagttgaggctctcaatgggactgaggttggtgatagaaaaattacaagtgaacgtcacagagagcttcttaccgaacattgaccgatcagcaccagaaccagaggctctgtttgtagatagtcagtacaaggtttatgttggtaatcttgcgaagactgtaacaaccgaagttcttaaaaacttcttctccgaaaaggggaatatcctcagtgcaacagtctcccacattccggggacctccaagtcaaaggggtatggctttgtcacattctcttctgacgaagaagttgaagctgctgttgcgactttcaataacgcggaattggaaggacaactcattcctgtgaatagagcttagattatcacaaatttgcaggggcacccgatgatggggaatatcttggcgaagacatgtcgtaagaggggatgttt

SEQ ID NO: 280052 - DNA, 414 bp, Zea mays
gctttcctctccagccgatgtccatctcccttccagcccaaacatggccgcctctccgagccccatcgcccatggcagccgtgccctgctcccagctccctcacctcccccatggccgagcgccctctccagccaccggtgctcgccaagcccatctcccatggcgcccagcccagtttccagcgccctcctccatcaccgcgcacctctggtcgcttcagctcatctccctcgccgtggagctctctgcgtgcgcccctggttcctgcaccctggcctccctcatcttccctgggtccggccatagctggccgccgctgctccatctcgagtcgcgctcgcccagctctgttggctgcgccctccctgccgcagctcgcgcctgtcgtcctgcttactcgagctcgccccggc

SEQ ID NO: 280053 - DNA, 551 bp, Zea mays
ggaccggtccaaggacatcatcatctccggcggggagaacatcagcaccatcgatgtggaggcggcgctgttcccgcacccggccgtggcggaggccgcagtggtggggcggcccgacgagtactggggcgagatgccgtgcgcattcgtgacgctcagggagggcgcggccggcagcgtgcgcgccgaggaggtggtggcgttctgccaggcgcgcctgccgcggtacatggcgccccggacggtggtgttcgtggccgagctgcccaagacagccacggggaaggtgcagaagttcgcgctccgggagcaggccagggccatgggcagcatctccagctccgagcagcaggatggggcagggacgaggagcaagctctgatctgaactcgcatgcccacatggatgtctcctccattccactgacgagtagttgagcagcaacgaacctaagtgtgctgagctgtgctgtgctgtgcttggacatgtagagaaagagaatcaccacactcagtgatacagattcgtcatttcagtaatataatttacag

SEQ ID NO: 280054 - DNA, 713 bp, Zea mays
ctcagcagcaggctgcagcttctaaaagtaattctgaaatcgatgatacaagaaaaactgaggatatgattggttgtgcaagttatgatggtgaaaatatagatagctcaaagcagagacatgacaatgctgaaggtcagcagcctatggacacgtcagttgatcatcctacctgtgcaagtgaggtggatgggatggacgtggttgattgcaatcatgatgaaaacaatgtggcttctggtgaacaaaattgtagggaagcatcattgattaatggtaaacccattgagacatcatcagataatagtttggagcaaggcaaggcatgcaaggatgggtcggccagtccaaacaacaatgtccttgctgctaatgcatgccagtttaagaatgtcgttgctattgtagaccctccacgtgttggccttcaccctactgtgatcaaggcattgaggacgcatccacgtattcgacgtctagtgtacatttcctgcaaccctgacagtctagtcgccaacgggatcgagctttgcacaccaacacccgagaaacaagagaagaacaaaggcaaccgagggtggcggtctatgagcaccgcgggtctcgctcggcagaaggacgaagtccaatcgcaactctgaagctttttaccccaagagggcaatggcggtcactttggtccctgacacaccgccacttccgaaaagggttag

SEQ ID NO: 280055 - DNA, 269 bp, Zea mays
cgtccacccacacgtccgcggcccaacactagtagcgtagctgagagcctgagacgatggccgactactaccacggcggcagggccatgtactccaacactgacgagtgctatgacgccggcaggcacggcggcagcgtgagggcgtactcgcgcaccgacgagtactacgacaacgtggacgaccgcatgaggaggcccgcgtacggcgccgacgactgcggctacggcggcaggcagaccgccgtgtacgccgacgagtactcccgc

SEQ ID NO: 280056 - DNA, 463 bp, Zea mays
ctcagtcattgattcagtgcttgaaggatttgctagattgaagggcctggatgggaagtatgcactagcaaagcctttatctcaacattctgtaaagcaaacatatcgatctgttattcctaatggacgagtcagaaagtatgaacttgttgatttgccacaagattcaagaccactgctggtattcatcaatggcaagagtggacgtcgaaatggaccttcgcttagaagaacgctgaacatgttgttgaatccaatgcagatatttgagctaagtgcttctcaggcacctgaagttggattacaactattccacaatgtgaaacacttcagaatccttgtttgtggtggggatggaactgtagcatgggttcttgatgctattgacaagcagaactacgagtctcctccccctggtcgccattcctcctctcgggaactggaaatgaccgtaccacgtgtt

SEQ ID NO: 280057 - DNA, 456 bp, Zea mays
  unsure (1)..(456): unsure at all n locations
gcgaaagggcaagctttgtggcgtcggacggcggctgcagctagagccgggcagcgggcgacgcatcctgccatcgtcctcgtccggccagctgcacactgtgatctaatacaatggctagcgatggatgaagacctagatgatgatgatcatgatgatggacctgaggcatcgttgtaagcttgttgatgaagatctagatgataataatgtaccatgaatgctatgaatgtttcttattgtacttgctccgtaatgttttgtgaccttgtgaacttgggattgtggacttgtggctttgtgaactttatgatgaacttgttatattgtgtacttgtgttctttgtgatcaacttatcatattgtgcacttgtgatctatgttatcaatttgtaaaaaaangaaaaaaaaaaaaaaaaaaaaaaaaaaaaaaaaaaaaaaaaaaaaaaggggggg

SEQ ID NO: 280058 - DNA, 354 bp, Zea mays
aacggacgcgtgggcggacgcgtgggagcggagaagcgcccaacccaacccgccgttcctcctccaaagcgccctcctgccccgcaaaatggagacctccttcctgcccaccacactccccaacacaaggcctctccccgcgctccgaacctacgccccagccgcctcgatccgttcccaacagcgccctcgtcgctccaccatacgcgcagcatcacccggggccggaaggaggagacggtgaccaccgtccgggagcaactggaggggtgctacctcctggcgggtatcaagtacgagggcctgacggtgaagcagctgcagggaatccgcgacgcgctccccgacacctgc

SEQ ID NO: 280059 - DNA, 421 bp, Zea mays
agcgtcacattataactgatgatcagttgtttagaccagttttggatccccaaggatgggaccatgatattgggttcgatgccatcaattttgaagcatctcaagagttgaaaaagaatgtctctgcggcaattacaggacagatgagaaaggacaaggaagacatgtatatccattcagaatgttcagtaagttacaatgctcagagaggctgctccttgatggggggtatggatatgcagacggcaagcaaagatttggtctgtactgttcatggggatgccaagttccacaatctgccttggaacagtattggaggtggcatttctgttactaagtttggcaacaagtactttgctggggctaagttagaagactctgttaccattgggagacgagttaaactggtagccaagccggt

SEQ ID NO: 280060 - DNA, 562 bp, Zea mays
gtggtatcaggattgaggtgcctgcctttgaaaccagacatggacttgcaccttgcatggttgctcctaccaagatcatagctggcctggggctgtcactggggattgatatccttgaagcacctggagcaactggagattaccgtactctcttaacttctaaagctaaagccatagccaaggcactctctgcccctatgggtacaccacctcgtgtttttgtgcctggagaggatggatacaaggctggaaaagaaaatggatatgactttgggttcctgcacataaaggccattgatgatgctggtcatgacaaggctgtcaagttgaaagtacggggtctagaagctgttgatcgagctattggtcagcttgcgaggcttctttgggaagctgaaaaggccggacactatcagtactttctttgcgtcactggagaccattctactcctgttgaatatggtgatcatagcttcgaacccgtcccgtttgcaatatgcagactgagagattatgcaggagccattggaggaggataatattatgaatacacagctcgacg

SEQ ID NO: 280061 - DNA, 683 bp, Zea mays
gccatgcctaggtatcaagtgggcttgacaaaggatgattcaagtagtagacactctgagtggcggcagcctagcacagatgatgtgcgcaagagcaagctcgggccaagatacttcacggcgtttggcgtggatctgtcccctgataatatggcagttgccattgtctattttgtgcaaggggttctgggtcttgcacggcttgctgtgagcttttacttaaaagatgatctccatctagatccagctgagaccgcagtggtatctggtttctcgtccttgccgtggttgatcaagcccctctatggctttatcagtgattccattccactctttggatatcgaagaaggtcatatctttttctgtcagggtcacttggagcactttcatggagcttaatggccacagtagtgagcagtaaatacagcgcagcattctctattcttcttggctcactttctgttgccttctcagatgttgtagtggattctatggttgtagagagagcccgtggagaatctcaaagtacatctggatcactccagtcactctgttggggatcttctgcctttggaggaattgtgagtgcttatttcagtgggtcactggcggatacttatggagtaagatgtgtctttggtgatacagcgtctttacccctcatgacatctgctgttgcaga

SEQ ID NO: 280062 - DNA, 651 bp, Zea mays
agcgcggcgcgtcgggttcgaggtcgtcatcggggacccgcccttcaacgtcgacgtcggggagttcgccaaggaggtgaacgccgtggacgtgctggtgggcgtgcacggcgccgggctcaccaactcgctgttcctccccacgggcgccgtcttcatccagatcaacccgtacggcaagatggagcacatcggggaggtggacttcggcatccccgccgtggacatggggctcaagtacatcgcctactccgccggcgtcgaggagaccaccctggtggacacgctggggcgcgaccacccggccgtcaaggacccggagtccatccaccggagtgggtgggggaaggtggccgagtactacctcggcaagcaggacgtccggctcgacctccagcggttcgagcccgtgctccgcaaggccatgcagctcctcagggagtagcagcgtcgtagagagcagcagatgaaagtacagtttttttccaaatgacttttagagttttcttccctccctatacctccttaattatatatatttctcaattcttttccattttttggtgttcttttataaagtaaaaaaagaagacaaaccaaagactcacatgcttacttgttaaaaaaaaaaaaaaaaggggcggccgccga

SEQ ID NO: 280063 - DNA, 456 bp, Zea mays
  unsure (1)..(456): unsure at all n locations
cggacgcgtggggacagcacagcgcagcgcaagctcgatcaccacaccaaccagactcagaacatccagaactcagagcttctacttctagaacagaagaacatcgagatcagtcctcccctgcatcctccaccggcctcacctagatgagcacctcgtacaccgaggcgcagttcggctccttgttagacctgcccgccggagacgacctcacgtcctggttcacacacctgtgcggcgaggagcaggcggcggcgctgccggcgttccaggcgccggtggcgatggcggaccccaggaagaggagcgccgagtaccatctctgggaggggaggcgtccggggtcaagaggcagcgctccccgaccagcagctcccgggagaacagcgccggcagcaatgacggcgactacgagcacacgtncgcagccgcagccgcagccgcagccgcagccgc

SEQ ID NO: 280064 - DNA, 681 bp, Zea mays
cggacgcgtggcgtgacgcgtggccggacccagggacgccttccagcgcctcaagtcccgctggggctgcctccagaagcgcaccgaggtgaagctgcaggacctccccgtcgtgctcggcgcctgctgcgtcctccacaacatctgcgagcgcgccggagacgccgtcgaccccgacatcgcgttccagctcttcgacgacgacatggtggccgagaaccccgtgcgctccacggcggccgtcgccgcgcgcgacaacatcgcccacaacctcctccaccgcagcagcagtagcagcgccgccgccggccccaggttcgccttcaattgaactctgacggcgggagcaaggaaaagcagctcgctttctcggcggaatcagagaagacgacgccacgaggctcagcaatctttcaccgtttttttcgcttgaatgaaattgtaataagttgggaacatagcaacgggggttgatagcgaaacatacatagggttcaaagatacagtaggtgattggttgataggatttgagatggttctgcattttctttggtagagtcaaaggttcaatcatcatttttcagatttggtgagaccgcgtagcctgtgtattcaatactgtgcaggctattttgccaccagactttgcaatcaaaaaaaaaaaaaaaaaccacgcgtccg

SEQ ID NO: 280065 - DNA, 670 bp, Zea mays
agcatgttgtcatgggtcagttagacgttgcgtctgagaaacttcagagagaagggtcccggaggagcgcaacataaagcttttgatcgcacaaatgcatgttgtcatgggtcagttagacgttgcgtctgagaaactacaaagtcttataaatgaggatcctcgggattttcggtctcatctttgccagggcattgtgtatgcacttttagacagaaaagaagacgcagatatgcagtttgatgtatacagaagccttgtgccggatgaattcccagataagagttttatcagtgatgttatactggcggctaggacggagtcacatgatcggctacaaaaggaatttgactctgagtttcaagcgaagaaatgatacattaagttttgtatagatgaggcccaaatactcctggtaggctaaatggttgcatggccccaatctttcaaatgaaacataacccagtaaaagcatagtgaaaagaggcgtctcttatcaggctatcaccaattttcctcatttcctctccctcttagtctctgcagacatttctcagtgaaatataatatagcgaagacaaaattttgcttgaagttaaaagctgtagtatccaaccagatggattgatttgttgatgttcaaatgtagaatttgtgaagcttatgttcc

SEQ ID NO: 280066 - DNA, 353 bp, Zea mays
cggccacgaatatctcggtcgccaattgctgtatactcttaccttcgccttcgccgccgccgccgtacagtctagagagaaccggcacagccgccgcagtccgcagatgtcgatcgtggtggcatcggaggtcgcgaccgctctcgcgagccgcggcgcggtcgtcgccctcgagtccaccatcatctgccacggtatgccgtacccgaagaatctccagatggccatggaggtggaggccatcatcagggacaacggggctatccctgcaaccatagccgtcctggacggagtccctcacgtcggccttaacaacgaacaattgaagaggttggctataagtggaaggcaat

SEQ ID NO: 280067 - DNA, 425 bp, Zea mays
tgttctcctgcgctcgacctctagctagtgtccactacatgggagatgtagctctggtgttcagtcggtgtaaacctttcctagccaccaagtttgttgtactccaaagctgagcgccaacctccttccaatggtgataacgctcatgtttctctctgtctcctcgtggtcaagcatactcgaacatgggctcaacgtcgcacaacgccgccgggaaccacctaatcatcgatcgctcgattcacgacttctccgatcaaaatttataccacctagaagaagtggtgtttgaacgaggagtctactccagtggctgctgatcaagtggcggagccatctaactgggtattgggtagaaaggtcttgagcctcttcaatgcaataaacgcaagccccgggtgcattttcccccttccgtgtaattt

SEQ ID NO: 280068 - DNA, 481 bp, Zea mays
cccacgcgtccgcccacgcgtccgcccacgcgtccgctgagactatccaatatgaaaaagatcgcaatgcaggttttctatcaccatttgggtactcaacacctacagtaacatcagcagtagatgctatatgttcaatggagtggtattggctcttggcatcaaaatcccaagtatgcatcgaggggaaatattctataagaatttggagatggaagggttatcttgtacagtacacctttcttggcaacgaaggtccacctgttcttcttgtgcatggttttggagctttcctggagcattttcgtgacaatatacacaagattgctgctacgggccaccgagtttgggcaattactcttgttggctttgggaaatcagagaaaccaaatgtcaactattcagaacttttctggtctgaactactgagggattttattgttgaaattgtgagggagcctgttcatcttcttggcaactc

SEQ ID NO: 280069 - DNA, 321 bp, Zea mays
aaccacataaagttgaacatttgaatgtgtcaatgttgaaaacgtgttactagacccggcttcagtgaaaataaaatcccaagtacgaccaacaagaaagtacccagtgatggcaatgtatggccacgatagactgcaactcagtgaacggctaccaatgacaatcctaatctaagacttggccttctcattaatggcacgcttgttgtgccaagttgcgctcttatcacccttcagttggttctttttcatggctattgaacactggtcaggccttctagtatttgtattcatctccgcttgtgatttcctccgcctgat

SEQ ID NO: 280070 - DNA, 499 bp, Zea mays
cggacgcgtgggcatgcaggctgctgagtgaaaatgggagtggcaggtcacaacgatccattgttaggtgaaacgacatgtgggtctttgctgcagcaacttcagctgatatgggatgaggttggcgaaagtgatgaagatcgtgacaagatgttacttcagctagagcaagagtgcttagatgtttataggagaaaggttgatcaggcttctagctccaggtcatgtctcctccaacagctttccaactccaaatcggaactgactagactcctttctgcattaggagagtcatctatttctggtgctcctgacaagacatctggtacaatcaaggagcaactagcagctatatcaccatctttagagacactccgcaggaaaaaagagagtacggtgaaagagtttgctcatgtacaacttcagattcagatacttcgtgatgaaattgctggggatctacatattggtgaacagttggaaacaccccatgttaatg

SEQ ID NO: 280071 - DNA, 1470 bp, Zea mays
cttcctctccacgctcgacgcctgggttcacgtcctccgccagcttcaggaccgagacggcgcctgcgcgctccagtcggagctcgtcaagctcgccttctcctttgaccgcctccgcccgccctccaaccctgccggcgtcgaggtagcccgctcttcctccttctctaccgccttccgcgtgtcggagccaggccagtacacgctcgttttcgccaactgcctcggcggcggcctcaaggtcgacatggacgtccgctccgccatgtacaacgtcgacccggccaccggggagcgccagtacctctccgcgggagcctcggcgctgccctccttctacttcctcttctgcctcgcctacgctggcctcgccgccgcctgggtttccatcctcctccgcaagcgggccgccgtcttccggatccactacttcatgctcgccgtgctcgtgctcaaggctctcaacctcctcgccgaggccgaggacaagtcatgcatcgagcgcaccggcacggcccacggatgggacgtgctcttctacatcttcagcttcctcaaggggatctcgctcttcacgctcatagtgctcatcggcaccggctggtctttcctcaagccctacctggccgaccgagagaagaaggtgcttatggcggtcatccccctgcaggtcgtagccaacatcgcgcaggtggtgattgacgaatctggaccctatgctcgggactgggtcacctggaagcagattttcttgctggttgatgtgatctgctgctgtgctgtgctcttcccgattgtgtggtccatcaagaacctccgggaggctgctcgctcggatgggaaggccgctgtgaacctcatgaagctcaccctcttccgccagtactatgtggtcgtcatctgctacatttacttcacgcgtgttgtggtgtatgcgctacagaccatcacctcataccggtacctgtggactagcgtcgtggccggggagctcgcgacgctcgcgttctatgtctttactgggtacaagttccggcctgaggtgcataacccatactttgccattgatgatgaggaagaggaggctgcagctgaggcgctaaagttggatgatgaattcgagctatgattgaggggttaggaattggcatatcctccgtgccagtggtgatattggtgttgtatgtcccagcagaggacaagtggcatagactggtacctagtccatatccttttgtttctccttttgagttggttacattttatcttaatgtaattgggtagtgacaacaaccctgtgtctgttaagcaatgcagtttggctttgccttaaattttatacacaaccattgagaaaaatgagcaaattcggttttaaaagtttccctttgtttccacccttaaaagtgttcttatgcccctaaatgtacttctgcctatctgagttcggatttgctcaagttcatctct

SEQ ID NO: 280072 - DNA, 625 bp, Zea mays
ctctgtcgtggctgaacgggtcgtggctggtagtgttcggaggctgcgggcagcaaggtctgctcaacgacgtcttcgtcctcgacctcgacgcccagcagccgacgtggagggaggtcgcgagcgcagggccctccgctgccgcggtcctggcacagctcatgtaccctggacggctcgaagctcgtggtctcaggtggctgcgccgagtctggtgtcctcctcagcgacaccttcctcctcgacctcaccaaggagaagcctgcgtggagggagatccctacgtcctggtcgcccccgtcccgcctcggccacaccacgtccgtctacggcgcgaccaagctgttcatgttcggtgggctggcgaagagcggctcgctccggctgcgctccagcgacgcctacacggtggacgtcagcgaggacagcccgcagtggaggcagttggccacgacgaccgggttcccaaacgtcagtccgccgccgaggctcgaccacgtcgcggtgagcctgccctgtggacggatcatcatattcgggggctccatcgcggggctccactcccccggggcagctgttcctgatcgatcccgcggaggagaagccgatctggaggatcctgaac

SEQ ID NO: 280073 - DNA, 387 bp, Zea mays
  unsure (1)..(387): unsure at all n locations
aaccaaaccttcgcccaagccttcgcccacgcgtccgcccacgcgtccgaattcagatactagcgttgcgttgggttgcgtcgattatatgtttcttctcgggacgcgtgtcgcgtgctcggctcggcagtcgggctccgatttctggacggacccgacggaggcgatccggcgcgcgtaccaccgcacggaccggaagctgctgaagaagacggcgggcgacgacagcggcgaggggatgaagaagggcaggcggcacggcgggtcgacggcggtcacggcgatcctgatcaacggagaggatctcgtggtcgccaacgtgggcgactcccgcgccgtgctgtgcgacgcgggcggcagggccaggcanctgtccgtggaccacga

SEQ ID NO: 280074 - DNA, 460 bp, Zea mays
acacacgcgtccgcggacggtgggcagtcaagaagaaaagcagagatgtttctagtacgtactgatggattttcttgtactagagaaaaagtaacagaatcatctctggcttttacgcatcctagtacccagcaacagatgcttatgtggaaatcacctccaaagactgtcttacttttgaagaaattaggagatgagctcatggaagaagctaaagaggttgcttcatttctgcatcatcaagaaaagatgaatgttcgtgtggaacctgatgttcatgatacatttgctagaattccaggttatggttttgtgcaaaccttctatactcaagataccagtgaccttcatgagcgaattgattttgttacatgcttgggtggtgatggactcattttgcatgcatcaaacttatttagaacttctgtaccacctgttgtctccttcaatctcggatctc

SEQ ID NO: 280075 - DNA, 367 bp, Zea mays
  unsure (1)..(367): unsure at all n locations
aataagaacaattgtcactgggctgtgctacctagcaacttctgtctttggaatcaatgcggtgggattagttttgtattccctccaactcactttacaatcaatcatggacgatgactccagctcttccacagggaagattagtgaacaatctaatacactggcatcatctgatagctccacaagtagcagggaatcagacagtagtgacatgcaagtcactgacaaaagtaaaaactcagcagagaagcagagctagacatgtaatccagacagccaaaatctgagatctgagggtacatatctgatgaaatcccctcaagcattccttctcattattaaaaaaaaaaaaaaaaaaaaaaanaaa

SEQ ID NO: 280076 - DNA, 525 bp, Zea mays
acatagatgaagacagtgttgaatcagtagcttgaacagaaaactggtttagagagagttactattagagataaacagaggtcaccacgtgcaaagttatgccgggtgaaatttcttcatgagtgtcgactgctgcatgagcgtctagtggaatgtactgcgaaatttctagcacaagaacacagcaattttactagtgttccttcgtccttgcctgatgcattagatcttctagcaacatcagacaatagagtacgcttactcattgctgaggcacaacttttagcacgagatgatgaacaaggctcttctgatgatggcgacaattctgatagtagatcgtcattgactatgagctgggaagatgcaaaagttacagatgaagatgcaacgaaaatactttctgatctacttattgacaacgcgcactgaggctgcgtcttaatgctgtcatccgcaacgctgtaaatactgtcgtgaagccaaagaaagaagtaatggcgaggttcttcccaaaaagacagt

SEQ ID NO: 280077 - DNA, 385 bp, Zea mays
aagcatctggtaggcttctagagtatgaggttgggggtccccgtgtttgcgtgcagactgcatacggagtagaagttgaggtggaaaataacccatatgatcctagcttaatggttttcatggactacagagattgtttcaaagaggaattctcacacattgaacaagaaaatcccactttcctgtatgctatgcccatgtcatccacacgagttttctttgaggaaacatgcttagcttctaaagatgctatgtcttttgatctacttaagaagaggctgatgtatcggttgaacgcgatgggaattcgtatcctgaaagtttatgaggaggaatggtcctacattcctgttggagggtccttaccacacacagatcagaaaaa

SEQ ID NO: 280078 - DNA, 422 bp, Zea mays
tattttattccacattccacaacataacaaatatatcaacaactatatagcacaacatattttcacataaaatatctcacacacaatcacataacaatatttaaatccatagtctcatcaattacatcacaaaagtctcatccatagtcataatcagtggcggatctacaccccaggccacccgatctgtggcccagggcttgatccatgtaactctatataagtctctatctaatatggtacaaaatagttaagataaaataaagagaagaaaatttggtagatttggctggggtcatagaaaaattctggatccacctctggtcataatatgacacatctcttgtaatttagtgcatgtttatttacgaacattcttccttgagggagttgagtagcttgacaaagatgggcacagtacc

SEQ ID NO: 280079 - DNA, 804 bp, Zea mays
acccaagcgtccgcccacgcgtccgcggacgcgtgggcggacgcgtgggtgagggcccccaatttgacgaagcattcgctgagaccggtgtgagcacgagtccaccagcaagggaaacatctgaaattgaagaagtcggagactgggacaacgagttgtatgaaagggttcaaagtcatctgggggcatcaacatcaagtgctttgttctggaacactccagggaaggaccatggtacagaagaaaacactaacagcaattggtgggcacatgcccctgcatatccttctggtccccagggtagcttcatcgagcctccagattttggaaatcgatacatgacaaatcctcattccagtaatcacagtggcggtacatcggagggaagcacgtcggatctagagcagagcaatagcagaagcagaagttcctggaggagccctcaagcgttgtccaagacaagatatatggacgactctgatattgaggaagggctaagcctgcactttgctgatgtccatcagaaggatgaagacgatagacacctggtcagggatcatcaagatcccgcaccatctggtcttccagtaagaataatacctagaagcagtgaccctgtgtaagctggttaaactccacaggattatcacataaaaaaaactccacaggattagttgatgcatgttaacggttgtattttgttgtttgaatcacatcaaaatcaaatgctgcgtctcgcccatgaactggcaaaatagccacagattcttttgtacaggccagtaatgatagaaacattctttt

SEQ ID NO: 280080 - DNA, 303 bp, Zea mays
atgataccttccaacaactccatagcgatattcatggccacgctgaggccaccctgcctcctgtttataacttgagccccttgggattgcttgacacagaccaaagaatgcatccatatatcctggactggtattacacatgtcatccaccacactcggatagagctgagggcccccaatttgaccaagcattccctgagaccggtgtgagcacgagtccaccagcaagggaaacatctgaaattgaagaagtcggagactgggacaacgagttgtatgaaagggttcaaagtcatctggggg

SEQ ID NO: 280081 - DNA, 390 bp, Zea mays
agcccacacatccgggtttatggcatgataagtgacagcgtgaagaaagaactaaaccctttgcttgaattgtgtatacaggatccacaaacttctcagtcaagtattgcaaaaggtaatcttaatggcatgggtcaacagaaccaactcacacattggctgggcatagtgaaaatcctcactagctacttggatgtactaagggaaaatcacgttccctcaattctggtgcattaacttttcactcaaatgttctcacttattgatgttcaattatttaaccgattacttttgcggcgtgagtgctgttcttttagtaacggggaatatatcagagctggactagctgaactaaaacattggtccgacaatgctacaagagagtttgca

SEQ ID NO: 280082 - DNA, 486 bp, Zea mays
cgaagtctatctactctgttataagatgtcacaagatgtgcgcgcaccgcgttgtgccgcagaacggaccaccaggttggcgttgctggaagagaaggagctgtcggcggtgcttaaaacctgtgctctacctactggcgtagccaggaagatagtacagcctgccgctgccaagtacagttatgcattccaagtccccagagaagcaatcacttctgggatcgaggagaaacccagcaaataatgggagtacggaggatgaaaagggagacggcgggatcccatggctgacatttctggggttcgtgttcctgaccttcaactcgggcatggcgatctaccgctcggaccgcgaccccgggtcaatagcgttcgtgtcgggctcgtacgtcgacctgctgctgctcttcctctgccttcgcctgttcgagcggacgccgcctgactcgccgcgccgggggtggatcaaggcctgcgtctgggggc

SEQ ID NO: 280083 - DNA, 530 bp, Zea mays
acggtctcccggcgtcctaattccaggaactttcgtcgcgtcaggtgatgcttttagcaactacaagcatagaacaatgttgatgcactatgatgtggatagaagtgaggaccggcaacgtgaggaggttcagtcagcatacacacgggacactgacattggtgaggaaatgatcataagtagcgaagagcagaatgatgaaaatgaatggagctgggtgaaccaagatagagatggtggtcctcttgctgaatcggtttcttcacttcatatgacacaccaagtccttgaaaatgagataccaaaattatcagaacttggcaaagaacttgaggcggaggaatccacttctggtaacaaagaccaagatgtgatcgttttgccgtatgctgaggccgatgtgttgctcctgagtgagaagatggagcatcttgaacagaaagtgaaagaagtgtcaaacaccatcagggagaaagacttaatgctttcgaagcttcaaatactgatcggtactgcagatagggcaacgg

SEQ ID NO: 280084 - DNA, 641 bp, Zea mays
cggacgcgtaggggagaaagataggagtcaattaatttgcctgttctgcttgctgctgaccttgtgagtgagccgccggtcttccccttcctcgccgaggggaaataataaggcagccacagccagggccgccccgaggaagaagatgagcggaggaggcgtggacggagctccggtcgccgagttccggcagacggtgacgcacggcggccggttcctgcagtacaacatcttcggcaacctgttcgagatcacgcacaagtaccagccccccatcatgcccatcggccgcggcgcctacgggatcgtctgctcggtgatgaactccgagacgaaggagatggtggccatcaagaagatcgccaacgccttcgacaaccacatggacgccaagcgcacgctccgggagatcaagctgctgcggcacctcgaccacgagaacatcatcggcatcagggacgtgatcccgccgcccgtcccgcgggcgttcaacgacgtgtacatcggcacggagctcatggacacggacctccaccacatcatccgctccggccaggagctctcggaggagcactcccagtacttcctgtaccagatcctgcgcgggctcaagtacatccactccgccggcgtgatccacc

SEQ ID NO: 280085 - DNA, 517 bp, Zea mays
  unsure (1)..(517): unsure at all n locations
tttccttaattgtacactctcctgatgatgctgcactgattttcatggttgcagttggcccaacaatggttgttatagcttcaatgttcattgtaagacctgttggaggccacagacaagtgcgaccttctgatggcacaagtttcacatttgtatacagtgtctgcttgctgttagcctcttatcttatgggcgtcatgttattggaagaccttgtcgacttaagccagtcagtgactgtcgtgttgaccgtgattctaatcatgtttctattagttccaatagtcattccagttctactcagcttcttttcggatgatgacgagactttgtatgcactattgttgccatcacctcggaaagaagaagcaagtgcatcaacatcttctgaggagcaacatgaggttatactcagcgaggtggaggatgaaaaaccaaaggatgttgatttacttccagcctcagagaggcaaagaaggatagcagaattgcagacaaggttatttcangcagcagc

SEQ ID NO: 280086 - DNA, 479 bp, Zea mays
ggaccgaacaaatacgatatcggttatactagtataaactgggtctgacacaatttaaaataagatacattcatctactgctcgaacacctgatcgcactgccatagacaatttattagagaatcaaatcttcatcatttttcgtggacttgaattctctagttagccacatgttaaccgtgacagtattcgacatccacacccgtctcgcgtgctatgaacttaccgtgaccacttgttggtcaggtgacggcttctgagcgcgacgagaaggatgttattcggcgagtgcagcttggacgaagaacagacagaacggtccgcgcgaagatgtttgacggcggggtgcttcggcgtcgaaggactgttctgatgactcaactgaccatggaggcactatcaccgcggagccgggaacggcagaggaaaatacaatttttctaggaaatttctagggtgcatggcgagtctctcacgta

SEQ ID NO: 280087 - DNA, 475 bp, Zea mays
  unsure (1)..(475): unsure at all n locations
acgggtgctctcccggcagcaccacgacgacgaggtccctgagggatcctcgtcggcgtcgagggacaacagccatagcggcggtcgtcggggcagcggttcgcgccgcgattcgatggcctgcgctccatcgagacgctcgtcacggcgcaccgctgaagcgacggacccgcgatccgcctggctgcctatgctccggtggtaatctccccgccgccatgattcggcgattcgttgttgctggtggcgcttaggccaccgagttttgttagaacaacaatttcaggcttccccttttcatttggtgctgtgctgttcgtcctcttgttgatgtccgtggtccgtggccattcattctccttttttagcttgtttgtgtttgtgcgagagggaaggattaagattatacccggcatgtcgatttgagcaaacgctactctatttctttatttataatgtccancatttcttcgtc

SEQ ID NO: 280088 - DNA, 938 bp, Zea mays
tcgctgtcaattcgtcttgatataagtttcaaatcgccatcccatacaggactgcagactactgagttggtacgtgagttgagccagcaatttcctgcagttatacctcttgccttgattctcaagaagtttttggctgaccggagtttggaccacccctattcaggtggtctgagctcttactgtttggtgctgttaattgttcgttttctccagcatgagcatcatcttggtcgacctattaataaaaatctgggcagccttttgatggatttcttgtacttctttgggaacatatttgatccacgccatatgcgcatttctatccaaggaagtggaatttatttgaatcgagaaagagggcaaagcattgacccgattcacatagatgatccacattgccctgctaacaatgtgggcaggaattggttccgcattcaccaatgtattaaggcatttgctgatgcgtttgctgttcttgagaatgagctactgcagttcagttcagaatgtagcatgcctgtatcttcattcaatatactaaagaaaataatcccaagtattgattctgatgagctgtagctataaaaaagaggtacgattccacagaatacaattgatgacagggtggaatgacctgtgctgccttctagacacactgatgtctatgcagctgctcagaagcctcagtgtggcaagtttgatacctctggaatagaccaaaaaatagaccggcaagatggcaatattcaaacgtgagctcttgtgtgttcatgcaatggcacatgatgccttgctccctgatcgagcttcttgatgttcagatctctgactgaggtaaattggcttactcaagaacaaggtggtgaattggctttctcatgaacaaggcgttgctgcacacagactactgacgtggctgttcttgcacctttctg

SEQ ID NO: 280089 - DNA, 710 bp, Zea mays
ctggtgcatccaaatggcaccacccaacatagagaatcaatttgtactgtagcatgcctccactcgaagccgccataccagtctgcctctaaatcatttcactatcgcagattaccactgtatcgagttcatgatttgggagaagggatagaaggaaaaggaaaaccaaataggggaggaagagatgctcaggcatccatcttttggtgtcacagacctagttaattatgttcttggtagcactgatcttctagtaagatggtcttgatttgttttgctgggaaattggatgtcatggcctttggctgccgacgattccgccggggcgtgacctgggcaccggctccgcacagtcaccgaaatggtgaacgcacgtgaagtggtataaaaatggtgaatttttaagcccagatgatgaaaaggttgtaagagaaaagcttctttctcatcatcctcgtgcagaagaaaagattggctgtgggctcgatggtataatggctgacaggcaccctgagttcaagtcaagatgtctctttgtcgttagaacaaatggcgattgggaggatttctcataccacaagtgtctccgggcataccttcaaaagaagtatccatcctattcagacaagtttctgaagaagcatcttgttaacaagagctccaatcttttccgtgttcagaagaaggccatggtggatcctttgcctgct

SEQ ID NO: 280090 - DNA, 402 bp, Zea mays
accgccggccgcgccacaccaaagccaccatggccttttctgccgccctcgcctgggccgccacgcaactcctccgcgggagcctccctcctgcccgcttcgccgctgccgtctcgcctctcacatacagcagcagccgccaactctgcagtacccccatcgccaacgattcctccgccgcaggaccgtgggacgaggccgagacggagatcctccgcgacgtcgagcccatcgtgaatatcgtcaaggacatcatccactcccgcaggtataaaaatggtgaatttttaagcccagatgatgaaaaggttgtaagagaaaagcttctttctcatcatcctcgtgcagaagaaaagattggttgtgggcttgatggtataatggttgacaggcaccctgagt

SEQ ID NO: 280091 - DNA, 416 bp, Zea mays
acctaccacgcgtccgcggacgcgtgggtcgcccacgcgtccgcccacgcgtccgggcttatccagttttgttcttctactcgatgcacttgctaaagtgtttactttaattcagaggcgacatatcgagcaagtaaaggtggcactgcccgttgtacttaaagttatgcatgctactgtatcagaatgtgttgaggaacatggaagtgctgctgttgatcttttcaatgcagcacatggtgttggcaaggccattcaagaaatgtgcatatcaatgttcaacaaaaacaaagatctctgtgcaattcttggtttatactcccttcagaatatagctcttgtatcacgaagcagacagcaggatattctctctgcttgtggttcagttggttttcagagtttcagatttcctaaaa

SEQ ID NO: 280092 - DNA, 358 bp, Zea mays
acgcggacgagtgggcggacgcgtgggagcatcgctggctcatctccacgctgtgctcggtgctcaagcgcttgttccttagctctggccacaccagtctcatctccctactactcgtcgttcgacccatgcattccagtcgttacctggccgtgcgggtgcagtgcaggggcggccatgggtgcccagccgaccactaccgccttgcactcgtgctggttctccgcgtccttgctgtggagcctcagttgccgtgcctctctgctcgcccatggcgctccggccaacctcgccgaccctgtgcgtgcctcaacgccgtcgcacgccctgcttcctggtcaacgattttccctgggcg

SEQ ID NO: 280093 - DNA, 442 bp, Zea mays
acgcctgactggcaagtgagataacagaaggagcggcggctacagctttcggttgggggcatacaccgtcaatggatcagcatgtcctccatttagatcgacacagaataagctgctgcaaactagagccattatgtgacaccatgtcacgttgtttgatgaattccttctatctgcccctgccaagggagagaagagaatagacatattattgtgtgtagattaaatgtgcatgaaatccatggaaatggtgaaggatgaaccacgtgcccataaccgtgatgtaggctggcggtgccgtttcttgttcttgatcaccttgacagcaacggggaattctgtgtttcttttgaggacacgtgatgtgccccatcagtatgaatgtaaccaaagaataagggcctatttagtttatagcttattatgtcatattttgtctaaa

SEQ ID NO: 280094 - DNA, 329 bp, Zea mays
acggaagtttgagtcaggtgtacaccgtgttcagcgtgttcccttgacagaggctatgggtcgtgttcatacgtcaacagcaactgtagctattatgccagaggctgatgaagttgatgtggttattgatccgaaagatattgagcttaaaacagcaagatctggtggagctggagggcagaatgttaacaaggtggagacggctgttgatcttattcacaagccgacaggaatacggatattctgtacggaagagagatcacagctacagaacagagagcgggcatttcaattgttgagaacaacactttacgagataaaattaaggg

SEQ ID NO: 280095 - DNA, 792 bp, Zea mays
acgcacctgtggcgcatactctcgtgtcccaaaaccaaacacggcggtgctggtgcgcgcgcagctagcagttgagtgctcgcccttgtcgtcagtcgagtcgagcgatggagaagacgacggtcgtgctgtacccgggcgcgggcgtcggccatctcgcgccgatgctcgagctagccaaggcgttgctccgccacgcaggtgaccaggtggacgtcgccatcgtggtcgtcgagccgcccgtctacgcggacggcttcgccgccacggtcgcgcgcgccaaggcctccaacgcctccgtcgcctgccacgtgctacccccgccggcctccgacggcggcgccgagcctgacgacgaccccttgacccgactgctccgctttctccgcgccacgaacgcgccgctccgggacttcctccgcgcgctgtcggcgtcgcgccgcgtccaggcgatcgtcctcgacatgttctgcgccggcgcgctcgacgtcgcggccgacctcggcctgcccgcctacttccacttcgcctcgggcgccggcggcctcgcctacttcctcggcctgcccgccatgcgggccagcgtgggcacgagcttcgccgagctcggcgagtcgaccgtcctgtcgttcccaggcgcccctccgctcacggtcgcggacctgccacagggggtgctcaacgacagcgaggcgtgccgggtcatcatgggcgcggctgcccggatgcccgacgcccgcgggatcctcaataactcgttcgagtcgcttgagccgcgcgcgatgcgggcgc

SEQ ID NO: 280096 - DNA, 500 bp, Zea mays
ttagatggctcatttggacaactgggcactggtgataacctctcaaggaactttccttttgaagtggcatactttaatgcaacacatattgagaagcttgcttttggtatgcgccattctcttgtactactgaaagacaattcagtgtatggatttggctcagcaagacgaggacaagttggtaaatgtgcttctaggatccaaaaatcatataatgttcctagactgattgatggttttccaaattgtaagatagtaaatatatatgccaatggcgatcacagtgctgcattggacgaatctggtcatctgtatgtctggggaagagcatttattggacaacatgatgatgatcaaccttcggaaatttttccctcattgagtgtttctcaagtggcactaggatggcaccatgctttagttttatctgctggagaattgtacacacttggtgtctaccgccaccagaaatgtgatctccctgggttaggaaatgtatt

SEQ ID NO: 280097 - DNA, 418 bp, Zea mays
acgcccacgcgtccgcatgagccacgatttccctgcggtcccgtcgttgcggttgttgggggtcaaccgtatcctcgggcatccggttgcatgcctcagttgccgccttggagctcgttgtggccgttgcggccaaccccgcaagcccgtccttcctccgctataagcctctaatcgcttgtgaccgtgcccctaccttcctttgatccggtccccgagagctccgcgtccatggactcgccaccgctaaacagagagtactgagggaacgcgccgccgacgaaggcgtggccggccacatcgagcgggaccttggtgactgggagggtggccgagatgggtgctggtgaagggactcgcgcacgcggggcgccgtgggagtagtggagattgctcgccggaggtgtgaaactacgcc

SEQ ID NO: 280098 - DNA, 736 bp, Zea mays
cccacgcgtccgcccacgcgtccgcccacgcgtgcggtggatgacactgacaccgcctggggctcggactacgccaacggcaaagccggctccggatttttcggcatcaccccactggatggcacgctgttccttactagaagcgcggacttgagaactctgctcggattgaccccagaccccgattcccagaccaggagtggcttttgcaactcaatttcagcgctcattcatgaccctactacgcaatgctcaagctggaagaactctccgcaacaagatctgctcttgacatatgccctaaataacgattacctgctcacgctgcccatttatgtcgactggaagaaggctgctcaatctaatgcaataatattcaggcgtggatacgcgactgagaggcagaaaggcctcctgttggttgagaaacttgattacttgcaatcaaaactcttgcagaatgtctttttcagcctctccaaacccttgaaaaagccagggatatggcttaatgaggctttgaaaagatcaacagataaccagggatttcagatctggatagacaaactgagactatggcttaaagagcaaacttatgcagataattcactgctgttgatagaaagctcttcatgggacaagcttagttctgatcagttacctgatgcagatgttcctatttggatcgctgcacaaagggcagtctctcgttatgaaggaattttgtcacctgttg

SEQ ID NO: 280099 - DNA, 195 bp, Zea mays
acccaagcgtccgcccacgcgtccgtgtagcagcagtcgtcgtttcgatacctgcttgtaggcgcaagcgtgatcacgtcctatgtgctgctgcttgtaattggcgtattgaggagacgaactgtgcgtgccgcttgttatattgttgccacggaaagagaagcagatatatgagcactgcctatcgttgcagat

SEQ ID NO: 280100 - DNA, 447 bp, Zea mays
cgcgtccagaaaatgttgaacctgctgagatcgaggaagcagccagcaggagtaccttgattaatcagatacttgtgatcggccaggatcaacggcgtcttggtgccataattgttcccaacaatgatgaacttctggcagaagcaaaaaggaagtccatccttggtgaggatggcgagctagcgaaagataaggtcatgaacatgctatatgatgaattgagaacctggaccgcgcactgctccttccgtgtcgggccaattttggttgtcgacgaaccgttcacgattgacaatggtctgatgacacccaccatgaaaataagaagggacacagtgacagacaagtacaggagggagatcgaagccttgttcaagtcacacgcggagcgcgtgcgcacccatcagagttcccttttccgagtacaagacggcaaccatacggcgt

SEQ ID NO: 280101 - DNA, 296 bp, Zea mays
gttctatgcgtaaccaggtgaagccacggacggcataactatttgtacactcggtttgcataagaaccgactgcacatctgcatttgcaccgtcggttgcaagttgtgatagactcggcgggaagttttatgtaatatagaataaagtataggtgaagtacatgtttttagtataaatttttatcctgtaattttatagttattgaattttatgactaagagttggtaatcgtgctagtagtgttttatcttggatcactgcatatgtccccttgatgcagtttttggttgtaatc

SEQ ID NO: 280102 - DNA, 548 bp, Zea mays
acggaagcgtgggctacgggatcgaaggggttgtaccttcagaactactgccacctgaagtaaatgccaagttttcttctaaacccgcagagaaggttaagcggacgagaaaggaagattcaaaaagcgtgtcagctcatcagcccagagagcatcaggttgctgcgacacccgaaaccgacggcggtgtcgacccggaagaaggcgaaggcgcggcgccaatggattccgacaacggcgcggtgggggatagccagaaacggagcccgggggaggtctctggccctgaaagcgggcagtgcgagcctgaggcggatggcgatgataacgtgaggacggaaactaccagtagggatgctcgtgccggagagatgaaatgaaacagtggcatgaagaggaaccagattttgtcgactcactcactgacattgaaagccgatcgagcgcgttttgaacagctgagatacattctcttgttggtgtgtactgtgtagtagacatcagtagccatccatttgaaggaaatgcttgccgtgacgtgctgctgc

SEQ ID NO: 280103 - DNA, 422 bp, Zea mays
acccacgagtccacggacgcgtgggcggacgcgtgggcggacgcgtgggtgagcttgcccgcttgcagctgaaggcccctctgcaccgccattccccaggctgcgagtccgtccatggggaaggtgtgcctgctcaccgtcgacgagagcatcctcgtggcgttggccctcgtcgccgtcgccgccttgatgctcgtcgccctcttgctgcccccgccgcgccgccgcggcttcttctgagagcacggccacgggccatggccgggcgtgccgttggtccggttcggagtcgtggtgagtgatcggttcagagtcgctgtgacccgccactagtgccatgcctcgtcgatctggaactgcctgcgtgtttggacgccgggtagcatctgttgctctgtaaaccatcatgcatatgacagttc

SEQ ID NO: 280104 - DNA, 607 bp, Zea mays
  unsure (1)..(607): unsure at all n locations
ctccctcgtcttcttccccacgaccgcgcgcgcccctggtccaagctccctgcttccttgctgcgctcccccggcagcgctccatctctccctcacggtgctccggctcggcctccatctccagctcgcttctcccccgttcctccatggccgcgcgcctggcatccgctcgccatggagctcccgcgcgcgccccattttccatggcgctcggccgcgcagagtcttcatcggacatggcgcctcatcgtcgctgctcccagccctatgtacgacgcctcccctccagcttcagcacggcgcacctcctcatggccgcacctctccctgctcggcatcaacgtcgaccgtgccttgccaacggggctcacccatgttggccatgcctcccaactccgttcttggatcggctgagctcctaggcaccacctcgctgccgctctagatgttgtgcttggccctccgtgatgttcacccagtgagcagcaacagctccgcgaactagtcctccacatgtcgttagggtctgctacaccttccctgtcgccgtggagaccgtgtctccctgctccacagtgcccttcancatctgtcatcgcaacaacag

SEQ ID NO: 280105 - DNA, 549 bp, Zea mays
gcacatgaatcaaatcttactgttcgtctcaattgtcgccatgcggaaagcacatgaatcaaatcttaccgtgtctgccgatatcttatacatcaagtaaaatgtatataaactcctttgtgatgtagggaattcgtgtgtacaactatttataaaccgatggctccgcctcctcttctgtttactataaagctccctttgggtatctatgcttcgtgttgatgaccaaatgttattgtgaaacagccctatctatgtactagtagaacaaaccatcttgtacgaatggaattaagcaaagaaaggaggggaaaaaatgattcaaggaaataactttggtcagctagatgctatgagccagtgagggccggtggatcaggccaccatctgctccagctccggccactgcgcaaatatgtcgccggcgtggccgtccttgacaagagagctgacccacgacacgtccggctcggcggggggcggtggggatcgcgcgcggaacgcgaacgatgcggacttgcggaacttgtgcagctcgtcaccctggac

SEQ ID NO: 280106 - DNA, 524 bp, Zea mays
  unsure (1)..(524): unsure at all n locations
acgcgtccacaccaacgttgatgatgctcttctcagtggaggtcagaaacaacgtgttgctattgccagggcccttctgagggacccatctatcttactgcttgatgaagccactagtgcgcttgatgctgagagtgaacattatgtcaagagcgtcatcacaaaagttagtcgagattcaaaggctaaaagaactgtggtaatcatagcacacaggctatctacaattcaaacagctgatagaattattgtgatggaaaatggtaatattgtggaggatggtaaacacattgatcttattgagaagggtggtctatattcaagattagccaggcgacaaaatgacgatctcaagtagccctggatcacagaatgtggtttagtgcacgccttctttttaaatggaatggcagaagggagagtcgtctgtcattagtgtattctttgcaagaactgacctggacccaggagctcgaataagctggcattgtttttcccanaaaaaaaaaaaaaagggcggccgc

SEQ ID NO: 280107 - DNA, 471 bp, Zea mays
ggcagccatgccgcgcggacgggggcccgaaccctagtggcggacgagggtgctagataggggggacacgtgacccggcaaccatgggcacgggcaggaggaagggcaagcgcagcgccgccgtggcttccgtcgacgacgctaacgaggccatggcttcggcggaggcgctctgtgtggagcatcaggacccaccgctggcttcagcggagggaaccgatgaggccaaggcggccaacggggaggcgacggcggtggtggagccggacgagccgaggcgggactcgtcgccggagcggggcgacggggatgccgcgcggctgaagctcctcaacggcattctcatccgcacggcctccgaggagcgggagcgggtggcggcgcttgaggcgcggctcgctgaactctccgccgacgccgccgtgctcgcggacggggagagcgcggtactgctcgcggccttctctgccc

SEQ ID NO: 280108 - DNA, 546 bp, Zea mays
acccacgagtccacccacgcgtccgcccacgcgtccgggtgttcgccggcgacgtgcagagcagggaggcagggtgcggcgcggcgtccaccagtggtcgggcggcggccaccaccaacggcgtcctgtcgctgctctaccgccagggcatggagatcgacgcgctggtgcggctcgagaccgagaggatgcgtgcggggctgcaggaggctcggcggaggcacgcgcgcgcggtggcggcggccgtgcagcgcgccgcggcggggcggctgcggctggcggaggccgagctggggcgcgcccgccgccgcaacgccgagctggaggagaggctccggcagctggccgccgaggggcaggcgtggctgggcgtcgcccggagccaccacgccgtcgccgaggggctccgtgccacgctggaccagctgctgcagcagcagcagaccggagccggcattcttttgcagctagtcggagttcgatcggatgtgtaccaaacatgtcttgcagatgtggctctttggcaagctataatacggccagtac

SEQ ID NO: 280109 - DNA, 435 bp, Zea mays
acccacgagtccacttctagattgtccaagtcgcgtggattctctccattgtaattatggggatcaatatttatttcttctgcaatagcttcataagttggcttgtgcacagtgaactcccaaggatagtcaatgttataattagcacccttgtcttccctttcatggcggcatatattgcacctttaatctacttggctttcagagaagttaatgctgctggcatattcccttccgtgtcagcttccactgggactgaagtagaagcatggaggcaagatgcccccattgatgatattggtgtacattgatatgtttgaagcacagtatataaatacactctttctttagaaaaatattttgttcatacaccacacattagggaagacgtcaaaccattattgaaagatgtatatagttatacatatagtttta

SEQ ID NO: 280110 - DNA, 609 bp, Zea mays
agtgcagccggtgagctagatgacgcgcgtcccctaaaagcaggatctggcataaggctacgtgctggggtacagttacagctcaggcttaccatttctttaaccaattcgcttcttgttctttaaaagttcagagttcaagagttcagtttagagagagagagggggagagtgatttgccgacttgccagttgccgcacaaagctcctctagcacctctgtgtggccgacttgtccccggtatcaccaagtctgcaggcctccccagtcgtcgccggcgagggaacgcgccgcccgtgacgccgcgggttgttggcgccggcgttgaggccacaagcgcgccagcatcaggacctcacaggtgattcaatcctgaaggcatcaactatgttcaattttcaagaaatgtcttgctgttttacgtgtgcgacgggcatggaacgaaataatgaaaacgaaggaggaagcaaggtgaggattttttcctacagtgagatgaggaaagctacgcatgattttagtggagcaaacaagattggcgagggcggtttcggctccgttttcagggggaagcttaaagatggaacgatcgtcgcggtgaaagtcctt

SEQ ID NO: 280111 - DNA, 485 bp, Zea mays
ggagcaatggacgggctcaactacagcaagttgcgctcctcgctccggcctcggctccaagcgttctccggcgtcctcttctccatttgcgctccctagacgggctcctgcacatggcgtctgtcgccgtcttgcagtttgtccacgatccgcacgatgatccaccagtgctaggctgcgtacacttgactctagctcgcgtatatgccttggatcgagctcgctctctttctctcgtcaaggaccacttcacaaccttgggaaaagacctcaccgtcattgggtactgctgcgatgatgctgaaccccgtcgtcgacaactccagttctacgtcgccgagtccatgtttcgggtagcagaggttgacgcctttggtcataggtggactgtccggctgagttagccggaccgtttgtctgagcaccggattgtccgcacgtaagtgccggaccatctacgatgctggggctaggctgatgtgttt

SEQ ID NO: 280112 - DNA, 555 bp, Zea mays
caagtgtgttgctcgattcgatcaccattgtggatggatgaataattgcattggggagaaaaatattcggtattttgtggcctttttagtttggcatttccttatatgtctgtacggggctttaatccttggcttcattcttgctggtgaaataaaagagcggaaaattatatacattctgacagtttattatggcatcgataattcattctcgggcttgtttccacatgttgcacagtggttgcttgctgtgcataacactcagatactcttgagtgtatttttggctatattagcactgctccttggtggcttttgtgcttaccatgcacatctttgtttgacaaatacaacaaccaacgagacattcaaatggcaagactacatcatgtggatgaaaaaggaaaatgaagcaaaggcggacgctgccacgctcagatccagcataggctcggccaatagtgatgcacagatagctcctccaagcaaatggaggacggtcttcatgagatcccgcacaccaagcatggaaccagttgtgagaaacaacatata

SEQ ID NO: 280113 - DNA, 674 bp, Zea mays
cattatcctcagctacaacgagaagaatggaaatggcaggaaccctttagccataatctcggcaccaacaagagaacttgctcggcaggttgagaaggagtttagagaatctgctcccttggacaccctctgtgtatatggaggtgttcctatcaatcagcaaatgagagctcttaactatggtgttgacatagtggtcggaactccaggtcgagttattgaccttctgagaaggggtgttttaaacctttcacagatccagtttgtggtcctagatgaagctgatcaaatgctggctgtgggtttcgatgaagatgttgaggtgatcatggagcaattgccacagaaccgtcaaagcatgctgttctctgcaacaatgcctagttggataagaaaaatttcgaacaagtacttaaaggatccagttataatagaccttgttggtgactcagatcagaaattacctgaaggaatctctctctattccattgcctctgataacttcgggaagccttcaattattggtcctttgattaaagagcatgccaatggtggaaaatgcattgtgtttactcaaactaaacgggaagcagatagattggcatatgtcatgggaaggagttatcagtgtcaggcactgcatggggatatttcacagaatcaaagagagagga

SEQ ID NO: 280114 - DNA, 1131 bp, Zea mays
ggggcagaaactcaggtggccagcttggccttggtaaaggggcaggtaaagtagtttctaccccaacaaaggttgattgtttgactgacctcagagtaaaaacggttgctctgggatcagagcattcaattgctgttacagaggaaggtgaagtcttgagttggggagctgctggttctggtaggctcggacatggccgtcaatctagcatcctgggattttctctgacctcaactgaatatactccaagattgatcaaaaactttgatggtatcaagattaaaaagatagctgcaggaatgttgcactcagcttgcattgatgaaaaagggatttggaagaccgaacgaagaattcagaccaaatattgttgaagagataccattttcagaagaagttgcttgtggaggttaccatacttgtgttgtaacagatagcggtgatctgtattcttggggttcaaatgaaaatggctgccttggtctgggaggtacggatatggtccgctctccggaaattttgaaaagttctctatttaaacttcctgtatctaaggtatcttgtggttggaagcacacagctgtagtttcaggtgatgacatctacacatggggttggggaggcgccaatgggacttttttcgaagagggccattcttccggtggacagctgggacatggaaacgacgtagactattttgagcctatgatggttccctttggcacgaatgcaagagccgtccatgtatcgtgtggcttcaatcatactggtgcaatttacgagtgctccgaggactttgactgacgtgccacctgcagacagcagatccgcatgtcttggagacttaggttagttatcaaattatactcgctagaagtgcatataaacagcataaataagctctgatgttggacctgcatttatgtgaagagaaatatagaacaagtgataacacccctgagagggggatgtaaattaaacagaataagggatgaactggatgcattttgtgatgcatcagagttacttgccagtgtatagcatttcttcatttaagaaaaggggtgttttaaacctttcacagatccagtttgtggtcctagatgaagctgatcaaatgctgggcggccg

SEQ ID NO: 280115 - DNA, 671 bp, Zea mays
gaggtgattaacctcgccggagaagacgaccgagactacaatctccgtagttgagggccagctaccctaggggctgacgcccttgataggaggagcaagccgggctactgcctagaggtggtgctggtggctgcctcttgggcgtcgtagtcacagggaacgacgcacagggatgtggattccagctcccgtgaggaagctggcagaagatatctgctattgcttgccttctcttgattacaaagtcctaattatataggcctaaggccaaccgaccactctacaatactaagagacttatccaactcaactactccataatattaggagataaactgctaagacttatccaactaaactgattacttatctcctgatctcttgcgcctaccctggttgggcctagtcgccttctggtagaccaggccggttataacagggttggcctgagaattcatttttccaatagctggccataactgttcaatgctggacagttttacacgatgtacagtagttataatgcactaaagtacagccacaccacacatgttgtagcagcaccatcgacaactaacttttactttggatgtttggtcatctgtttgaccattgcaatggtttgatcttcaaactagaaatatttacattgggcatgcaggtccgagttg

SEQ ID NO: 280116 - DNA, 700 bp, Zea mays
cagacgcgtgggatggcccgaacaacctttatccgattatccccccgcattatctctctcggtagttcccccgtccccctcgcgtgcgctctgtggcgacgactgctcggccgccgccgccctacgcgcaggcgcccaggtttccaccttcgccggcgacgagcgcccacaaggaaaacaatggagtggtgggctgctgatggtttgtactacttccggacctgaaaggagctttttacaatggcaccgggaagcagcattgtgactgtagtccccgagtcggactgtggagatgacgatgggctttctgaatcacttgggggtatcatgcttgacgtagactctgcaagtaaaccgtggtctacatcggcatcgctagccaatgttgcattgtcgtcgctgtgtggcttgaatgatttgctcgaatgcccagtgtgtaccaactcgatgcgcccacctatactccagtgcccaaatggccacacgatctgctctagttgcaagcacagggtagagaaccattgcccaacctgtcgccaggaactgggaaacatcaggtgcctagctctcgagaaggtggcagagcaactccagcttccgtgcaagtaccagagcacgggatgcaccgagatccacccatacaagagcaaactgaagcacgaggagctctgcaggttcaggccgtacagctgcccgtacg

SEQ ID NO: 280117 - DNA, 494 bp, Zea mays
gtagtttgccatcaactcatgtatactctgggggattttctgacaagataccgctgggaaagattgaacgttctgttcaggctgtagaagcagctttaaaaaagctggaaaatggaggtagtgtcaatgatgctaaagcagtatgtgaacctgatgttttaaggcagcttgcaaggtggcataccaaactcagagtgtatatatcaccttttattcatggcacaaggtacagttcctttggtcgacattttacgaaggtggagaaacttgttgagattgctgatagacttcactggtatgtggaatctggtgacatgattggagatttctgctggggggcaaatgattttagccggcttatgaaagaaaaactccacaaagttcagaagaagtgccatttcaagaattatgatcttatccaaccacagaatcgcttctgctttgaaaagagggattggatgactgtgcagcccaacgagctgcctcatggatcc

SEQ ID NO: 280118 - DNA, 816 bp, Zea mays
tcttgttttgctgcatgcttacatactgtgctgcttattcactccttggttgaaggtacaatacattttgtggctatccaccagaagtggttaggaaaatgcctaaaaaggaccttgcagaagaggtttggaggctgcaggctgcgttgggcgaacagtctgtaaccaccaagtgtaccaaacaggaatatgaaaggcttcaaaatgagaaggttctttgtagggtttgctacgagggggagatatgcatggtgctacttccctgccggcacagaactttatgcaaatcttgtgctgagaaatgcaagaagtgtccaatctgccgtgtgccaattgaagagcgcatgcctgtatatgatgtttaaacctcactaactcagcttaacaatacaaatttgtgcatgtgggttctgtcatgctgtgcatttagtctcgatcacaactttaagctgattgaggtttgcacttcagaaagggtctgcaatatatgggggaaatacaagtatatcatgtctaaccaaaagcatggatatgtgggtgatgagcattgtcgttttggaccagttatctactgtaagtatgtggtcagtgtatttcccttccctcttgtgattggtagatgagtcagatagtcttgttcgcgtagcagcattttctcagggttatgcagttgttgagaagaaagtggaccaataccagcctgtaaataaaaacaccctgccttgtttgaatctagtccttgtttgagaagaaagtggaacaaaaaaaatgtaaacatctctgttgtattattttgtagtagaaaaatgtctaccg

SEQ ID NO: 280119 - DNA, 798 bp, Zea mays
ggcttcttggttggtggtctattgatgaatggagcaaggaagagcaagcccggatattttatactgaatctactgggtacaataccttttgtggctgtccgccagaggtggttaggaaaatgcctagaaaggaccttgcagaagaggtttggaggctacaggcagctttgggagaacaatctgagatcaccaagtgtaccagacagggatatgaaaggcttcaaaatgagaaggttctttgtagggtttgctacgagggagagatatgcatggtgcttcttccctgccggcacagaactttatgcaaatcttgtgctgagaaatgcaagaagtgtcctatctgccgtgtcccaattgaagaacgcatgcctgtatatgatgtttaaacctcactaactcagcttaacattcaaatttgtacatatgggttctgtcatgctgtgcatttagtctcgatcacaactttaagctgattgaggtgtgcgtttcagaaaaaaagtctacaatatgtgtatatcatgccatgtctaaccaaaagcatggaaaggtggctgatgagcattttgccatttcggtccagttatctactgtaagtatgtggtcagtgtattccccttttgtgattggtagatgagtcagtcttgtttgcgtagcagcattttctcagggttatgcagttgttgagaagaaagtagaacaaaaacagactgtaaataaaaaaatactgccttttttaaatgtaatcctcaagtgtaaacctccctgttgtgccattttgtagtagaaaaatgtctgccg

SEQ ID NO: 280120 - DNA, 642 bp, Zea mays
aatccattgatgttcctatttacataacgagggttgttgggaacaatattttctgcttagatcgtgatgggaagaacaagctggttgcagttgatgcatcggagtacattttcaagcttgcccttctccgaaagcgctatgaccatgttatgagtatgattaagaactcccagttgtgtgggcaagctgtgatttcttatttacaacagaaaggtttcccagaagttgctctacactttagtgaaggatgagaagaccagatttaacttagctcttgagagtggaaacattcaaattgcagttgcttctgcgaaggagattgatgacaaggatcactggtacaagttgggaattgaggccctgaggcagggaaatgttggtatagtggaatatgcttaccaacgaacaaagaattttgagaggcttgcttttctgtatcttattaccggttacttggacaaggtgggcttcatgtgcaaaattgctggacagaacaacaatttgatgggacagttccacaatgcgttgtatcttggggatgccaagaagcgtgttgagatcttggagaatgctgggcagctgcctcttgcttatgttaccgctgccactcatgggctcacagaatttgctgagaggattgct

SEQ ID NO: 280121 - DNA, 499 bp, Zea mays
gcgtccgcgggatccccatccgttccagccccccatttcccagagctgcaaacctaggccggagccgcggtgcaagcatctacgtggattggacttggacgtctggctctggaggtcccaagttcccaacgcttgctggagttgagatctggtgggcttccggaggagacgccgacgggttgcgaggtttgctggctccgcggcgtcgcggaaggtcatggagcaccgcgccttcgactgcagcgggagtgatgatgatctccctccaacatatcaaattagagtaccgtgaatgcatttcagtgggaacagaaggccattagcaggcccattttctcagccaagaccacacaacaagttggatagcgatatacatcagattgagcaacaggcatatactggtgttcttagagcattcaaaatgcaatcggatgccctgacatgggaaaaagaaagtctaattactgaactaagaagagagttgaaagtctttgatgtg

SEQ ID NO: 280122 - DNA, 397 bp, Zea mays
gtcctgtgggtcgcttaattttatattcggggggagtttacagaggatctccgccaagttatcggtcatattttaggacgttatcctcagtccaatgtctatgctaccggttggtctcttggagcgaatattcttgtgcgctaaccttggcgaggaaactgataaatgccctttatctggcgcggtctccttgtgcaatccttttaatttggtaattgcagatgaagatttccacaaaggatttaacaacgtttatgataaagcattggctagggctttgacgactatatttaagaaggatttgaacaaaatttaggcatgctctccttttcgaagggttgagggtgaatatgatatacccaaggcagcgaatgcaagaactgttagagattttgat

SEQ ID NO: 280123 - DNA, 672 bp, Zea mays
tgttttgaactcccgatctggcaatccccacggaggctcccgagcaactttgtactcactccggcgtcgcttcgaatcccagcgcggcggcgtgacgcgtgaatgcgtgatcgacgcgcggcgctgctcctccgggaaaccgcatggacgccgccgaccctctctgcgccatcacctcgcctgcgcggctccttccgcggacccttggccccaccccctcgaaggtccgcggtgcgctcctcgaggccatcgcactcgcccggtcgcggaaagggtctgaggagctggttaagcaggctgcaatggtgctgaaggagcacggggacatccagactctctaccatgatgatgcaatgaaagccatgccccccacaaatgtcagcaaagggcaacagggaagaagggcagcactggatcgcaaacgggctcggttcactatgaaggacactggaagcaaagcggtgcctgttgtggatcgatctaagttattgaatatttcggatccagtcgcattcttcatggccttggatcggcttgaagaagctgaggatgagatcaaacggctaaatggagaggcagaaaatcgcatattgatttttgatcccttagacgaacccattagacagcctggtttgcgtgggagaaaatcattccgcagtttcaaagtaactg

SEQ ID NO: 280124 - DNA, 464 bp, Zea mays
atctgcatgctcgtggacatttgggaagctatactattgacagctttggatcgtgtgaaaactgttgtcggcttgtcgctgaaggtgtccgggagatttggttgagtagccagtagcgaagataccggtgcttatggacaggatatcggtacaatcttccaaatttgttaaacacgattgttgcggagcatcctgttgaccgaagcacattgctccgcataggcatgacaaatccacctttcatactagagcatctgaaggagatatctgccgttttgcgtcacccctgggtttattcgttcctccatgttcctctgcaatctggaagtgatgctgttttaacggcgatgagtggtgaatacactgttggcaagttcagaaaggtagttgatgcttggggtgagcttgtacctggaatgcaaaatgcttcagattttatctgcggtttctgttgttacagtacg

SEQ ID NO: 280125 - DNA, 523 bp, Zea mays
ttgttttttttttttttgttatgcgatttcaacggcgatttttttctggaaaaagaataaaatacaaaaaaaaatcggacgcttacacacgccactgacgaagcaatacatgatacacattgtgagtttgtgacactgatacccacgtacaacgcttatttatttgaccatgcatccatgcatacggacggcatggatggccggcgagcatcgatttctactctgcgtaagcagacggcagcagtctgggtgctgggcggaccattaacggcacggcgcgctgcagggtgagcccgtaggcctcctccatgtccagcttgtccgcggtcatgccgtcggcgaggtcccagtccagggcgtgcaccagcgtggccgtcatgagcgtgaccatccgcagaccccagctgaggcccgcgcagattctccggccggcgccgaacgggatgagctcgaagtcgctccctttgacatcgacctccgcgtgcgagccgcccgggaggaagcgggcgggccggaactcgag

SEQ ID NO: 280126 - DNA, 574 bp, Zea mays
  unsure (1)..(574): unsure at all n locations
ttcttgagttgtctaggactggaggcacttcccactgattattggtgttgttccaactgctcatgtaaattttgccatgaacattctagtgatgatgctgaagacactgctgatgttgattcttcattgcatacttgttcccagtgcgaagagcagtgtactgatccctgtttatacttactctgtagttcttttgaatttcgaaatcttttgacactttttattccattttcattattatcttactatattattttgatgttcaatcatgtctttgagtattttatacgataatgtctgcagatcatggagcctgctctcctgatattgattccatagctactaatctttctagtcagacaggcaatttattctgccaacaaagctgcagactggtaacgcttgtcagattattggttcttttttccttgaccttgtttctggatatgcttccttgtggttntcatgatcattaaatttaaatggtgacactttgctatttttactttcatgtttgaggcagatattgttccctttttaacggctcatgttgggtttgggactaaaaggcttt

SEQ ID NO: 280127 - DNA, 495 bp, Zea mays
tctcgcggacgcgtgggtgcgcctcgttcaggagccgattcggcagataccagacgtgatcggagttgtgattcaggcgaaagttgccttcaccaggataaccaagttccttgacgcgcctgagctgagtggacaggtcaggaagaaaagctgtctgggggatgagtatccgatagtgatgaattgctgcagtttctcgtgggacgagaacccgtcgaaaccagctctaaagaatgtaaatctggtggtcaaaactggacagaaggttgcaatatgcggcgaggtaggatcaggaaagtctacactgctggctgcagttcttggagaggttccgaaaactgaaggcacgatccaagtttgcgggaaaacagcatatgttttctcagaacgcatggatccaaacaggaaccgtgcaggacaacattctctttgggtcttcgatggacaggcaaaggtaccaggaaacacctcagcggtgttctttagtgaaggatc

SEQ ID NO: 280128 - DNA, 721 bp, Zea mays
ttcactacaagtactatggtaaagatgatcgggtataggctttttgctacaaaaagaagaaggcatataaggctcagacttgtcgttcttcacaacttgctaatggtgccagtactggaggttctcaggaaagttgtactgatttagtcactcaagagatgttgatgctccttcgttgccttgttgccttttcactaggtgttgctagttatgtgactctgtctttgactctgctaggttgtgctgttgcttctcagttttctactgagggaccaccttccacatccactataggttcccatgccaatcttgcacatggacatgcctccatgtcactacattgactatcctgagggccctgtgcatccagttagtccaggctatcactctgtatctactgaaaatctccaacatgaacgacggattggcactagcttatttgaggggtaggcatcctatgggaaatctacgacatgctgatacatttgaatacagatgggaagcacctacacctttcaggagatatcgatctgttacaccaccaaatcatgctataagtgcatatgggccaaaagcatcttcacctacggaagcatatctatcagctccaatgaaatcacgttcacaccacagccttataaatggttggcatgcatctccagttagttcaacagattctgatgaaagaatatgctcccttatatctgtgtatggacaacaa

SEQ ID NO: 280129 - DNA, 317 bp, Zea mays
  unsure (1)..(317): unsure at all n locations
aaagaagccagatttccgccgcaagccttggtcaaacattacttcgagtgcaaaagattttgtacaaaaattactagttaaggatccccgtgcaagactaactgctgcacaggcattatcacatgattgggtgagagaacgaggaaaggcatctgaaatacccttggatatatcagtattacataatatgcgtcagttngtgaaataccagtcgttcaagcaatttgctntaagggcattagcatctacattaaactcagaagagatgtctgatcttcgtgatcaattcaatgccattgatgttgacaaaaatggaa

SEQ ID NO: 280130 - DNA, 288 bp, Zea mays
gagaaacttcagaatcttgttaatgatgctctagacagaggtgccgaaattgccgtcagagggagctttggcaatcttggtgaagatgcagttgatcaatttttcccaccaactgtcctggtgaatgttgatcacacaatgaaaattatgcaagaagagacatttggacctattataccaatcatgaaattcagttctgatgaagaggctatcaaacttgcaaacgactcaaaatatggtcttggctgtgctgttttttctggcaaccagaagcgtgccatcagaata

SEQ ID NO: 280131 - DNA, 331 bp, Zea mays
tggttgctcatggtcggaggccaaagtctaaaagtagccccctgggtgctccaggaagacttggtggacagtattcatctgtttcttcggtgtcattgcttgatagtaggagagttggacctattacatcaaattcccatttttcagcaggagtactaatgccaggacatgtttgtggaggaaaaaatacaaatggggcctattcaggtagaccaattggtgacgaaatcaacattggagaaggagtcagaatttgtccactgaatggtgggtctcatcctattcgaactcccagagttcgcaagcgattagattctgcagtcgaatcatc

SEQ ID NO: 280132 - DNA, 526 bp, Zea mays
tcgcccacgcgtccgtagttcttccatccagaggactaatcttaggtaaaatatgacacaattagcggtgaaccaaacatgcagcagtgtccttttttatgaggacaatgtaggagcggtcgattccgcccatgtcagctctcccggagtggaaatcgttttgagagacttcactactttgctattatgaaacatgccggatatgctataatatcatttgattgtttaaaaaaataaaaagaaaaaaaaatatatttatagggacatgcgagggatgattttgcctctattgttgtttgtgcatgcactttgatcgctgatgttcgtctccctataaaattgactctcaatggccctatatatatatatatatatgtatatatagttcctctttcgatttattaaacgataaaatgatatcataacgtgtatgacatgtttcagacgaatcctctaaaacgatgacatagcgatgaaatcccacattttaccatggcgggccacgctgcatggcgcgagcgcatgc

SEQ ID NO: 280133 - DNA, 511 bp, Zea mays
ttgattcccatcatccagtgtttcggaatttgggttgcgtgtgtttgtctcacatgatctgttcgtgccatcaggttttcaggtctgccactcgctcggcggtggcacggggtctggcatgggtaccctgctcatttctaagattagagaggagtacccggatcgaatgatgatgacgttctccgtcttcccatcccccaaggtgtcggacacggtggtcgaaccctataacgccacgctctctgtccaccagctcgtggagaacgccgacgagtgcatggtgctggacaatgaggcactatacgacatctgcttccgcacgctgaagctgactactcccagctttggtgatctgaaccacttgatcagtgccaccatgagtggtgtcacttgctgccttcgcttcccagggcagcttgaacctctgaccttcccaagcttgcctgtgaccctgattcccttcccacgcctgcactttttcatggttggctttgcaccgctgacctcgcgt

SEQ ID NO: 280134 - DNA, 616 bp, Zea mays
ggatctcttgcaagaggttgacgcccttgagttcttcccagatcagggtgactctggtctccttcctggtattgaagagttagaatctctttcggatttcacagatatcggatgaacatagatgagcaaattattgttgatgggatgccctcctataccaagaggagacaagattgcctctggcaggagcccaaggatacaggttgaattgctcagccgtgcacagatgtgttgcaagcagcaagctatcatcatggctggctggagcaaagcactggcttggtgaggtcacattgatctgacaagctcggaggatgggtttgcactaatggcggcatttgggtaatttccatacatgtatgtatattggtagtctagaatcgtaggatgtagaaatgcctccctcatttgtgtttgagggtaggaccttgtaactcgaccacatggaaattttgttgagcaggtaccaacatagaagggaaaagaagaggccctcagcatcacccatttgtcgctgtatctcctgttatgttcattctctgtttaatccaatgctgtttggctatcttgccattgaaaacatctcagatgtcaagttggtggtgtacatatctat

SEQ ID NO: 280135 - DNA, 909 bp, Zea mays
  unsure (1)..(909): unsure at all n locations
attgcatctcatagtagcaaaaagtttcttgtagttttagatgatgatccaactgggactcaaacagttcatgatgtggtggttttaactgaatggccgggggtagcccttgttgaacagttcctcaagctaccaacttgcttttttattttgacaaactctcgttccatgactgctgataaggccatgctgctagtacaaactatctgtaaaaatcttaaagctgcggcagagaaggtccctggtgttagttatacaatagtcttgagaggtgattcaactctacgtggtcatttcccagaggaagctgacgctgctgtctccgtattaggtgagatggatgcttggataatctgtccattttttcttcaaggtgggagatacactattaacgacatccactacgtcgcagactctgatagattaattcctgctggtgaaaccgaatttgccaaggatgcagtttttggctataaatcttccaatctcagacagtgggttgaagagaagaccaaaggacgggttttggagaaccaagtttcaacaatttccataactctcttgcgtaaacaaggaccaactgctgtttgtgagcatctctgtagcttggagaagggctctgtgtgcatcgtcaatgctgctagtgacagggacatggctgtctttgcttctggaatgatccaggctgaattgaaaggaaagcgatttctctgccgcacagctgcaagttttgtgagcgcaaggattgggatcaagccaaagccacctatctgtccaaatgaccttggcttaaaaagagctttaactggaggcctcataattgttggttcatatgtgccaaaaactacaaagcaggttgatgagttgcgatcacagttcnggcaatctcttcgagtcatagaggtgtct

SEQ ID NO: 280136 - DNA, 389 bp, Zea mays
atctcaacatcctctcctcgtctgctttcattgtcagacgcagcggtgttgtctggctccggtcaggtgaagtatgctgatgaacttcagggactggatctcgtaccggctcggttcctcgctgctgtccgccaggccgttcgcgctttcccccggtgctgatgacggcgcctccgagggtgatgctcatggtacagcacacaatgactttgtagatactgttactgccaatacattttcttctaatgatatgcgggcgtcagaggtcacagccaactctggtagtggtgcaatttattctggtattgttcaacaagatgatgataataagaagtcagatccactgatgaaagtcgaggcgcttcaaatcaagtttctgcggttagtat

SEQ ID NO: 280137 - DNA, 661 bp, Zea mays
ggaaggcgaagagtcaaggcgtctggcacttcagcttgtcccgcttgcagcttgctcctggagtcctggttgctccgtcttctccggtcgggctcttgtccgacgaacgtgtggctgtggcactcgaggaagtacactgagcagagcattccatggagctcgaggcgatcggaaagcgactccgtataagcagcggcagcagcagcttggcccgcgacaggctgacctccctgccggattgtctcatccaccacatcatgtccttcttgaaggcccgtcaggtggtgcagacctgcgtgctgtccaccaggtggaggcacctctggcgctctgtgccatgccttgacattgaccaggacgagttcaaggccgccggctcgaaccgcatcacagagaaggaacaggaagacttcgaggactttaccgaccacctgcttatacctaataatatttccattgcgctcctggatacacttcgtctgcatgttagcgatgatgaatattatcatcgtggagcatcagttagatggatccgtcatggcataaagtacagtgcccagaatcctggcattatgcacaaggaatcgaacttagccttttggcgcctcaaaaaactacacctctccggtgtatatctggatggcagtttcatgaagcatgt

SEQ ID NO: 280138 - DNA, 341 bp, Zea mays
gcgcctcgcaggtcgcgtggggggtgtgctggtgcagtcctgagcgttaccggcccagatatgctgctctctgcgtttctcggcgattgcctgttcagctacccgccgtccgcctcttcttacccgcaacaacggctgccccgagaccgagcacgcgtctcccggttccctttcctgctcgcctcaggcccgcgtccctcgtcgcccgacggctgacggcggaggcgggggaggcgctgagccgcggtatccgccgcggagggcgacgacgaatacgaagcggagctccaggaggaagggtttccgagctgggcgggcggcggcgaggaggaggactacga

SEQ ID NO: 280139 - DNA, 493 bp, Zea mays
tgcccctgcatcgtctactggtgggcttatatgggacagccagggggttattaatcgcatcatcggagcgaaatggtccacctgttccggccaagcctgcatcgccatcgactacctgctggtggaggaggagtctgctccgattctgatcgagatgctcaagtcgacgctggagaggttcttcaccaagccagagtacatggcgcgcctcctgaacgagaaccagttccagaggctgagcggcttcctggccgaccgcagggtggcgtcttccgtggtccacggcggccacttcaaccccaagacgctgagcatggagcccacgcttctgctcaacccttcgctcgactccgacatcatgacggacgagataattcggccgctgttcccgatcaatacggttgaagaagatcgaatacagcatcaagtttctcaggttcaagcccaagccggtggcgatctacgcctttaccaggaacgagaagctgaagca

SEQ ID NO: 280140 - DNA, 512 bp, Zea mays
cagcggggctaccatatcaccccgcgcacgctcggactacgcgcgccgcagcctacagcgctggtgagacgagtaccgaggagcagcacagggatggtcggtggcctcgaggacgagcaggaggacccgagcttcctcaaaccaccacagcacccctcgcactacgggcaccgccaccgctgtcccttccagcgtcggtgagacgagtagggaggggcaatgcagggatggacggtggcctggacggcgagttggaagacgcgggcttcctcgacgaggtattacgcgcgacggacgaggtcatcgccttccgcaaccctaaccccgctcccgctcccgctcccattcccatgtttgactccttcgtcattgtccccggctgggaagcctctatcttcccaccgattcgatcttccacctccccgtcgcttcgtagccccgcttcacgaacagcttttcccctctcgtatggaatgagatttttaccggctaaagtttggtaatgaagaata

SEQ ID NO: 280141 - DNA, 481 bp, Zea mays
atgatgcgctggtgggaaggggggtgtagtttaccattcccggggggtgcccaccgagcctgaggaagctcgtggacaagggatccgatgacgtggcgcaactcaagccgctctacagggccaagcacccgggcaggtctaatgagaagatgattgaattcttgcaaaattcagttggcatcattcacaagaatcatgctgagagtataactttgttcattaaagagagtgttgatgaagagctgaacggcaccgatacatctaagcttcctaaaaataggaggttgaccttctgtatagaagggaatatcactgttgggaaaactaccttccttccaagaatagctactgacactatcgaactcccccaccctgtagaaattgtacctgaacctattgctaagtggcaggatgttggccccgtacacttcaatgtacttgatgctttctatgcagagccacagaggtatgcatacacctt

SEQ ID NO: 280142 - DNA, 453 bp, Zea mays
gggacgatggcaagggggcgtgttgattagaacaagacgggggtttatcaacacgcggcggacggggacggcggcggcggcggcggggacgaggcggtgccggggggcttcatctgcccgatctcgctcgagcccatggtggatccggtgacgctctgcacggggcagacgtacgggcgggccaacatctcgcggtggctagccctgggccaccggacctgcccgaccacgatgcaggagctctgggacgacgcgctcaccccaaacgccaccctccggcagctcatcgccgcctggttctcccgccggtacacgaggtttaagaagcgctccgccgacttccacggccgcgccgccgacctcgtcgccgccccccccggcacggcggtgcccaagcggcagtccctcaagggccaggccccgcgtcgcggcgctgcgggagctgcccaccct

SEQ ID NO: 280143 - DNA, 925 bp, Zea mays
tgtgtcgcgtggggcctccgcgtcgacctccaccccgctctccgacgcgcttaccgtcgtctcggatttctggtgcactctcttctctacgacgcgagcaagggcggtgcttgccatggcatcgacgggaaccaggaggggagctgtttgagcggatgcccaccaggaacaatgtttcctagatcacgatgtttgggccacttttggaagaggtcagggatgacatgttttcaagcttggaggacatcaccaacgcaccatatgcagatctgctctctattaattcaatgaggaaaggaaaggggtcatagaaattagtcttggcagatggaggggaacgtctcaatgactgaggcacattttttcttgttagttagctcatggatttttatggtccaagaggagttgctgctatatgaatatgacaacacccattaatcaacataactatatgaatacaatctgaaaggaaggtcggcttggtcagaaacacatggaggtactgatggaggctatgaaacatataagagacatgccagtgaggagcaggagtagtttagtcggttcttgctttatgaagtggatgcaattagaaagacgtacgagcaggccaacatctcgcggtggctcgccctgggcaaccggacctgcccgaccacgatgcaggagctctgggacgacgccctcacccccaacgccactctctgacagctcatcgtcacctggttctcccgcctggttctgcattttgatttcttatctgacaatcatgtttttccatattactgcaggcgggtctgattaattatttaaatgtagtttatcttagatactgtttgaacggatgggatgttggaggacaaaagacattcatgtcttactggagaaaatttttgagcaaccaagggtagtttggttgctgata

SEQ ID NO: 280144 - DNA, 366 bp, Zea mays
  unsure (1)..(366): unsure at all n locations
ggaccgtggcgagacgcgtgggcgcccgcgggnttcgcacgtccccgccgtcgcgctcgcctccctcctctttgttgcctccgcactgacctccacgcctctctccgacgcgcttaccgtcgtctcggatttctggtgcactctcttctctacgacgcgcccaccggcggcgcttgccatggcatcgacgggaaccaggcatcactctccctatctctcgggaggggagctgtttgagcgggatgcccaccaggaacaatgtttcctagatcacgatgtttgggccacttttggaagaggtcagggatgacatgttttcaagcttggaggacatcaccaacgcaccatatgcagatctgctctcta

SEQ ID NO: 280145 - DNA, 912 bp, Zea mays
gttaggttcttgtctcaatcattctacaggtccaagagaaaaaacttgtggaaaattaactggcggttttgataagacagcacaacagctttatttggacagagacctatccaatgctcttaacagcagtgaatcaatacgttgtgagacgagatcaatttcctcttctgaaccgacaactccaaagtctttaaaaggcaattatacttcagagtctggtgaatcaacagatattacaataggagctcttcccatgcagaaaagaagattgcaggatttagttcgaactgatgatgccagtgaaactatttctgggcgatcatcaccttgttctgagtcatcgacaactgaattaattgctggacatagtacagattcatctattgaagggaaccatggctgtcaagggctctgggactctagttcacatctagcccagatgctcagggttgtaaacgatgcctgtaaagttcaggttggtgcagatgttctccttgctgctggttatccaatttctgatcttgagaaatttatatgctctgcaactcccgttattggtcgtgcaccttgcatgataagcaacacttgttcattggaccaagtagttagtgactcagtttgtcagcatgacatctcttatggttccttgaggagaataggggagtggtaatgaagagccagggtgctatggattgggagtaaaagctcttagcaatctcagctctaaaacatccagcagcagcagttcagagttctttgcatactttgtgccttatctatctgctattcagttgtatgggttgtctaggaataacatgcatcacagttctggtgtgcaagggagggaattactgatatcatcaaatactgcaagctctatgagctctcatcctgtgcatgcaaaagcgcata

SEQ ID NO: 280146 - DNA, 541 bp, Zea mays
tcaatgggctctggctagcaggcgttggtattctttacatgagtcagcgggttcacatacgtcatcttggaaacttgaggcatgatgcattattctctgggaacacagcccattcatccagtttcaacgataccatagcaatgctcatcggcgatgtacctgttcttggtgatggaattgtgctcgattcttcctcatgggacaacatgccacatgcttttcaaatggcggaattcaaatgagttccatataatttctttgtgatgctgaagggcttcttcctgcttgttttggggtcaatatcagggaacgcccccctgattgtgacgctgcattcctgacagagatccttgtgatcttcatgcggatagtccttttgtctaattaagtgcatggaagataacctggatattatttttaattttttgctttgtattagagaaccgtttttgccatccctgacagcatttctgttggaaacgtgtcatgacttttgtttgaacaatttaaatatcggttatagataatgtgatgtgtgccc

SEQ ID NO: 280147 - DNA, 815 bp, Zea mays
gggtataccacctggtgattggcttgctggttatattggtctcttggactggtgtcagtcatgctgtttcaattgctgaatagttcaatatgggttcaagaactcttacctttcctgtttctcctggaacgtggtgcaacaaatgagagctccaacggcttaaaaatttggattatgctttggttggacttatgagatgaaaaattatttttatggtctaatagcctgtggaattgctgaaacattgacttttttgactggcacaagtggtgttctcctgactggttgctggtctattggtgcttctgtagaattgaaaagttgaattgtgggtaaagtatctacatatgtttttaccagcacacggcttgagtcatccatgaattaatcattatgttttgcaatttaactttattaagacttaggagatgaaccatgaatatgatagtcctgacagctgtgttaggctacttcatatgaggtacgtggagtctacttgtcatggtatcatgtgggcacaggaagctcctcgtccagccaaagaaacaatacattttttcttattaacaaaaagtaaccgaacaatgctgttatgtaaaacagcagcagtcggttaaaattcgaactctcttgcgaagcaaactgtgcaggaatgtttaatgatcataatgtgatggtcctgtaagaatcgtgcagttgctccaaatatgggttaaacttagtttacctgttacattgtcatgtggttgtgggcactgtgaaagctctttggccactcacagaagccctagaataagaatattgctaatgatgag

SEQ ID NO: 280148 - DNA, 450 bp, Zea mays
tttggtgacgtggatgacaagtggcagtcagccccgcttgtcatcattgttcaatttttcagaatggctcaaaatggagaaatgaccaaaaccaaagttgttatagttgagatctactttgcacttgacttgttcatttgaaattatttacattctcaaaactctgtttgacgttctcatattttgaaatccaaaattttcgaactgttcaaattaacttggatggggaaatgacccaaacagaagatgtagatctcatcgatgagatctacaactttgtagctggcaactttttttagtgaaaatcatttatggtccccaaattttgtttgaaggcaaattttgaagttcaaaattttcaaacctccttggatggagaaacggccagaaacaaagatttacttttccacccgatggggggggaagaagataatgctgacatgtgggctt

SEQ ID NO: 280149 - DNA, 518 bp, Zea mays
cctcactcgtccggatgaacctcctcgctgacacgtcgccccgcccccgagccgacttcccgatgccaccctcgcacaagatcccaatgtggcaatggcgaccagcgacgggcggtcaacgccaccgcgccgcctgtgaacccatggtgagaagtgtggtatcgatctagagccgaaggacttccccaacaccccttcctccatcggcgtgacatcggccagctcatctgcgacgacgaggcatcttcgaccgacttcccgacaccccattctccatcaatgcggctccagtaccccttcctccatcggcgcatcaacatccaattcatctacgacgacaaggcatcttcgacaaaccacgccctactacaagtggtgtcagtccatctcagccgatgtcgtgcgcatgtgagatctatggagaggaagaggaggaaggggttgtggggaccgagggtgccagatggcggattcacttgcaactacaagaaaataaagagcgagagatttacagaaac

SEQ ID NO: 280150 - DNA, 898 bp, Zea mays
aatgtctcgcagagaagatgggttttatccataaagcaccaccgtttttttacaggcatcaggcaacagatcttggacattcttacgttcgagacattatggttttgtgttattgaacaacttggatcaactaataatggtgtcaaatctgttctcatcgacatcatccaacaaataccatatgttctttccagtctgaaatctgcacatgttatttgcaggttcgtattgatgccgctggcagtatttgtcttcctagcctataaatactggaaaacacagataacaatagatgcagttgagaagttcctgcgaatgcagaatatgctcgttccgatgagatatgcatacacaaacatcattgctatcaccggccatttcagagacaagctcggacaaggaggctacggtactgtatacaagggagtgctactgccaggtgaaattcatgttgctgtcaagatgctgggcaactcaaactgtaacggagaagagttcatcagtgaggtggccaccattggaaagatccaccatgtcaatgttgtgcgcctcattggattttgctccgaggaaaatatcagggcacttatctatgagttcatgccccgtggatctctcgataagtacatcttctcgtcggagaagacattctcatgggacaaactcaacgagatcgctctgggcattgctagaggtcttaactacctgcatcacgggtgtgatatgcagatagtacactttgacatcaagccacacaacatccttcttgatagcaactttgttccaaaagttgctgattttgggcttgccaaactgttcccaagagacgacagtttcgtgccactgagcgctatgcggggaacgataggatatatagctccagagatggtatctcgaa

SEQ ID NO: 280151 - DNA, 386 bp, Zea mays
gggcgctcaggccgaccagctcctcgtccagcaagagcttcatggccgcgcccacagccgcctgacacggcagcggcagcatgcatgcgggggtagcttcatggggttgatgctgccgctgcgtgagcgatcaatggccggtgaatcatcatccattccatccctcgaccatatatactagtactacataaatgtctccatctttattggtgttctcgtgtccatgccttacgatttttaagcagaacctggtcctgtttatgttggaaatgttgctatggatctagctatagctactgcctttacatttgggattcctgtctccagtggccaataaactgtggaacttgttaatctgtttaacccctggagtatttgtttgggcc

SEQ ID NO: 280152 - DNA, 531 bp, Zea mays
gcgcccacgcgtttttcacgggcacaccaccgcacatgtgttgtgtgttttgcgcaagaccgccggaccagagaccgtccgccccgcccgccggtcacgcacgccgtctcgcgccacccagccgtccgtcggctggtccgctgactcttcgccccccgcgtgtcctgtctgtggtggcgcggcgcgggacggaagcacgcagcagcagcaggtcaggtggtggtggggatgccggccgcggcgcggtcgtggacgtggacctgcgggtgctgcgcgggcaggaggcggaccagcggcggcgctgcgggcgacacggccggcgcgtcggggcgcgccgccgaggagggggacgagtggagcctcttcatcgacctgcccgtcctcgaggccgccaccggcggcttctccgacgacaacctcctcggccgcggtggcttcggccccgtctacaagggggtgatggagaatgggcagcagatcgctgtgaagaggctgcctctggggtcacggctaggcgtgcgcgagttcctg

SEQ ID NO: 280153 - DNA, 772 bp, Zea mays
aggagatacatgccgtgttatcagagcagtcactttatcctgcagggtggattcatactcatccttcacaaacatgctttctatcatcgatcgacttgcatactcaatactcttaccaggttatgttaccagaggctgttgcaattgtggtcgcacccacagatccaaccaggagttacggaatattcaggctgactgaacctggagggatggatgttcttagggagtgtgacgaaagtgggttccacactcaccgagagacaaccaacggcagcccaatctatgaaacctgctcgaaagtgcacttcaatcccaacttgcggtttgagattgtcgacctgcgctcggctcaatgatcaatgggactaaagctatggcagcacgtgctcccttgtgctccctcttggcagaagtatataccatagagcttgctgacgatgcgtgataggtatagtgacagcgccaagccggaaccaagatgctcatgttacttatctgacatctgcgctggtatttgtcaaagaaaaggagtaactgaaaactagcactggttatcttgtctgttcggccagcctttgagttggtattttaagtaatactgtatataacatacaactggggcaaaacacacacacacactattaacttggtctgggatgtgattgtaacgtagcgcaatagcgcttgactgtttctgtggcactgccaatttacttactaattgtcagtgactggagtatgaagaaatacattaatttggcagttccttact

SEQ ID NO: 280154 - DNA, 169 bp, Zea mays
gcgaagtggatactctagccggcgagctttgctcccggctgttatatataggaatgcgttgtctcttgaccttagtgtattttctctgggttatagggttcttgttaagttaccacatgtacttttgcccttttagaccctatggaatagtaaacttactattttctag

SEQ ID NO: 280155 - DNA, 349 bp, Zea mays
cacgcgtacgcccacgcgtcgcgttacgtttacgcccacgcgtccgcccacgcgtccgctggaatcctgcgacgaggggaccgaaatggcctcgtcctcctctgactccggccgcatcgccggaaccctagccttgcgtacgagctcggccttagcggcggcgtcgctaatcccggggctcccggacgacgttgcagctgtcattctctgcctgctcaccttccccgaccagtcccgcctccgcgccccctcgcgcgcttggtgcttgctcctctctgcggctacgctcctcccgctccgccgtagcctccgtctcccgcgccgtcaccttctctgcctcttacccacc

SEQ ID NO: 280156 - DNA, 548 bp, Zea mays
  unsure (1)..(548): unsure at all n locations
cggacgcgtgggcggacgcgtgggtttgtccatcaatccctctctttcccatcgccagatcacctggccggccttctcctgcaatggaggcttccatggcgttcacctccggaagccctacccccacgcgcgtctactcctcagctttgctatcgttgcgcacccccaagagcctctctgtctacggcccatggcgatggcgtgggcgtgggcgccccctcctcgcgctccggcatcggtcccaggcccaggccgccgcagcggcggccggggcggccgaagcctcccaccacgatgttgtagttgtgggcgctggaatcgtagggcttgccatcgcgcgccacctncttctccacacttcgctctccgttgccatcgccgacgctgccgtcccctgctctggtgccacaggcgcagggcagggatacatatggatgtcgcaccggacgccggggactgacacgtgggagctggcgctgcggagtaagcaactctgggaggagctggcgaccgaggttgacggccaaggaggcggcggagcacgggag

SEQ ID NO: 280157 - DNA, 537 bp, Zea mays
cccacgcgtccggacaggatcatagggtgcgttattgtctcacactcatagcatactgtggtagtgtgtccttctaggataacctgtaagacaaatataatataatgatatataggtccttgttcctgtcaatatttttaaaagttgtttactgtggtatgaaataaatccatgagaggtttgagctgtgtatgttgtctgggttttatagttactcttgcactagttttctgtccatgatatttttcataatatttttctcgatgagatcaatcaagagcagaaaaatgaacagatatctgagtgctacattagttcatggtctttttcagttgtgtcagttgttttatgttggaaaactgactcctatttagaattctatattagtatgtaccttttgttatgccacatgaacctatggcaacagcctaatttcatagcccacattaccttaaggcaaaacctttcacaatatagtccttgaaaactttgccacgacatactcactgtactggccccctttgaatgcaggattgt

SEQ ID NO: 280158 - DNA, 336 bp, Zea mays
gccgtgccgttcccggcgcagggccatctgaaccagttgctccacctgtcgctgctgctggcgtcgcgggggctgtccgtgcactacgcggcgcccccgccgcacgtccgccaggcgcgcgcgcgcgtgcacggctgggaccccagggcgctcggctccatccgcttccacgacctcgacgtcccaccgtacgactcccccgcgccggacctggccgcgccgtcgccgttcccgaaccacctcatgcccatgttcgaggccttcgccgccgcggcgcgcgccccgctcgcggccctcctccagcgcctgtacaccagctaccgccgcgtggacgtc

SEQ ID NO: 280159 - DNA, 526 bp, Zea mays
cgcgttcgttgtactcttaatagagtagtaaagatgaacaacccaacttggttttatacctgtttctgataaaaaagatatttctttcttttggctagctcattattttgcatactttctatcacatgaagaagaattatgactatatgtgcgtaatttaagttctaccacagttgtttgtaactagagattaaaaatttctatgtagcaccttatgacagtttttttcttcttccttgcagtcgggaattaagtgagacaatgtagaaggtgaaagaggcgagcatggcacataagtgtgaacaagcgacagtgatttgttgaacgaatgacaatcttttgaagacgcccactgccaattctctgcctttgtcatgtgtgagaacccttaatcggtactcaaactctggcatgaatctaagctactagccccaactaaatacactgataaataattatgtagtgaaatttatttagcatgtgtagtgagggtaatctggatttttacactttgcaattgctatgt

SEQ ID NO: 280160 - DNA, 618 bp, Zea mays
ggttaagaattttcttttgggggggtttttattggttaaacgctttcttttctataaatagagggcacacgacaccatcctgtaggttgtagtcttgtgatcttgtccttggaggtacacacaaagactggtagacacagacgacctctgccgatggctggtgccccaaaagctcgacttgtatataattgcaagttatagattatattgcatacaggtgacatattagtttatatgtatttttcagcgtttttatatctaattttagaggagcagactgttcaaccaatgatggcaggtggtcgtgtacttgatccattttgtactcgccttgaccctaccatggtagaagcactggtctgcaccaaagattggatagctggagcaagaaaaggttatatagtagtaccttatatttatttacaatttaattagtcattagttgtgatcaatttgtaatattgtgaacttgtgatctttgtgatcaacctgttatattgtgaacttgtgatctttgtgttcaacttgttatactgtgaattgtgaatttgtggtctttgtgatatttgtaaactttgttgtattgtgaacttgttatattgagatattttcatattt

SEQ ID NO: 280161 - DNA, 652 bp, Zea mays
caagaacccgacctatgaggctgtgaggagtactacaagaaaaatatttggcagatccaatactaaaggttggtaaaagtaatcaacacacttttgacatattagcatggtggaaagcacacaaagaagaatatcctctcttgggccagcttgctcgtgatgtcttagctatgcaagtgtcaacagtagcttcagaatctgcttttagtgcgggtggtcgtgtacttgatccatttcgtactcgccttgaccctaccatggtagaagcgcttgtctgcaccaaagattggatagctggagcaagaaaaaggttccaaggctaagagtgttgctattcctaatatggtttgtgaaatggaggaacttgaggctcttgctagaaatctttcacttgaggatgaagacctagatgatgatcatgatgatggaccagaggcatcgttgtaagcttgttgatgaagacctagatgatgataatgcaacatgaatgctctgaatgtttttattgtacttgttgcgtaatgctttgtgatcttgcgaacttgggacttgtggacttgtggctgtgtactttgtgatctgtgtgatgaacttgttatattgtgaacttgtgatctgtgtgatccacttattatattgtgaacttgcgatc

SEQ ID NO: 280162 - DNA, 580 bp, Zea mays
cggtcgctcccctacacgctctccggcggcgagacgtacgacgacgttgcctcggaattcgccaacctcaccaccgcctcgtggctgggggtctccaacgcggacccggcgggcatgctgcccgccgctggagaagatcaatgtcaccgtgaactgctcctgcggcgacaagagggtatcgccgcggtacgggctgttcctcacctatccgctctgggaaggggagacgctctcctcggtggcggagcaatacggattctcgtctcctgcgcagttggagctgctcaggaggtacaaccccgggttcgggatggacagggcctccgggaaggggatcgtgtttgtcccagtagaaagattgcagacggcagtttccgccctctggaatcagatgctggaaatatcctttctggaggagcggtagcaggaattgtgatagcctgtatcattatttcgattgctggcatctggctgtttgcaatgtattataggaagcataaaatgataaaagtcataccactcacatgtctagaatatatttgtcaacttatcaaggttttccaagatgagggcattaagg

SEQ ID NO: 280163 - DNA, 798 bp, Zea mays
ttctcgtcccagtcgacgaaaacgaacagcccctcgctttagattgccgcaagttcccccattcctgtagatcgccggcccctcgctcggctcggccatgtcggccggctccacggcgtccctcctcgcggccgtcatctgccttgccctcgccgtgcttgctcccgtcgttcctggagatggtgccacattggaatcagttccagaccttgtgaaggcaatgtacctaaacgttgaaagcttcccttgtgtgaggctgttgaatctttctggtgaaattggctgttctaatcctggaagtgagaaggtcattgcaccaattgtaagacttagaaaaggcagtgatcaattggttcaaccatctactattctcctttccttagatcagatgtcagatttctttctgagggtatccaatgatccagaacttcaccagaaggtggcaggtgtattggttgagtcaaatggtgtcaacaatgacttacaagagctgtctcctgatagaaaatttccacaagatgattttgcaccctactcaaatcacagccatgattggaatcctgctggatcaggtatcatgtggaacaaatataattttcctgtatttctactttcagaagagagtacatacactcttcaaaagatttcagaaaaaaatgagaagactggcaatggattataaagcaaatgttgcagaattcgaccttgttatgcagacaaccaaagctcatacacatgattcagcatcctgcctcaaagaacaatcatgcttgcccttaggtggacacagtgtttgga

SEQ ID NO: 280164 - DNA, 464 bp, Zea mays
  unsure (1)..(464): unsure at all n locations
aaaaaaaagccaaaatggcggggggtgtgtcttagtctnccctccctgcgatcccctccatccgcgacgccatctcggccacttcatgatcactagggtttcgctcttctacccataagccctcgtcccgatgcgctggtggaagcgctcctcctccccctcctgccccgcctcctcatcctcagcatcgacccccgcttcccccgcccgcgcctccaccccccgtctcatcggcggttggggtagcggccctagctcacgccgcgatggcagcggggccagcaacgatccgcagccgcggctgatcagagcgcggcggatgcgctacgtcgtcgatgacctcgaggtcggggtctccgcgctcggcgtggactctccggcgaggagggacgccgcggccgggtttgcgcttgagacagggagctccgcgccgatctcgtggtcttccagcaacatggaggtgg

SEQ ID NO: 280165 - DNA, 1069 bp, Zea mays
ttatgttgcatggtgcagaatgtttgtctagtcgccatcttataaaacttgcattttagcttctacaagaccctcttgtcacctagaacgctagatgctcaccactttattcactccgctttgattctatggctaacatcttcatcaatatctacgcctctctgtatcattgattttaaacactgaaaagtattcattcttgggcactacttgacctaactagcatctccttcctcatgtgtagtagtgtcgaagtcacatcttatatatttagttttagttctattgagtctaagaggttgtttggcatcgctctagagcaaaactccgaaggggagctggccagagctagccaaacaatgtaactccaaacttgcaaacttcatagagttttgagagctacaatacaaacttttagagtacatcttttgctgctctaaaatccttaaaaaacaacctagatatggaagttgaaggtatttacccgccactaccactagttatgagaaagcaatctagactttggagcagaactgctccatccagagttttggagcagagatgctctagagtggagcggagtcatgctaaacaccccctaactctaggggcgtttgctgcaactccaatcccctatttgctcttgcttactttcatcaactagcattacatgattacatcgtccgcaaaaagcatacaccaagagtcatcctcttgtatgtcacttgtgacctcatccatcaccaaggcaaaaaggtaaggctcaatgatgacccttgatgtagtcctattctaatcggaaagtcattcatgtctacatgacttgtcccatcattgttgtacatgttcttaatgagtctaattcgtgagaactttatgtttgtccaaagtcgatcacataacattccttggtattttgtcataagctttctccaagttaatgaaaaccatgtgtagattctttttttggtccatgtaatgctccattacttgtcttattaagaaaatggcttacatggttgacctttcgtgcatgaaaccaatttggttcatagagatcctcattatt

SEQ ID NO: 280166 - DNA, 467 bp, Zea mays
gacgacgacttcattgtgggggtttttgtcatggtgaatgggctccctaagaagaaggccaggatagggagtgggagggagacagtggtggaccctcatgtatctattgaggaagagacatggccagaccttgagtcagactcatcggactttgagtttgcgacgtccgatgaagaacctaacaatgttgaaacacctgtagctgagcagactacagtcagaaaagggaggaagaagaggatatctgagtcagagtcaccctcagattctgaatttgttgtatcaggtaaggaattggaagaattgagggagcctgagcctccaaaggctgcaccaaatctgcatgtgtccttgagaaggatttgtattacaaggcatggagaatgcaagggaaaggagaaacaagaacaggaggaggctgggaagccaatatgcgggatctgtctctcggggagctgagagctact

SEQ ID NO: 280167 - DNA, 448 bp, Zea mays
gaactctaacggaaacacattgcaggtggagccaaacagaaacatcacgtacaaagaagaggcgatcaagaccatcgcacgttctctgagatgctgcctgtcagaggacactgccgtgcccagcactcggagaactctgctgctgctcctcaggcgaccttcacgcagaggactggatgctggaacatgccggcttcgtcgaccactcacgggccaccactaccactcctgatgctgttgtacacgtacagtgctacacacccggtcaccttttacacacaggaaggcacaacacagtatcgacgagtagtttctgaagttcgctttgcggtgcccaggacaatgaagcagccgaaaacgatgtgtggctgagacacgtggccgcgacgctactcggcagccgtagcgggatcaggagaccgttcctggaggcgctgtccacgtgcct

SEQ ID NO: 280168 - DNA, 619 bp, Zea mays
  unsure (1)..(619): unsure at all n locations
gtctactgataactctagcttcttcaaggagaagcttacacaagcccttcggtacttcaaggagtccacagatcaacatctgttggtccaagtctgggcaccagtcaagaacggagaccgctatgtgcttactacttcaggacagccttttgtgcttgaccaccggagcattggcctacttcagtacagggctgtatccatgatgtacatgttttcagttgatggggaaaatgctggagacctgggcctacctgggcgtgtctacaagcaaaaggtgcctgagtggacaccaaatgtgcagtactatagcagtggtgagtatcaacgacttaaccatgcgatcagttacaatgtccatggtacggttgccctgcctgtttttgatccttctgctcagtcgtgtattgctgtcgtcgaacttataatgacatcaaagaagataaactatgcctgtgaggtcgataaagtctgcaaagcacttgaggcggtaaatcttaaaagcactgaaatactggaccatccaaatgtccagatatgtaatgaaggccgtcaagcggctctggtcgaaatactagagatctngactgtagtatgtgaagagcacaagctttcttggcac

SEQ ID NO: 280169 - DNA, 413 bp, Zea mays
accacctcctccgcaaacaacacacgaacaccgcaccgcaacgtagccggctaggggaagagctctttccttcagctgtgccgtgcacaacgcacggcacgctggtttggtttgcatcgcccccgccaagacgctgccgtgagcaggcagagcgggtgggaagactggtgggcgagccggccgcgccgagggatagcagcagcagcagcaggcgggcgacatgccgagcggcggcgtgttctccgggtcggtgaacctcaagcacgtcaagctggggtaccagtacctggtgaaccacttcctgacgctgctgctggtgccggtgatggccgccacggcgctggagctggcgcgcctcggccccggcgagctgctctcgctgtggcgctcgctggagctggacctggtgcaca

SEQ ID NO: 280170 - DNA, 500 bp, Zea mays
ccctcttttccgcatttccattccgtccggtttcttccgacgacggtgtgtacagagagcaggatcggacaagtcgctgctggtagaagcatggcgcagcgccggctgttgggcacggcgccggcgcccgcgggcgatgcggcgtcgcacggctcgggctccagccccgacgcgatgcggatcatggtgggcgtgctggtaacggtcatcgtctgcacgctgctctactgcgtctactgctggcggtggcggaagcgcaatgccatccggagatccctgctggacagcctatggcggcggtcgagctcggacctgccgctcatggacctcgcctccatcctcgctgccaccgacaacttctccaaggccaacaagctcggcgagggcggcttcggccccgtctacagaggcgtgctgagcggcggctccgagatcgccgtgaaacgtctgtctgctcggtcgcggcagggcgcggctgagttccggaacgaggtggagct

SEQ ID NO: 280171 - DNA, 526 bp, Zea mays
tgttgcgctcctttagcgccggcggcccgtagcctcaatcatcatttccattccatccggtttcttccgacgacggtgtgtacagagagcaggatcggacaagtctctgctggtagaagcatggcgcagcgccggctgttgggcacggcgccggcgcccgcgggcgatgcggcgtcgcacggctcgggctccagccccgacgcgatgcggatcatggtgggcgtgctggtaacggtcatcgtctgcacgctgctctactgcgtctactgctggcggtggcggaagcgcaatggtgaaactgcgctctgctgccatccggagatccctgctggacagccttgggcggcggtcgagctcggacctgccgctcatggacctcgcctccatcctcgctgccaccgacaacttctgcaaggccaacaagctcggcgagggccgcttccgccccgtctacagaagcgtgctgagcggcggctccgagatcgccgtgaagcgtctgtcaaccccgtcgcggcagggcgcggcg

SEQ ID NO: 280172 - DNA, 504 bp, Zea mays
  unsure (1)..(504): unsure at all n locations
cctcgagcgaagccagggcaaggtcgtcggagccggagagggaggaaggtggagaacctctacctgcgtcacgtgacaactgtctcctgacccacaggagcggcggactccctctgctcgccgcgcgcggcctgttccggttcggtcggcggccgacggccggcggcggaggcagcaggaagctactgtaccaaccggcccaagagaattgcgggttcagaggcagtgatggcggngcgctacgattgacgtgctacgattatgggcatccaagggaacaaggcggcgacgcacgagcacgacttcctctcgctgtacgccgtcgtcgtcgtcaaggacgctcctctcctgctacacgactccaaggcgccgcctccttctcaggtaatttcctcttgaagacgcacgacttcctgcagccgttggatcagaagccgggagcgccgccggagccgtcgtcgctgcccgcttccgccgcggagagcaggcaccagccgcagcagc

SEQ ID NO: 280173 - DNA, 496 bp, Zea mays
cagatacaatggcattcagggggccttgttaatcttactcaagtatgcccaaagctcatggatgtgaataaggcattggatatgacatattctgtcaaatgggaaccaacatacataacatttgctcaccgttttgatgtgtatctggactatcctttctttgaacaccagattcattggttctcaattttcaattctttcatgatggttatctttctcactggactagtgtcaatgatactgatgcggactctaagaaatgattatgcaaagtatgcccgcgatgatgatgatattgaaactctggaacgagatgtcaatgaagaatctggatggaagcttgtacatggtgatgttttccggcctccttgcaatctagttcttctttcagctcttgttggtattggtacacagctggcagcactgattctactagcgattttgttggcaatcattggaatgctgtacattgggcgaggagctattgtcacaacat

SEQ ID NO: 280174 - DNA, 540 bp, Zea mays
ttacgttgactgagaacggggaagccgacgctgcgcgcggtaatatcctgaggcggcgacttctcttgatcgcagcccgactcacaccggtaacgaattccttgccccaatcttcgggatacggcggcgattgttatcaccctacttatttacctgcctcagagctgcgtgcctgcgttcattcgaggcgtgcgctccttcaattatccctgacaccgatgcatagagttagagtaggcacaataatctgttttttttcttgggatgatcgtagttttgtctctgaccactaaacagttcgtttttttctttctatgcccgtggctaacttctagtgaggagttcgagggatggctttcgctagtagaattggaaatgcgctcaggagaactttagcgcccacttgctccccactgcttcagccagtaagatgcatgtcctcttccaagctctctgttggaggtatgttgagatcgattctgttctccgccgcggtgtctgagtatctaattccgctctgaatgagcctgcctgtaggac

SEQ ID NO: 280175 - DNA, 1003 bp, Zea mays
cccactcgttcgcacgaagaacctcctttcagtcatgggttccatggccagtgctgctggaggctttgttgggcctgatcccagggtaatcgagctttatctggaggagattcttgcgttgacccagcttggggaggactacactgaattcatggtgaacaagatccgtggattgagagatgtcaagcctgagcttgggccgcgggcgatgaaggccttccgtaatggtaacttctataaaacggagcaggatctgactgggttctatgtgatcttcgaggagtttttcatggtggagaatgtgaggaaagccatacggattgatgagcccatatcagatggtctcacaacgtcaatggtggatgatgtattctttgtactgcagagttgctgccgccgggctacttccactgcaagcataaactccgttattgctgtgcttggtggggcaacgagccttctgagcaatgagtatcaggaggcactacagtggaggatgcgggagccaaatttgggtgcaaagctcttccttggtggtgttggggtgcagaagactggtgaggagattgcgactgcactgaacaacattgacattagctccgagtatgttctgaagctccgccatgagattgaggagctctgtgtagagatttttcatactccagctgatcgagagaagatcaagtcctggttatcagagctaggagagatcagtgcttcctttaagaagatccttcattctgcgctggagcatttagtggcatctgtggcgccacgcatccgtccaatccttgacactgttgctactgtcagttatgggttggatgatgctgaatatggggaaaatgaggtgaatgatccatgggtgcagaagctaatacttgcagttaacactaatgttgcttggctccagccagtgatgacaccaaacaactacgattcctttgtgcacttgatcattgacttcattgtcaaaaggctcgaggtgattatggtgcacaag

SEQ ID NO: 280176 - DNA, 422 bp, Zea mays
gcgggggcgctcactcggggcccgctgcgaaacacatacacacacagatcgaagcggaggatgaaggtggaggtggtggagacgacgctggtgccgccgagcgaggcgacgccgcggcacgcgctgtggctgtccaacctggacctggcggtgcccaagacccacacgccgctcgtctactactacccgaggcccgccggcgccggcgccggggaggagggaaagggagagggagaatgggtcgttcttcgacccggcgcgcctgcgggaggcgctgtccagggcgctggtgcccttctacccgctggcggggcggctggcggccggcccgggcggccggctcgagatcgactgcaccggcgagggcgcgctgttctgcgtcgcgcgggccgacttcaccggcgacgagatgtttgccgact

SEQ ID NO: 280177 - DNA, 522 bp, Zea mays
aagggagtagcttggaagaaatgggcatagtggatacagtacaaagcgaacgctcaaccaccgcgaggtttcctcgagaattggcagtctcttcttccccgcacccactctttatccacgagcgacggggacccgtgacagcggcgaaaggctcgagcttttcttgatttgccctgccgcctgcattgggacgagaggaggtccttttcttggacgttctggggaggagtacctgagccgactcgcgggcgttcttgggctcgttgcgtctgttcaggttctggaagcatgaggttatggtctctccttctcttgcctctgctctgtctacctgcgcgggttcgatcagaggattacgcggatgcaactgtcattgttcgaggctctgagacgattgcttcgaccagtgatgagtttgtctgcgccaccattgattggtggcctccagagaagtgtaactacgaccagtgtccatgggaaagggcttctgtcttaaatctggactagactaatcctttgctg

SEQ ID NO: 280178 - DNA, 874 bp, Zea mays
  unsure (1)..(874): unsure at all n locations
aacaccnngccaanggcgacgggggcgccgttaaggncgccgcgggagtgccaaccacgctgccgcccgctcccgccgcccaaacagctgtatccgagccccgattcgccggatcacatgctgcggccacctctcaaatgacctctcaactccagagcactacgctcctgctcccgctcttcgccgccgctgcttagggccgcggcggcgacgcctcgactgcgccgccgctggagttccaccatcgggtctccgcaccgctgcggcggtgggtggaggcccgagggcgcgcgctccctggcgggtggccggctcccggcagcgccgcgtacgtcgccgcccttgccgggcacgatcgccaccgggcggtgtcggcagcaggggggagtagcagcgacgcaccaccgctcactttcgccgagggaaatgccaccctcaaggtcagcaacctcggatttttgcactatgctcttgtgaccgttggcacaccgggccagacgttcatggtggcgctggacacaggcagcgatctcttctggctgccttgccagtgtgacggctgcacgcctccagccactgctgcctctggatcagctacattttacatccctggtatgtcgtcaactagtaaagcagttccgtgcaacagcaacttctgcgatcttcaaaaagaatgctccacagcattgcaatgtccatacaagatggtgtatgtctctgcgggtacatcatcttctggatttttagttgaagatgtgctttatctctcaacggagaatgcccaccctcaaattctcaaggcacaaataagcttgtttgtggacagactcaacagggtcatttctggatgctgctgctcctaatggtctttttg

SEQ ID NO: 280179 - DNA, 561 bp, Zea mays
aattaggataatagcagcacaagcgagctgcggaggagggggaggtttaaccatggcgcacctgctgctgcacggcactctggatgcgaccatcctggaggccgaccacctcaccaaccccacccgggccaccggcggcgcccccgggatcttccgcaagttcgcggaggggttcgaggactcactcgggctcggccagggctccacgcggctgtacgcgacggtggacctcggccgtgcgcgcgtgggccggacgcgggtcatcaccggcgaccccgtgaacccgcgctggtacgaggtgttccacatctactgcgcccacttcgcctccgacgtcgtgttctccggcaaggccgcgcagcccatcggcgccacgctcatcggccgcgcctacctccccgtccgggacctcatcgctggccaggagatcgagcggtcgctcgacatcctcgacgccagcaagaagcggctcccgcacgggcccaagatacgcgtgcgcctgcggttacaggacgtgtccgccgaccctcgcggttggagccggggcgtccgcggcgcgcg

SEQ ID NO: 280180 - DNA, 769 bp, Zea mays
aagagccggcgctgttcgcgacgacgatctacgacaacatcctgtatggcaaggacggggccacggaggccgaggtcgtcgaggcggccaagctggcgaacgcgcactcgttcatcagctcgctgccggaggggtacaagaccaaggtcggggagcgcggcgtgcagctgtcgggcgggcagaagcagcgcatcgcgatcgcgcgcgccatcgtgaaggacccggccatcctgctgctggacgaggcgacgagcgcgctggacgtggagtcggagcgcgtcgtgcagcaggcgctgaacagggtgatgaggaaccggaccaccgtgatggtggcgcaccggctgtccacggtcaagaacgccgacgtcatctcggtgctgcaggacggcaagatcatagagcagggggcgcaccagcacctgatcgaggacaagaacggcgcctaccacaagctcgtcagcttgcagcagcagcaacagatgcagacgcagcagagctcatcagaagacatttgaataagatcgtgcgtttctgtatcttgctgtggctttgtctttcttgggcttttgtaaaagatctgcgctggttatcttttcaatgaaagggagtgttcagaattacaggatgaagcattattgggttcttattcctgactcccgtaaaaaaatatatatattgtacatagaatcttgcaatgtaattctgctccatggatctcaatgtttagtgcctacttctgattcaaaaaaaaaaaaaaaacaaagagaac

SEQ ID NO: 280181 - DNA, 362 bp, Zea mays
  unsure (1)..(362): unsure at all n locations
gggccggaatncccgtgacgttccacgcgcccgccttaaattaaggggccacggcagcgacatacggggcccggttcacgacgccatggccagcggccaggaactctacaccgaccggctcaacaacagccagctactcggacgactgcccaccggcctcgccgagctgcccgagctccgggagctcaagctcggcaacagcaacctactgggccccgacccggcgctcaaggcccacactctcaccttctccgggaacgagcactgcgccgacaaacccggagaagcctgcgccccggaggacatggcgctggtgcacttcctcgaccaggtgcagtacccgaacaggctggacggcacct

SEQ ID NO: 280182 - DNA, 654 bp, Zea mays
  unsure (1)..(654): unsure at all n locations
tggcaggccaccgaatgttccacacacccgaaggatcaacggatcaagcgaggtagtcgactccgcgtctaattaaaccctgagggctgcggacgggccgtcatatgttagagcattgcttccgtgtggtgcggttgatagctcggatcttctgctggccgagttcgccttggaggagaagagagagagagagagagagagagagcgccgggatcggagccaggaagcatccagcagcgatggcgggcggaggggtggcggcgctgggcgtgaagacggagcgcgcggcgcagtacaaggggcgcatgacgctcgccgtcgccacgacctgcctcgtggccgccggcgggggcgccatcttcggctacgacatcggcatctccggaggcgtgacatccatggacccattcctggagaaattcttcccggtagtgttccaccggaagaactccggcgggaagaacaactactgtaagtacgacaaccagggactagcggcgatcacatcgtcactctacctcgccggcctcgttgcctccctcgncgcgtcccccgtgacgaggaactacggccgcaaagctagcattgtctgcggaggcgtgagcttcctcatcggcgcggccctcaacgtggccgtcgtgaatctggctatgc

SEQ ID NO: 280183 - DNA, 772 bp, Zea mays
tttcttactaacactttccaacctggaagtctgtgccacattccatgagaggttgcacatgcactttttggagaggcctggtatgtattgtagcccaaggtagcggcagggaaaaagtgcctctggctcccaagaaaggtgagatcacttgatcaaggtctatgtcctcacaacgaattgggtggatggagcttttagcaaagtttacatgggtctgacactttgctgaaggcgtcaaggatggatttaagtgcctcgtgcctcgatatcttcgttcaaaaaaaagtgcctcgatatcctcttttacttttgacttatttctttgtcttcttactatcccgttctacaccttctacatgcttgcacagtgtttgggtttgtctaaaaggtatccctagattggacaaatgtgtcatgtctctctctctctctctttaaatgaaggccttattctctgctgaatgaactggaagaatccttgctcgttttattggtttttttatatagtagtccagattaaagtactaatacacctttctttcttgtaaacagcttgatcaaatagtggttgaaaatgttctggcattcgacgcaggtttctgggttcgactggcagctagaattgatctctgcaaatcagatgatgataaagcatgatttcacatatgtcgaaaattttactttctatggatgctgctagcttttatcttaattaatctaactctgcagttggttgctctcttttgccttctcagaaagattatgaagagct

SEQ ID NO: 280184 - DNA, 1161 bp, Zea mays
cacacttcgtacgcgtccggtcgctgtcggcgccgccgcctgtcctaatctcctctgagtccagcggccacctcctccaccgggagctccccgtaccataaccgcagtccgcagccattggaatttccgcttcatgcgtggatcctcgtagaccccgacccgcgtgcactcaatccctaggcggcggcctccggcgcgaggctagcgggcggcacccatggcgtccgtggcggagctcaaggagaagcacgccgcagctacggcgtcggtgaactccctgcgcgagcgcctccgccagcgccgggagacgctcctcgacaccgacgtggcgaggtactccaagtcgcaggggagggtgccggtgagcttcaaccctacggatctggtctgctgccgcacgctgcagggccatagcggaaaggtatattctctggattggacccctgaaaagaattggatagtcagtgcctctcaagatggaaggttaattgtgtggaatgcattgacaagccagaaaacacatgccataaagctgcattgcccatgggttatggcgtgtgcttttgcacccaatggccaatctgtcgcctgtggtggtcttgatagtgcgtgctctattttcaatctcaattctcaagcagacagagatgggaacatgccagtatcaagaattcttactggacacaagggctatgtctcatcatgtcaatatgtcccagatcaggaaacacgtcttattactagttcaggtgatcaaacatgtgttctttgggatgttactactggacagaggatatcaatatttggtggtgaattcccatcagggcatacagctgatgttcaaagtgtgtccatcaactcatcaaatacaaatatgtttgtctctggctcatgtgatacaactgtgaggctgtgggatatcagaattgcaagtcgagctgttcgaacctaccatggacatgaggatgatgttaacagtgtgaagtttttccctgatggccataggtttggtactggctcagatgatggcacatgtagattatttgatatgagaacagggcatcaacttcaggtgtacagtagggagcctgatagaaatagtaatgaactacctactgttacatctattgcattttcaatatcaggcaggctactttttgc

SEQ ID NO: 280185 - DNA, 555 bp, Zea mays
tttgcttcgctgcccctgccgcgtcgtcttctggaccgcttctccactccgcccagctcgcagtcgcagctcgctcaaagcagcacagcagcaagcagaaggaagaaaaagagcagcgagagccgagaagagaagcgcgccgccgctcgagctcatcccgccgccggacacaccgcatggccatgaggcacagggcgcggtcctcccccacctccccgctcaccccgtcctccagcgcaagaacaaacaagatacttggtttctctgtatctctcatcctcatcaatctggcttcaattatggagcgtgctgatgagaatctccttccagcagtttacaaggaagtcagtgcagccttcaatgctggtcctgcagatctgggatacctcacctttgtaatgaactttctgaagtcaatagcatctcccttggcaggtatccttgctctgcactatgatcggccaatagtgcttgcaatagggactgttttctgggccttatcaacaggggctgtcggtgttagccagcgttttgggcaggttgcattctggagag

SEQ ID NO: 280186 - DNA, 575 bp, Zea mays
actgtttggattcacgcggcttgaccaccaccggaccgggctggagctggaggcgtggcggcgccggcgcgtccatcaggaggagaaggggcagggatggtgctgggcggcggcatggcggcagcggccgtaggcggggacgacgccgtcgtcatgcagctgggcgccgccgagggcgaggagaccgtcgtcaccgtcaactgccccgaccagacaggcctgggctgcgacctctgccgcaccatcctcgagttcggcctccgcatcacccgcgccgacgtgtccacggacggccactggtgcttcgtggtgttctgggtcgtgccccgctcctcgtccatcaaggtccggtgggcgagcctcaagaaccggctcatgtccatgtgcccttcctcctactccatccccttcttctaccgggacgtgagccagccagagccagggcccttgcagttctacctcctcaagctcatgtcgccggaccgcaaaggattgctgcatgatgtgacgcacatactatcggatctggagcttataatccacagggtggaggtgtcgaccacacccgacggaag

SEQ ID NO: 280187 - DNA, 542 bp, Zea mays
  unsure (1)..(542): unsure at all n locations
tctgtttgcggacgcgtgggccagcaccgtaaccaccgacagggcacgcaccatgacgaggaccaccaccaccagcacgctgctgacagcggcgctgctctgcctcgcgctgccgctgctccccggggccacggccaataaggcggcgcggcggcggcagggcgacaacctggcgcgcctgcgcgggtcgccgtggccggccgagtcgtcggtgtcgctggcggtcgcagcgacggatgacagagcgtcccggcacgcggcgtcgccgcccacggggcgcagcaaggaggacgaccgcgttgacaagctgcccgggcagccgtcgggcgtggacttcgagcagtacgccgggtacgtgacggtggacgccgcggccgggcgcgcgctcttctactacctgaccgaggccgtcggcggcggcgcggcggccaagccactcctcctctggctcaacggaggccccgggtgctcgtcgctggggtacggcgccatggaggagctgggcccttcccggtgaagagcgacnngcagacgctgtaccg

SEQ ID NO: 280188 - DNA, 400 bp, Zea mays
tcggagaaaccggaaggaggggagggataattaaggagcaggaggggcgactgaagccccttcgcgaccaagcgccgaccaccatctacgtcgccggagcccctcttcgacagcaacccgggcgccgcggtgctagccgaggccctgcgtggcgccatcggtgcaaagccccggcgtgcgcccaacgacaagcattactagagggaattattaagagcgatttcagggatgattgtttgtacataggatgactgaacgaatcaatcaaaggcagaggggggaaaagagttagcacatagcaaaatccagcaatacattcaccattgtgaagaacggatggatggatctgcacctagtacggttcaactcccatctgatatgatggaaatggttagtttat

SEQ ID NO: 280189 - DNA, 445 bp, Zea mays
tcaagactagcagagagaacataatccaaagatgggctggagaccacacgttgggtctgcgtcatcatccgcactagtgcttcagttcctcgtgctgctgctgcccctgcccctgcccctgctgtccgccgatgcatcgtcaagccaaacgacgacgacgatctacgtcgtgtacatgggcgagaagaagcacgacgatccttccgtcgtcatggcgtcgcaccatgccgcgctgacctccgttcttgggaggtagcaaggatgaagccctccgttcgatagtctacagctacaagcacggattctctggtttcgcggcgaagctcacccagccccaagcggaggagcttacaaaataccctggagtacgtgagcgtgaagccaaacgcgtaccaccacgtgcacacgacccggagctgggattttcttggcatgagctaccggc

SEQ ID NO: 280190 - DNA, 510 bp, Zea mays
gtctgccggccccggggcggtgctgcggctccccggggcgactctctcgggggcagtccccgcggggacgctcgggaacctgacggcgctccacacgctcagcctccgcctcaacgggctctccggcgcgctcccggccgacctcgcctccgccgccgcgcttcggaacgtcttcctcaacgggaacaggctgtccggcgggttcccgcaggcgattctcgcgctcccggcgctcgtcaggctctcgctcggcgggaacgacctgtcggggcccatccctgcggagctcggcagcctcacgcacctcagggtccttctcctggagaacaatcgcttttccggcgagatttcggatgtcaagctaccgccgctgcagcagttcaatgtctcgtttaaccagctgaacggatccatgccggcttcacttcggtcgcagcccggcttccggttcctggggaccggcttgtgcggggggaccttggggccttgccctgcgaggtttccccttcc

SEQ ID NO: 280191 - DNA, 779 bp, Zea mays
  unsure (1)..(779): unsure at all n locations
ggatccgatgagatgcgggggtgctctcgcagtcggacctggtagcaggcatggctgaagcggccacttcttcgtcttcgtccggatccttcgccccgcgccgactccatgacgccggtgtcgtcagggaatcgctcccgtacagtgttctcgctgcacccccgccgtcgactctgtctccggtgcaggtgcacagttgcgggtatccggctgcggcggtggagggaagattaaccccgcggtgcttttcatcatcgtgattctcgcataagtgttcttcatctccgggctgctccaccttctcgtgcgcgtcctgtcgaagaagcagcaccgccgcggcggcccaagggacacggcgtcggcggcggcgccgaggactggagtggaggcaggcggggttgacgtggcgttgcagcgccagctgcagcagctgttccacctccacgactccgggctggaccaggccttcatcgacgcgctgccggtcttcgcgtaccgggatatcgtcgtgggcggcggcggcgacggggacaaagagccgttcgactgcgcggtgtgtctgtgcgagttcgatgccgaggaccggctccgtctgctgccgctgtgcgggcacgccttccacctcaattgcatcgacacgtggctgctgtccaactcgacctgcccgctctgcgcggggttctcttcatccncgggctcatgggcgagggcaaccccatgtttgatttcgaggagagactggagggagggcngttgtccgaggactgtgacgacggatt

SEQ ID NO: 280192 - DNA, 695 bp, Zea mays
  unsure (1)..(695): unsure at all n locations
ccagcacagtcccaggtgggggggttagatttagtggaacgtttaacacaagcgttactgaggcatggaataatatcagcctactccagcaaacagcattaggacctcaaggcatagatgatctcgacacgctgcaaaaacgcggcgaagaggtgctggaacggctacagcatggcgcggaccgaaggctaccgagagctgatgaccaggcgcagtcgagttcttgtgtagaactgcagagggacaggcgcaagaagcggaaggccccggacgtccagcagatgatggagacctatttgaatttcaggatgaagcaagctcacgtcaaagaacaaagagcgaaggacgctggccagttcacgatttcaggctgtatcaaggctctgcacaccatggccgatgtgtcagacgaggtcaaggtgttagcctctgatgttttcaaggacgctgagaacagggagatctttctctcctatgaacccaggctgcgcagcttgtggctgaagagggaagttggcaagctactctcctgatagtggtgttttgtttgttacctgtgtcagtgagtcagtctgacattcgattctggagggagctattgaaggtctaggcttcattcacaaactctattaaaccatctccgtcagtttaagagaccccaaaaaaaaaattaaaaaaaaaaaaaaaaaanaaaa

SEQ ID NO: 280193 - DNA, 575 bp, Zea mays
ccaaacttcaaaaatgatgggaatccttttaataccagcatagctccctctaccctaccctcttcaacacctacaggctctcgaccaacacaggcaccatcgtcttcttcatccccttcaggatctccgccaccatctagtgcagcatcaaactcttctagtggatctactgctcgaaatagcaactctccatcatccaagaagaacaagtcttcacccctcagaactgttggatatgttcttcttgctattgtactattcatagttctagtgctgttggtaatcttttgcctgtccaagtatcaagaaagacagtctagacgtgattattccacgtctcaattaggtagggtgcaccagagggttgaggagccaaaaagcaagcacgcttcggtgcagtctaaacatgaagccaaaaaaggttcatctgaggttcctgaaagaaagaagccccgagaaataaatttagctgtaccagttgccattgagaagcctcctgaaaagagaaaagagcgtgtaattaatttggaacgaacagaatcagagatctttgctgcagcaccacctccacctcc

SEQ ID NO: 280194 - DNA, 528 bp, Zea mays
cggacgcgtggcgctagcgaaaaagcatccgcccacctcccctcgtctctctcgcgctccgccgcagcgcaaaactgtctggtgatgacgaacgccgccggtacggcccctcacccgactccgccgacgccgctccaacaacaacagcatcagccacccaaggaccagcagcagaaggcgctggccttgaacgcattccgcctgaaggggatcggcgaccgcatcaggttccacctgaagggcatgaccgtgcccccagtcgccgagttggcccacctcatctacgcgttcgccagagggattgacttcgcggtctcagctggtgatattcctctgacagccggtgacatacccgagattctgaaaaaggtatatgagctgaggaaagaaacaattatacaatcttcgcttatgatactagcgatctcttgcaagaatgcttgctccaataaatggtttcaacctgcagattccagagacattcttagaatggtcaatgagctctctggcaacttctgcacgtccaca

SEQ ID NO: 280195 - DNA, 785 bp, Zea mays
attggatgtggtttggtgttctttcagcaggtcactggtcaacctagcgttctatactatgctgctacaatttttcagagtgctggattctctggggcatctgatgccactcgtgtgtcaattcttcttggcgtactgaagctaatcatgaccggagtagcagtccttgtggtcgacagacttggcaggagaccattgcttattggaggtgtcagtggaattactgttgccttatttttgctgtcctcctactacactttactgaaagatgcctcctatgtggctgtaatagcgcttctactatatgttggttgttatcagctctcatttggtcctattggctggcttatgatctcagaggttttcccgctgaggctgcgagggcgtggactgggcgttgctgttcttgtcaattttgcgtccaacgctctggtcacctttgctttctctccactggaggatttgattggaacgggagcgctcttctctggattcggggtgattgcagtggcatctcttgcattcatattctggatcgtccctgagacaaaaggactcaccctggaagagattgaagcgagtttgtagttgactgatccagacgtcacgttcttccgtcctagtttcactgaactgaagggacttctggtatccttctgtagtttgctgccgtagttagccttctataaacgttctacaagctgttgtagcaataatacttctttccttccgggtataaaccgagatggtcggctgctgcaaagtgtgttctttaccgcagttcc

SEQ ID NO: 280196 - DNA, 520 bp, Zea mays
tctgacgcgtgggcgggacacccgggcgcgtgcacgggagacgggagtatggacaagagcgcggtggcggcatacgacgtcgagcggggcgactacgaggaggagcacgaacggagagggacggtatggacggcgacggcgcacattgtgacggcggtgatcggctccggcgtgctggcgctggcctggagcgtggcgcagctgggctgggtcgcggggaccctcgcactcgccggcttcgcctgcgtcacctactacacctccacgcttctcgccaacgcctaccgcgcgccgcaccccgtcaccggcgacaggaaccgcacctacatggacgccgtcagatcgtacctcagtcccagggaggtgttcatgtgcgggatcgcgcagtacgtgaacctgtggggcaccatggttgggtacaccatcacggcgaccataagcatggccgcgatcaggcagtccaactgcttccgccggagcggcgccggcgcgcaatgcgacgcgccggggaccgtgctta

SEQ ID NO: 280197 - DNA, 478 bp, Zea mays
cccacgcgtccgcccacgcgtccgcccacgcgtccgcccacgcgtccgctcctctctttccccggcacctgtcacgggaggaggatggacaagagcggcggcgaggcggcggcggcggcagcagcagcagacgacgtcgagcggcgggggggcgactacgagcaagacgagcacgagcggagagggacggtgtggacggcgacggcgcacattgtgacggcggtgatcggctccggcgtgctggcgctggcctggagcgtggcgcagctgggctgggtcgcgggggcccctcgcgctcgccggcttcgcgtgcgtcacctactacacctccacgctgctcgccggcgcctaccgcgcgccgcaccccgtcaccggccacaggaaccgcacctacatggacgccgtcagatcgtacctcagtcccccggcgccgttcatgtgcgggggtccgccatacgtgaacctgggggggaccatg

SEQ ID NO: 280198 - DNA, 974 bp, Zea mays
gtgttttcttactctaattatacatatacgttcggatggagatggaatcaccacccctgacggttgaagcgaccgcttttaccgagaaaatgatggacatgactttggaggatataatcaagatgtgaaagaaaaagaatcctggaggcaagaaaccccctaggcggccggtaaactctaagtctgaaggtttagggttttcatgctctcgactctgatagctaactcaggaacgaaccaatggtaacaattttcttcatttaatggtggattaaatgaaactatcttcggtctttggtacttgctcaacatctacaataagtaggtcagtggaacatatgtcctgtcaccgttagattgggcgatcgaaccatggtacatcagtcaccttctttaatgattttttgttctacttactaatctgctgctttactcttccccggtgtttgtactgacctttctaggaaatcttgcagaactgatattcaatgtaaaatattcagtgtgatagaaaaaagaaggttagtcgagtatgatctttatttcaatctgccaatgctcttggtaattccagtttgcctaatagtcaacttgttttttttgtaatgttcgagcattcgctgaaattgctgatcgtattcaaaattgttgctaaattgacgattaacccttgtttccatggatagcgagaggtgtgacgtggtatgtttatagctattgtgcagtatacaccttgcttacaggttgccacaactccgccggttggatccactaaacttccaatgtgtcctgtttgcattggtgtgcttacagttttgtatttttgtttcttagggcccacgccaccatgatgtcacatttcaattcattttgtgacctctgatgaagagatttaaacacatatgttctatcctatccatagttttaacttcaaatatcgttctgtttaatgccccaacaacatatatttttcc

SEQ ID NO: 280199 - DNA, 602 bp, Zea mays
  unsure (1)..(602): unsure at all n locations
gtagtatatattttaatcttctctgtatgagcttaatatacttttatttagcttcttgcaagcttgaatttcctggtgctcaaatgccaccttctacttttgtagtctctgctcggaactgtgttttcttactctaattatacatatacgttcatatagagatggaatcnnccacccccacggttgaagcgaccgcttttaccgagaaaatgatggacatgactttggaggatataatcaagatgtgaaagaaaaagaatcctggaggcaagaaaccccctaggcggccggtaaactctaaggtctagaactctggatgtgtggtggtgttgaaattagttttgtgtataactgttccaacttcaaatagcttcgttttaggtgctatgtttgggaataaattttccagttaaaagtacaggacgtccacgatggactttcttggttttccaaggctcagttacttgctgcgatatattcctttggtgaagttttgccgtgcaccatgtgtgtatcttcaagattaaactaaattttgcattattcatcggttttcttaattcttgtagttgaatagctttaacctgaaacaatacaccagt

SEQ ID NO: 280200 - DNA, 425 bp, Zea mays
aatatcctgctccagggaaggagtttcatgccgcagccgcagccgcagcagacaagagcagacgccatcgcccgcagccgccgcccccggagaatggtgcgggccggaccgcgacgggcgaaggagggcgccgcggcccccggcggcccccgccgccgctgatagtagtctacctgctgctaaccagccatctgaaggcacagtggtcgcacgcgaggggcccggattgattgggtgataggcggcgggcgcagatccaccgaccccctcgtcgtgcgcctgtgtctctggttccggtccgtgtccccttggccgcttggtggaggccggaggcgtggtcggtgcgtttggagtttgggtatggcgggtggcggccagggggatcgcgtgggtgtcgggggagcccagcagttcgtggaccggag

SEQ ID NO: 280201 - DNA, 668 bp, Zea mays
cccacgcgtccggcttgaggcagggtttgtttatttccgccctgggctaccagcagaaaaagcgccgggatcaacagcatcaggcttttttgcaacattatttgcttgttgcagagaggaagtcccgcgtcctccacctcctcctcaggccgaagtgaagtaccttacctggcatagatcaatgtcttcactttcttcatcatctagaattcctcttgggacaacatcgaaggaagacactgacggtctcaatggaaatatctttggtggtgtatacatgaattcaggcagtcatgcctccacactggacaggttgtatgcatgggagagaaagctttatgatgaagtcaaggcaagctgtgtagtttgcaggcaatatgatgagaaatgtaggcagctaagacaccaggaatccagaggagaaagccaaatgagtattgacaaaacccgtgctgttgtgaaggatttgcactccagaattttagtggccattcagagaatcgacatgatttcgaagaacatagaggatcttagagacaaagagcttcaaccacaactagaggcattaattggcagtttgactcgcatgtgggcaacgatgcttgagtgtcaccggcatcaacacgatatcattaaactagtatccagcactcgcaacatgaagacct

SEQ ID NO: 280202 - DNA, 551 bp, Zea mays
ccagttccacacttacatggaggtttatttaaaagagccggcggtggccggcagccaaaacccacgtcggatttcgccgccgccgccaggagctaggggacaaggcaacgccggcaggtgcaacatttatgcgtgtaccgcccggcagccacgcgtacacttctgccgcagagctaaacgcgccactccgcggcaagctgatctgctgctcccaagtcccaccagccaccgcaccgagtgccaatggcgactgcagcgacttctacgccggcggcgtggcagtctactctggtctactctggtctacgccatgcagggacctgcccgtgcttctcgcccagccccgctcgctccccgtcatcgtcacctacaggccgaattgggagggaggccagtacgcaggcgaagatgagccacggtttgaggcgcttctactggcaatggagctgggagctggatatgtcgatgtcgagttcaaggtcgccgacaaatttatgaagtatttgtctgggaagaaacctcaaacttgtagctcatcattttagcatacg

SEQ ID NO: 280203 - DNA, 1012 bp, Zea mays
ttccacgcgtccgcccacgcgtccggtcagtaatagcagaatgggtggccactacagctgtaaaagctgcagatgctgtcctttcaaactgttcatcaatttatgagaagaggtgtctactgcagcttcttgcagcagtggattttgctgatggtggcacttcatcatcttactttagccgaagatattggaagattaatctgtctgaaccatctttgtgtaaagatactgatgtgtacaactggaatgatttgatggatgatgcttctcttttaacattattagaaaaggacggtcaatgggagcaagctcgaacttgggcaagacatctggagtcaagtggcatagcttgggaatctactcttgatcatgtcactgaatcacaggcagaagccatggttgctgaatggaaggagtttctttgggatatcccacaagaacgtgcagccttgtggggtcactgtcaatctctctgtatgagatattctttccctcctttaacggctggattatttttccttaagcatgccgaagcagtaggagtagagtttccagcacacgtgcttcatcaaccatcattgctctctttacaatggctaagtggaactatgactaaatcctctccggtctatcctcttcatcttttgcgggaaattgagactagggtgtggctcctggctgttgagtcagagagtcaatccaaggttgatggtgaatttgccacttctgctgttgctcataacaaagctgttggaaacagtatcagtattatagaacatactgctgatatcatcacaaaaatagacagtaacatgagcttgccgcacatgaaaattacagaacggaatagcacacgggacagtttatcataccaacatgtgcaactctttgagtctaacagtgaagccatttcaacaacaatgaattacacgcgagcaaaagcgaagatgaaaacaaattccccacttaaacgaggtgtcaatgacaatattgaagtagagctaatgagctg

SEQ ID NO: 280204 - DNA, 507 bp, Zea mays
gggacagcggcagcagctcgtgggccggggggggttggctgctccgttttctccagagcagcgtccatccatggagaggacgaagaaaccatgccttggtgtcgtcgctctgcttctcttcctgctcctggcgtcggccgcccatggagctcagcctgcagatgccaaggacatagcagcaggtgacggcgacggcgagagggccacggtgaggacagggcacgggcacggctacagcagcagccacagcggcgggcacccgagcggcggcacgcccgagcagggcggcgcaggggtcgtcgatccccgtaacctcaacgccagaagccaccaccgccgtggcgcggcgaccagggcaaatgtatactcttcttggctcgtctgcacgctcgtcgcaggaggtgttatgctgctgctgtttgaggtactagctgggagatgacgtgtgatgcatgtacaaatctagggggtgtttggttgctcctgctaaagtttagctcgggtcac

SEQ ID NO: 280205 - DNA, 877 bp, Zea mays
cccatgcgtccgccgacgcccaccctcccacgatccccacatcgctctctccctcgcccaccagcccttcccgtcctcgatgcgctctgcaacttccaccctcgccgcgacgagctcggccggccgagctccgcgccaacctccagcttgatctcctcgccatgagccttgccaacctctcgcgccgagctacgcgtttccccgcagatctcctcaccatgatctccttgccatgatctttccctcgctctgccatctgcccccaaattcccctccccgctcgctcgcgtcgcgatagcaagcaacgcgcaggtgctgaaactcgtgtactgttgatggatgatgactgttcccatggatagtgctagcgcagccccatcctctgcgcgggaccttgccatggatagtgctagcactagcatgaagcactttcagttttataataattgaaaaaaacctggcgcctgggctcatatttatgcaatagggaaatcacatggttgcttatatttcctgttttctgtgatgagactggtgatgtgaagatatatcaattcaagcacacatagctttaaccttcataatttcttcaccagttataacagttttcatttttgagataccacatgtcttttaaacagcataacttccttttacccaattattggtttacacaactaatttttacatttgcttctattactaaacttaaatttcacactcagccttgtgttaactaccttgaggtattatggtttatttctcgcattaggtattcttctgagtactggcataaggtcatttttttcattaggaactttctgagaggcttcttttacatacaaacctgaagagttgaggacattcctgagcctgc

SEQ ID NO: 280206 - DNA, 612 bp, Zea mays
caaaaagaggcgtttgtgcggattcttgagagtgataagaaagaagcatctggtggttcaattgctcgccttccgttgcttgctcacctgggtgttgagtttcctctggaaccggagccttgggtgtttcttcaaacgcacattctctctgattatgcgaataatgaggggcacgagttgactatatgcatcctgaaccggctatatcatgaggcagagcaggatcacgatttcctttcatctagaactgctacatcagtttacgaatcctttcttctaaacatagctgaaaatcttcgagacatgtttccagcttcagataagtcacttggcaaattgctttgtgagataccatacttaccagaaggtgtgctgaaactgcttgaaagtttatgttctcctggaagtaatgagaggcaggacaaggatattcagagtggtgatagggtaactcaaggtctcagtgctgtctggaaccttatcatgctaagaccttcaaatcgggacagatgtctggagattgctttgcagagttcaactcatcatctagaggaggtccgcatgaaggcaatacgttttggtggcacataagctatttcctatgacaagcat

SEQ ID NO: 280207 - DNA, 620 bp, Zea mays
aaggaatctgctttacactaaagcctgattttaagtttcttgaggttgcctatccatatgtagcaaagcgtctgttgacagatccaaaccctgctcttcgtgaaacgcctgatttcaggtgctatccatggatggggcattccagtggaaacgactagaaaaccttatagttcttgccaaggagaatgtgtccaagatgagtagcaaccccgcactgaaaaagaatagtttgcaagctgtaagaaatcgacagttggagagcaaacttgatctcactgaaacaataaaagatggagcacggatgttccttatcgatgctggtatcaggagacaacttatactggctttcaccgaagactccagattgcacgtagaagagcttattgatgtatacagactggttgaagatcaaatagatatgccttcagttgccgtcgaggttcttcaagatttaccatctgttgcgcgtgatttcatgctttcctggagtgattccatcctgtcagatcgccagtactaacgatcttttacaactagaagagaaagcaagcagagtgaatagggccctgcatggctatggtatctcgatataatctatacaagaaaaatggcttgacaag

SEQ ID NO: 280208 - DNA, 550 bp, Zea mays
  unsure (1)..(550): unsure at all n locations
gaaaacagaancccatcagtgcctgagcgtattttaaaatggtgcattatatggacatgacggcatgggaccacatgtcaagtttgcccaattctttgttcgaaatgcccagttgctagagttaatgaagttcagaatctttagaaactaccactgtgaacctgggaaaaccaaggcatggattgaggatcagcaaaggcaactgcaagtcaggagcatgacttcccgacctgtgaagtttaagtttgtacatgattctagatataatcaggatgtttactgtggtgaggatatcagtgacctgtcagagcacatccacgatgacccatttgatcaatggtttgaatcagagaaggaagccccccggcatgctgaaggaaaagaagatgctatagtttggaactccagccaaaggcttgattcatttgatcaaagctgaataagaacctcgtcctgaacttttatttaattcgttatgtttgtgtgctttcagttgataacatcacattttctgttttgatgcttcagtaccacatcatattgttccctt

SEQ ID NO: 280209 - DNA, 585 bp, Zea mays
  unsure (1)..(585): unsure at all n locations
ccggcagccgagagaaacgccgccgcccgctcgccccgtgcactgctcctccgccttagcccgtagccaccagatccttggcgcaccagccctccatcgcagtcctggttaggctaggggatgtcaaatctcgattccgcgacgccggcggctgcagtggcggagatagggacggcggagcgggactctaccaccgcttctgtttcagctttaaatgggacacatagatgcaagaagaagaagataaagaagaatacgactcgggagcagcaagagttacaacttgatttggattcaacattgacagcagaggcggagggacaagtagaggcaaagggaaacgaggtggaggagcaggatgccactgatgctgttgcttctggtattttgatggaggggacagcaaaatattatgaggaggactccaaggtgaaggtcagtctgatgcccgagaaggaagccaacaccactgttgtttcagtttctgagagtacaccaaaacacatgatgaggaggaaaaagaagaacatgattcangggcaactagattctgcaaggcatcatctagtgttgtttcatggatat

SEQ ID NO: 280210 - DNA, 1087 bp, Zea mays
gggatttacaacttattcgggacatccctgatgaaatcaaggatgcgtcacgtatggtgatcaatgtagaattcgtcgggttttggctgacttcttgctaagcatggtgcggtctgctccatccgagaatggttgggtagaaatacaagtcagaccaaatgtaaaacagaattctgatggaacaaatacagaacttttcatattcaggtttgcctgccctggtgagggcctccctgctgacgtcgtccaggatatgttcagcaattcccaatggtcaacacaagaaggcgtaggactaagcacatgcaggaagatcctcaaattgatgggtggcgaggtccaatacatcagagagtcagagcggagtttcttcctcatcgtcctcgagcagccccaacctcgtccagcagctggtagagaaatcgtctgatatgttaagatccgtgctgaccccacctaactttctcggccgattacataacttagccccctgataagagggtgcctaatttacgagaagcctggaaacaaatcaaagctgccatggcaattcaatgactgaagtgttgttgatgaggctgttttcagtgcaccgctatccatggccatgctgtggtttcaagaccagagttggcggatagttacgtacacaggcggcaaatgtgtctcttagccgctgtttaagtgcaccgctgtaagtttgggtgtccatgtccatgctgtggtttcaagatcagagtccatggcggatagttatgtacacaagcgacaaacgtggttcttagcttaggttcatgaccagttccacgtagtacatatagcttatatgtatatatacaatctattttttactatgcataaggagttgtttcagcttacacggttgtatgttatagtcctttctaggtctactacatcctaatctagatctggttcctctggaatgttggcaccaccgctctgtattttgcggcgaaggtttgagtttggcctacctcggtttatttcattctcagaccttaatgtaaaagctttgacagttgacactgggtgtgtcctttgtagagaaagaaaacctttttttttt

SEQ ID NO: 280211 - DNA, 540 bp, Zea mays
cggcttgttggcgaggacttctcgctctcggcaatgtcataagtgctcttggagatgagaaaaaaagaaaagaaggtgctcacgttccttatcgggacagcaagctcacccgtcttttgcaggactccctaggtggaaatagtaagactgtcatgatagcttgcataagtccagcagatattaatgctgaagagacattaaacactttgaaatatgctaaccgggcacgtaatatccaaaacaagccgattgtcaatagaaatcctatcgctgatgagatgaaaagaatgcgccagcagattgaatacttgcaggcagagcttgtttcggctcgaggaggagccacatcagatgatgttcagggtctcagagagaggatttcatggcttgaacaaacgaatgaagacctctgcagggaactatatgatagtcgcaaccagtctcaaaatgatccatgtgaacctgaaatacaaaggactttaaacggctttaccaaaagcgaagggctcaaaagaagcttgcaaagtacagatccatttg

SEQ ID NO: 280212 - DNA, 691 bp, Zea mays
  unsure (1)..(691): unsure at all n locations
gactcntactgccctttctcttgctgcacttgctgaggctgctgcaccatatggtatagaaagttttgatactgtattgaaacctctgtggaagggtatcagatctcaccgtgggaaggtccttgctgccttcctaaaggccattggtttcatcatccctcttatggatgctctgtatgctagctactacacaaaggaggtgatgcaggtcctcattagggagttccagtctccagatgaagaaatgaagaaaattgttctcaaggtggtgaaacagtgtgtcagtacagagggtgtggaggctgattatatccggaatgacatccttccagatttcttcaagcacttctgggtgaggagaatggctctagatcgcaggaactataagcagcttgtggaaactacagttgagatggcaaacaaggttggagttgctgatattgttgggagggttgttgaggatctgaaagatgaaagtgagccctacagaagaatggtgatggaaacaatcgagaaggtggtagccaacttgggtgcatcagatattgatgctcgtctggaggagctgcttattgatggtatcttgtatgctttccaagagcagactagtgatgacgcaaatgttatgctaaatggttttggagctgtgggtaatgcacttggacagagagttaagccctaccttcctcag

SEQ ID NO: 280213 - DNA, 550 bp, Zea mays
  unsure (1)..(550): unsure at all n locations
ggtagagttacagggaggccggaatctttcgatcgaggacaccgccgtcgccgtcgccatcgtcgtctcttcccgcagaggcgggctcaaatctccgtggtggcggccgcggaggaaggcgccacttacggcgcaagagtggtgcgacctgtgcacaccgcacgggaagcttcaggacggcggagtgaagcttctgaagaaagttcggagcggagggattgaaccgagtatcagagcgcaagtctggccgctcctcctgggagtttatagccctgacaggtctgaagcacaaagagatgtggtcaaggcccagaacaggaagggatatttgctattgaggaaacattgcctgcgtacattagcatacatcatggaagagagcaagcggtcaactaaaacagttaaagtcaaccatgaagggagcaatagttctgaaaaagagcangaagtgcaagatgacacttctgaaacaaagccagagcagatgaatggaaaccagtcttcatctagctcctctgatgaggaagggagtgaaagaagtgtgggactc

SEQ ID NO: 280214 - DNA, 1510 bp, Zea mays
ttggaacaccgtctttgccgtcggggtcacggccgccgcgggcctcgtgctcgtcgccatcgtcgtctcttcccgcagaggcgggctcaaatctccgtggtggcggcggcggaggaaggcgccacttacggcgcaagagtggtgcgacctgttcacaccgcaggggaagcttcaggacggcggagtgaagcttctgaagaaagttcggagcggagggattgaaccgagtatcagagcgcaagtctggccgttccttctgggagtttatagccttgacagttctgaagcacaaagagatgtggtcaaggcccagaacaggaagggatatttgttattgaggaaacattgcctgcgtaaattagcatacatcatggaagagagcaagcagtcaactaaaacagttaaagtcaaccatgaagggagcaatagttctgaaaaaggtgatgaatctggttgtgttagtccttttgaatctgaagatgttcttgaaaattctggcatgggagaggctacaactgaggaaggaattccatgcctcactacagagcaagaagtgcaggatgacacttctgaaacaaagccagagcagatgaatggaaaccagtcttcatctagctcctctgatgaggaagggagtgaaagaagtgttgtgactcaagtagaagcatctcataagaacttggcctcagtttgtgagtcctcatttgaggatggacaagaaagcatcccaagatattcgaacacaggaggaaatatggatgatgttgtgttatctaaggctgcccgccctgtgaagtctgcacgggcaactgaggattttgagacatggcaacggattatccgtttggacgcagtccgtgctaacgacgaatggatttcctactctccatcccaagctgcagtttccaaggagagggcaattgaatctgctaaagctgtttttctcaaagactatgaccacttagaaccatatcggatccatcatgcgtcacgccttgttgctattcttgaggcctacgcaatatatgaccaagaaattggatattgtcaaggaatgagtgacctgcttgcgcctctccttgctgttctagaggacgatgacgaggccttctggtgctttgctggttttatgaggaaagcccgccacaactttaggcttgatgaagtgggtatacgccggcaactcaatatggttgccaggataatcaaatacaaggacttccatctctacagacatttggagatgctccaagctgaagactgctttttcgtttacagaatggtggtcgtgatgttccggagggaactcaccttcgagcagaccctatgtctctgggaggtgatgtgggctgatcaggcagcaaaccgcgccgagatcgcaaactcatcctggcgtaaattgcagttgggagcgcctccaacaattgaatctgttactgtatgcgattgctgctagtgtgttgcagaagcggaaactgataatagaaagctacaacagcatggatgagat

SEQ ID NO: 280215 - DNA, 341 bp, Zea mays
catccagccaaccacctctcgttggaacctgcgactgcgagttccacctccgcccgcccgctcgcccacgctcacgcccggaataggcagttgcagcagccagccagccccgcgcgccccgccatcgtgggaggaggcccatgccgcgggggcagcagggggaagggtagaatgggcaacgtcacgtcgtcggtggcggcgcggctggccttcttcccgccggagccggccacgtacggcgtcgagcccgcggccgagaacggcgccctgctgcggatgacgggggtgttgccggacgcgggcgtcgaggtgcgcgcgctgcccaccagggccggcacgcg

SEQ ID NO: 280216 - DNA, 447 bp, Zea mays
cctggtgaccgcggacgcgagggcacggcgcagcgcccgggtctttctcagccaccccactccgcatctccagaaaattccgttattttactcccagtatttagcctcgacgattgctcgggactctctttacaggtcctatttcgcggtttcctcatcctcctaatcctaacctccttccctgttttattcttcctcgtcgagcctgattcccctgccgccaccgcggccagcgccgccctcgccgccggtcgccaccgccgccgccaccgtccactcctcgccctcacctaatctcactcggagggagaaaaaaaaaacctcgccctcgccgccgggttgagttgaatctgtggtcgctgggttgaattgaatcgatttagatccggttatccctaggatcggtgcccggggactggaaggtggaagctttggttgggtatctct

SEQ ID NO: 280217 - DNA, 420 bp, Zea mays
acaggggaaggggggattttttaagaagaaccctcatcttctctcacagggcatcacatcacaggcgacgcgggcacacgggacacacacacacaccagcgctgccgggggatcagacggcaaagtcggcgccgcggcgcatccggctgcgcctaccgggcctatgcaacgccgcccgcgcgtcccctgacgggaggaacgccggggcctccgggccgacgctgcactccggcagcggcgcggggtaccggaggcggtcgtagcagtagccgtacgtcatgtagcgcgcccggaacgcctccatcgtcgaacgccgggcgggcggcattgtggcagcagcgtggccgtacgcgtcgttgtcgccgccagacgttgagcacgccgcggtggggccggccgcgcagccgcggagcgcgaggt

SEQ ID NO: 280218 - DNA, 641 bp, Zea mays
  unsure (1)..(641): unsure at all n locations
cggcccggaaggcccgggttgatttacgcgcccgcccacgcgtctgcactccctgcggtgcgcccttcgctaccccatccccagtaccgccgcctctttatccacctccggcctccgccgtctctcctcccaccatcgcactccaccgccgctccgctcagcgaccaccggtgaagacgagtggaacgacgcgtgggagaccgcatggcttccaggcgactcccccgcctcctccccagcgcccgccgcgccatgggagtctcccgcctcggcttcggagtccgccatcccggtcatctccgcccgaggtggatccagacactaaggccttcgtggcagacatggacgagcgctgggccgagcgccgcatcgcgtcgaggcggggccagcagcagcgcgcgtctcgcgcggcggaacgcggggagggcggcgtcgtggcgaggaagaaggcgcaagcggatgattacaggaccaggaagcagcgggtgcacgccgcgctttgggtgaaggagatcgagaagatggaggaagcgcgactcggcggtggnggaggtggcgctgacgatatcgacccgctgctcgactcgtgctcagatatctttgattctggcaacactgattttggtgattcaagacccaaa

SEQ ID NO: 280219 - DNA, 562 bp, Zea mays
cttcattaacttctgacgaacaaacattaactgatttgaaatcaatctcccagaggcattttctccgacgcgtgggttcttttgcagaggatgaagatcccatacccatatttgctcaaaaactgctagtaatgctaatggaacatggttatataaaagtctctgatattctacacaaagcaacagtatcccaatgctttgattttttgctaggagatctgtcaaatgcaaatgtaagcaatgtcaagctttgctttgccctggcatctgcacctgagatgaacacccatattctttctcagcttcaagttgttagaaggatagggaacctacttgagtttgtcgctgcaaaagacatggatgattttcttgaaccaaccctggagttttgcagagctttcattattcgtggcactggcagcaacagaagtggtgtcgccctctccgaaaacccagcacttcttgttgacagtgccttcagcatgagtattgctgttgatcaacaaacttgtgtcacggatatatgcgactttggtggcaacatgggtacttttcttgagct

SEQ ID NO: 280220 - DNA, 492 bp, Zea mays
tccacgcgtccggttccttccgaaagcaccgcgctcgcctacagttcacgacacctcgcaccgccgctcccacttccggcctcgccggtgcgtgcatgtgcgcgccagggacgccaattgagctcggctccagcacgcaatcggctgcagagtgagctcagagctcaccctctccctctgccgctgctccgctggcctcttgaattctgttcatggctcggggatcaagaccattaggccagactatttcaaagaaattttcagacatgagatactccaatatttcctggccatgccttctactgctatgttttggttcgatggcagatgcagagtacatgaagtacaaggatccaaagcaacctattaactctagaatcagggatcttatcggtaggatgacccttgctgaaaaaattggccaaatgacacagatagaacgcccggttgcatctgcaaatgtcatgaaacagcactttataggaagcatct

SEQ ID NO: 280221 - DNA, 528 bp, Zea mays
ttctcttctcacgcgtccgcccacgcgtccgtccatatccactctccaacttttacaaaggaatatggtgaagacttacttccttttgtgctggatgcattgagtgagatagcttttcatccaaagttttcttcatctcgtgttgagaaggagagaagagcaattctttctgagctccagatgatgaacacaatagagtatcgggttgattgccagttgttgcaacatctgcactcagaaaacaaactgagcaacagatttcctattggacttgaagagcaaatacataaatgggatcctgataagatccgcagatttcacgagcgttggtactaccctgcaaatgccactttatatctggtgggggaaattgatgatattcctagagctgtgcgggaaatagaggcggtatttgaacacactctttcagaaaatgaaggaaatcctgtaccgagcgcttatccatttggtgctatggcaagcccttttgcaccaaagctcccaggtggttttactttcaaacctaac

SEQ ID NO: 280222 - DNA, 555 bp, Zea mays
ttcattaagctcatctcgttatcagatgggaagatcaggacggctgttgacacaggttgcggggttgctagttggggagcttacttgctgaagagaaacatcatcgccatgtcatttgcgccgagagacacgcacgaagctcaggtgcaattcgcgctggaaagaggtgtccctgccatcattggtgtgatggcgaacagcggttgccttacccatctagggcgtttgatatggcacattgctcacgctgtctgattccttgggatgaacacgatggactgtaccttgctgaagtcgataggattctaaggccaggaggatactggatcctctcgggacctccgatcaattggaagacacaccacagggggtgggagaggacgaaggacgacctcaagcgggagcaggacaagatcgaggatgttgcgaggagcctttgctggaacaaggtggttgagaaggtggatctgtccatctggcagaagcccaagaatcaccttgagtgtgccaacattaagaagacatataagacacctcatatttgcaagagtgaca

SEQ ID NO: 280223 - DNA, 531 bp, Zea mays
gagcgataagctgccgagcgcgcccccgcgccggcctcccactggttcgctccacctcatgctccaaatctttattggtttccacgttgccccctcgccgtccccaaccatcgaccgcgccgcgcccgctgccgcctcccagctcgctctatataaacaccacgtacgcgccgaagcatctgcacagccacgtacgtacgaccggcttccggcaggtgagagaacagtgagaagcaggcgagcggtgacatggcggagggggagttcaagcccgcggcgatgcaggtggaggctcctgccgaggcggcggcggcgccgtccaagccgcggttcaggatgcccgtcgactccgacaacaaggccaccgagttctggctcttctccttcgcgaggccgcacatgagcgccttccacatgtcgtggttctccttcttctgctgcttcctctccaccttcgcggcgccgccgctgctcccgctcatccgggacacgctggggctcacggccacggacatcggcaacgccgggatc

SEQ ID NO: 280224 - DNA, 471 bp, Zea mays
acaggaggaatccaatgggaagcggtgcagatcgaccattcgcggtggcacgaacgacaacccgagaatggcggaaagaagcaggggaaggacaacgcaacgaagcccccctagctgcccaaggactacatccatgtctgggcatggcgtggcgagcaaggcatggcgaggcgatggactgtcacaacctcgtggagaggggagaagatctgctagcagatgaagccgctccaggatctcgcgccgagttgcaacaagtgatgctcgatgaaatcataaactatgtgtagaccttgcaatggcgaatcaagggatagttacacatcgaggcttttcggaatgctactcttctggctccctcccggctccagcagctgaagaatgtgaatgcacacacatgtcatatctatggtgacactgtcgggttcttagcaacaggcgatatttttgtgcgtgcaacgaatgtgcctt

SEQ ID NO: 280225 - DNA, 607 bp, Zea mays
ccacgcgtccgatcggccgcatggcgctttccgacacctaccgcatctggaagcgcggcgccgcgctccggaccgacatgacgctcgctggcttcgacggcttccgcatccagcgctcggaccagacgttcctcttcctcggtgacggcgccaggcccgaggatgccgggggcaaggagctgcactcgggctcgctaatagcgctggcgcacaaggataaggagactacggatgcgctggagggggcgggggcgcagcccacagagtctgaggtggcgcatgaggtagcgctcatgtccaagaccaacatgtaccgtccggggatcgacgtcacgcaggcagagctcgtgccgcacctgaattggcgccgccaagagaggacagaagccgtcgggcaatggaaagccaaggtgcatgacatgctgaatgtcctgggcaccgtgaagtctacgcgcgtgcctggggcgatgacagacgaggagctgtttgccatggatggggaggagaagaacggcacgggcgcagagcatgatgctgacttagacgaagcgttaacagtcgaagagaggaagcaacttgaatctgcgcttaggatggggaacaacca

SEQ ID NO: 280226 - DNA, 462 bp, Zea mays
ggggtctccacatcgtaaccactgaagacgaggcggcggacgagacggtgagcagaaccgcgcagcgaagcagcagcggcgacaagccctcgcgtcggtagaggcgccgtccgccgtccgccccctcaactccggtagccgctggccgctgcaggtcgagtcccgtcgagccgactcgcgcttcccgatctgggtggccgcggcgccggcatggcgcggttcgaggtgaacggcaagtcggtgcaaggcgtggacttgctgcggcggcgccactggccgtcgcgcctcgacttctggcccttccttgcactctatgcgctctggctgctgcttgctgtcccggcgctcgacttcactgacgctctcatcatgcttgccgcgctctacgctggtcacattctgacctgtctattcaccgactggttcgtcgatttccgtgccttcgtcgggtactctaaggtc

SEQ ID NO: 280227 - DNA, 594 bp, Zea mays
ttgatgtgaagtatggtctacacatgagccagttcacataaacccttcagacccaagcaggtaccagcagaatggcacgccagctaaagaaaggagtcaatgcactgtaatgcgaagaattcttcatgacatcctatgagataatggttttcttgaatgggctagctcaagttgtgcggtttggtgtcatggtgttgttcaaacttcgcagtggtgtgtgaaatagaagaatcccaattcccaagcatattatttgtcacgcttgtttgccggcaggtacaggggaaatacgacagcatcatcgtggaggtgaagagctactacatgtcgatgagcaggtacagggatgataaaaaaagaaaggtatatcttcacgtcgatgagcgggtacagggatgacaaaaaaagaaagggtgagattatgaaggtttatgccaatgatcaaataaaaacatgtgttgagtttccagagtgttctgtataggattgctggtcaaacatgagcttgtagtgagagaagaattgtgccctcttccctctggttctccctgattctcacagatgaacaatcttctacatgcaaatttctgtatg

SEQ ID NO: 280228 - DNA, 557 bp, Zea mays
gtccattgccttacgacatgattggtgagaccagaggagcacgagcgcaacctccgtcacccctaagatctcctcaccattgtggccatcctgcaagatcagtactcattatctattaagaaggttacggttagcttggtgtgtaagtgtgttggacaaatgaggtcccgtttttttactggatttatttgccttttcttttctgttttggatatttgaagtcttatttactagctattaatacattgtttttaagtcatcggccttgcaagcattgcctctttctttaaaattatctgatgactggtgaattctgttttgatcttttagattattggcattgaccttttatctcaaacgctgcgacccgtcattgttgaacttgcagaggataggcactggagagtttgacttgcgatatttgagtacatcccattgctggcgctccgagtatctgctgtttctgcaaagaggtcgtcttgactgatcgcaatgatgaagttctggagtgttgttgttatgatgaaggcagacccaagtattgaaagggatgatct

SEQ ID NO: 280229 - DNA, 501 bp, Zea mays
tccggggactcgggcaccactctccattcctgcatcccattcccatctcttcttcgcctcctccgcctcgccggcgtcaccgtccggccccgcctcttccccccgctcgaagctcgatctctcctcccgttctccgcccacgcaatccctgccaccgccgaatgcggaacactcgcctttggtgaccgactgacctaccctgcttctgccgggttagttgagtgtccgcgcctaccggaccccgcgccgcgtccggatctcgaatgcgccgccgccgccgtcgcgcgatctagcggctgcgcgctgccccgcaggagggtagagctccaggggcccggtgtggtcaggcggcggatatggcaacggaggcgtctacctctgcggcgggcgggatctgggtggaggggtatgtccgccgacaacatcaaggggctggtgctcgcgctctcctccagcttcttcatcggggccagcttcatcgtcaagaagaaagggcttaag

SEQ ID NO: 280230 - DNA, 614 bp, Zea mays
tgtgggatacaagcaagatgagtggtagaggagcaaggcagtggccttcaggtgcttcatatgatggagacctttgtggaggtttcattgacggaacaggcagtttcaaaggagttgatggatctgtatataaaggttcttggaggatgaatagaaagcatggaatgggcacaatggtttacgccaacgatgatacttacgaaggtttatggaatgagggcttgccagatggatttggtaaatatacatgggttgatggcaacatctacattggactttggaaatctggtaaaatgaatggcagaggagtgatgcaatggacaaatggcgatactcttgactgtaattggcttaatggactggctcatggaaaaggtttttgcaaatatgcatcaggagcatgttacattggtacatgggacagaggacttaaggatggacatggtatgttttatcaaccaggaagtaaaatgccttgtaaccctgaagtggctgagtgtgtaacagaccacgatgtttcaagttcttcaagctctggtaatgaaaatatcaatagtagcttattgtttttattccaaaaactttgcaacacatggagactacacagcattttc

SEQ ID NO: 280231 - DNA, 432 bp, Zea mays
agttgccatctctagtttttaaattctgttaccatttcgtgtgaacactgcaatgtttatcttatgttatcttacaggtatgtgagctttctagttgacagtatatgcatagagagggcctgtcaagatgcggtctgtataccatactcatcattgtttaaagctagccgcctctcattttaatttgaatgcaggtgcaggcaccgggtgtccaaggaggaaatatactccaagataagatagtaaaaactatacaaaggtgtagtttgtgttccatactacaaaatatattgtaggctataaaagactagatttcctacatagtctactccaaaagtggatttatattattcatgctctgtatatcctagaaaatgtattcttccttgaattgatgttcatagttcaatgaagtgatattttttcaatttc

SEQ ID NO: 280232 - DNA, 717 bp, Zea mays
atcagttgttaatgctttatcagagacacttgaagttactgtttggcgtgatgggaaggaacacagacaaagctattcgcgggggaaaccaaccactaggctaactagtagcacactgactggtgaaacaagctctcgtcaagggacgcgcatcagattttggcctgataaagatatatttaccaccacgatcgattttgacttcaatacaatctccagtcgcatacgggagcttgcctttctaaatcctgagctaacaataatcttgacaaaggaagaagggcacacagttcaacgcaacgaatattgttatgctggtggccttgttgaatatgttaaatggttgaatactgacaagaaacccctgcatgacccgattgcgttcagaaaggagttggatggtataacagtggatgtctcccttcaatggtcctctgattcctactctgatacagtgctaggatacgcaaacagtatccgcactattgatggtggtactcatattgatggtctaaaggcttcattgacgagaaccattaataaccttgcaaagaagtcgaagactattaaggataaggatattaccttgagtggggagcatgtaagagaaggaatgacatgcatcatttcagtgaaggtccctagtccagagtttgagggtcaaacgaagacaaggttggcgatatcagaagtacggagaatagttgagcagtctgt

SEQ ID NO: 280233 - DNA, 505 bp, Zea mays
cttcttcctcaacaccggcgcgaagatcccgtcggtcgggctcggttccgggcaggccgacatcgggctcgtcggcgacgccgtctatgccgccgtgaaggcaggttacaggcacattgactgtgctcaagcatacaacaacgagaaagaggtccgggtttggcctcaggagagtgctggacgagggcatagtcaagcgtgaagatctcttcatcacctccaagctttgggacattaaccatgcggcggaggacgtcccggttgcactgaacggcacactgaaggacttgcaaactgactacgtggatctctacctcaatgcattggcccgtgaggatgaagaaaggcgccggcttcggcccgcacgccgtcgtcccgtcagacatccccgcgacgtgggccgcgatggaggagctgtacgacgcccgggaaggcgcgcgccatcggcgtcagcaacttctcgagcaagaagctggctggccctgctggcccgggcgcgcgtgcg

SEQ ID NO: 280234 - DNA, 491 bp, Zea mays
cccacgcgtcctcccacgcgtacgcccacgcgtccgctattttatgtgaacaatttgttatctttattattgtggacgacatacattaggaacatcgggttactaggctactcaatgtttgaatcaagctttgctgtttcagtggcttgtagtttcctatcctttttttccaatggaagtgtgtagctgaaaatagctaaccaaccgcttcttgtttcaggtatgccgtcacaaaagccttttgcattgcctttgtcatgaccttcttctctgtattcgacgttcctgtcttttggccaatacttctctgttattggattgtgctttttgtcctgacaatgaagcgacaaattgtgcatatgatcaagtacaagtatgtcccattcagcataggaaagcagaggtatggcggaaagaaaggccctgccgccagtgcatctaaggagtaaagactgagggagggtgtgggaccctcaaagcagtgcatgtgc

SEQ ID NO: 280235 - DNA, 628 bp, Zea mays
  unsure (1)..(628): unsure at all n locations
cggtattccttggttttcccatgcgtcctttgcatccaagaagaacatcaatgacatggggggtggttacattggagngtgctttgcgtaatgtcacgcttgtgctctctattggtgagactattgaagaagtcagcgacagccagttcctggacacgactcactcccttgcagtcacgctccttggtgaggactctctaatgcaggtccatccaaatggcatcaggcacatcagggaagatggccgtgtcaatgagtggaggacgcctggaaagaaaactattacgaaggttggatcaaaccgtctccaggtggtaattgctcttagtggtggggaggtcatctattttgagatggatatgactggtcagctcatggaggtagagaagcaggacatgtctggtgatgttgcgggcctggccattgcaccggtccctgtggggaggcaaaggtccagatttcttgccggacgatcctatgataacaccattcgtatcctctcattggatcctgatgattgcctgcagcctctaagcgtccagagtgtatcatcggcaccagagtcactcctattcttggaggtccaggcatcagttggtggtgaggatggtgcagattatccagccaa

SEQ ID NO: 280236 - DNA, 465 bp, Zea mays
  unsure (1)..(465): unsure at all n locations
gcggacgcgngggctcaacaaccaccaccacctttacccccgctcgctcttggtaatggcggcggttctggcggtcctggtgtcggcgggggccgccacgtccatcacggccgcggcgctcaacacggacggtctcgcgctgctggcgctcaagttcgccgtctcagacgacccgggcggcgcgctgtccacgtggcgggacgcggacgccgacccctgcgcctggttcggcgtcacatgctccaccgccgccggccgcgtctccgccgtcgagctcgccaacgcctcgctggccgggtacctcccgtcggagctctcgctgctgtcggagctgcaggcgctgtcgctgccctacaaccggctctcggggcagatcccggcggccgtggccgcgctgcagcggcttggcccgctcgaccttgcgcacaacctgctgtcgggcccgggccccgccggggtggcgcg

SEQ ID NO: 280237 - DNA, 830 bp, Zea mays
ttcgaccgttctctgaggcaggcctacgtctcggccaacgggatctttgcggacaaggtgctggaggtgatcaacccggacgacgacttcgtgtgggtgcacgactaccacctcatggtgctccccaccttcctgcgcaagcgcttcgaccgcatcaagctcggctgcgtcctgcactcgccgttcccctcgtccgagatctacaagacgctccccgtgcgcgaggagcttctgcgcgccctgctcaactccgacctcatcggcttccacaccttcgactacgcgcgccacttcctctcctgctgcggccggatgctcgggctctcgtacgagtccaagcgggggcacatttgcctcgagtactacggcccgacggggagcatcaagatcctgcctgtgggggtgcacatggagcagctcaagacggtgctcgggttgccggagaccgaggccaaggtgtccgagctgatggagatgtactctggaaaggggagagtggtcatgctaggcgtcgacgacatggacatcttcaaggggatcagcctcaagctccttgccatggaggagcttctgcggcagcaccccgagtggcgggggaagctggtgctggtgcaggtggccaaccccgcgcgagggagggggaaggacgtcgccgaggtgcagaccgagacgtacgccatggtgcggcgcatcaactaggtgtacggtgagccagtgtactagccggtggtcctgatcgatgagcctctgcagttctacgagcgcgcggcctactacgtcatagccgaggtgtgcctggtgaccgcggtcagggacggcatgaacctgat

SEQ ID NO: 280238 - DNA, 482 bp, Zea mays
tttcgtggacgcgtgggcgagaagcatactatgtataggatatatgaatgaagcaagcagcagatgatatatatgattcagttgtgcacgcacacactcgatcttaattatggtgaagtgaaaagagagatatatggatccattcacgcaacttaatttagggaccggacggcggatcgcgactagctagcagctagtgccaagcctgagctccagatccacttcttcttgccggcctgcaagatgatgactgaggctactagggctgcttaatttgggtacctttgcatcatcatcttcaactcctcctttattgggtgatgatgatgccggcggaagccgccgcaggtcgtagaacggctgatggactagccgccttcgtttcgtcctccgccccgtcaccatgatctcttcctcttcttcttcctcctcctcctcctcaccgatgattgctatagtagtagcggcttttttgctccccg

SEQ ID NO: 280239 - DNA, 454 bp, Zea mays
gcggacgcgtgggaggggagccccgtgaagctgtccaagccggagcaggccggcagcgacagctccgtcgaggacggcggcgcgcagaaccagaagccgccgtcgccggtgaagggaaagaatgccaagccggtggagcctcccagggactacgtccatgtccgggccaggagagggcaggctaccgacagccacagcctcgcagagagggtgagaagggagaggatcagccagaggatgaaggtccttcaggacctggtgccaggatgcaacaaggtgatcggcaaggcgctgatgctcgacgagatcataaactacgtgcagtcgctgcaacggcaggtcgagttcctctccatgaagctcgcaaccgtcaacccactggacctgagcaacctgcccacgctcctacaaaaagatatgttccaggcctgcggcgcttcggcgagctcggtct

SEQ ID NO: 280240 - DNA, 609 bp, Zea mays
  unsure (1)..(609): unsure at all n locations
atgagattagccgctctttngcaacgatgatggcgaagcttctgtaattgtaggaaaagttgcaatcacaaaaaacccttgtctccatcctggtgatgtcagagtacttgaagctgtatatgaccctggattggatgctaggggtcttattgattgtgttgtatttcctcagagaggggaaaggcctcatccgaatgaatgctccgggggcgatttggatggcgacctcttctttattacttgggatgacaaactgattccggagaaggttgatgcacctatggactacactgcaacgaggccacgcataatggaccatgctgttacacttgaggaaattcagaagcacttcgtcagttacatgataaacgataccctcggtgccatctccaccgcccacttgatccacgcagaccgtgatccactgaaagctcgcagccccgagtgcgtccagctggccgctctgcactccatggcggtcgacttcgccaagacgggagctccagccgagatgcccctggcgctgaggccccgggagtttccggacttcatggaacggtgggagaggccaatgtacgtctccaacggcgtcctcggcaagctctaccg

SEQ ID NO: 280241 - DNA, 926 bp, Zea mays
  unsure (1)..(926): unsure at all n locations
tgattattaaaataaagtggacacggaaaggcgccttgtcaggcaaagagaagagctgaagataggattagcttctatctatattgcagagtttgctggtaccaggaaacacaaaagaaatacaatactcctatctatcacctgtctagatctccttctagaaagaaaccataggatgaatggtgggaccaccagcatagcatgagtatacaatgaaagcagatcataaccaccagcattatagctgcttttaaaaagtaagtgttactctgaaagtttctccttttcaaggtcacaaatgattggatttttttggttatataccatttgtttgcttgcattatagttgcttttttgtggtttgaatctaacaggattttcctacttttgttgcattggttgctntttttagaaaaaaacacagtaaaaatacgggcctctagtttataaacactccgcatgtagactagcgagatagtatatagattaaacaccagttaataaatgatattaggaagaagcttgtgtagcatcggtggccctatggggcatgctatgtcaacaatgcatcagtggccttgtcagttttattttgaccccctcaaggccttgcaaccatttcccaagccacagtatccaagagatggcagtgtcactcacagaagcagctgttcttagtatgtgatttaggaattcaatgaattatatctatgtatggttacacaagtcctatgctgacaatctgtaacatgtgtatgcttgtatttgaacctgaaacctgtgtaggctggtgtgagatctgtttgtggtatttttggtaacctgaaacctattttctatgttgtgtatgttgttttttggtaacctcaaacctgttgtgtatgttgtgcgtactactttgtagaaacctgaaatctgttttgtat

SEQ ID NO: 280242 - DNA, 491 bp, Zea mays
cgtcccgctccacgacggctccatccgcaccgcgctcgacaccggatgcggggtggcgagctggggcgcgtacctgctgtcgcgggacatcctggccatgtcgcccgcgccgcgggactctcacgaggcgcaggtgcagttcgcgctggagcgcggcgtgccggccatgatcggcgcgctcgcgtccaaccgcctcacctacccggcccgcgccttcgacatggcgcactgctcccgctgcctcatcccctggcaactctacgatggactgtacctgatcgaggtcgaccgggtgctgcgtcccggagggtactggatcctgtccgggccgccgatcaactggaacaagtactggaaggggtgggagcggaccaaggaggacctcaacgccgagcagcaggccatcgaggccgtcgccaggagcctctgctggaccaaggtcaaagaggccggcgacatcgccgtctggcagaagccatacaaccaccccg

SEQ ID NO: 280243 - DNA, 1019 bp, Zea mays
gttggatggaactctgaatagtggtgacttgcttgactgagctttttttcagttcttgctgcttctgatctactactgtatgagcttgttttcaggtgggctgccagggtgctggggaacagcgtcgaagcctgccggcacggccgcaaggaggtaggactgccaagccatgtcgccacattctcgtcaaagaacgaggctgcttcgcttggggatagaccgttggctagaccaaacagcttcctcaacatgctggggatcgggtcgacagccttcgagcaagggaatggccgcgagattgaggtttcagagtccaagggcggctcgtctactcggcatctgtgcaacatcagcctgccatttaccggatcacataaggaccaccagtgggcgggcccagcaatcagaatgtcactcccgagtttcaggcacgtctcgcttgctttgcgaatttcagcggacgtacagtggaccatcctgatcttctcaagtactcctgtcaagtagaatgcagggtgcgccctgtgaagcctgctaggatctggagtgcaagaaccacagagccccagcaggaaaaatccgacggcgaggtcagcagctccgggtccagcgtggcagccgacttggacgcccgaagccacagcatctcggtcctgttgtccaggcccatcttcgcgctcgagttcagctccctgaggatgcacgtcgacgctcccaggaccgttgttccgcaccgcgacgacaagaaagtcgggtactcgtccagcacttaaaacgtgatgaaggaaggagctgtgcctgtgcagtttctggttggaagcacaagaacccccgggagttttggccgcgtttgacccggttgcttgcgtgaattcgtgcagtttctggttgctttttactgcgcatcatattcgtttcttggttatttttttcttctctcccttggcggtattctttttcttgtttgtgaggaaatatgtcgggtatgcatagcatagcagagcacttgtttgattcaa

SEQ ID NO: 280244 - DNA, 403 bp, Zea mays
tttcttccaatctctgcacgagggaggactgccaagccatgtcgccacattctcgtcaaagaacgaggctgctccgctcggggatagaccgtcggctaggccaaacagcttcctcaacatgctggggatcgggtcgacagccttcgcgcaagggaatggcccccagattgaggcttcagagtccacgggcgggtcgcctactcggcatctgtgcaacatcagcctgccatttaccggtaacagtcttgttatccatttaggcactgcttgcttaccctctatatcatataatcgagcttaaataagttaaagcggcaaacaaacaacatagattattggacgagattatataatctagctacctagatttataggtggcaatagatcacgatccaaatgttat

SEQ ID NO: 280245 - DNA, 824 bp, Zea mays
tctgttctggaagctccaagcgttggcgaaaaaagtaagatatttctgcgaggcaaggaatccctcccccgcttctactctttcggttcgccggttcgccgtctcgcacacccacttcctacaccgccaccgagcactcgctcagtttcatacccatcctcgaagtcgcctctgtctagttcctgctcttccaccaccgcctgtgatgtatccccgaggcccggatgggggacgagatgcctcgtctcgccctatgcttgccactcccgccggcaacgacacgcgcgaggaggatgagatcaccaccgcggaggctcatgtggagaaagacgccgcgcggatggacgctgccctcctcatgcggactacgcccaagatggacgagtttcacaccgggggcgatctggactcaagtggaagtggaagcggcatctcggggccaagcgcctccaaaagacagctacaaagaaggggatcgtggcggcaacgagtcagcaggtccagcatccatgcttatccttttcctttgtgtttctatttgatctgtttttttgcccgcgccagcaacagagaagaatgtggtcgtggctgtaatgggtcagcaggtacaccatccacgctcatcatttcctttgtgtttctggttgatctatttttttaaaatttctttatcaagttgattagcatccacttgcatccgctcatagtttgattcgtgttcgttggatgggcctaaaaattaccagttgcttcgactacactctctgaatttcgcgatcaagataaaacccgacaccaggaatgatagcacacaaaaatacagt

SEQ ID NO: 280246 - DNA, 474 bp, Zea mays
tttctcggacgcgtgggtaagtggacacaggccagttgaaccaatacgaacccgatcaactacatcgatgcatcaccaacccaagcatcccaatccaaacaacttgtaatttgaaactagagattgcgaactgaatttaaatcaaatacttcagtattggtctctagagaggaagctctgccaaccattactaataactgagaaggatttggcaatcgcttatctttgactcaataccttatgacctcggaaaggtttgaacccgtcagggactaaagatgccaaaggttgaagaagggtcaccgagcaaagagggcatttactatcctttgcaatcttcaccgttggaaggattatgataactgcaatttcatttcttcttggatatgagctccacaagaggatgagacccctctcttcgccatatgtataggtcctgcaagctagaagctcatcttgtacccgtaacaagtt

SEQ ID NO: 280247 - DNA, 575 bp, Zea mays
atcacgcgttcgattcaaacagtggaacagcttctatttgcgtcgtcaactactgcagaaccaatattgacgccttggccattgatgcgggcactcgatgatatggaaaatgccaacgctcaagtggaagtttctgtggaagaagttaccaaggctcgcacccagaagataaagatctttgaaaaatgtgcccatgaggtggggagggagaggcaaatattcgctgatttcttctgcaaccctgaacgcctcaagaatcaagtcagagagctgacctcccgtgtgaaagctctccaggactaacctgtttctgtaggctggtctcacaggtcgtgatgctttttttttctatgtaaagtttgacttcactccagcgtcaggttggggctgctgtgcagggacggtatggaacaatatacccatcatgtagctcgggggggttcaggctgtaggtccttgtgccacccggaataggatggcattgttgtgatattatttgtagcgatatgtatgttgtaaagtatctcagaaatcacgagccctttctttcgtgtaaaaaaaaaaaaaccaacaaa

SEQ ID NO: 280248 - DNA, 530 bp, Zea mays
tctttttttcctctcgctcacaagggaagggaccgaggggcgagggagacgttggggaggggagcgagcgagccgtaacatccgagctgttccaatggcgacccctgccgttgctttcgtcgccagcgctttgttggggcggtggtagcgctaggagcggagcagtactaggttggtaggtggttgtagctttgcgcgtgacccgagcgcgcgctcgctcgctcctgtgcctctctacctcgcttgcgtgcgccgggaaggcagtgggtggctggtcggttctcgcaagaggttgctggtgctgttcctcctcccccggttgatgagcatggggcattgctccgagcagcggacggggttcgaggtgactaaggactggaacggcgccgaccagttcgcgatccggtccccgcggagggcgtccgttcgggtctgcctgcacggcgggcaggtcgtctcgtggaggaaccaccgcggcgaggagcttcttttcagcagcagcaaggcaattttcaagccggcaagagcga

SEQ ID NO: 280249 - DNA, 496 bp, Zea mays
  unsure (1)..(496): unsure at all n locations
tttctctgggcatgtgctatgtatcggaagagttataagcatctcgtaaaaacagcaaattctttctttgtacgttgtttggctagttcttagtgttaggctattgtattctgtctaggtattatgggccttgagcctaacccatgtaactctaatatatgtatcactcagcccactcaatgagttagggtttcaacttctccaacatggtatccagccaacctctctctcctcccttccttctctagccgctgcctcctcctgttgcctttgattctaaataaaaatatattaagaaggatagatggaaacttagaaagatagaaatacaagtcagctttagaatttacatcttttgatattttatgctgccttttcttttctaattcagcttctgaactagggctcatattacgaagcttgaaaacaagaagactcatctncaatctaaacttacggaggaggtaccaacctttctctaggatcacacaaaaat

SEQ ID NO: 280250 - DNA, 431 bp, Zea mays
ttcttctcacaacaaacaaggagaaatcgcaaggaggagcagcgcctgccgccgcgccgtatccagcgaggcagcccccccgccccgatctgccggcccgacacgctgggatcttcctttccttagccgaccggtcaacgccgcagatattctccttccctgcggctctggaggtttccgtaaacccggcgcccccctccttctattccttgcaggtgaatccaccgtcgcccctttcctcgttcctccttcccttcgtctccccccaggatctcgccttcgctcggcgcttcccgattcgcggccggcggggcggactccggctgtgtgggtggacgcaaggtagtcggcaaaaggtgcgattttgatcttgtattcttgtttccggggccagctgcgctgcgtgatggctggtccgtcgaaccttcgct

SEQ ID NO: 280251 - DNA, 486 bp, Zea mays
tctttactagaatcatgcctataataaattgttcgggggccacctgctccaccctccagacgtccttttttttgtgcacatctgtctgtctacttatattgcaattgcttcaaaatacgatcaatacataggtgtgcatgcatcatcagtcactcagtcttttgtcaaaccaatcaatggacccgttgtattgtatctgtgaactatgatgacatttgtttttgggaatgaatcatgatctggttatgtttgcttgcccttgggtactatatacgtttcaaataaataagcacatgtttactcagattactgtgccatttgaatgatataatatcgtaggctgtcaaggttgcagactctggggttgcaagggttaaagaccagtcaggagttatgactgcagaaacaggaacctacagatggatggcccctgaggttgattttgccacattgcttgtattaaacattgagaaactcttacattaa

SEQ ID NO: 280252 - DNA, 486 bp, Zea mays
ttctttgcgtccggcgcgctcggcgacggcgcgtgcgtgccctgccgtccgacgccgagggtcttctgcgttgggccactggtcaacgacagcagcagcacggcagtgggcggggggaggcaccagtgcctggcgaggctggacgcgcagcctatgcggagcgtcgtgtgcctctgcttcggcagcaagggctccttccccagcgagcagttacaggagatcgcccacgggctggagagctccggccaccggctcctgtgggccgtgaggaccccgccggaagaaccggacacggacctggggaagctgcttcccgaagcgttcctggacaggaacagagacagaggcatggcggtgaaggactgggtgccacaggcagaggtggtgcggcacgaggcggtccgcgcgttcgtcacgcactgcggctggaactccacgctcgaggccatcatgtctggcctgcccatgatatgctggccgctgtac

SEQ ID NO: 280253 - DNA, 456 bp, Zea mays
ttgtcgactcttggcgtgactcggcgacctttctccttcagcttccctctgcgagaggttaaatagaggagcacccctgtcattcgggacacgcgagaaaacactttcagaacacaatccagcagccgagtgagggtatttccatctcgtgactctgcgcgcacagagaagcgagagggcaggtgcctccttgcacgagggatcggcaattaggtttttggggagcgtctacgcgactgcccaaagtcttcttcctgctgacatgacaagtgaagttggacaaggatctagatcctcggagcgcatggcaggaggttttgctgctgtgctaaagcctgatccttttgatggtaaaaacttcttgatatggaaagctaagatggaattgtggctaactgcaatgtcttgttttcatgccgctgagggcaagcctgcccacttaccttctggggatga

SEQ ID NO: 280254 - DNA, 433 bp, Zea mays
tccctcgcgtccgcccacgcgtccgcggacgcgtgggggcgatagcatcaaaaattggcgaagtactctgatagcaacagaaactataattaaatgagtgttattactcacactagatcttgtcccccaccgcctgatctgactacttttgagctgatttggtcaggaaaggtgccatttttacccagcggcttcctcgccaccaaattaaaggttgcattttgtctccggtctcaccattcccattttattctctgcgtgttgctgtctgctccagggcgacagagggcatgctgctcggcgttgaggacatgcacaggttcccggggcgctccctcgtggatggaccgcggcgacctcatgcgtagtcccgccgggcgacagatcgtgtgcaactacttcagcatgttcgggccggtgcaggacgtgcgca

SEQ ID NO: 280255 - DNA, 494 bp, Zea mays
cctacgcgtccgggacaccatcagcgtcatgggggggcttctcatatacgaccgcgccatagaccccctggagcgctactacaccgggaggccgcgcgggttcacgcagctgcagagcatgggcatcggcctcggcggctccatcttctccatggtggcggcgggcgtgctggacatcgtgcggctgcgcgccatcgtgcggcacggcctgtacggcgaggacgacatcgtgcccatctccatcttctggcagataccgcaggacttcatcatcggccgcgcggaggtgttcaccttcgtggggcagctggagttcttctacgaccaggcgcccgacgccatgaggagcatgtgctccgcgctgtcgctcaccaccgtcgtgctcggcaactacctcagcacggacctggtgaccattgtcacccacatcaccaccaggcacggacgcatcgggtggatcccggggaaccttaaccgcgggcacctcgactact

SEQ ID NO: 280256 - DNA, 543 bp, Zea mays
tctcgcattaaaatctgccccctcctgccactgccggcgaccaatccaatccctacctgctcgggaaccacccgtcgggctcctcccgcccccctcgccgcatctgcatgcggcggggatctccgggctcgctccgtcaccggagccccaatcaccgccacctcatccaagcccccgaatcccccgggcgcgcagcacaaccttgccgcgatcgcgcgcgggaaccgccgctgattgggtcgtgaaagctcgattttgggcgattttgattcggagaacccgccgtcattcgattttggcgcgcgttgcgagccgggatggggttgcagcagtccaaagaggaactgctgtaccagcaggtcaactacggcaacgtcgacgggattcgcacgctccgggggcaaggcgctggtctcgagtggattgacaaggaagggaagacgcccctgatgcttgcctgcatgcgccccgatctggtcgtcgtggccagggtgctgatcgagttgggagctaatgtgaatgcctacaggcctgggtcacact

SEQ ID NO: 280257 - DNA, 526 bp, Zea mays
gtcgttttggcggccgtctcacccacgtgtgtgctggatcaccagggcgctccacgagaaggagcggcgcgtgaagggaggcatgacgcggaaccagttcttcctggtggcattcgtctgcagcttcgcctactacgtcttcccgggctacctgttccagatgctcacctccctgtcgtggctctgctgggcgttcccgcgctccgtggtggcgcagcagctggggtcggggctgagcgggctgggcgtgggcgcggtggggctcgactggtccaccatctcctcctacctcggaagcccgctcgccagcccctggttcgccaccgccaacgtggccgccggcttcgtcctcatcatgtacgtcatcacgcccgccgcgtactactggctcggcctgtacggggcgcgcagcttccccatcttctccgacgggctcttcaccgtcgtcgggcagacgtacaacatctgcagcatcgtggactccaacttccgttttgacacctaggcataccagcgcaacgggccg

SEQ ID NO: 280258 - DNA, 423 bp, Zea mays
ttctttgcgtccggcccctgctccgctctgccagccggagtcgtctacgcccaccaaggcaccaacgcattaaacccccattcatcaattcattcttcccttcctgctacggtgctaccctgcctctgcggctctgcctctgctacagcggcgtcggtatgggcggatcgaattccacggggaggaggtccgggtccgtcccgcgcgccatgccgcccgtggaggaggtggacatctccgccgtcaggtacaagtttcccgcgctgcaggcgccacacctcaccggcttctccctcaaggccttcgtctggctcatggagtcgcctctgctcggccggctcatacactcggtcctcaagtcgcagaacaacatgccgcagatgctgcagcagacggtgatacccgagcgccccatgtactatc

SEQ ID NO: 280259 - DNA, 440 bp, Zea mays
tcgtttgcatcagcagctagccaagctataccacgggggccagtgcacaactcaaggcgatgccgccgcctcctcctcctccgccccactcccacgcttgccatcccgcgccgcatggacgcgagcagcactagcgcgggggcacacagcacggcgagcgggcgggggcgcgacgatggacctgggcgggtcggtggtgatggacgcgggcgcctcggagctgggcctgctcggcggcggatctagcaggctgctcaagcacgggcgggggcccaatgcggccgggggagacgacgacgtgtggggcggcggcagggccaagcagcccaggacagggacagcgcccgtcgtcgccggggacgtggcggctgccaccaaggcggcggcggcgccgttcctgctgggctcgtgcagtcccggccacggcggggagcagatgc

SEQ ID NO: 280260 - DNA, 415 bp, Zea mays
tcctggtaggacattgttgataacttgatactggatgggggtccttctcgaacctgtagagggctctgctttatttggtatcattcataatctttgatacctttaattacttagtcctaattaatagcctatatgttccaccactgctcattattaggtgtattatttcttattatacatgaacctgaagtatgggctaaaatttccctcagacaaaaaaaggtggtgtttgccaagagcccaagacccttgtccttaacctagaatatagctacaaacttgaattttacttgttcatctacacgcgttgcacgaaagtggtaccgttatacttgcaaagttgttagaaaaatgctttcattacactgatgtataatattttggcaatatgaccgttagagctaaccatacaggc

SEQ ID NO: 280261 - DNA, 519 bp, Zea mays
tcccacgcgtccgctgaattataagggagtttgcgtgttatgatagatataagtattcccatttattggagggggtcagttaggctgatctctacccttatcaagctaacgactagataaactttctataaccaacgacacctccttggactataaaagggggtagtatcgcccatcaagggcacatcatctgatcatattgcataggcaatagacaccggaacacacaagacgcatagtattatcttacattgatagcccgaacctatctaaatcttcgagtcccttgtgcattttccttaaactgttgatctaccccataaattcactatcgaatatttctcgacaacctttagctgtatatcaagaccatacgcctcttatatattttttatagcctcatgcatgcaactagcagtatactatttttcgtccacccagggcaggtgccaattgcgctgccaaccatttttctgccagcaggtaaactcgtgggcatggcatgtcgaaaacagagct

SEQ ID NO: 280262 - DNA, 373 bp, Zea mays
tctcagtcgtctatccccaccgcgagccgccgcggggatctgtgacgatggccccgccggccgatgcggttgccgtcgtccgccaccacagcccgcacctgctcctccgccgcgggggcgggggtctcctatcatcgccttcgggccccgccacgctccctttcgcctcgcggggtgcgggctccgtgcccgcgcgcctgcgcctgccgtcgtcgcagttctctctctcccccgtcccgaagagcctctccggcgactgctcctcccacgtcattgtacggtccctcttcaccggcatcgtcaaggaggtcagccgcgcgcgccgactctgaccgccgatcgcgccgtatgggggtggcggcggctaggctct

SEQ ID NO: 280263 - DNA, 567 bp, Zea mays
acggcataaggaagaggaagagctgcggaaacgaagatgcagctgctgtgaagtttgtgaagtacaaggtagaagacagctcagtgaagggctacctgttagcagctaatggcatgagcagtggcagtgaggtagagaacccacagtcggatgatgagatggaagaatccgactgatgcatagaaaatgacagcacccactaatgcttactttggggagagttgctttgaagagtttcttggacaaccgcctttttggagtctggaccagccttgtttcagatgccgcttcttaatgatgtcgtgcagtaccctgttctaggccaataatctgcaggagggcccctctccagctaggctttttttcggatataagtggtaaccgttagctgaccctacttgacaaggagcatgtgatgtctgctatgagctgtatcgtgttctttgttattataatgctatatagtagagacctcaatgtagtcttgcttcattttgcttttgtaatagatgggtacgttgttgttatcccacggaaccagttggaactaatgaactgttaaccaat

SEQ ID NO: 280264 - DNA, 1245 bp, Zea mays
atctcaaatcctcatcgttctcctttccccaaaggccaaaaccgaccccgctccacgcctccactcccagccccagcggatcttctcgagcggcggccggcgatggcagcgagcaacatcgggatgatggacggagcctacttcgtcgggcgcaacgagatcctcgcgtggatcaacactacgctgcagctcggcctctccaaggtggaggaggcggcgtcaggcgcggttgcgtgccaactgatggacgcggcgcatcccggcgccgtgccgatgcacaaggtcaacttcgacgccaagacggagtacgacatgatccagaactacaaggtcctgcaggatgtgttcaacaagctcaagatcactaagcatatagaggtgaacaagcttatcaaaggaaggccccttgacaatctggagttcatgcagtggatgaaacgatattgtgattctgtcaatggtggcttcatgagcagctacaatgcttctgagagaagggaaagcagcaaagggggaaaggagacgaacagaagggcatcggtgccctctcacacaccggccaagtctgcatccacaggtcacagggctcaagcatcacatggtgccaagcgggcaagcgggcagacggcgggtgcaccacagcgcacgcctaagccatcacctgcagccagctctggcggaccagcttatgacgaacaaataactgagctgaagctccttgtcgatagcctggagaaggagagagatttctacttctccaagctgcgggacattgagatcttgtgccaaaaccctgaggttgagcacgtgccggtccatgctatccagaacatactctacacatcagaggaggaccctcagcagcaggctccagccctgagccccatcatggaggcgtccgaggagaggccgaagcaagaggcggcgcacaagagaaagagcatctcggacctggacgagtttggtatgtcgtccagctcaaggcagaggctctccgacatctcggacgtgcagctgtgtggatccccgctgacgagtttcagctgaaggaaccgtcatctctacaaaatgggtgtctcgtctttctgttggattggttcgtggtttcgtatttcatgtgttgtttggtggtgaactgtcgtgtgctcttagcaagttgtctgccacagaatttgtggccataaatgctacaagttcctcctgctatgttatctgccccccgacaaagaaaaaagaacagagaaa

SEQ ID NO: 280265 - DNA, 563 bp, Zea mays
ctcgtccggctgcagcagcatttggccaggcggacggatcttcgctgctgcggacactgaccccaacgatcttaacgtcctcaacacgctcttcaccagtctgaattctcctgggcagctcacaggttggcaggcgaatgggggtgatccttgtggccagtcatggaagggcattacttgctcaggatcaggggtcactaaaatccaattaccaaacttgtcactcactggaaatttggcctacaacatgaataacttgggttcattagttgagcttgacatgagccaaaataaccttggcggtggaggtcaaatacagtacaatcttcccaatatgaagcttgagaaactcaatcttgcaggaaatcaatttggtggaaatttaccctactcaatttcgacgatgcctaatcttaagtatttaaaccttaatcataaccaactacaaggaaacatcagtgatgtattttccaacctttacagtttgtcagaactggatcctgactttattcccttactggtgatctaccacaaagtttcactggattgtcaagcctgaaaaa

SEQ ID NO: 280266 - DNA, 1067 bp, Zea mays
  unsure (1)..(1067): unsure at all n locations
aatgactacgcgcccgcacagccanaatanaggggagcgtttaccagaccaggtccagcgtttgtcgcatcacatacacgcggtaccttcgttcgttctcaagcttatagcgcccgatcgaccctgcgcggagctagttcgttcgttccggcaggcggcggcagcgaactcgtgcgacgacgacgacgaggtacgtagagagcgagaggatagatgtcgagccgaaggtcgtcgtcgtcgtcgtcgcacggcaacatctccgaggacgagatgaacgagctcgtctccaagctccaggccctgctccccagctcccgccgccgccgcggctccggccaggcgtcgacggcgaagctgctgaaggagacctgcagctacatcaagagcctccagcgggaggtggacgacctcagcgaccggctgtcggacctcttgtccaccatggaccacaacagccccgcggcggagatcatccgaagcatcctccgctcctgagcgcgcgcaagggcgaggtcaacgaacgccggcctccgatcgatcgccgacagcgcgcgctctccggccggctggtcacgtgcgggagctgagctcaattaggtagctagggtatatatacatataatatatatatctacatgtacgtgtatctaccttttcctttaccagtctccctagatctgagatcatgtggctagctccgtataaaaatgtactagccacacgctgacacgcacacgtatgcatgatggtctctgcgctaagcttcactgggtagtagggtatagcactagagcctaagcaagcttatcctcctcactttagtatagctcgcagcagcagtctctcgattcctcggcgatcttcggtggcttaattggatcgagctggctagtgcgctctctctctctctctcatctctagcaggcaggaaaagagacaaccgaccgaccactactagcctagcctagagcaaattgactgtcgttatgatgatgatgatgtactgctaaagcttttattaacgacttcaataacatgcacgtcctgcggttagtgctttgtttttc

SEQ ID NO: 280267 - DNA, 915 bp, Zea mays
atttcgcccagcatcgggaggctcgacaagctgcagagactagctctgcaccagaacagcttgcacggcccaatccctgcagagatcaagaactgcaccgagctcagggcaatttacctgagagccaactacctgcatagaggcatcccttcagagattggcgagctcgtgcacctcaccatcttggacctgtcaagcaatctgctgaggggcacaataccggcctcgatcggaagcctcactcacctgcgctttctgaacctgtctactaacttcttctccggagagatcccaaatgccggtgtcctcggagccttcaaaagcagctcgttcgttggaaatctggagctctgtggcctgtccatccagaaagcttgccgtggaaccctcggctttcctgccgtgctgccccactccgatccgctctcttcggctggcggtgtctctccaatcagtaacaacaacaacaagacgtcgcgctttctgaatggcgtcgtgatcggctcgatgtcaaccttggctcttgccctgatcgctgtgctcggattcctgtggatctgcttgctgtccaggaagaagagcgtcggtggaaactacgtaaagatggacaagaaaactgttcctgacggcgcgaagcttgtgacgtaccagtggaaccttccgtactcgtcgagtgagatcattagaaggctggagctgcttgacgaagagcgatgtggttggctgcgggggcttcggcacggtgtacagaatggtgatggacgatggcacgtcgttcgccgtcaagaggaattgatctcagccgccaaagccgcgacaggaccatggagaaggagctcgagttcctgggcagcatcaggcacataaatcttgtcactttgcgaggctactgccggctgctccctgcagcaaagc

SEQ ID NO: 280268 - DNA, 581 bp, Zea mays
  unsure (1)..(581): unsure at all n locations
tttatggtttcttgaatgggtgcaggccccttctataaattgacaaggctgacttgaaaaaagtatcttgggacattgctttgtgcttcagctattgatgctgatcacatgatgttccctctagcatttggtgttgttgattctgagagtgatgataactggaattggtttatatcggaattgaggaagatgcttggagttaacacagataagatgccggtcttgactatactttctgagagaaagcggcaagtggttaaagcagttggatctaatttccccactgcttttcatggtttttgcctgagatacgtgagcgagagtttccttgacgagttcaagaatactaaactgcttaaccttttctggagtgctgtttatgctctcacagcatcaagaatttgatgcanaggtaaatgaaatgatgcgagttcaagatgtcatgccatggttacagcgtttcccaccaaacctgtgggcagtctcttgctttcagggtatcagatacggccattttagtcttgggataaccgagatattgtacaacttgtcgcttgactgtcacgaacttcccatcgtgc

SEQ ID NO: 280269 - DNA, 420 bp, Zea mays
tgctcacgcgtccgttttttttttttttttttttttttttttttttttaatactgcatatgccaagcgcgactcaagagatagatatgtatggtacattaattagcctctcgatcatcacaaggaagccaaatacacttcatatatagcgtctattacatgaatcgttcgcgaacagtaagtaatgataatatgtctgtcatcatcataaggacgtactagtacgtaatcgttcatctgatgatgatgaatgatctatcacaagcttggcttggcctaaccatgtctggctttgcttagtacggatgaggataacaggtcaatgatgatgatgatgatgatgatgatgatgatgatgatgatgatatgtgtatggccgggagagagaaagggatgggaccaaaacagagaagattaaaat

SEQ ID NO: 280270 - DNA, 1023 bp, Zea mays
cagatgagctacttgctcgtgttcttgaccgtggttttatagatggtgaaatgaaggtatatcgccctgatgttgcccgtgttggagttgattcacagtctcgtgctgcacaggctgtttcagttgaaaggaggacagatcagcttttactgatgggccgtgaagacgtaattgggtggctacatcagctaaaagcccgtgagcagcagctatcacaggagattgcctatcttcaaagggaactcaatatagttgcagcggctggtagatcccagggttcagtaggggtagatcctgatgttcttgctcaaagggatcgtaatcgtgatattctgcttcagaaacttgctgcgtcagttgaaagcagggataaagtactggtggagatgtcacggctgctgatattagaaagcaggttcggtcttggcagcaacttcaatatggaagatgctagggctagtctggaagccagttttgccaatgaagctgagattgtttttacaactgtgtcaagtagcgggcgtaagttattttctcgcctgagtcatggctttgatatggttgttattgatgaggctgctcaggctagtgaagtaggagtcctccctccattggctcttggtgcagctagatgtgtcctggttggtgatccacaacaactccctgctactgttattagcaaagcagctggaactttgctttacagtaggagtcttttcgagaggtttcagcaggctggttgtcctaccattttgttgtcagtgcaatacaggatgcatccccagatccgtgaatttccatcaaaatacttctatcaaggtcgccttacagatagtgagagtgttgttaaattacctgatgaagcctattacagagatgcacttatggcaccttatatcttttacgacatgtcacatggccgtgagtctcataggggtgggtcatcttcatatcagaatattcatgaagcgcagtttgcattggcgttatatgagcaccttcagaagtttctgaaagctaatg

SEQ ID NO: 280271 - DNA, 581 bp, Zea mays
  unsure (1)..(581): unsure at all n locations
ngtgattcgtggacggacgcgtgggcggacgcgtgggtttatgaagccttttgttgttgtaatgaggaagagccgagctgttgagatcagagaacttatcattaggtgtgtctctcaaacggtattggcccgtgttagtcatgtgaagtcagggtggaagagtatgtttatggtctttgcgacagcgtcatatgatgatcacaaaaatattgtactattggcctttgcaattatagaaaagattttgcgggaatactttccatacattactgagactgagacaacgactttcaacgattgtgtgaattgtcttcatcgcgtttactaacagcaggtgtaacaaggatataagtcttagtgcaattggatgtcttcgattctgcgcagcaaagttggccgaaggagatattggatcctcatggttgaaggacaatccttcaaacagtaatccaccctcgcctcatttgactaatgatggaaagcaggaatgcacagttcttgttgacaaggaagaccatatacacttttggtttcctttactagcgggattgtctgaacttacctttgacttaagaccagaa

SEQ ID NO: 280272 - DNA, 974 bp, Zea mays
acttgacgaaggacatacacctagaaatcgggagactaatgtactcgaatcactaaatagagtggaaacaccacgcaaagtggttctttcgggtacacttttccagaatcatgttgaagaagtgtttaatatctgggcgctcgcgcgcccaaagtttctcaggatggaatcatcccgtcctactgcccgacgtataatgcgtcaagttgaaatagttggtagaagttcggacgggcttgctgatggcgcattcactaaggcagttgaagaaaccttattgaatgatgagaacttcaagagaaaagctcatgttattagaggtcttagagaactaacaaaggatgttcttcactattataagggtgatatcttagatgaactacctggcttagtagacttcagtgtgtttttgaagctcacacccaaacagaaagacattatttataagttggaagcacatgatcggttcaaaagaaatgcagtagggagtgcactgtacattcatccatgtctttcagaactttcagaggttaatgctgagcatagggctaacacctttagagatgatttagttgatagtctggtagattctatcactgtgagagatggcgtgaaggccaattttttcatgaatatcctgtcacttgctaattctgcaggagagaaagtgctagctttcagtcaatatatatctcccatgattttctttgaaaggctgctggtgaagaagaaaggctggcatgtggggaaagagatctttatgatctctggtgatactagccaagaagacagagaattggcaacggaccattttaacaactctgctgacgcaaaagttatgtttggttctatcaaggcatgtggggagggtatctccctcgttggtgcgtcgagagttgtcattctggacgtacacctgaacccatctgtcacccgtcaagcgattgggcgtgcattcaggcccggacagcaga

SEQ ID NO: 280273 - DNA, 514 bp, Zea mays
atcggattgatcaatttgatgaaatggttcatccaagtgacgttcttgggccatcatttcctggaccaactgctcttctggcggattgccccacacagtatcatatgccagaactttgttcactgcacccccttagctgcttttatgaagattctccagaacaaagtggcaagaaagtaaattgcataatccacttaggtccatcacctgtgactagatctgttgactaccagaactggatgaaaaaatttggtgcaacgcaacatatcatggcaggacatgaaattaaaaacatggaaattcctatcttgaaaggtagtgcaaggatatcatcacacctcaattttgtatgccctcagcttttcccatcctctgggtttcggtcggaacaaccttcacatgatgtcatggaaaatgataagagtgtttcatcggaagcctgtggaagtgtggctgcgcacaacctcctaaaggttcatctgcgtccttatgctcaattgggtttggatagaac

SEQ ID NO: 280274 - DNA, 561 bp, Zea mays
accggccggaacttttttgcccaccgccttctgatggctccacccgaccggagcggactatttgtctcccagtcccactccctccactcgagctctccaccagctttccccttctctccggtccgggaatcggaagctcagggcagaaggtaagctaccagaccatgtcgtagcccctagttactactgcttgattattacttttcgcttttcttgggagtaaaattttatttactcgccgttttgggctgttcatgtttctgttagtgtgtttggtgccttgattttttcagataattggtgcctttcttgataagttgatatacaaccgtggatccttggacttcgatttagttagtgactccgtaggtatcagataaccaaaaaaagaggaatcacgtgaactactggttatatttcccctggatttcgacaaagctttttaggaaatttcgcactttttttcatggagaaacttcgaagacaccaatgaagttctcgcataaaatattaaaaaaaccctaagcatgctcgattttcatatttttggcctgaacaact

SEQ ID NO: 280275 - DNA, 420 bp, Zea mays
tgcgttgcgagttccaaagggctgagcagcgcggctgcgcctctctacctctgccaaatccaaacgagacggtcgccggaggaaggatacccgaaactcacctgagtcacctcccctcgcctcttcttattacgatctcgcgaggcggcggcagccgtcgcgtagccgctttcacacattcggtctccttcgccgccgcctatactcctgcagaaatagccccagagcgaaggcggttgctgcttcttcgtgttccttcgcccgcctcacacgggatccatttgaccgatcgaccgacccacacacaccgagagccagccatggggcataaccacagcgcgcaggacgggagcggtcacgggcggcgctccttccagcagcagccgtcggcgcagtggggcgcccgaggaggggggtact

SEQ ID NO: 280276 - DNA, 305 bp, Zea mays
gttcgcgacaccccgtgcagccgtgctcttccgcttgaactagggcgcctccgcctccgcgcccgcgccgccgccggctgtagccatgtccgacgaatacgtggacttgcccgtctcggacgaggatgaagaagagctcgaagatgagatggatgatggtgatggggagagtggtggtggaagctcgaagaaaaaggccaagcagcacgtggagcagctcaagcggctgcagcaaaaggatcctgatttctataaatatttagaagagtttgataaagatttgttgggatttgatgatgatgatg

SEQ ID NO: 280277 - DNA, 399 bp, Zea mays
atatcatcagcacaggtgttttgtaccgcatcattttgaagaaaaagctaagtgaaattcagtgggcagcatttgttcttctatgtgctggttgcacaacagctcaacttaatccttcgtctgaccatgtgcttcaaactcctattcaaggttggatgatggcaattgtgatggctcttttgagtggttttgctggggtgtatacagaagctatcattactaaacggccatcaagaaacatcaacgtgcagaacttttggctatacatatttggggtgatcttcaatctagttgcaatttgtgttcaggattatgatgcagtcatgaataaaggctttttccatgggtattcattcatcacagttttgatgattctgaaccacgcactgagtggaattg

SEQ ID NO: 280278 - DNA, 430 bp, Zea mays
tcggctacgcgtccgcccacgcgttcgctctctagcgtctagcctctgcctgcgctcccacaccagaacaccacaccgctccgcgtgcggcgcccgcactcctcgcctctgcccgtctgcctaccgtgccgtgccgtgccgtgctccccacccgatgcagccgccgacgcgggccgtgccgagccacagccggagatgagctccaggaaccgttccgccgccgcctcgtccgctgccccggctctccggacaccgcgccgcctgaagcggcggccagttaaggcgtcggcgccggggccgggcagcgggcggcgtagcgggcccgcgacgccgctgctgaaatgggacgtcagtggcggcggcgggcgcggtgagggtaggaaggctggcgccgacgaagcgggggacgccgcgcgggcgcgggagacca

SEQ ID NO: 280279 - DNA, 798 bp, Zea mays
ttaaccgcgcacggtccgccctcctccttcggggacgtcttcctcctcgcgttcctctcgtcagtacggcgacgccgcaaggctcgcaccgctgacagtcccccttcccggatcgagcctctcttttcccagatcggattctaatttggctatcgccgccgccctacgccaggtgccgagtccttagctgatcttcgccggcgaggagcgcccaccaggagttacagattgaatgacaagaatgttctctatatcatcctcagtatgtgtgaagaaatagtctgtaactacacatacctttcattgcaattaccaagaactggaaatggacgatgataatgggcttgagcttagtttgggcctatctttgggcgggtcatcagggaaggccaaggctagagatgcacctctagaaccaaaagcagaaccccaagtggaagaaagcagtaccaaaggtggtttacaaactcctgatgctccttctgggaaattttatcaaaagagcgctgataaccatgaacaaaatagtaaacagaggcacagccctgttgcaccacaatttgggaacttctggggacaaccagggaattcctccggtccagtggtagatggttctgttgaaccggtgagtcatcagcctcagctttccagttatcaagatggaaggatgccaattaacagtggaaataattctgaggagcagaagccagtttctggtaaccacaagttgccttctgaagagatgaactttcagaagaaacatcagacagctagtgaccagcctgatgcattcagtaa

SEQ ID NO: 280280 - DNA, 380 bp, Zea mays
tcccacgcgtccgcccacgcgtccgcataactggagcacacgggtattggagtctacacacgccgcgcttcataaaaaaaaggattgaagggaggaccaaaaaagagacgaagaaggtggaggggagcgcggtgtggagagattccccgacagcaaaatctagagaggaaaagcgattcccgtgccggcgagccaccctcctctcctccttcatcagtcgtcacgcacgcctgcggcctgcctgcctgcctcagtcctgacaccatccatactaggagccgtccctggcctgcgagccgtcagaggattgcctcctcctctctctctctctctctcttgctctctctctctctctctctctctctatctctctctctctc

SEQ ID NO: 280281 - DNA, 852 bp, Zea mays
cggggcgggagactgggatgaggcacgtgccggagtggttgcccgtgttcccggatccgcacacgtatgtgagtacggaggtgtgggttgagccaccggcgaccaaggacagggttgacaaggtggagcaggtgcggcaacggaggaaggccgagagatccctgctcagcttgcagcgaaggctggctatggcaggcgcggatgggtttcatccagcggttgcattggcggaggatagcgcacagaaggggaaggagatacaggcagctgggacaaagagaaacccgtttcttgagccagcattgccgcctggggagaaggatgtatctgaggttggtatgcctccggaaaagaagaaactatctgtcctcgaggcatttgcgccagctatgcaatctagaaccatcctcagggatgttgatgctggggcaggattggatgaaaaccaaaggagcattgttcccaaagagagggctccggtgcaccttaagattggatttggaaagaagccgttggctgcagctctgaactcaagagccctggacctgagggaagatccttccttcctgaaagaggaagcaaaggatgacaagaagcggagagcaggcatgatattaagggcatcaatggagaacccacaagaacttcctcagctctaaagttgtttgtggaggaagtgcggtacccagagtggagttgcatcatggtgtaattgtggaacagtttccagaatcttgaggccatgttccctgatacaaccttcctcaggatcaccatgatatgccccgatacaacctgcaccggactctcctgcctccacctaccgttttcttaaaacaccatgcgctgata

SEQ ID NO: 280282 - DNA, 805 bp, Zea mays
ttacgtatcctagcaccaaaccctaactgtttgttttattcggatttgttccaactacaaatgtggtgtatgtagtattgtgtcaactaactttcctctttttaccctttttttctttttgcaaaaaaaaacatcgggtgtacatgtgtacacccgtgccgtttactgggtcggcagtcggccggcagcccggcacctggcccaagggttgagcatggagatcacgaacgagatgcttaagagactgccgagactacgttcttcagttgccaaggccatatccctggtacctgattgactagtcgctgcttattgtcataaagctttttggagggtttgctggttgctgccatgacaagtccacctagggtgagcatggagatcactgatgaggtggtcaagagcatgaagatagggttggtctttcaaggctataatggcagaatttgttctatggactttcacagcaaggctaccaactatctcgtgacagctagcgatgatgaatcaatccgtttatacgatacccaagatgcagtgtgtttgaatactattaatagcaaaaaatatggggttggacttgtgtgcttcactgataacccatctattgtcttatattcatcgaacaatggctgggatgaatctctgcgtctgctctcaatgaatgataaaccggtttactagatattataaaggtcaccttgatagggttgtctgcatcgcactttgctctggaaaagaaaattttcttctcatgttcgcttgatcgtaccattcttttatgggaccattctgctgaaaaacc

SEQ ID NO: 280283 - DNA, 448 bp, Zea mays
ttcattttgttaggaagaatcgaatgccaaagggggaaatgcgggatctagagatgagcctgttgcagttgagcacaatcattttactgatcttaatgttgatgaacataaagtgcagacaactgcaatgtcaggtgatcctgtgatcttggctgaaaattgtatggaaggacaaggccccagacaggctggggggcaacttcaaaggatacctgcttcaaacaagagtagtggcgcatctggtggtggtggtacatataaaatagcgacattatccacaccaatgactaaaggatcatctaaaagtaatgacatggcttatggggctggtttggatgctgctcagaatgcaattgatggttgagtaggcatggaagttattgtaagcaacactgacaattatacttctcattgtaatgaaaatggacgagcaaatgaagttgcaccc

SEQ ID NO: 280284 - DNA, 385 bp, Zea mays
tctgtgttgctctcgggccaggtcgcggacgggcggatgacgatcctcgcaggcgagatgatcgacaggtttggccgcttcaagctatggcacatcggagggtcggtcctcgtcggcttctccttctcctcggtctttggtggctgcctgctgtgcaccatcctggggacggactcgtacctcgtgaggaccgtgggctacagcttcttcgcggcggtgttcaacgttggctgggcggccacacagggctcccacatgtccatggtgaactgcatgacactgaatccgacaagccgtgtagccttagcaagctgcacaaacgcatccactatggtcgcaaatcttggtttgtatgggattgcgttaggtgtctttggcgctataa

SEQ ID NO: 280285 - DNA, 426 bp, Zea mays
ttggtcgcgtgggcggacgcgtgggcgccgccggggaccgatgaccctttcattaggcttgttgcggtcaggcctcctcaaccggcgcatcaaccaaccggcgaatcaagtccttcgcctccacctcgcattctcctccgcctcgccgtccccgtccgacccctccgccgccgccgccggcccccagaccaccatcagggaagggaaagtggaaatatttttggacgagtccaactcagtcttctacaacaagacccaggttaacaatagagatatttccattgctgccttgagatcatttattttgaaaagacatgaagaatatgctgcccgatcaagaaaaggaccaggagacactacattgagtgcgcaagctaagtataaagagccgaaagttcttgaggcattagctgcttcagggctaag

SEQ ID NO: 280286 - DNA, 369 bp, Zea mays
ttttgtctttctgccttgctaacgaggtgagagagtgttggggccgtcgctctcgggtgatagaggaagaggatacagcatgcgggggttgcgaggaggcagcggacgctactgggcaacgccgggagtgcgccggaccagcccaagaactcggcggatggggccggcgctgccgacgcggagtctcgccgcgggccgccgtctacggtgcgtttcttccccgatgcggagcgccacaaggcacggcagccgccgccaataaagctcgaggaggaggagacggcgtcccgccgccgcccgccaccgaggaggagatggccccgcgcaacctctggcaggtgtatgcgcttggggcgttcattgtgttga

SEQ ID NO: 280287 - DNA, 463 bp, Zea mays
ctctctcaacgtgctccgattcgtgggctcgagctccggtgactaggaacagcggcaaggaaacaatgcttctttctcccttcgcacctttgtgatgcactgaacactagtcaggagctctagtaatcctctaatggccgaatgttcattggcaacgctgagagtgagaggccagtatcaagggagatggacctggtccaacagcaagttgaatatgccaatcatggatccaaagaggaactacgccctcaagattcatcttccatgccaatccaaagcagcaagagaatggacaagtgttgcatttaccccttttggttttcatggaagggatcacagggtggaaacttcagttaaatgttactgtttgcagccactcatggattcggaggggcatggtctcaccaaatctaatactgatttcggatgaagctcttctcactatcagcatggtttttgcata

SEQ ID NO: 280288 - DNA, 725 bp, Zea mays
  unsure (1)..(725): unsure at all n locations
ttgtttttttttcagctttgggcactgaaggtgggcttacttgacaggaaattccccgtttaattgcatattggacatgtcttgtggcgtttgattggagaatttaattcttcccaacgatttccgttcttcggaggcttccatcttggtttcagttctgcagatctgtgactgagaggggaggaattccagtcagtcgtttatgaatcctggggcctgtgcttactagagggagggcaaggcaagttaggatccgagatgagggggagaaatgactccgggaacagcaagccggttgtgctgtgctgtgtgatgatcgtgtgcctatgcctcctcttcttgtatttctcgggctccaatggacaggctgggagcaccgcatttgagtacgggaccaaattctcacggtcacttggatggggcagtgatgatggtgaggatggctctgaagagtccatttttggaaccggggatgcagatgatgtcaagcccaagagctttcctgtgtgtgatgaccggcactctgaactgatcccctgcttggataggaacttgatatatcaaatgaggctgaagctggatttaaacctgatggagcactatgagaggcattgccctccacctgaaaggcgttttaattgcttgattcctccaccacatggctataaggttcctataaaatggccanaaagtcgtgatgtagtgtggaaagcaaacattccaca

SEQ ID NO: 280289 - DNA, 548 bp, Zea mays
gtgcagactgtgaaactccctcgattgtaataacagagaaaaaaaccatccgccggaggccggagggcagattctccaccatcgcctccactccaccctcactacgcgaatccgcggcgaacccccctctcggattccttctctcctccccgccccgatcgcgtcgtccagagaccgccaggctccggcgcccccgcccgcccgggctcgccgggggtcgggatgccctgctgctcgccgtcgctgctcggagtcgggccgcgggtgcgctcctttctccgcgactacgacgccctccagtccctcgccctcgcactcatctacctccaggtgcgcattcccctcgtatgtcgcctcagaaggccggatcggcctggcccaccggcggcttgccgctccccgcgagatcggccaacttctgctcttgtactcgctgctgctcttgctgttagcgcctgtgatgtggaacctggtgaccgtatcgggtttgagcgtcctctagtgtttcctacccgagtgggcgatattttagctgcctcagtttggca

SEQ ID NO: 280290 - DNA, 473 bp, Zea mays
tgcctcttagtaaaacaagaacaagttgcagggtaatattactatattatttccaagcaactaggggcaaagttaagagataatatagtaatattacactgccacttagtaaaacaagaacaagttgctggaagttttctgttgtaaattctaattgtccaaaacataaaataaattttcttgttatcaatgaaggcccaacctgcttggaaacaaaaggctctgttgtattatcggctaagggcccagccacaatatggtttacaataatcacatctccacactttttcatattcatatttgaagcttgatgtcggtgattacatgattttggaccaatagaatgcgtcttgtcaaactaattgatgcatcttttgctaagtgttctacctattcttatgtattacattattatagttggaaccataatcactatttttgagctaaacattgccagtcctcataatattatt

SEQ ID NO: 280291 - DNA, 556 bp, Zea mays
tgaacttgttcacacaatgatactaaaggaggcatttttaaaaatgttgattgtatgtatacatcccagcgagatgatagaatggaaggagtaccagaggctaacactgatgaagaacatgttctgtcagcctttttgctggatgcaaatcacctaaacgtagtcattaattctgaagaagtggtttgtgagggtgaagatagtaaggagcttctccattcggaagactgtaaagcttcatccgagaaaacagatgtgaatgatggcaatgtatatggtattagtgatgctgtagtgagatgtgcactgcatgctccagccgatgataattatgagatttttttgggtcccaatactgatgtaccacgtcaggtttataatgacggatgcagtgatgtcaaagaagatcgatttgctttcaaaccctggacaattgatattattgaggatgcctctgtaaagaaagatcacatttaaagattgcaacttgattcaagctggagggacagaaatagtggaatctggcctttacttcaataggatattgtaacattta

SEQ ID NO: 280292 - DNA, 507 bp, Zea mays
tctgtcgcgtgggcggacgcgtgggtttttatcgggacttgttctgacggacggtgattagtccgaactccggaaaaattttcagggaaatagaaagaaggattttggaccagtttcatttttttgaactaaagctcaacgtccaagactttaaagagaagtaatgatcttgttcaaaaatgaacagagaatgtattgccctttttttgggggagtttgatgcatgagctgatcttctgggtccaggtgggctaaattctccctttcttcttcctgcattcctcaaaggcgacgtgaagttgtgagatctgggtctccttatgaattgagctggctaaccgtactttaccatttggttaagtccatcattgccaggtgagctgagctacgtactgccggcatgcacgcagccattgtgcaccgaccagtaacagtaaccatatgggctatggcatgcaacacacaatcacccctctagctagcattaaacatggggacagaagcaca

SEQ ID NO: 280293 - DNA, 438 bp, Zea mays
cccacgcgtcctagctttacaagatgagtttacagcttggacttgatcagggcccatctgaggaaaaggatctccagttttggcacttgaattatcaccattgtcgaatagccaccctaaaatcaaagtatttaatttcttctgtgactgctaaaaggttgaaataacttttctaaaagaaaattgcttgtccatgggagacccctgggcattttttagtttataagttagcaaattacatcctgattggtgattggctaggaaaactagctaaatcagtttccagggaggtaaccacaaattgctgagtcctggatttgagcacaggtggccttcctctcaactgggaagtactttctaatttccttttcagatgtagatgtaatattttcaagaagtacaaccctttttctttttttccttgcaccaaaccttttg

SEQ ID NO: 280294 - DNA, 648 bp, Zea mays
  unsure (1)..(648): unsure at all n locations
caggtaacggatattcaaggaacttcaggacattggggacattttggacaggttcgcagaatagcaacctccagatgattatgtagttgatcttgcagaaaatatgctattttattctgaaaaacacattgtttgtggagagtatatttctgaggactgggattcagaattagtgaagcatgctttgagcttcttcaatccagataacatgagagttgatgtactcagtaaatcatttgataagcagtcccaagctattcaatgtgaaccatggtttggttcacattacattgaggaggacatcccatcatctttgatagaaagttggaaaaatcctgttcaagtagatgataatttgcatttgcctagaaagaatgaatttataccaggggacttcactctgcgaaatgccaactctcctggatcctcgagcgacgataaccctcgttgcatagtggatgagccattcataaaactctggtacaagatggacatgacatttaatgtccctcgtgccaacacttattttttgatttatgtcaaggatggctatagtagccttgaaaactctgttctgatagatctctctgcaaaccttcttaaagatgaacttaatgaggtcctttatcangcttatgtggctaaatg

SEQ ID NO: 280295 - DNA, 401 bp, Zea mays
tttgtctggtcgaacacctcccccgatcgcgcgactccggccatggcggaacactccgacgcggctgcggccgtaactgcgcggctactggagctcgcggccgacaacgactccacggcgctcggggacctcctcgcggtacacccgtcgcttgccgacgagcccgcgccgtggtactccccggcgcgcggcgcggagcctatgaccccgctcatggtcgcggcggcgtacgggtccgtggcctgcatcgatgtcctactgtcgccgctccacctggccgatcccaaccgcgcctcaccgtcgtccctctacaccgcgctccacctcgcagccgccggcggcgcctacgctgcgccggctgcggtatcccgtctactagctgctggcgccgaccccacgct

SEQ ID NO: 280296 - DNA, 558 bp, Zea mays
cccacgcgtccgcccacgcgtccgcccacgcgtccggccggttcttgccgcagtttctgcgcgctcgctttttgtccggaagaccgtggagagcgagagcggacaggttcctatgtggaattcttcagcgatgatgaggcccggcgaccgtctggactcggtggtcttccagctcactcccacccggaccaggttcgacttggtcctcatagcgaatggccggaaggagaagtttgcatctggtttgttgaaacccttcctggctcacctgaaggccgctcaggatcagattgcgaagggagggtactcgatcacacttgaaccaagctcagagttcgacgtgccatggttcacgagaggcaccgtggagaggtttgtgcgtttcgtgagtactccggaggtgcttgagcgagtcacaacactggagtctgagatcctgcagctcgaggatgccattgctatccagaggaacgatagtcttagattaaaatgtgtaagcgcggaagatttctctaccttatggctaggttgctttgtgtatttgtagagagatcacat

SEQ ID NO: 280297 - DNA, 471 bp, Zea mays
ttttatcgcgtgggcggacgcgtgggatcgccatggcctccacagagcaacagtgctggtttgcctcagaattcaaaagctttggtactgtctggaaatggccctgccagcacctctggatcaagcacagacatcttctctgcacttacacagccaaagccaagcttatctgcacctcagacaagctcgattccgagttcatccagttctatggccacgcctactggctcccagaacctgactaatctcactcagtttggttctttgcaaggtagcagccaacctcaacagactcagcctatcgtaaagtccattcctgctccagctacaccctgttgtctctgctgggatttctaattcagcttctcaatggcccaaaattactcaaccggacatccagaagtacatgaaagtctttggggatgttgatagggacagagatggcaaaataactggtgcagaagctcgcac

SEQ ID NO: 280298 - DNA, 452 bp, Zea mays
tttcctttgtattttccgaattcacatcactcaatcgagaccagatatttatggacctgcatttgtggaagttgaaaacatgtttgggttatcaaattttgttcctatcctttttggaagcaaacagttgtgttctgaactagagaggattcatgatgctctttgtggttcttacagtgaaaataatgtacttggcgagttactcagtgcttcttctgatcctcatgagcaccggaaactttgtagttctgtgatgtctggattcctgatcgacattggatggcttatcagaaagcctactcctgacgaatttaaaagtgtgctgagttcaacaaatatacagagatggatatgcatgttgaagtttttgctacagaatgatttcatcaatgctctggagataatcgtgaagtcaatggacagcatcatgggttcagaggttctttcaaact

SEQ ID NO: 280299 - DNA, 945 bp, Zea mays
acttctaccaatggcatacaagaaaatggggaagttctcgacgcagctagtggatctccattgccaggaatgaagcaacagcttgatgattctgtcaggatccccaaggctacaatagacattctaaaggatcaggtttttggatttgacacattttttgtaacaagtcaggagccttacgagggtggagtattattcaagggaaatcttcgtggtaaaccagccaaaagttatgagaagatcacaagtcggctacagaacaaatttggtgatgaatataagctttttcttctcatcaacccagaggatgagaagccagttgctgtggttatacccaagcagacattacagcctgaaactacagcggtcccagaatggtttgctgctgctgcatttggattagttaccatcttcactctgctacttcgaaatgtacctgttctacaggagaacttgctatcaacatttgacaaccttgagttgttgaaagacggactatccggtgctctagtaactggccttataataggggtgcacgaaattggacatatccttgctgccagggaaagtggaatcaagctcggcgtgccatattttgttcctagctggcagataggatctttcggcgggattaccagaatcgtcaatatcgtccgcaaccgtgaggacctactgaagctagcggctgctggaccattggccgggttttccttgggattcgttcttctgctgctgggcttcgtcttgcctccaagtgatggccttggccttgtgatagatccaaccgtcttccatgaatcgttcctcgttggtggtctcgcgaaacttcttctcggagatgttttgaaagaagggacgcagttatccataaacccgcttgttctatgggcctgggccggtctcctgatcaacgctatcaacagcatacccgctggggagctgaac

SEQ ID NO: 280300 - DNA, 418 bp, Zea mays
ttccattcgtccgcccacgcgtccgaaaggacaccattaatgctaggcttgatttggaggacatgggcataaggagacatttacacttaaagcataatggtgactcatacaattttcctcatgcaccatacacaatgaataaaacacagaaggttgctttttgtgactttttgagaagtgtgaaattccccgatggctatgtttctaacttagcaacatgttttagtactgatggatgcaacctccaagcattgaaaactcatgattgtcatttccttcttcaaagaattttacctgctgctattagaggaatcatgagtaaggacatatatgaagcactttgctgaattaggtattttctttcagcacatatgtgctaagacattgaagttggatgttttacaaagaatgaaagttg

SEQ ID NO: 280301 - DNA, 204 bp, Zea mays
catccctccagcctccagcaccaaccatccaccaccgagctagcagctgtctgctcgcctcccccacctaggctaggactaggagccaccaaactctgccccgccatgccgggcctcgccgcctcaggcaactcgcccccggcggcggcgccggccccgcgccgtctctcgacgtcggtgtcccgccgcgcgccgtcgatcccg

SEQ ID NO: 280302 - DNA, 493 bp, Zea mays
acaaatctctcgtgctccactcttctccacgtccatcccgcgccccgaatttcccgagccaactccgccccgccctgtcgctttcccttccacacgcgccgttcgctttgatcgatcaggcaggcatggccgacgagacgaagcaagaagccgccgccccggcggccgaggtggtcgtgacggaggaggagaagaaggcagaagagaccgccccggtggcggaggaaaaggccgtggaggcggctgtagagaaggccgcggaggcggaggcgggggccgaggaaaaggccgcggaagcggactcggaggaggagaagaaggcggaggaggccgaggaggccgccgcgggcgatgaggcggccgtgatcgatggcactgggtcgttcaaggaggagagtaacctggtgtccgagctccccgaccctgagcgcacagcgctcgcgcagctcatggagctcgtcgccaccgcgctcgctaacggggagttcaacct

SEQ ID NO: 280303 - DNA, 506 bp, Zea mays
tcctcgcgtccgcccacgcgtccgcggcgaagccctagctccacagcgccgttgcatggagtcccagcgatacaactacggcagcggcgccggcaccggcggcaaaatccgccgctaccctccctctcgcgccgtggctgcgtcaccatatgctcgaccggccaccgccccgacccacgctcctggaaccgccacggcggcggtttcgcatgagggcgggtggctgtcccggatcatagccgccggcacctcgcgattccttccctccttgttcagcttcagcacgtctcaacctcagcaagccgcgccggccccgtcgccaacgcgcgaccagctgccagtcgtcgagccgccttcgccgcttcccccacctttagtggatgatcgtccagaatgtgaagaaaacggtggagtggctgccaataatttgcgtactgaaaatcctcaaagctgtaccaaggaagaggaagacaacatgctaagaacatctgatgaccatggtggaa

SEQ ID NO: 280304 - DNA, 385 bp, Zea mays
ggctcgagaataatcttgttttgttccgcctgtctcaagccgggttccttcatgaactgcagaaggaatttttgtattttgttttgtggatactgatgtgtactagggtagtctcgatgtatacagaaacaagaagtggcagcatgttatattcgattaattgtatgggtgcgccccctttttctgttttccttgaaatttaactattgggctgaatgtaaatttgggtatatgatttgatgatgacagatgctagatctgtcatcatttttattgtagttgatgatgtctgcatagtcacggctctgcatcaatgtttcttttccttccctagtgattgtgtacacttttgatggcagatcaattttatatggccggtcattgt

SEQ ID NO: 280305 - DNA, 653 bp, Zea mays
attcgatgctagctccctctatataaagagcactcgctccttgatccaaacagacacaggcagcagccattgcttgccctgcatctctcctagctaggtgtcttctcttgctgagtgaagataaaacaatgagttcgtcctggaccgagagtcaaaacaatctcttcgagcgtgcgctggcagtatatgacaaggacacaccagaccgctggcacaacgttgcgcgggcagtcggctgcggcaagacagccgaggacgtgaagaggcactacaagtacctgaagacggacgtgaagcacatcgaaaccgaagaaggcggccgaggatcccagtccagcagccctgctggtgctggtgctggtggcagtggaagcagcagcagcagttcttggggcagggacaacggtgacaagaggatgacgaggcaccccaaccagccgcagtgaagtggatgtgatcttggagagagccttatctctagagcctagagcagcaataggtccacataagaaacaaacaaacaaacaaaaaaggagacatgatgattggtgcgctctctagagatgttaactaagggggtgtttggtttctagggactaatttttagttcctacattttattccattttagttgcaaaattgctaaatataga

SEQ ID NO: 280306 - DNA, 466 bp, Zea mays
tttatttctcttcttgagttgtgtgcgtaggggcctgttcagctcacacggagattgttccagtggagaagggagaagatggcgcttcctgcgtcaccgtcgcccgtcgccatggtttgggcaaggcagggacgcctacagcagcgctacgatggttgctaccgccttgtatcaggatgcattccttacacgctcaaagaggatgctgtggaggagggtgctggaaagcaaagctgccagcaggacgtggtagggaggctgcaagtgctcatgatctcgacgcccaagcggagcgatctcatcttcccaaagggtggatgggaggacgacgagagcatcgacgaagctgccagcagggaggccttcgaggaagcaggcgtcaagggcattatcagcgcgacaccgctgggtgaatggatcttcatgagcatgagcaagcaaaatagttgcggtctgcaggggcatg

SEQ ID NO: 280307 - DNA, 428 bp, Zea mays
tttccgtctgttcctcctcaactggaaaagtcggggggagagaatgctgtagatgagggatcattttaccaatcattaggtgaagtgcttctacaagatgtggaagccagcaaagtactgaaggatggatcaattacctctttcaatggggtcactgatcactttgaaatctcagcttgggcaagcaatcaccctgggctggaatctcgttcaggaaatcttgatgaaaaaacacctcgcacagcagaacatacgaccaatcttggtgtttctgatgcacacacacgttcccaaacgctagggaaggaaagcagtgatgatgttgattgttctcaaggcaggtcaccaacatcaaccataaaaaggaaaattggtctaaaccaaaacaagttgcagggaaatcttgtcgacgaaaagaggaagtatta

SEQ ID NO: 280308 - DNA, 488 bp, Zea mays
cggacgcgtggcgagacgcgtggggccacacccaacaaaaggtaaaccaccgcgtctccgcccgccgccgcccgcagatccatcccctcccggcctccctagcctttcccctcgagcacgtcagcgccctcgccctgctctgtcggccggccaagctcctcaccggcgccatgaacccgtatgatctccgcttcgctgacccctcatcctaccacgacaggcgcagcgacttgaccgtggctcctacgttcgctccgccggctcccgtggctgcggcgaacctgaacccttacgccgccgcctacccgctgcctgtgcccgttcccgtgcccgcggcccccgcgggcggcgactaccagcgctacgggcagggaggcagaggccgtggtggcggtggcagaggcggtggaggagggtacggaggtggcggcagacgaggaggtcgcgggagggacgggcttgactcgctcgccctccctaagccggac

SEQ ID NO: 280309 - DNA, 359 bp, Zea mays
tcctggtcctcctcaaggagttcgagaggaacctgcagaacgggccacggaggagcggcggtggctacgacgacgggctggcgccacagtagattcctctctctttctcggtgtgtggtttgaattttggaagagaacgtgtgctacgcctctacacgaccatgtgttgcagagatgcttcggtgttcgctggtgtgatctctctctctctttttttttttttcctacaaaagacagtttttctcgagggctcatgtgaggactagaaattttagccagtcgaacgaatgccttgagatcacccaatgaaactcattggcgcttccaaagtttgaataaatttcaaagaatctcctcct

SEQ ID NO: 280310 - DNA, 828 bp, Zea mays
ctcatgcgtccgcccacgcgtccgctctctctctctctgcccttcctctcgagttcgagtctcgcgctcgccggtggcgccggggaacagccagctcgagctcgctttcgcttcagctgagatgaaactggaaaagaatcaaagttctgcatcacctgccacttcgaattttagagtgaatagcaatcgccatggggtctggatcagggacactgaagcagaagaaacgagtgaaacatgcaaaaaacaaatacttgaaacctggtgccctcgctcagattcgctatagcaggagtacaagcagggacatcgggaagaaaaggattttgttgaatgcgaaagatgagctggagttacctccacagcctgaggttctcttagaaagcaatacactagttttgtcccctgcaagactcaattttgagccatttggtagcaatacagggcaggtattgccaaagactccaaggactccaaatgcatctgtgtcctgtggtgattcagggcttgaatcacttcctcttgatttgctgatcaagatcatgtgttgcttgcaccatgacgaactgaaagttgttttccatgtttcaaaaaggattcgaaaagcagttcaacttgccagggagtttcatttcaactacactactccagacagaagcagacaggacttgctcctgaatagaacccctcttccaacggagcattggcctttcttaagaatcaacggcaaggacgtgcacgtttccaccccaaggacaccgagggctccaaaacacgctgctcgcctttcacgcctcaagctggtcgacgtgaagccaatcacggctg

SEQ ID NO: 280311 - DNA, 341 bp, Zea mays
caaaagcgccggcgccgttcctctctctctctctctccgtcctctcgagttcgagtctcgatatcggcaaagcagggggacctacctattgtgcggctgcggcgcccgtcgttgattcatccgctggctcgcgctcgccggttggtgccggggaacagccagcctcgacctcgctttcgcttcgcatcatgggagccgctgggttctgagctgcgcggccggcctgtttcagctgagatgaaactggaaaagaatcaaagctctgcatcacctgccacttcgaattttagagtgaatagcaattgccatggggtctggatcagggacactgaagcagaaga

SEQ ID NO: 280312 - DNA, 513 bp, Zea mays
ggtacgaggagctaggtgatgcaccactagtaaccgtgctccgactccgagttcatcacgcacgcatggaaggctcggcggcacttgcgccggggaagaccgtcctgagggtggtggcgatctccggctcgctgcgcagggcgtcggccaacaccggcctcatccgcgccgccgcggagatctgcagggagtcgatcccggggctggaggtggagcacgtggacatctcggagctgccgctgctgaacaccgacctggagggcccgggccccggcgcgttcccggcggccgtcgaggcgttccgcggcaaggtgcgcgccgccgactgcttcctgttcgcgtcgcccgagtacaactactccatctcgggcccgctcaagaacgcgctggactgggggtcgcgcccgcccaactgctggggcgacagggccgtcgccatcctcagcgcgtcgggcgggtcggggggcagccgctcgcagtaccacgtccgccaggtctgcgtttttgctcgac

SEQ ID NO: 280313 - DNA, 542 bp, Zea mays
cgcgctcgtgtcgtcgcagggagaaggtgaccgtctgggcgatgctcgcgttcatcaccctggagggcgccggcgcggacaagacggtcgtgcagtggggcgacaccgcggactcgccgaccgggcccaagggccggcccctcggcacgttcaactcggcgtccttcgccgtgaacgcgcagtacttcctggcaaggaacatcactttcaaggtacgtacgtagccggcaccacgcacccgtgtcgtgtgttccctagtactatatatatgtgctccttagttctggcgttggcgcgcgggacagaacacgtcgccggtgccgaagcctggggcggcggggaagcaggcggtggcgctgcgggtgtcggcggacaacgcggcgttcgtggggtgcaggctcctgggcgcgcaggacacgctgtacgaccactcgggccgccactactacaaggactgctacatccaagggtccgtggacttcatcttcggcaacgcgctgtcgctgtacgaggactgccacgtgcacgcgatcgcgcgggac

SEQ ID NO: 280314 - DNA, 525 bp, Zea mays
gtcctcgatttccttcctacgcgtctcgcgttggcagcgcgatccttcggagccgacgaatcccaccactgcccgcgccgcctccgcagacgacgcaactgacagtcaccgacgcgacgcggctcgcctcctccgcccttctgttcagcctcctcgcccgcgatggctccgggcgccgacgccggctacggccagtgggcggcggcgtgccccccgctgcggcggaacctgcagctgcttgcgcccgacgaggttgagctagcaaaaatgctgctgaatgaaggccagattcacctgttcgaacactggcctgaaccaggtgtcgatgatgacaataaaagaggcttctttgatcaggttcgccgacttaattcaagctatcctggaggtctggtatcttacatgcagaatgccaaaaaacttcttgcggattcaaaggaaggcaaaaacccatatgatggtttcaccccttctgtgccttcaggggaggatttgacttttggcaatgacaattgctgttcactg

SEQ ID NO: 280315 - DNA, 473 bp, Zea mays
ccgtggtacagggcgtactacgaggccctcgcggcaagcgggtggggcggcacggtggagtggttcgagtccaagggccaggaccacgtcttcttcctcttcaaacccgactgcggtgagtccgtggcgctcatcgatcgactcgtcgcgttcttcgctgcgaactgaaattcgtcatgtgtgctccctattttatacatagtagtgacatataaaactgccctataattttaaaataagtatattttatataatttaagtcaccaataaaatatcttgctctaacagtaaaacgtcaaatctaaattatagagcagcttattatggtgtagtatattcgagtcatttgaaaatgtgtactataactcttctactaaattttatgaaacacgttattgttggagtagctttttctatgtagaactatatatttcagtttgcgacatcagttatattattggagatgctctcac

SEQ ID NO: 280316 - DNA, 656 bp, Zea mays
agcgtctgaaaaggatgcgcgtggcgagctgctttgtgcaggagagaatttcgcacactcgggcggtgagctgttggagtttcccttggatggttgttcggctggaggagggtttcctgtaaatgaccatcatgtctcaggtcagagcgtcaccctcaaaagaagagacggaaaacggataatggcgatgatggtgaggcatgcaagcgatgcagctgtaagaagtcgaagtgcctgaaactttactgcgagtgtttcgctgctggtgtgtactgctcagaaccttgttcgtgccaaggatgtatgaacaagcccatacacgaggaaaccgtcctctccactcggaagcagatagagtttcgtaacccgctagcgtttgctccgaaagtgatccgcatgtctgatgccggtctggaaacaggggaagatcctaacaacactccggcttcggctcgtcacaagagaggatgcaattgtaagaagtcaagctgtctcaagaaatactgtgaatgctaccaggtaattcatcccaagctgtgatgatctcatctgaaattgtacctgctggattttacttacgctttttaagtgtttggttgaataaagggaggtgtcggatgctcgagcaactgcagatgtgagagttgcaaaaatgc

SEQ ID NO: 280317 - DNA, 1042 bp, Zea mays
ttgttcacgcgtccgcgcaggtacgacctgctggtgctggcggcggacggcgaggagctgaaggcgctggtggacgaaggctacgacctcctcgggcagctgaactggtccgaccacctcccgtggctggcccgcttcgacctgcagaggacccgggccaggtgctccgcgctcgtcccgcgggtgaaccgcttcgttggcaacatcatcgacgagcaccgtgcgcgcctcggcctcggcgacaccggcggcgtcacggacttcaccgacgtcctgctctccctcctgggcgtcgacaagctctccgacgccgacatggtcgccgttctctgggagatgatcttccgaggcacggacacggtggccgtcctaatggagtgggtgctggcgcgtctcgtgctgcaccaggacgtgcagagcaaggtccaggaggagctggaccgggtggtggggccaccgggccaggccgcatccgtgacggagtcggacaccgcctcgctcgtctacctccaggcggtcatcaaggaagtgctgcgcctgcacccgccaggcccgctgctctcctgggcgcgcctggccacgtcggacgcgcgcgtaggcgggtaccacgtgcccgcgggcaccaccgccatggtgaacatgtgggccataacgcatgaccccagcgtgtgggccgagccgacggagttcaggcccgagaggttcgtgggcgcctctgctggtgctggtgctggtgctggtgccgaggacgttccgatgataatgggctcggatctccggctcgcgcccttcgggtccggcaggcggagctgccccggcatgtcgctcgcgctggctaccgtcgggttctgggtggccaccctgctccacgagttcaaatggttgccgccgtgccgcggcgtcgacctgtccgaggtgctgaggctgtcgtgtgagatggctgcaccgctggaggcgagggtggttccacgtcacgcggtgtgagatgacgaggatgagacacgtgggctggggataggagaagttgcccgatcgtctgact

SEQ ID NO: 280318 - DNA, 477 bp, Zea mays
tgtgttcgtggggtgcgatgaagcgaaatttgagcaatacaagctggttgcaggtgattgtatcacggcagagatcacccagtctgtagagaagtgctttgagaagatcagaggactagagagctaagcagaagaattgacatcatgtccacccacactcggatcctaaaacctgctgaccctgcaccacatccgtgatcacgtcacaccacaagttgtgtgtccagcgcccaccacagcaacggcctcttgctgccagcagcctccgtgcctccagcagctctcctctccaaggaaaagtctgaagtccgcaaccaaacaagtgttctgcagctgctctttgccgttggttgaagtctgcaaccaaacaagtgttatgcagctgctctttgccgttggttggagttcttggctccacactttcagaaagaattcatgtatacataaaatttattatatagagagtttgcttcgtaa

SEQ ID NO: 280319 - DNA, 449 bp, Zea mays
attgaagcagcatttcagtacaaagctaaagagtgccggtcttaaaagtgcaacgctgatgaagcatgttaagacgggcaagactgtttcaatgggatttggctctgttgagtttgactctgctgaaactgctaccggtgtgtgcaaggatctacagggaacggttctggatggacatgcttcgatcttgcaactgtgtcatgtgaagaaagatggtcaagcggcaaagaagaatggcaaggataaaagttcaacataactgctcgtgcgaaatgttgcatttgaagcaactgagaaggactcgaggcagttatttagtccgtttggccaggtcagtgtcctctcttttcatctgaatctaacgcaagtcctaacttgggaccaatggtagctaacgaggctacattttgctcaatattagccaagtccgtcttctcagaccttattga

SEQ ID NO: 280320 - DNA, 491 bp, Zea mays
atctctcaagccttttgaggccaccaatggtgaaaaccgaggcggcggaggagcgggagcccctctcccggacgccagcggcggcagtagcggtcgagggtagcggcagaaggaccgccacggcggtgatcgacctcagcagcagcgactctgattccgacggcgagggtgcggtcggaagcggtaagagggtgaggggcgttggtggagacggctccgcgactaagcgggctagggtttcagcggtcgtcgatctgcccccgggtttcctcgagccaatcccgccgccgccggtgccggtgccattggcagcttgtgcgacgaagcagttctggaaggctggggactacgacggaaagccgctcggtgatggggtggctcagcagtcagtctctggaatggatcatgttcgcgtgcaccctagatttctgcactcaaacgcaacatgtcacaagtgggctctaggtgcttttgctgagctgctggacaat

SEQ ID NO: 280321 - DNA, 1287 bp, Zea mays
  unsure (1)..(1287): unsure at all n locations
gtcgcccaccaaagtccagcctccagcgtccgtccaggagaccagaactccaaacctccagtccagccgtccagggcaccacgcccacgctccagtactccacggaccacggctccagctcggcagctcgcaagtcagctgctcgcctgctccaactcgcaccaccagccgtcccagcgcacgggcgggaatcgctggatcccagcgcacggactccccgccgcagtgccgcacatccacagctcaccaggcgtccgacgtcctgctcatgccgcccgcgtccaggacagaccaagtcccgccgccggccgcccgcgtccaggcagccgccagcccgctagccacccgcgtccagggctctaggcaaccgccactccaccagccgtctcccaggtacgccgccgctgcagatgtcttcgtcggtatcggctacgtcgagcccacagtccacagagaacggtgaccatgacccaagcactaggccagcagcctcgtcccctcctctacagattcaggcaggggacgtatcatcctctccggagatgaccaactcagacaacgcaagacttacaacatcaaagaggagcttagacggtgagagcaacagcttgcctcaaggaactagttctgaagctgctacagaacttgaatctggtaatggttcacaaccaattgaaatagatgatgaagaagattggcaggatgttggttcaaagaggaagctaacttcagaggtttggaaagagttcaagagagtgaaattgttagatgaggttaaggcacaatgcatgcattgtggtaagaagctttcagcaaagtccaaaagcggtactaagcatcttcatgtacatttgacggggtgcccatatcggaggagcaaacttgcaagcaaggataaggtgttggcacaaacttctctaaggttttcttccaagcaaccgggatctttatctttggagaattattcatttgacccagatgtagctagaagagagcttgctgccatgatagtcttgcatgagtaccctttatctatggttgaccatactggctttcgaaggtttgtgagtgcacttcaaccattattcaagatggtgacaagaaacacaatcagaaaggacattatggatgcatatctggaagagaaaaagaaggcattggagtacatgtctgcaactaagtctagagttgctatcactacagacatgtggacctctgatatcaaaaaagaggctacatggcttgaacagcccatttcattgatgactctnggacacttagaaacat

SEQ ID NO: 280322 - DNA, 516 bp, Zea mays
  unsure (1)..(516): unsure at all n locations
ctcatgcgtccgcccacgcgtccgcccacgcgtccgcccacgcgttcgctcttctcaaagtctgccagccctcaccatggatttgcagcatactacacctttgtcgagaagatcttccaggccgatgctgttctgcactttggaacacacnggncccctccagttcatgcctggcaagcacgctgggatgagtgacgcctgcttccctgacagcctcattggcaacatccccaacatctactactatgctgcaaacaacccatcagaggccacggtggccaancnccggagctacgcgaacaccatcagctacctgaccccaccggccgagaacgccggcctctacaaggggctcaagcagctgtcagagctcatctcttcctaccagtctctcaaggacaccgggcgtggtcctcagattgtgagctccatcgtcagcactgcaaagcagtgcaacctcgacaaggatgtccccctgcctgaggaaggggaggagctcccaccaaaggagcgtga

SEQ ID NO: 280323 - DNA, 633 bp, Zea mays
cctggagtatgtttctggtggatctatacataagcttctccaagagtatggacagtttggtgaacaggccatttgcagttatactaagcaaatacttttgggcctagcttatttgcacgcaaagaatacagtacacagagacatcaaaggcgcaaacatattggtagaccctaatggccgcgtgaagctcgctgactttgggatggcaaaacatatcaatgggcagcagtgccctttctcatttaagggtagcccatactggatggctcctgaggttataaaaaatgctagcggatgtaaccttgcagttgatatatggagtttaggatgcacagtcctagagatggctacttcaaaaccaccatggagccaatatgaagggattgccgcaatgtttaagataggaaacagtaaggagcttccgccaataccggatcacctctcagaagaggggaaagacttcataagacagtgcttgacaacgtgatccatccagccgtccaacagcagtggatcttttgcagcatccatttgtaggaaatgcaccaccacttgaaaaatcatctgcctctcatccactggaacaagtgacgactatatcatgcagaacatattggaaggtggttgagcatg

SEQ ID NO: 280324 - DNA, 522 bp, Zea mays
ttttcgtacgtcctcggacggcagcacgaccatcggctccgacgaacatcttgattccccgccatcaccttcgacgttcttcgactctcctcctgaatccgatgactccgccgcctactcgctgctctcggacggctcttcagagtccgagcccatcattttcaagaaaccccgcccacccgtgcgctcgaggccggcctccgacgagatcgcgatcctcgagaccgtcgcgtcgcaccggcagaagcacgggcgacttcccctggcagacgacctcgccgccgcggtgcggggccgcctcagcgcgggggaccgcctcagcgccgcgcagatcaccaggcggctgtgcgcgctccgcaaccggtacgacaacactgttatccgtctcaaacgcggcacgatcccggcgaaggacagcgacgtcaccatctacaggctctccatgctcatctgggagggaacgcgcagggggaggatagagaagaagacccgtgtgcccgacgcgcgcaatgacccaagagg

SEQ ID NO: 280325 - DNA, 383 bp, Zea mays
gccgcgccgagcacgtgctgcagaacccgggtcggtcgcaaggctgtgttcctgcgatgctacgccttctgcatgagtgcatgtctggagggaagcggaaaatgctgttaatcaggaactagttgctttggagaaagagctctcaacacaccgaagaactggctctattgattcgattggactgtacttgtatggcattgccctacatgataaaggatgtgaaggtctaactcgaaagatcttggtagaacctgtcaatagctatccctggaactggagtgcttggtcagagctacaaactttatgcaccagccgtgacatcttaaacaaatcaaatctgaagaatcggtggatgaaagacttccttcttgctagtgcatatc

SEQ ID NO: 280326 - DNA, 324 bp, Zea mays
tcgcctgcaactttgtaacttacagtcacacgatggcaaaacagcatcatctgcatccatgcatgggtcgttcgtcgtcgtcactgcctctcctgctggttccactcgagtattgccgaacgaagggccctgttcggcacgagaaggctgcgctcgaggtcgagattcgtcatgggtgcatgtgctatgcccgctgtcaagccagcccctaatagcttcaccctcataagtgaatccatccgctgcaacgtaagggtctctcatgatctcctggccaccatcaaattacagccatgagtttacccatttcaatgtatttaggtg

SEQ ID NO: 280327 - DNA, 379 bp, Zea mays
cttgtggacaactcagtattaacatcagtagggcctgaaatgctagcgacaacttctgtctctgatacatgcaaaacggaggagtttgtgaatcagcaaaaagcacttgaagcagatgcatcaaatgcttcacttaatcagcctcacatttccgctgtaccttccgagaaacaagatattgagtgtgaatgtcctagcccaactccaaggtctgactgtaaggaacctcttatggacaactcagtattaacatcagcgctgcctgaaattctagcaacatcttctgcttctgataaatgcaaaatggaggagtttgtgaattagcaatgaccaattgaagttggtttttcaattgcttcactttattagtcttatctgt

SEQ ID NO: 280328 - DNA, 858 bp, Zea mays
cacgcgtccgggaaccagcatgaagccactggtggcgcgcctgctcctctgctaccccctgctctgcctggcgcccgcggcagccccgttacgcctgcagcacgatcatgtccggggccacggccacggccatgcccacccgcctccgtacgcgcgtaacgcgacggcgtacggcgtctcggcggcgctgtgcccgggctgcggcgcgtgggcggacgcgctggagttcctctactaccacaacctggtgcggctggcgtcgctggagccgccgctggcgtggtccccgcgcctggcgtcgtacgcgggctggtgggcggcgcagcgcacgggggactgcgcgctgcgccactccttccccgacggccagttcgcgctcggggagaacgtcttctggggcgggcccggcggcgcgtggcggccccgggacgccgtcgcggactgggccgccgagggcgccgactactcgtacgccgacaacgcgtgcgcgccaggccgggagtgcgcgcactacacccagatcgtgtggcgacgcaccaccgccgtcggttgcgcccgggtggcgtgccacggcggcggggtgttcatcacctgcaactactacccgcccggcaacgtcgtcggcgagaggccgtactaactagctagcttagcaactcagtaccctcggcctcggggatttattacgtgacgtggcgaacggcctcgtgtagccgtgtcgtgtgtaaataatattcagcggtcgttccggtgaacatgatggtaattcactcgagtttttcactgttggcttccgtaaatcgtgtttggtttgaccagaggcctcagagccacgatcacaataaaatgtggttttac

SEQ ID NO: 280329 - DNA, 584 bp, Zea mays
tcgctgcaaaacttgatactgctaaaattagaaagcaataatattactggagatgtctcttcacttatttactgcttgagtctcaatatcttaaatgtatcatacaaccatctttatggtactgtacctacagacaacaacttctcacgattttcacccgacagcttcttgggtaaccctggactttgtggctattggcttcactctgcttcatgcacacaattatccaatgcagagcaaatgaagagatcctctagcgcaaaggcctcaatgtttgcagctattggtgttggtgccgtattgcttgttattatgctcgttatcctagtagttatttgctggccacataactctccagtgctcaaagatgtctctgtaaacaaaccaggtgatacatctttttggtttcccgtctgttgctctaacaagaaaaaattcaatactcttttgtaaccgccagtgtgactcacactggaggtttcaaatcattttatcctgtaagagtatgagaatgttgattgtattccatctcaatgtacagtggtacataaatagacaccatacaggcctacatgccactaatc

SEQ ID NO: 280330 - DNA, 457 bp, Zea mays
tgcctgcgctcgtgaagcatcatgccgaccttcagatcaaggttgaggatgggaacacggcacaggacctgtgccctccgagctggtcttttatgaaccgggcgaactgacaaccaacatgctaccttacattagctgtactctaagctggtaccgcacttggtcatgtgctttttctttatgggggacatatggtgtacctggtgtgccctgtgtgaagtgccgtgcgtggcgcccgctatgacgattgggaaatcagatgagctgttttattttatccacctcatctaactagttgtcaaaactcaaaagtcgagtggttgaagtgttagtgctgggagatacatgtgttgccttacgccaatggtctgttactgttagtgaaaaggaactacaatcatacatgttccttgttgtaccttgtttcctttgtatttattggcccgccgtttgtgtg

SEQ ID NO: 280331 - DNA, 485 bp, Zea mays
tctctggtatctctgggtattcaagttgaggacaaggatgtctgctcttcacaagtacttggtggcacacaagatttatcttctaagaagccccaggaagacaatgttaatattgtgcccatcgtacctgtctatgtaaatgatggtttaatgatgcccaattctgttgatgatgaagcaagttcgccgttagaggaaaccaatcctgccgaagtgttacagcacattggagcaggggaggagaatccctgtcctgctcaagagttcgagtccattggagcaggtggggaggaagagttgaacctcctaagatctatgggctgggatgagaacgaagatgttcagcctcttcagcaggaggagattgctgattgtctaaagcagaacgtcaggctgcagcagaagcttcaagaatgcaagggctgatcgcaatcaatggagcaacgtcactgtgcctcaccacactgagggggtgtttgatacct

SEQ ID NO: 280332 - DNA, 860 bp, Zea mays
  unsure (1)..(860): unsure at all n locations
aacgcaggggcttggtccagcgacttctcagaaacgcgccaccagccaacgagcaagggccgcagccggagctccaatggcctccttctcctccctctctgcctcctcctccacctccaccccgtccttcaacctccccgcaaaaacctccgctggcacaggctccctgtcattccacagggcgagggagtcgcagaagtccagggccaggatggtgacggtgcgggcggaggcggttgacacgaccatcagcccgcgggtgaatgcgctcaggccgtccaagaccatggccatcaccgaccaggccacggcgctgcgacaggccggcgtgccagtcatcggactcgccgctggggagcccgacttcgacacgccagccgtgatcgccgaggctgggataaatgccatcagagatggggccacaagatacacgcctaatgctggaactctggagctgaggaaggctatctgcaaaaagcttgaggaggagaatggtctatcatactccgccgatcaggtgctagtaagcaatggagccaagcagtgcattacacaagcagtactcgctgtctgctcacctggcgatgaagttttgatacctgcaccatattgggtcagctaccctgagatggctagactggctggtgcaacgccagttattctccctacaagcatatcagacaattacctgctaaggccagagtcacttgcctcagtgatcaatgaaaatcaaggatcttgattctctgctctccatctaatccacaggggctgtgtatcctaaggagttgctngaggagattgctgctatagtcagaaagcatcctagactcctagtttattcgatgagatctatgagc

SEQ ID NO: 280333 - DNA, 789 bp, Zea mays
  unsure (1)..(789): unsure at all n locations
ctcttgaggagatactgtaacgaaacatggctcctctgactcctagactggtagtgcccatagacgtgaagaagcagccatgggagcagaaggttcctctccacaaccgctggcatccagacatccctcccgttgctgatgtaaccgaaggggaactgttccgggtcgagatggtagactggactggagggagggttagagacgataactctgcagacgacatcaaatccctggacctcacaatcactcattatcttagtgggcccctaagaatcgttgattccgaaggggttccggcttcaccaggcgatcttctcgcggtggaaatctgcaaccttggcccgcttcctggcgacgagtggggctacactgcgatatttgagagagagaacggaggtgggttcctaactgaccacttccctactgcgaggaaggccatctggtatttcgaaggaatctatgcgtactcccctcagataccaggtgttcgtttcccaggattaacccatcctggtatagtgggaactgcaccgtcagccgaacttcttaatatatggaacgagagggagaaaagattggccgagacaagcccacagacccttaaactgtgtgaagtgctgcaccagaggcctcttgctaatttaccgacccctgagaactgcttacttggaaaggcatgagcacccacctgcttgtagtggtgcttctagacttgtgttntcacacctgtacgattaatctntttgtgttacctaaaagcaacactaatctgtcagacttaagtataac

SEQ ID NO: 280334 - DNA, 592 bp, Zea mays
cttgtcgttcggcgcctcaaaccccagattcggatccgccatcaccatagaggtgggggcagacggcatagcgctcatcaccatcgccaacctgcccgtggtggatgcgccatcgcctgaggcgagccgcggggaaatgagggatccttggaggcagagctggcgtcgcgtcgccggtggacgctggtgctggtgaacatggcgtcggtgctggaaaagatagacgagatgttgctgctcgccgtgtacaagaaggtgtgcacgtcgctgggcgcttctcgacggcgctgggctcccaaaccctttgtcgcgcgctcgttcaagccgcctactacctactcaaagcctacgcctccgcgcgccatgatcgggcccgtgtcgtcgctgtcggagccttcacctgggccaccatcgccttcctcgtcgccatctccggcagcttcctctaggaaggccatctggtatttcgaaggaatctatgcgtactcccctcagataccaggtgttcgtttcccaggattaacccatcctggtatagtgggaactgcaccgtcagccaaacttcttaatgtatggaatgagagggagaaaa

SEQ ID NO: 280335 - DNA, 276 bp, Zea mays
tttgcacccaatcccttgtcctgtcctcgaaccgtccgccgccgcgttcaacatgggcgacccgccgacgctcaagaggcccaagctcgagaaggccgacgacgactccacctactgcccccgcccggcctccaatggcgccgcgcccgtacgcacaccaggcgccaccgccgccacaggggcggcgccgggtgacgacgtggaggaggatgacatcgcggaggaggcggtcatcgccctgatcgcgcaccgcgagcgcgacgtcgagcgctgcaa

SEQ ID NO: 280336 - DNA, 370 bp, Zea mays
ctacgcgtccgcccacgcgtccgtccgacccgagatcgttttccattcccatcgcttctcttctccacacgaactcactcttgagagatagagcgaaacacaaagcaggcaaaaaaaaaaaaggatagagagaaaaaatcattctcgtttctctcactccgctatacccccgcccggatcgatggagattagggctccgccaacgagcctcagtctcgcgccgccgcccgcctccgccagcttccgccgaacaccgcttaggaccttcttccttaacggcagcgtttcacttagagttgtgcaagttcgacaatcaaatgtcaacagatttaagtgcaatagcatacaaagttacctctttgatagacta

SEQ ID NO: 280337 - DNA, 627 bp, Zea mays
ggctgcattccctaatgtgattgaagcagcacatcatcgtgttgttacactctcctggtctataataaatttttccaggcagtgtttagatccaggaattagggcaaaatacttcagtccacgactaatggaggctgtgatctggttcttggccagatgggttgcaacctatttagtgccacttgacgtgagtagaggaaaagtaagcagagaaattgataatgtgggtacaaatggatcccaacattccagaaaactgctaaacagttttgcttgggaaaataaccaaggagagcttgttcttgattttgttgttctcatttcaatgttagctcttactacctatcagggagaaaatgagttgcagacactgacatgccagaagctacttgctacagtcgttcgccggaaacacacatgcacttatcttgttcaactggattcatggcgtgatcttacaagagcttttgcaagtggacggtctttgctttcattgagtggacgtttacaaaggtctctagcagaaacacttgcctctggagcttcctgcatcaaagatcctgaagcatctgcacagtacctgagggatctcattggaccagtggcagggtgcctggtagaaaatgc

SEQ ID NO: 280338 - DNA, 588 bp, Zea mays
cccacgcgtccgcccacgcgtccgcctgctccctcgcttcaaatcgattcggcgctaccgagcaccaaacgccaaggcggctgcttaccagagtcatgcggacccaaagaagcctccttcccctgctcctgctttccgccgccgcgctgctcgccgacgcgcaggagcgcaagaactacgtggttcatctcgagccgagggacggcggcagcaccgcttcgttggaggagtggcaccggtccttcttgccggaggcgacgctggactcggcggcggacgacgggccgaggatcatccactcgtacagccacgtgctgacgggcttcgctgcccgcctcaccgacgcggaggcggagacgctgcggcgcaaggaggggtgtctgcggctgtacccagaggagttcctgccgctggcgaccacccactcgccgggcttcctcggcctccacatgggcaaggacggcttctggagccgctccggcttcggccgcggcgtggtgattggcctcctcgacaccggcatcctgcccagccacccgtccttcggcgacgccgggctgccgccgccgcccaagaagtggaagggcg

SEQ ID NO: 280339 - DNA, 763 bp, Zea mays
ataaattcagagaaaggaggaagggagactgggagaaacagacaggaaggagcccatccgcgtctgcctccacccctcggctcccagagtccccgctagccaagcccccacatggcaccaccgcccgcgggcctcgtgctcgtggctctgctcgcgctggtcctggcgctggcgccggcgccggcgcgcggggacaagccggcgaggggcggggcgtccagctccatcgccgccggggcggagactgagccgttctccgccgtcttcccgctctacggcgacgtctacccgcacgggttgtactacgtggctatgaacatcggcaacccacccaagccatacttcctggacgtggactccggcagcgacctcacctggctgcagtgcgacgcgccctgcaggagctgcaacgaggtacccccgccccgccttctttcgccatgccggcccatgcgttccattgcttctagctgtcctcccatcgcttcttcttgttgtcggtgcgcaggtgccgcacccgctgtaccggccaacaaagagcaagctggtgccatgcgtgcaccggctgtgcgcttccctgcacaacgcgctgaccggcgggaagcacagatgcgagtcgccgcacgagcaatgcgactacgtgatcaagtacgcagaccaggggtcgttcaccggcgtgctcgttaacgacagcttcgcgctccgtctcaccaacggctctgtcgctcgccccagcgtcgccttcgggtcggtacactactac

SEQ ID NO: 280340 - DNA, 507 bp, Zea mays
ggcccgccggggcgggccgggccggaatgcccgggtctgaccacgcggccggatagcatcacactcgcagttgcagagttccgcttcatcagtcccacactctccccttcctccccccagtcctgagcttcgccgaggcatacggacaataccggcaccggcagcgagcagtcgggagccatggctccgcggctcctgctcttcctcctcctcctcctcccgctcctcgccgccggacaccagcacccgtcctcctacggctcctccgcgctttccgagtggcgccccgccaaggcatcctactacgccgccgaccccgaagacgccatcggtggggcgtgcgggttcggggatctgggaaagcacgggtacgggatggcgacggtggggctgagcacggcgctgttcgagcgcggcgcggcgtgcggcggctgctacgaggtcaagtgcgtcgaggatctcaagtactgcctccccggcacctccatagtcgtcacgggcaccaac

SEQ ID NO: 280341 - DNA, 675 bp, Zea mays
tcttatgcagcaaatgcagcagcagcagcagcaacaacatcaacaacaacaacagatacagcctcagcagcaacagatgcagcaaatgcagcagcagcagcagcaacagatgcagtctcaacagcaacagatgcagcaaatgcagcagcagcagcaacagatgcagcctcagcagcaacagatgcagcaaatgcagcagcagcagcaacagatgcagcctcaacagcagcagcaaccccagatggtgggtacaggaatggggcagcagttcatgcaggggcacaatcgggcagtgcagatgatgcaagggaagattacgccacaggggccgggcagcatgcctgggggaggcttcctaccttaagcaccttttatcagcaggcatcagatgaattgagggtttacactgacccaagtgttgagatgtcaacttcatttgacagggttagggaatagtcactcggggagtgttgctaaaacttaatctgaaaacttaagcatccctgtcaccgataggtaaatgccagatgtccatgcataggtgcatactttatgatatggtggtgtactcgtaatcttgagtgactttatggcattgttgtactagccgtaaactattaggtataacagaattattatttcacctacagtaaaataactgccctgtgttgtttg

SEQ ID NO: 280342 - DNA, 349 bp, Zea mays
cggacgctgggtcggacgcgtggcacagaggtgacctacacttttgggagaagctgagcggtttcgttctccttcctgccgctggccggccggctggtggcaagctcgatcgagctaggagtcagatggaaggcacgatgaagcacagcaacgttgtgacggagaggagctctgtgaccaagccccgtgaacaggaggtgtccgcttggcatgatgaggctggagagcgtctggtttggacgccgagagcagcagttcagctgatgcttcatgcctagcattatcacggcgctatactaatagagcttgtcagccaccatacatatccttgctcagaaaaaccatatcg

SEQ ID NO: 280343 - DNA, 415 bp, Zea mays
tcctctccactctgcggcccgggcgatccccattccgatccatcgcacgggcagcgcccagaccggttcactcatggagtctctagtggctgcgctccccgcgggcggcgctgcggcggcggcggccttcggtgggctggtggccgctgccgcgctcgccggaaaggtcggccttgtcgggtccaagaaacacctcaacgcgcccccagctgtctctggtttacccctgattgggaatcttcatcagttgaaagagaagaaacctcaccagacctttacaaagtgggcagaaatttatgggccaatttacactataaggaccggttcttctactgtagttgtgctcaattcagcccaagtagccaaggagggcaatgtttgccaaattctcatcaatatctactcgaaagctatc

SEQ ID NO: 280344 - DNA, 766 bp, Zea mays
ctgcggctgaagagtgaggtcgacgccgccatccgcgacaccctcgacaaggtcctcgttctccgatttggtcgcgccaccgacgccacttgcctccacctagatgacatcctggctaaatcttcttgggacatatccaagtttgctatggtagcattagttgacatggactctgaggagattcaagtttacattgactactttgacatcactttggttccagcaaccattttcttcttcaatgcccatcacatgaagatggattcagggacacctgaccacacaaaatggataggttcttttagcagcaaacaggactttatcgatgtagttgaggcaatattcagaggtgcgatgaaaggcaaactgatagtgtcttgcccccttcctcctgagaggataccaagattccagcttcttttcaaggatgtctgagaaaactgcagctcatcacgtgcacacaatcagctacctagcccaaggtaactaggtaagtagaaaagctgaagcttctataagagaagcacaacagaggggacagtgcaaggcgtgttcgtgcttcgaagaaacctaattgtgctggaaacagccattttcattctcaagactgtttgcgcaaatctctgcactaatctaatgttgttcttgtccatattgcatgtttaggtttgtatttaatcacgttcatcaaatatgacgggtatagatttcttgtttggtgttaataccttgctactagtttatattgagttttggcattttcccc

SEQ ID NO: 280345 - DNA, 484 bp, Zea mays
attgatgccgccgccgccaatcgccgtgcacagccgcgcgccctagccggccgggtgcaaccgccgccccagccgcgcgcccaagcaggccggcccccaacgccgtcgccgtgatcctattacctgatgcggcggcaccaaacctcgcaaggtcgaagcccgtacgccgccctttgtcgcccaccgtgagtcacccctccggtcctccctccttaccccctcgccaagtccctagaggtcgctcaacgctggatctgccacgaccctaggctcccagctatctacgtcctactcctgcccctggctatacctatgactgcgtctcggcagccggcgccctgtggaagccctccgcttcatatccccgtgctgtcgcgcagccagctgccaggagggacactctgaccacacaaaatggataggtttttttagcaagcaacaagactttatcgatgtagttgaggcataattcagaggtgcgatg

SEQ ID NO: 280346 - DNA, 611 bp, Zea mays
tgtccctttcatcggggcttgtggattggctggtgtggctgctgcccccggatctggtgctggctctgtggcggatgctgcctcatttggagctgctggggctggcttgacgggtaccaaaatggcaagacgaattgggaaagtgaaagaatttgagttcaaacctattggtgataaccataatcagggtcgccttgctgttggcatcctggtttctggatttgcttttgatgaggaggatttctggaaaccttgggaaggatggaaggataacctagagaagtacatccttcaatgggagtccaagcacataattgcagtgagtacagcaatacaggattggctgacatcaaggcttgcaatggaattgatgaaacaaggtgctatgagaactgtcttaagtggccttcttgcagcatttgcttggcctgctacgttgcttgccgctacagattttattgatagtaaatggtctgttgccatcgacagatcagataaagcaggaaaaatgcttgcagaagtgcttcttaagggactgcaaggaaacaggcctgtgactcttgttgggttctcgcttggagcgcgagtcatattcaagtgcttacaggagc

SEQ ID NO: 280347 - DNA, 677 bp, Zea mays
tccatcgcgtccgcccacgcgtccgtttcgataaccggcattcagctctagaagatagctgttgcaagataagttttggatccatgtattgcagcttcctttcaaactaaatggcactcctgcagaacattttgtttgcaacatttttttgctcctagagttcaattttaggccaactcaaatgtaagtgcagttccagcccgagtacaactatggaatagtgcagtgcaggcacctacggattggaaatttgtgtttgcgcatgacctgttctatcatgtacatggttttctagatacgccactggagggtgacaagtctggcttgctcctcgacgtcatcatgctctgcacctgaagtttgtggctacgatctgcatacaactccagcgaggcacatccccgtcgagatggatcgatgccgtgctcactgggacgacaccaccacaagaatattcctggacctctgcatcgccgagaaggaaaagcagaactacaacagcatggggttgaccaagatagggtggcacaatctgtaccgcaacttcaaggaagagacacgcaggtcttatgataccaagcagctgcagaacaagttcaacggcctgaagaggatgtacagcctgtggagactgcagaacgacaaggctggacctggaggaggaggcgtgtgggaca

SEQ ID NO: 280348 - DNA, 581 bp, Zea mays
ctcgttccagcggcctcgagtctggagaggactcgcctgttctagggttcggtgcccagtcgctgctcgcgtctccgccctccggccaggtcactggcgctaggaggcgctaaatcgagttggcgacgcctccctcacccgtccccgatcgacgtcgggaggcattcctggcggcgtcagcgtcggcgtcggcgtccccgcacgcgcgcactactgactcatctgtgcagatcgagccgtcagtgagcatgacagatcttcctttataagaagagttgacaatgtcaatggacattcctagggggcgtttggcttgaagataatcactctcaaccagccaaacgttcaaaattccaactgattcaggaatccaatggaatcctcaatcaaagaatcaaggagtagagctgaagaatcaggaagtggagctctcccaaacttctgttaatttcgataaccggcattcagctctagaagatagctgttgcaagatacgccactggagggtgacaactctggcttactcctcgacgtcatcatgctctgcacctgaagtttgtggctacgatctgcatacaact

SEQ ID NO: 280349 - DNA, 886 bp, Zea mays
ttccacgcgtccgcccacgcgtccgcccacgcgtccgcccacgcgtccgatggttgtgattcttatttggttggaaacttgtcaaaacttggttttcaagaacctacaccaattcaaaggcaggccatgcccattcttctttcgggtagggaatgctttgcgtgtgcacctactggttctggcaagacattggctttcttgtttccacttcttatgaaaattaagccaggatcaaaaggtggtgttaaagccgtgattctttgcccaacaagggaattggctgcacaaactgtgagagaatgcaagaagttggttaaggggaggaagtactatattaaattgatgaccaaagagctgtccaaatcagggaatttcaaagatatgcactgtgatatccttgtttccacccctcttcgtttggaccatgctgtgaagaaaagagaccttgatttaagtagtgtggaataccttgtcttggatgaatctgataaactttttgagcttggatttgttgaagtggttgattcagttgttgaagcctgttccaatccttcaataattcggtctctgttcagtgccactttacccgattcaattgagactcttgcacgcactataatgcatgatgccattcgagtcattgtcggcagaaagaattcggcctcttcactgattaagcaaaagttgatttttgctggaactgagaggggaaagttgctaactcttcgccaaagctttcaagagtctctcaatcctaccagtattgatttttgttcaaagcaaagagagggccaaggagctttacatagaactggcctttgatgacattagagttgatgtaattcatgcagatcttctgtgagcagcagcgtcaagatgctgttga

SEQ ID NO: 280350 - DNA, 527 bp, Zea mays
ctgaaaatgacctttcaaggcggtcaagttgcctgaaagatgtaaaatctccaaagatcataaagttcctgccaattgatgtcagggttcttaatgacatgactacacatgctagttatttgcctgacaaacagcatcccacaacacagaaatgcaatgattctggagaagattctaagaatgtgataacttcaagtcaacaggaaagttcgtgttctggcagaaaaccaatacttttgggtgaacatggtggcagtcttacaggaagcataagtgaactaatgagtaaaagtgtgatgaatcctattgctattactcctagagttcatactgatcatttaacaacaggaatcccacatggaaatattttttctgcagcggtggagaaagaagaaagcactcacaagagaggtgaagacccttctcaatgttatccaggtgttgaggggaatatgctgaatatgtcttccgaatccagctctagcaatcaggcaatatttctgaaactaatgcacaatctatcagta

SEQ ID NO: 280351 - DNA, 508 bp, Zea mays
ttggacgcgtgggcggcggccttgtgctagtacccacctcgcgatcgacctccctctcgaactcaaagatggccggcaccacaaggtgtagtatcagaggcagcaacgctcccggcttggccctgccatgcttgctgctgctgctgctgctcgcgggcgcaggcgtctccaacggccagctccaggtggggttctactccaagtcctgcccggacgccgagtccaccgtggcgtccgtcgtccggcagtccgggtccgccgaccccaccatcctcccggcgctcatccggctccagttccacgactgcttcgtccgcggctgcgacgggtcggtgctcatcaagggcggcggcaacaacaacaacaacgccgaggtggacaacggcaagcaccagggcctccgcggcctggagatcatcgagggcgccaagacgcagctcgaggcgcagtgccccggcgtcgtctcctgcgccgacatcgtcgtgctcgctgcccgagacgccgtcgc

SEQ ID NO: 280352 - DNA, 524 bp, Zea mays
ttattctatgctaatttggttgaccaagaagagctgcaaaagttgctcatagcatcccagcaacagattgaacaatcaaaggcgaaggatacagagctcgaagcgctgaaggaaccaacttggccatcttattctggaaagggacagcttgcttgatgacatggaccaaagaaagacggacctattggaggctcaactgctcgttgaacagctcgagcaacgggagcagatgctagaagcgcagattgaaatgttgcagctggagaaagacagccttcagcaaaagaccttggagatggacgagacaatcgagcttctagccagatcaaaccaaccagatataaatccacgaatgggcgacaaccaccatcgcggcagcagtgagttcagcaggcggctcgctcagtccgacatgctcctctcccacgcgaggcatgagcattctcgcaggcacgcggccggaagctcgaggacgcaccacggtcggcaccgatgaagctcgaggatgctcgctagtagaatgc

SEQ ID NO: 280353 - DNA, 1059 bp, Zea mays
cgcagacccccgttgaagcctagggtttagcggctacacttctcttctagctagttggcgaccaccgtttacgctaaaccacccgcgcggccgatggacgtcgactcggacccggccgcctcgagcaagcccacgcagatggacctcgaggaccagacggacacaaaggggaagggaaaggcggaggaggggaacgggaagggcgaggagctcgcggactccatcggtagcctctctatcggcccggggcgcaccaatttcaagaagaagcctgtgattatcatcgtcatcggcatggccgggacggggaagacgaccttgatgcaccggctggtatgcgatacgcaagcatcaaataagaggggctacgtcgtcaacctggaccctgcagtgatgaccctgccattcggtgccaacattgatattcgtgacactgtgcggtataaggatgtgatgaaggagtacagccttggtcccaatggcggcatcctcacctcgcttaacttgtttgccaccaagttcgatgaggttgtatctgtcattgaaagacgtgcagaacaattggattatgtactggtggacactcctggtcagattgagatcttcacttggtcagcttcaggagctatcattacggaagcttttgcatcgacgtttccaacagttgtagcatatgttgttgacactccgagatcaacaaaccctgttacttttatgagcaacatgctttatgcctgtagtattctctacaaaactcgccttcctctagtcctgacattcaacaaggttgatgttgccaagcatgagtttgccattgaatggatgcaggactttgaggcatttcagacagctgtggaatctgacaaatcatactccgctacatatacccgaagcctctctctggttcttgacgaattctacaataatttgcgctctgttggagtatctgcgatttctggttctggagtcaatacattttttggagctatagaagccagcgccaaggaatacatggaaacctacagggctgatcttgacaagaggattgctgaaaaggaa

SEQ ID NO: 280354 - DNA, 870 bp, Zea mays
tgtttcatggaccaatccgaactttgcttcacaaacaacccagtgcagagcttgctcgtggtcacctccgcacatttcttacagattatttgagcgattttaatgttggaaagaagttacaatttccaacctaccgtgacagcctaaaggagaggggaacagtccaaatgcttacggtatcacgagaagtggcacttgacgttcagtcactcgccacagtacttggatcatgtcttggaaatgttacctgccaatcacttgtactatttgaagacctcttggtgtcaacgacactgcccccggatgatactttaaacctatatacatatgctgttctgaggttaactccgcgtgctttatattccaatgcaagttcttggtcctatttgcggaaaggaacttctgttagtgctggccaaacatcaagttcatcaaatggaacaactgcaggagaaaggcctctcctacgtgagaaattgtcaaagggaaaggatggctttgttgctgctgatttcacagctacagaagctcgttgtgctgtaccctcgactccaatactttggttccagcaggcagatgagtgcatgcacctatgcatttatcagcacaaaagtctcactatcttactgctggttcctgcttcctcagtgataaatggagaagagggcattactcatgtgaagaaggcgatgcttgaaaatgcatcacagaagattgtcactgttgagcagaaattgacacggggatggggaggagaaaatgcgtatcatgttagcggatatccgtatttgcttgttgatccggagagaagagtatcaagagcctccccacctggggcagtcaccaccctagcaaaggattctctacttg

SEQ ID NO: 280355 - DNA, 763 bp, Zea mays
gcggatcctagatccgtcgaaaacaccacagttgaaggcaagaagcagggtgaagaaactacagcggatcctagatccgtcgaaaacaccacagcacagggcacagaggatgcagaaagcagcaagcagaatgagaacacaaatgtcatggaagaacaaagggtgacggtggaagatacaacctcaagggagatcagcgccatagaaagcacagatgacctgaagggcaaggctactgacgaaaacgaagagatagccgacaaggaaatggtcaccgactcggacaagaaccacgtctcgctgaaggtcctcctcgcggacaagaacgtggaagccaaagagaaggagaagaaggcgactagcgccaaggacctggtgctgtcgttcaggcgccgggtatccaaggacaacgtgtcgccgccggtgaagccaggctcgcccaccaaagacaaagatggctcagggcagcaggactggaactccccggccaggttgcccgtcgagaagaaacccaaggggaggaaacagcagtgggtaccgtttatttgctgctcgtcggtacagtaatccgtttgccagcatcagcttggggcatccattgttgtgtttgtacttgtacgctgatggtagtagattgagtaggaccttcgttccaggattggaccttggcagctttgctactctacttggattgtgaacccggctctgccgtttttgtatgttataaatatctcccttaatgaaggggaggagggtatgcccc

SEQ ID NO: 280356 - DNA, 741 bp, Zea mays
tcttaggaaatgatcaggcttttgtcagggtaaatgtgagaagtggaacaaaaagttcacggcatgaagttgtatttcagcttgattgctgggccagcccatacagggcggcgaatcgctccatgttcttgcctatacggtttcggcagtttggtggtgatgatcattcatggcgtaatctgcttccgaattcatcagcttccttctttttggaggacctgagcagaaggcatctattggaagttttggttgatggaactgaccctatgaactccatgacatatgacatcaatgtcgtaatggatcatcagccccttactaattcagatgcccttaagaaggccttacgtgtcactgtcttgaaggaggggaaattgaatgttattcaaattattgattggctgccagataatagaaatcgaggacagataactgaaaggatgttatcaccaatctttcagccatcagaggtcgactatgggcagtcatctcctgatctggatagtgaatttcatgttactttggaactaacggagcttggcatttctgtaattgaccctatgcctgaggaagttctttacctctcagtgcagcaactgttacttgcatactcatctggaattggctctggagtaaatcggctcaaaatgcggatgcattggattcaagttgataatcaattaccatttgttcctatgcctgtacttttctgtcctcaaaagattgaaaatcagtcagact

SEQ ID NO: 280357 - DNA, 473 bp, Zea mays
  unsure (1)..(473): unsure at all n locations
ncctcgcgtccgcccacgcgtccgcacaaaggggggggtgtaggaggccaagcccatcgtcatcacccatgggaacaaatgggcatctcgacctcgacacggaaggtaaatccgtagatcaaaaggtataccggtcgatgataggttctttactctacttgtgtgcatctcgaccggatattatgctttctgtatgcatgtgtgcaagattccaagccaatcctaaggaagttcaccttagggccgtaaaacgaatctggagatatttagtttatactcctaagtttggcatttggtaccccagagggtccacatttgatttaattggttattccgatgctgattggacagggtgcaaaattaatagaaatagcacatcagggacttgccagttcttgggaagatctctggggtcttgggcttcaaagaagcaaaattctgtagctctttctaccgccgaagccgagtatatt

SEQ ID NO: 280358 - DNA, 431 bp, Zea mays
tcttccacgcgtccgcccacgcgtccggggggagttgaagtacttcttgggatttcaagtgaagcaactccaagagggcaccttcattagccaaacgaagtatactcaagatattctaagcaagtttgggatgaaggatgccaagcccatcaagacacccatgggaaccaatgggcatctcgacctcgacacgggaggtaaatccgtcgatcaaaaggtataccggtcgatgataggctctttactctacttatgtgcatctcgaccggatattatgctttccgtatgcatgtgtgcaagattccaagccgaccctaaggaagctcaccttacggtcgtaaaacgaatcttgagatatctagttcatactcctaattttgggctttggtaccctcggagatccacatttgatttaattggttattcggatg

SEQ ID NO: 280359 - DNA, 619 bp, Zea mays
tatcggaatgcagaactctggctctgttcaaccagtggtggtggtggagcgaacagtcttctaccgagaacgagcagcgggcatgtattcagctttcccgtatgcatttggacaggtcgcaattgaaattccttatatctttgtacagactttgctatatggagtgctagtctattcaatgattgggtttgagtggactgttgccaagttcctctggtacctgttcttcatgtacttcacactgctttacttcacgttctacggaatgatggcggttggcttgactcccaacgaaaccatagccgtcattacctcatcggcgttctacaacgtgtggaacctcttctcaggatatctgttcccccgtccgaaactgcctgtctggcggaggtggtacagctggatctgcccagtcgcatggacactctacggatttgggtgcctcccagttcggcgacatcacgcatccgctggaggactcaccgacaggccagacggtggcgcagttcatcacggattacttcggcttccatcacgacttcctgtgggttgtcgcaggggtgcacgttgggctgaccgtgctcttcgcgttcctgttcagtcttgccatcatgaagtt

SEQ ID NO: 280360 - DNA, 404 bp, Zea mays
ataggctcaagaatgtacaaagggaaagagaagaaaagctagctagattcctcaaggaattcctctctcagtatgttcgtggagacaaagaaggatttgctaatcgtgccgaagctgaggcaaagaagctctcatgcacttcatctgggttggatattcttcgcaccattggatatgtctattctcgacaggcagcaaaggagcttggcaagaaggccatgtacctaggagtgccattcgtagccgagtgggtcaggaacaagggtcatctgtggaagtcacagatcaccgcagcgaaaggggccttgcagctgttgcagttgcaagaggaggcctgccggcagagtagcaaggatggcaatgccaccgagcaggatgtcgacttgcagatgaggatgaacaag

SEQ ID NO: 280361 - DNA, 365 bp, Zea mays
cggacgcgtgggccgccattgaagcgggaagaaattcgaagaaccctcgaaatcaggagaaggaaacaaatcatcctcccatcccgagaagagatggcaacaccaacagccaacagaaggtggggggaaggggacaccgaggcgggcaacgggagcaggtcgggtgggcggtggggggaggaaacgaacaaggccgcgcggtgcgcgggccgccatgtggacgccatgcgcggacgcggcgtggacgtcgtgacgacgcgacacccgccgctcctcccggcccgcaccgccatggccccgccgccgccgcaatgcgcctcaaaacgtccctccgcgcctgcccccgccctccaggtaggggacat

SEQ ID NO: 280362 - DNA, 521 bp, Zea mays
tttcgtctcagcgtatgttgtgcatgtgaagagagagaggaagagggtgacgagcgagaaaaaagctagtagagtgatagcttgacaagacgcattgaagcgaaggccacgcataccaaagcaacctcaccatcgctcgcaagctactcgatcaaggacattattgtcgcaacgagctagcaagaataatccgcgttagtttcgcgaagcggtggtacatatggctcgcatcctcgtgctggctctgctcaccatcgcgagcctcctcctgccgccggtcgtcgcgagccagcaggcggcggccaagtgcgagtacagaaagcactccggccaccggtacaggcacccggtgggcgtgcggaagatcgtggtggacgcgggcggcgccggcgacttcgtctccatccagcgcgccgtcgactccgtgccggagggcaacaccgtgcgcgtcatcgtgcagatcaacgccggcacgtacatagagaaggtggtagtgccggcgtcgaagccgtacgtcacgt

SEQ ID NO: 280363 - DNA, 776 bp, Zea mays
ccggatatcctctagcgccttcccacaatcgcgcttctgcggttctgccgccgccgtccgcgccgcccaccccctcgaccgcgtccctcgctgctttgccctctccaccctccgccatcaccgccgcggcgtccttctgtaccggatccgtcgcagccaccactccgcagatccgctgggttgacgtccagggagctgctccggggatgtcgtcctccgcttccagcgtcgagggcgacgccgccggagagttcacggaggtcgtaatcgtgcgtcacggcgagacgtcatggaacgcctcgcgcatcatacagggacacttggatgcagagcttaatgatattggaaggcagcaagctgttgcggttgctcatcgtctttctaaagaagtgaaaccagttgccatatactcttctgatctgaagcgagcagcagagactgcgcaaacaattgcaagaatttgcaatgtgccaaatgtcgtgttcgatccagcactgagagaaagacacattggagatctgcaaggcatgacgcttcaagatgctgctacagagaggccagaggcatacaaagcttttatgtcccacaagagaaatcaacaagttcctggtggtggagagagtcttgatcaactgtcggagcgatgtgtgtcttttctgtacgacattgttggtaaacacaaaggggagcgagttatcctggtttcacatggcggcaccatcagagagctctacagacacgtgagtcccacgaagccgctccacggcaacatacac

SEQ ID NO: 280364 - DNA, 536 bp, Zea mays
ttgttatcgcccgtgtgctactgccctactgctacctcctcttgattcctaagcagacagagacagagccccggcgacggcgagatggaagaggagcagagcagcggcggatggggcgaggaggcgacgaacaaggcgccgctgctggagccacgggcggcgtcggaccaccagcaccgcaacggaacatcagcaggagacggggctggcgccggcaaggcggaggcggagtggtcggcgctgccgctgcggcggcgcgtgtgggaggagaacaagaggctgtgggtggtggcggggccgtccatcttcacgcgcttctcctccttcggcgtcaccgtcatcagccaggccttcatcggccacatcggcgccacggagctggccgcctacgcgctcgtctccaccgtgctcatgaggttcagcaacggcatcctgctgggcatggcgagcgcgctggagacgttgtgcgggcagtcgtacggcgcgaggcagtaccacatgctgggcatctacctgcatcggtcgtggatcatgct

SEQ ID NO: 280365 - DNA, 388 bp, Zea mays
tgggcacattctttggcttttgtcccggttttgccctccggctcctgccgagctcagcagggggaggcgctgcgcttcgcttcacgccagatccaacctcaccggccaccagcttgcctccatggccggtcgcttcctcctcgtcgttgccgtcgccctcctcctccgccctggggatgcgtccgtgcacgagtaccgcgggctcagcttcgccaacaagggcaacgtcttcatcctccacgccggcagcgagggcctctacgcggccttccacgccaacaccaccgccgaggacgccgccgcagtggccgaagccttcatccggtttgacaagattacttttaggcgatcagaggatactaataattctgtaaaggagacttgttca

SEQ ID NO: 280366 - DNA, 352 bp, Zea mays
ttgttcacgcgtacgcccacgcattcggaatgggggggttgatgagaaaatgggggactatttcatactttggatgggacaagatagctcagcatttgccagcatagtgctcacctccaataaatgtgaaatagctagatatgatgcaatagacaatcaactcacagcggacgtctctcatctgatgaaaattcttaggcgaagatattacctcggggagaaggcgaacgatgcaaatattactggccttttggtgggaagtctgggtgtagctggttatcttcatataatcgaacaaatgaaagatctgatcaaggccgctggaaagaaatcctatacattggtcatgggt

SEQ ID NO: 280367 - DNA, 407 bp, Zea mays
tggacgcgttttcgtgttacgcataaacaccgcttaaacccctcgtcggttccccgtactcattccccacgctcgccttccttcctctcgcgtgtgcgccgtgttcccctccttaccccagaccccagcagcgggccgcggcactgcccgccaccacagcgccatggccgcctcccaccgcctaatcctgctagtcctctgcctcaccgccaccgcggcgtccgcccacaacatcacggccatcctggacgggcgctccgagtacacgctgtacaacagctacctctcggagaccaaggtgtgcgacgagatcaatagccggagctcggtcaccgtcctcgttctcaccaacggcgccatgtcctccctcgtcgccaacctctccctcgccgacattaagaacgcac

SEQ ID NO: 280368 - DNA, 487 bp, Zea mays
tcgttggtttggcgtgacactaccacgagcgtgccgttctggtttcaactgtggttgcaactgcccggaagcagtaaatgtcgctcctgcggattggctgcctcatggacagtgcgctgtcgagctctatagagatcagcatcgcaagacatcaatatcacatgacaagttattactgacggctgcaaaagaagctatcagacaactttggatgaacgttttgaattgcagaagtggtaaaggagaatacagatggctgaacacatgtggaaaggatggagtcctgacaagtgcaattaagacaagagttaagatggaggttgctgcatgggaggcaaatgttcctgtgaaaagtaagaagatggacaaggattacgattccaatgaccgagagtggcttctcatgcttctatgatctgcacttgcctgctgtcaggtgccagtgcacacctgaccgctttgcttgcttaaacatacaaatcttttt

SEQ ID NO: 280369 - DNA, 781 bp, Zea mays
tgcttggggagtcgaagctgctcgttctttgtgttgagctcggcaacgatgactctggatgggctttgtgtgtggggctgctgctgtctaggttgcttgtgcaccctgtgtaggttttgggcccggttttccttaaaattgggccaattccactcttcctcttaattgagaggtagagctcctgccattacgttaaaaaaggaacaacctctaaagtaacatggaatcatctcgttcgtgatctgtcatgatactctttgtggatattttcctaaaggcatttcttgatcgatcatatatgctacttgtgtaatatttttttctcgaacgcgctagagaggtgcacatcattacattaagaagaaaaagggtccaaaatggaccagtacaagtacaagaaaaaacaaccaccttacggtggccaaaaacgaaaatacagaaaaacgtccatacaacaccaagagaactaccgctttatagcccaggaattggagctgttagaagagagaggctcttggcccctgccatatcccacaactgcctctcttcctcagcccttctaatggcaacatttacattggagtgatcttgtcaaagacgcagccgttcctatggttccagatggtccagaaaccaagaattattaaggaattgagtcccttttctgctatgccttgcacctgttcgctcatgcttctgcaccattccatggccttgccttcccctggctgaggagcaagtccttgaagattgaccttgtccaagcatctgcaccaaaatt

SEQ ID NO: 280370 - DNA, 906 bp, Zea mays
agctgggcgcctgcggtccggtccggattccggtctcccacttttccgtcacgcgtccgcccacgcgtccggcttcaataagatatttgatgaacatcaagttgtgtttgaattagaagatgttcgtagtgagttagaaaaactttatggggattttgaggtgcagcatagagagacaaaagagtctcaaagcaaatctaatgcttcctcatctttgagtgttgaaagatcatgtagtttgccatccgcttcatgtcaatttcagtctttcttgtcatcaactcagtctaacccatcaaagagcgagttgcttatctatttggaggagactaatgtgtgtttatcagacaaagagtttgatttgctgaattggtggaaggttaattcacatagatttccagtggtgtcgagaatggcaaagaaattcctaactattctggcgacatctgtgtcttcagagtctacttttagcacgggaggtagaactctagatgattatcgtagttctctaaggccttcaatggtggaggcattggtatgctcttctagctggatccgaggaacacatgatggaagcatgatatatgtggaagaagatgatgaggacaatgttgagaacattatgttcccaaaaagcttggtggaaagcaactaaatttggaagaattggatggagacaagacaagctaagctaaggagacgtcaagagtcaagactcaagagaagatgcatcatactactgctggctgctgctgcttgagaatatactgctttattgagaacattatgttgagaacattatgttttgagaacattatgttttgagctgaatatactgctactgatttctagtgctgaactgctgaatatatactactctttgttgaatatatataattatatact

SEQ ID NO: 280371 - DNA, 428 bp, Zea mays
  unsure (1)..(428): unsure at all n locations
cccgaccggcaaggcgccaaccaacatatattaaccgcgcaccttttgtcctctccttgttcccaaacctctgctagcttcgcttccaaccccatcgatacttcccagcaagctacactacaagctcatccgcctagtccttccatggccgatcaccagcctcaggtcgaggtcctgaccgagtcagtgcgggtcaacggcaccaaggcggaggccacgctcgtgggcggcgagctggtgtggcgccccgccgccggcggcaacggagaggggcaggagcggcggctggagctggagtcggaggtgctcgggttccagatggacgggaagcagctcaaattcgcgacctttgccgcgagcggcggcggtaatgggaaagggggaggaggggatgggaatctgangacaagggaggtagttgaagaaac

SEQ ID NO: 280372 - DNA, 386 bp, Zea mays
ttcgttgatcggcgccatgacggacagcttcatcagggcggtggaggccgagccggggacgacgtacgggcggctgctgagcgcgatgaggacgaggatccgtgacggccaggggagccgccgcctccccggcaggcttggctccttcgtccgctggatgatcccgtccagcagcgtgcaggagcctcagctttgctcttcagagatgttcgacatctacaggaagccgttcctcctctgatttggtcgtcgtctcgtcggctgcgaattccaaacttgatctgagtgatattgttgtgctgtgtaactccatcagttcaacccttgtgcatatgtgccatgtaattatattttacgcgtgaatcaagtcatgcctctcgcctaag

SEQ ID NO: 280373 - DNA, 938 bp, Zea mays
  unsure (1)..(938): unsure at all n locations
ttcgttctccgacaccgagcaatattcggatcatgagatgtgtgttcacgatgaagagggagcgaatatggcgacagctctttatgctattgtcaaactgtagaatcatatggctctactgctcatggcgattgacaacattgtcaaactatacgaggagcacagcaaatatcttcatgccgagcatattagcattcttttggagatgatgtcagctattgcgatacattcaagtgaagtgagctctgagttatccttgcagtcgaaatttcataaagcatgttcccttttggaggtatctgagccagcaattgttcattttgagaacgattcctaccagagttacctcaaacttcttcaagctctgcaacatgattatccatccttgtcagaagagatgaacatagagtctcaagtgcttgatacctgtgagcaaatattgcaaacatatctgaagtgcgcaggacacaaaccatgtgatggggcgtcccaaagaaatccgcctttacattgtgcagtgccgctgagcgcttctaagaaagaggaattggctgctaggactcctctggtccttcaagtgatgaaattgttgggtgatctggagagagattcctttaggagaatattaccctgctttttcccattattggctgatctgatccgctgtgaacatagctctggagaagttcaacatgcactgtacaatatcttccaatcagccattctccccatgataagggtttaataacagattgggacccaccaattgtacagtttttgttaccccactttggtgttgtaattcagttcattgtggcgtcattccattacgaggggttgtatacctatgaggttggcacctcagccctaactgattatacctttgcaataccatatacaaggtgaaatgtatcggtagttctaggcgtaaanaaaaa

SEQ ID NO: 280374 - DNA, 519 bp, Zea mays
ctgacgcgtgggttccaatcagccattctccccatgacacgggtttaatagcagattgtgacccaccaattgtacagttttgttaccccactttggtgttgtaattcagttcattgtggcgtcattccattacgaggggttgtatacctataaggatgacgcataaaaatgctgcagggtctgtcattcagcttaaggactatggagcatctttttaatattcattttaccaatgatgttcatcatatatgctgggaccaggcagaaagacacgggtatggaatcatataagcctatgcatccatgaaccgcaagtcaggtgacctcggcttctcagagccccatgttaccatttgcccattgccatccccagggtcgtgtttatatatagcactagagctacaaaccgcttttgatgttactactggctttgctacgtcgattttttttaattttatacaaaaccctaaacaagaggtacatgccaacaaacacgattttcaattttgctcgttctgt

SEQ ID NO: 280375 - DNA, 644 bp, Zea mays
cggcagcaaggaggacgccaacaggcgcctcgagtgggccaccttgaacctggagcgcggcgtcgtcgtgagcgagacgacgaagggcgacggcaatggcaatgcaggccggaaggcgccgataagcatcgtccggctcttcttggcctgcatggtctccggcggcatccagtacggctgggcgctgcagctctccctcctctcgccctactctcagactcttgggatctcgcacagctacgtgtctctgacatggatctgcgggcctatcgccggatttgtggtgcaacccatcgtgggctactacagcgaccggtgcacctcgaagatgggccggaggaggcccttcatcctcgcgggatgcatcatcatctgcctctctgtgttggtgatcgggttctcggcggacatcgggcggcgcctcggcgacaccaaggagcactgcagcacgttcaccggctcccgctggtccgccgccgccgtctacattgtcggattctggttcctcgacttcgccaacaacacggtccagggaccggctcgcgcgatgatggccgacctggccgctggacagcacggccccaaccgtggccaggcgatcttctgcctgtggatggccctcggcagcgtgcttggatacttgt

SEQ ID NO: 280376 - DNA, 841 bp, Zea mays
ttcaagctgcaataatcaactcaatgcaggttattgaggaccagaatttgctatcgattggaaagcgttttagcagtcatagatccaggggccatacaacgtctggtggcgatgaaaggtcaaaaatggagggttttataagccggcgtggatcagagttggctttcaagcatctctgtgtgaaatttggaccttcattgtttgaaaaccttcccaagttatgggattgccttactgagtttcttagacctgtaaaaacagaagatggtattccggaagatgatgcaagtattgcacagctgggcagatcgtatgaggataaggacccacagtcactcattaattccgcccacgtcgttcgttccatttcacctcacttggctgagcccttaaggcctcaactgctaaatctccttccctctattcttgggtgtgttcgtcatcctcatgtggctgttagactagctgctgcaagatgcatcacatctatggcaaagtcattgaccgatgatgtgatggtactggtgatagaaaatgtcatcccaatgttgtccgatttatcttctgtctgtgcaagacaaggagctgggattctgttaagccttcttgttcacggtttggctgtggagttggttccttatgctcctttcctttgtcgttcctcttctgaagtgtatgagtgacccagatggttctgttaggcagactgtgactcacagctttgctgctcttgttcctttgctgccattatcaaggggtgcttctttaccatgtggactaagtgaacgcttatctagcagtgctgaagatgtgcaatttctagaacagctccttgacatac

SEQ ID NO: 280377 - DNA, 616 bp, Zea mays
cctttatccgtttcccatctgatgctcgtgctccgccgcgtctccttcctcctctcgtcgccctcccctcgcgcaccgctcgcaaaacctctcctgctcctacgcccgccccaaaccctagccccgacagcgcggcagctcgtggctatggccgcgtcagtcccgtcggcgggtggggcggggacgatgagccgcgacgcgttccgcgcggccgtgaccaacacgctggagcgccggctcttcttcgtgccctctttcaagatctacggcggcgtcgcggggctctacgactacggacccccaggttgcgctgtcaaagctaacgtcctcgcattctggcgccagcattttgtattggaggaagggatgcttgaggttgactgtccatgtgtgacgccagaagttgtcttgaaagcctctggacatgttgataaatttacagacttaatggttaaagatgaaaagacaggcaactgctaccgtgcggatcatttgctgaaggacttctgtaaggataagcttgagaaagatcacacattgtcaccagagatggccgaagaatacaataaaggtcttgctattcctgatgatctcactgcaagacaattgggtgcta

SEQ ID NO: 280378 - DNA, 660 bp, Zea mays
ggattgcgactttttagcctgataaacaacatgcccacgatatttgaggtagtgacaggagcagccaagaagcaggcgaaggagaagacacctaatagtagcagcaagagcaacaggcctagttcaaaagtgcagtcaagagcagagtctcgttcaaaggctaaggtcccccaagacgaagaagagagcggtgatgacgatgaggatgaggaggcagacgagcacaacaataccttgtgtggaacttgcggaactaacgacagcaaggaccagttctggatctgttgtgataactgcgagaagtggtaccatgggaagtgtgtcaagatcacgccagctcgagctgagcatatcaagcagtacaagtgcccagactgcaccaacaagcgggccagggcatgagcggcaaacatcggcatcgggcgacctttgataggaaggaagaaaccacctcctggcttcaagatccctagatatggcgtaggtccctagtttacgaagtctgcattttcatgtgttcattaatatatctgctgattagctgttcgacctagcagtgtctaaaacgtgccgtgtgtcttctgtgctgagtgttgacatggggcctcccccccccagcctgtaaacgctgtcactcaaggtacttttcatctgcccccc

SEQ ID NO: 280379 - DNA, 772 bp, Zea mays
gtctctcggggcgacgactaggcgtgttgtttgccggccgccgacgtcgacgcccgccgccagattcccaggtatctatcttcgggaccttgaccggcgacgagcacccaacaggtactgattttgctgaagcaacagaataatgtattagccctcatgtgttaacacctacataaactttgagtatcctagtttcaagtgaaatcatggcacgaaaaggaaatcaaagtaagagtggccccaatcatgcttcacctaagtggaaaaatacaactgatggtgatgcactaagtacaccagaaagaggtgctgcagatagtgaaaatccgagttcacatgttcaaggcagatcaaagggtcctgaaggaagcagtgagaagaaaggaagaggcagcaaaaggaacagcacaaacaacggcatatcatcctctggaaaaaaacaacaaatggacaccggttgtgatataagcagttcagaagaaaaggagattccggtaagaggtactaaaaatagaagaggtagccagaaaccctctaggcgcggttttggtagaagttttttgattgagcaaacaacatcgtctggattggcaggaaatgttttggagaagaccaggtgcattgcttgcatggctgcatccattattagagcttccatgatatatctagttgaagaaggcaaaagatttatcgacaaaagatgccaacaatcaacacttatatggcttttgcaacaaagggcatgcatatgtcttaagcaaattgatatgtt

SEQ ID NO: 280380 - DNA, 1943 bp, Zea mays
cccatttcgttcggtggcatttctcctaatctagccttgttttttgtaggacaggatagtctgccatggattttagcacgacatgagatcccatggcttgatgtcgttgtagatccttgtgcttctttcctcgttttcgtcgtcactggccttctctgtgtggggataaaagagagttcatttgtgcaaggagttgtgacggtcttaaattgctttgtgatgttatttgttatcatagccggtagctacatcggcttccaaacaggatgggttggctacaaggttgctggcggatttttcccttatggagcgaatggaatgcttgccgggtcagcaactgtcttcttcgcctacataggatttgattcagttgccagcacggctgaggaggtgaaaaatccacaacgagatctgccactgggaatcggaacagcattgtcgatttgctgttccttgtacatgttggtttcagttgttattgttggtctggtaccatactttgctatggacccagacacccctatttcatctgcttttgccaaacatgggatgcactgggcaatgtatcttgtaacaactggtgctgttcttgctctctgctcaaccttgatgggatctatattgccacagccaagaatattgatggccatggcacgagatggcctgctaccatcattcttctctgatgtccataagacgacacaagttccagtcaaaagcacagtagtgactggcatctgtgcagctgctcttgctttcttcatggatgtctctcaactggctggaatggttagtgtaggcacgctactcgcgttcactatagttgctgtgtccatcttgattcttagatacgttcctccagatgaggtacccctcccatcttccctgcaagcatcattccgcttgagccaagaaaatgacgaggaaaagctgaggggtacccttggagatgatgatcatgagcaaggctcagctgaaataagtgatgttgtagtagaaccaatcactgaccccctgatcgagaagcagctatacgcaagcaatttgagtgaggcaaaacggcgtaagaccgcggcatgcagcatcacatctgtttgcataggggttctgatcctcacgacgtcagcctcggcaacattcttgcccttcccggtgagatgctccgtttgtgttttgggtggcatgctcctcctagctggtctgggcatgctctgctggattgaccaagatgatgggaggcactcctttggccactccggaggattcatctgtccgtttgttcccttgctgccggtaatgtgtatcctcataaatacatacttgttaataaatcttggtggcggcacgtggatgcgagtgggggtgtggctagtgatgggggtgttcgtctacattttctatggccgcacccacagctcgttgacggatgtcgtgtatgtccctgtggccgaggcgaatgagatatacgggtcatcctcttcgttagggtttgtggcgtaaagagagatggaaggagatgtttgttgaagcctatcttgagccagtcatggtacttctcacaaaaacctcaaagatcctgactggagcaggtacctgcttgagctattgtgttgcaggcatgggtttgaagaattcaatttgtacgtcatatttttaaaatgtgtaaattgtaacgcacggctaagcttgtgtgtctctgttggaggaatgtaaatattagtatattgcatagaactatatataggtggtgccaataaacaggtgtttaaaaaaaagggggggggtcattctaggaatctgtatgttttactacgaacttgttctaaattcctaggaattcaaacaggcatgtctgaggcgtattatgtggttaaggcctcaaaggtccaaacacattttatttcatgttgaaatgaagattacacgagcagaaatccccccgg

SEQ ID NO: 280381 - DNA, 796 bp, Zea mays
cagttggaaatccattcattccttcgtcccccacctgtcgctctatctccatctccatcccgcctcctcctcctcctcatgctgctgcggccactgccactataatagcccagctagctagaggccacccatcaagctgcccattccctcgtgacagcagctgcctgcctgctccgaggcgccacccagctcttcctcgccccagcagccgcttcccgagatccttttcactttcaccaccagggtacatagaccgcatctgcggtgctctgcgctcctcggactcgatttgttggttcatccatccagctgccgccggacgtcgatcagctacctatcttgaaaccacaggaccgagcgtggaaactcccggaccggacattccattttccattccgaaggtggggtgagaaggcggggaatgagtacaaccaaggtgaagagacgtgtgggcaagtatgagctcggccggaccataggcgagggcaccttctcgaaggtcaggttcgcgagggacactgtcaccggcgaggccgtggccattaagatcctggacaaggagaaggtcctcaggcacaagatggttgagcagatcaagcgggagatctggacgatgaagctgatcaagcaccctaacgtcgtccgcatatacgaggtgatgggaagtaaaacaaagatctacattgtgttagaattcgctaccggtggcgagctctctgatacaattgttaaccatggtcgaatgaaggaagacgaggcaaggaggtacttccaacagattatcaatgcagttgat

SEQ ID NO: 280382 - DNA, 769 bp, Zea mays
tgttattgtagttggtgatccagggctaggcaaaagccaactcctccaagctgcagcagctgtttccccacgaggaatatatgtatgtgggaatacgacaacaaaggctggcctaactgttgctgtggttaaagattctatgacaaatgattatgcatttgaggctggtgccatggtccttgctgatcgtggaatatgctgtattgatgagtttgataaaatgtttacagagcatcaggctttacttgaagccatggagcagcaatgtgtttctattgcaaaggctggtcttgtagcaagtttgtcagctcgaacttcagtgttggcagctgcaaatcctattggtggccattatgaccgagcaaaaacagtgaacgagaatctaaaaatgagtgctgccctcctttctcgatttgacttggtgtttattctacttgacaagccagatgagtcactagataaaagagtgtcagaccatataatagctctccataccaatgatgttgataatttcagacccaacaagaggaccagaacagggtcacattttgatggtgatccggggcttggagttggtggaaattcagtagcttcaaggctgaggctacacccagagaaagacaaggacttcactccattatctgggcaacttcttcgcaaatatatatcttattcaagagaacatgtcttccccagaatgtcaaaggcagcagctgcaattttgaaagaattttatttgaagctgagaaaccgcagtgcttctgctgat

SEQ ID NO: 280383 - DNA, 1218 bp, Zea mays
ggacggtgggaaatgatgaaggaagtagaagccccaaaagtaatcatctaacactgttaccagaaagggtagcactttatggtgataaagtttggagatcagcgttgataagtgtaatcaggaattatacgagcgaaagatcctctccgatctgcattgtggctgatgacagcgtgttcctagctctcattgtttcttttctgttaccatcttcaaaagtcctcgctatgtttccatgtcttagagacagtggcctcaactatcttcaagctgttgcagatgcaaataatttatccatggaccggattaaagtgattggtaaaaaggcatcgtcccttactacaaatgacttaaatcatgaaaaggttaatatgttagtgggggaacccttttatcatggaagtgaagggatgctgccatggcaaaatctgcgtttctggaatgaaaggactctgcttgatccgttgctctctgaggatgcattcatcatgccttgtaagggaatattaaggttctgtgccatgtcacttccggacttgtggagaagccgtcgtagccttaaagatgttgagggttttgaccactcagttgttaatgatactttaggggcctgtggtgacctgcctggagagcaacaaggcccttgcctaccttattatgtgtggcaatgcggttataccaagaaattaagtgaagtttactctctcatggatttgaacttttctgagcctatccactcttgttttggtgaaacaaaggttgagtttgcccacgatggaacatgccatgggttcgctgtttggatcgactgggtacttgacaaggaaaattccatagtgataagcaccgggccagagagcagatactggaagcaaggggtgcagctgcttagcacgcctgtacaagtgaacccagcgaattcggtgatgcacgtggaggcgaatttcgatgctgacattggggagctcacgtttaaatccaccacgctctcatgatgccaactgtaatgtgtgcccaaccaagcctcatgcgtccgctgttcttaaaagttagcatttgtcgctgcgttttgttcgtcggagctcctgatgtgagtcaagcactcaagctcatgattacgtgtgtgttctgtcatgctagcacaagcaactgcctcctcggtggagctgttttttcatggtcttgtttgttagcccctcacgtcgtgagcaagctgct

SEQ ID NO: 280384 - DNA, 534 bp, Zea mays
tcgcggttcactaccgtcctgctccacgctcctcggttcccgtgctcgtgtcatcgaccgccggggcccactcaccagtctcccaacacgcagcgagcggcagctcctcctcgtctctcaaagtcgagccgccactcgattaagcgattccaaggcggagcggtgaggtggcgatggagtacaggagggtgaaggatcacgagatttatgatgatttatctcagaaggatgtggaaagcctgagtgggaggacactatctagtgccaatagaggcgcaaaagccaactctagttggaagctaaagtctgttgttactcttgcattgacattgctaacaagttctcaggcaatattaattgtgtggtcaaaaagagctggaaaatatgaatatagtgtcacaaccagctaattttcggtggaggctttaaaatgccttctatcactagctgctcttttaggacgtggaactgccatggtgtcactgatgataatagattaaccacatcttttgatgaagttgtgtatatccgatt

SEQ ID NO: 280385 - DNA, 611 bp, Zea mays
cccacgcttccgcggctcactaccgacctgctccacgctgctcggctcctgtgctcgggtcatcgaccgtcggggcccactcatcagtctctcaacacgcatcgagcggcagctcctcctcgtctctcacaggcctgccgccactcgattaagcgattccacggcggagcggtgaggtggctatggagtacaggagggtgaaggatcagatttatgatgatttatctcagaaggatgtggaaagcctgagtgggaggacactatctagtgccaatactacagctattggtcccgcttctgcaggaggcgcaaaagccaactctagttggaagctaaagtctgttgttactcttgcattgacattgctaacaagttctcaggcaatattaattgtgtggtcaaaaagagctggaaaatatgaatatagtgtcacaacagctaatttttcggtggaggctttaaaatgccttctatcactagctgctctttttaggacgtggaactgccatggtgtcactgatgataatagattaaccacatcttttgatgaagatggtgtatatccgattcctgctgttcttacatggtaaagaacttattgcagtactata

SEQ ID NO: 280386 - DNA, 406 bp, Zea mays
tctagtccctgtggagctcggagggacactgagggttgtagagccaccttccccaaacctaaaacattctccttgttgaggcgtcccgatcagtcgaagatcacagctacatgctgatgaacttggacgatgtttatcagtaactttatcaccctagctgtgtgccagaggatgacggttccaacctgccggttgctggttggatcgagagagaattctggtttgaaaagagttgtctcctgtgggtttgcttgtacaaagaagtgaaagaaaacaacactcttttccttagaattttaggtcccttctgtacagatcaaagtttgtccaacactatttaaaagaatttgagaatgacgtgctttgggttccacatgggtacccgagcactttggcttgctgcgat

SEQ ID NO: 280387 - DNA, 301 bp, Zea mays
tcggagtcaccttccccaaacctaaaacattctgcttgttgagatgtcatggtcggtcgaagatgacagttacgtgctgatgagcttggacgatgcttatcagtaacttatccctctagctgtgtgccagaggatgacggttccaacctgccggtcgctgagaattctggtttgcaaagagttgtctcctatgtctttgcttgtacaaagaagtgaaagaagcaacaccctttcccttagaatttagggtccttctgtacagatcaaagtttctcccccactataacataaagaatttgag

SEQ ID NO: 280388 - DNA, 645 bp, Zea mays
  unsure (1)..(645): unsure at all n locations
tcggacttaagccacaggttcagcagaacgaaggtgctggacctgaactgtccagaactgagaatgtggattatggtgctgctgctcctggtgaagatggcatgacaagttcaccttcattggttgaaacacacgtgagctccgaagtaatagttgagagaatgggcagcctggttcttggtgagaatacaaggacgcctagaaagaagaaaactaaaactccatcaaagatgttagagcaagaggaagataacagtatgctgtcatcttgcatatctgattccattgccaagcagcttgaggatgtagttttggaagagagaaaaggcagtcagaaaaataaaatgagtaaagcatcatcaagagcacagaagggtaagtctacaaaaaggcctgcttcgacaaacatggaggaaaatgctatgaatcagtataactacttgtcaagttctgtattggtagacaatcacccctcatcatctcaatcttcagaaaaagattcaacacaggcttactctgaacaactgtgtgaagaattcagtgaagcagtgaacattggaaatgatgagacaagtgatgatcagatgagacctgatggaagtcttcgttgaagttgccggtctagagcagangcagtctgtacat

SEQ ID NO: 280389 - DNA, 332 bp, Zea mays
  unsure (1)..(332): unsure at all n locations
aaccacgcgtccgcggacctgngatctcggtctcctctctcctccctctcttggggcatggatcgcgccgccgcatcgccgcccgccgtggaggaacccgtcaggaccacctccgttctcgacagcctcggcgcggaggtgctggcggtcatgtccccggtctccatctgcatggccctcgtcgtgctcctcatctccctcctctcgccgccgtcctccgggtccgcagcgggttcgcccccgccagtcaccgctgccacactcgtctacctcgagtcccctaacgactccccgggccagaagctcctcggggcgcttctcgacgccgccgt

SEQ ID NO: 280390 - DNA, 952 bp, Zea mays
ccctttcgtattttgctcagagcagaagcaagcagaggagggcggcggcgctcacagcagcagcaagcagaggagggcggcgctcagagcagcagcaagcataggagggcggcagcgctcagagcagcagcaagcatagaagggcggcgacgctcacagcaacagcaagcagaggagggcggcgctcacagcagcagcaagcagaggagggcggcggcactcatagcagcaccaagcatgggagggcggcggcgctcagagcatttagcagcaagcagatgaagcgggggcgctcaactccagataggctaaagactgtcacggcattggcacagtttcaggcttttcagcccccctggtgggccggaccaaatagaaaagagcagcctggagcccaaaacaaagcacctagtcgagaacaaccctaatcggacgactaatcgccgactaatcgcgattagtcggacgactagggttctagtcgccctaatcgcgtcggtggccctaatcggccttgcagcagcgataagtccgactaatcgcgactaatcgcgattagtcggacggactttaaaaccattccgatggagacaatggaaacaatccagttcgtggagggggtggctaagaactcgaagaatttaaagttggtggagaaccacgaaaacgagaccagggttgccacgtaagagaagactgcatcagcatcactacttgcctgttttgaaatttaatgtacctttcacggaagccctcactaacattaattgttcgtatgtttcatctcagcttgatgactgaaaataactagggccttgcagggaaaccttcgttgacttctgaggtactgaaggttagtgaagaggcagatgattacgttccaaatatgaagtcttgaatactgctgtgacttgtgttttgaaataggtatagtattttctggttctcttgc

SEQ ID NO: 280391 - DNA, 1025 bp, Zea mays
  unsure (1)..(1025): unsure at all n locations
caaaagcattgcatacttgtcgctgcaagtaatccttatcctctgccaacacctgtatactgtcttcctactcaaagtactgatcacaaagagaacattgagacatcaaaagaaccttcaattgctgatgctgagaccgttgcaaagtcatttgctcagtgctctgtctcattgtcagtgatatctccaaaacagcttccagcgttaaaggcaatatacaatgcgggcaagcgaaatcttcgggctgctgatccatcagtcgaccatgcgaaaaatccacacttccttgttttgctctctgagaatttcatggaggcacggactgctcttagtcgccctttacatggaaacttggctccaaatcaaaccataacgaagatggacacggcacctgcagtgactatgccaggaccaacatcaaatggcaactcctcagtgaatgcaatggcaggccgtcaaccaattgttggaggtatttctaccacatctgttaaagtggagccaacaaccatgccaccgatagtttctgcacctgctttctcgcatgtaacgcctatttcaaatgtggcttcacaaggaatatcagcactgcaaacctcatcaccttctcttatttcacaagaagcaaatatgggaaatgataatgtacaagaacacaagcctataataaacccagttcaacaaccgattcggcctggtggtcatggcagcctcctcaacaatctgtcacaggttcggttgatgaactcaacttctttaggaggaggagctacctcgatgggactgcctaacatgggagcaacaccaatacaagtccacatgtcaaacatgatatcaagcggcatgacatcaacaccctctgtcatctcctctatgtctggacctggacaacctattagtactcaacagatggtacagagcacagctcttggttcgtttggctcaaacactcctacntgtacagggcattcaactatttgctgatcatcctctttgactaacaaccaaagcagcatgggcatggg

SEQ ID NO: 280392 - DNA, 542 bp, Zea mays
  unsure (1)..(542): unsure at all n locations
gatcgtcccattatcccgggttcccatcgaaccgcatctgagtatctgaccacgtcacacgacaccagcaccagccctccccttcatcaattggagcacggcgcccgttcattcccctctgctccgctgcttgcctccggctccccaattccacgagatctccaattccaccgcgtcgtctctgcatccggaccccataccccgatcgatccctaaggcccatggttttctccgccgccgcgtcgcctctagtagccaccgctgctgactctgcttcctcctgcgtcgcccacctccgctgctgctgtcgcgttagttgctgccgttgttgaagacgcgtagctctttagggttcgcgatttctcgccgatcggttcgagaattggcacgcggtagccgcgccgctgcgcctgttcgacgacgcggaggagccgaagccggagcgcgtcggggccggagaggccgacgcggaagggatgactaggacggnggcgaccagcacttctccctcctcgggcactccctctgcgtcaagcgcccgc

SEQ ID NO: 280393 - DNA, 536 bp, Zea mays
gtggaatgctgtcttcgttctaatgcttttctggtatatcctagtataggcttattctgcaactctggcattaacagagtggtgcagtgttttctgttcccttatatacacatcagttccaacggtagtagttggcattctcgacaagaacttaagtcataatacgcttctttgttacccgagactatatgaggcagggcttcgaaatgagggctacaacttgacactcttctggatcacaatgctcgatacattgtggcaaagccttgttcttttctatgtcccttttttcacatacaatatcagtacaatggacatatggagtctgggaagtttgtggacaattgctgtggttataattgtcaatatccatttagccatggacattcaacgttgggtgcttataacccatcttgctgtatggggttctatagctgctacgtttttgtgcatggtgttaattgactctataccaattttccctaactatgggacaatttacaacatggctgcttcaaggacttactggcttagcg

SEQ ID NO: 280394 - DNA, 542 bp, Zea mays
gttgtaggttatggtgcaaacgatgtgggcatgattcaagaagctgatattggcgttggaataagcggggtctagggcatgcaggcggtgagggctagtgattcttctatttctcaattacggtttcttgagcgacttcttgtcgttcatggacattggtgctacaagagaatcgcccaaatgattggctacttcttttataagaatatcgcatttgggcttacaatattttactttgaagcattcgctgggttttctggtcaatctgtatacgatgattggtttatgctgcttttcaatgttgttcttacctcgcttcctgttatatcactcggagtttttgagcaagacgtttcgtccgaaatctgcttacagttcccagcattataccagcaagggccaaagaaccttttctttgattggtaccggatccttggatggatggggaacggcctcttctcctctctggccatattcttgctcaatctgtgcatattatatgatcaggcaattcgcgttgggggcatactgcaaacattgct

SEQ ID NO: 280395 - DNA, 442 bp, Zea mays
gtttccacccgtgcgtttgccccgagtgaaggatgttgttgtcaacggaatcactgtgaagacaaaatactgtgacacttgcatgttgtacaggcctctctcgttgctcccattgctctatctgcaacaactgcgtagaacgttttgaccatcactgcccctgggttggacaatgcataggacttaggaattacaggttcttctatatgtttgtattctcaacaactttgctctgcctgtatgtctttgggttctgctgggtgttcattattaagatcagaaatgccgagcagataacaatttggaaggcaatgacatagacccctgcatctatggccttaatcatctacacattcattgcagtttggtttgttgggggcctctctgtgttccatctgtttctcatgagcacaaatcaaacaccatatgagaacttcaaggt

SEQ ID NO: 280396 - DNA, 470 bp, Zea mays
ccctctcgtccttccacgcgtccgaaggacactttgcttgatggctacacaaatagtttctggacttgcagtgtgtcaaagcttggctattctggcactgcaataatttcaagagtcaaaccactgtcgatcaagtatgggcttggtatatcagaccatgatactgaagggagggttgtgactgtagagtttgatgacttctacctgttaactgcttatgtaccaaactctggtgatggtctaaaaagattgacttacagggtcacagagtgggatccatcccttggtaactacatgaaagaattagagaaatcgaagcctgtcatactaactggtgatcttaattgtgcgcatcaggagattgatatacatgaccctgctggaaatcgtaaaagtgcaggcttcacatacgaggaaagagaatcatttgggaccaattttttgtccaaagggtttgttgatacgttttc

SEQ ID NO: 280397 - DNA, 485 bp, Zea mays
tgttcttggttctggaacacaatatgctaatggatttgctgtggcggatattgaacgatcatctctaatcctatgcggtaaagcatttgctgattcagctatcgtgaaagatgcacttactgctatgacagccccaatattgtctgcaagaggaggcctccctgttccaggatggattctgaactttggtggttctactgtattattgtttgccccagtggaaatcatgatgtcctgcgtagaaatccacaatgctctattgtccattgactgtggtgcagtcatatcttccaaggggtctactgtgcttttcccaacaaaggcaagcagggagcagaaactgcttaccaaaccaactgcagtaattatcgtatcatctgatagctctggcgccataccatctgtatgtaagctctctcctggccaggctgcctaccatttcttggctggatatcacgactgaaatatttgtcccagcatacaac

SEQ ID NO: 280398 - DNA, 684 bp, Zea mays
  unsure (1)..(684): unsure at all n locations
gttcagacaggactcctcctcctcccccttccctccccctaaaagctgagagacatttggagagagagtgtgggtgatcgaggggaaaccgagagcaaccaagacgcacacgacgatggagcgagcggacgaggacgcgtgccgggtggcgctgctggacgctgacggcggcggcggcggcgagggcggcaagaagcagcagcagcagctcgcggcgcgggtgtgggaggagtccaggaagctgtgggacatcgtggcgccggccatcttcagccgcgtcgtgacctacagcatgaacgtcatcacgcaggccttcgccggccacctcggcgacctcgagctcgccgccatctccatcgccaacaccgtcgtcgtcggcttcaacttcggcctcatgctgggcatggcgagcgcgctggagacgctgtgcgggcaggcgttcggcgcgaagaagttccacatgatgggcgtgtacatgcagcggtcgtggatcgtgctgttcatgtgcgcggtgctgctgctgcccatgtacttcttcgcggaggacgtgctgctgctgacgnggcagccgccggagctggcggcgatgcggggaaaggtgtgcggtgtggttcatcccgctgcacttctccttcgccttcctcttcccgctgcagcgcttcctgcagtgccagatgaggaact

SEQ ID NO: 280399 - DNA, 541 bp, Zea mays
cttcaaacacactccaactccaagcctcaataatctcgatctctgtaatgaccaagaagctcgtctccatctccaccatggccgggaagcaaggttgcaaggagcagtccaatgatcggaggatccaggcttcgatccaaggagacgccaagagcgtggtggtggggttcggcggtaggctggtctcccgtgagcaggaggacgccatcatcgtcgcggcgctgcggcacgtggtgtccgggtacagcacgccgccgccggaggtcgtcgtcacggtggcgggcggggaggcgtgcgggacctgcggcatcgacgggtgcctcggctgcgacttcttcggggcgccggagctggcgcaggaggcagtgtcctgcggcacagggcaggtggcgacgacggcgtcggtcgggggcggggcagcggcggcggcgctgaggccccggcggcgtaggaacaggaacatgtaccgcggcgtgcggcagcggccgtggggcaagtgggcggcggagatccgcgacccgcggcgcgcggcgcgcgtgtg

SEQ ID NO: 280400 - DNA, 418 bp, Zea mays
cctcttgcttgttcgtccggttcttcgccctcgccgcgcgggactaccaatccaaactggcgacgaccctgctgccaccccacagcagatttgaggagcggacgcccgtttaaatggctattggagtcccatccatggagctccaccgctcctcaccgttgctctcgggtggccgaggaggaaatacatgcctacagaagaagcccttctttgtccaagcaaagagactagtggggatggagaaagcaagtacgaggccaggaacacaagagtctggacagacaaagaaaagagcacccctggttcgtggaactgttagcccacctcttccagtaccaggaaacatacctcggcctccttatgtcggcacagaatatgtaccagagatagcataagagatacagatgcatgacaaaga

SEQ ID NO: 280401 - DNA, 1050 bp, Zea mays
cagttgcacaaattgagctgtaaagctaggcttcccaacaaggagttaaaacaacaattcctcaaatttgtgctagaagcaagaggctgttaaagaagtgctctttagcaaaggtttcgtcattcttgccgaccgctgtccctttgcttcagaatacggtgaaacagaagtccttcattggctcttctcatcttggctcacatgcagtacttgaatgccagtttcttcctgagcagccaagtgatgcatatgagaggggaagccagttgcgcttctatgatgctctagcagaagtgttaaactcaagggtagattcgttttctataggatcacactttacccatgtagttgagcaggcacctagctatacatttcacagtcaatcatctggttctagctgtttgtcaaatattattgctagcatggctcaaatccaaatattattgctagcatggctcaaatccacggtcaaaaaattggcatccctcaagttgtcagatttgaaagctccctcgcatcccctaaaagattgggttatcatgatgaagaacatgtcacgtggacagaaaaacacaagaactatatttatggatatactatttttttcttcttttgtattattatattcatatccttttttacctttatattattattttttatatatgttgtatttgtctaatattacttcatcataatgaggaagctaagattgctagggaggttgaggctcatgaaaagagaattaaaaaggagcttgagagttgagaagcaaggtctactaaatagaaagaaagaagaccaaatgtagagggaaatggagagacatgatcccgagagatgtaatgaagagaggttcatgcgtgaaaggcaaaggaaagaagaaaattccattagcaacagagacgtatacttataactattatggtagataaaaaatgttacaatgtctctcttctatagaacgaaactgggacctcattcattgatatatgccccattttattcaataattattataaaattgggcaccgtcgcaacgcccgggcc

SEQ ID NO: 280402 - DNA, 616 bp, Zea mays
cggagccttaaatatgcttcttcccctacctcaatctgcctacaaatccatagtgacactattattatctcaccttcctacttgagttacctggcagctcgggcagcgcaggggaaccaattgcagagagcaagcatatccaacgcaattaaatgagtgtgctaaactcgctggggatcctactcctccgcgcggcgccggcgtttgcggcggcactgtcggcggatgggctttcgttactggccttcaagtcggcggtgaccgacgatccgtccatggctctctcgtcgtggtccgacgctgatgcggacccgtgccgctggctgggcgtcacctgcgtcaacagctcgtccagcgacggactgcgcgtcgtaggggtggccgtcgccggcaagaacctgtccggctacatccccgccgagcttgggtcgctcgcgtttctacgccggctcaacctccacgggaaccgcctgtcaggaaccgtccccgcggagctcgccaacgccaccgtcctgcactccctctttctctacgataaccgactcacggtgccgttcccggccgcgctgtgtgggataccgaagctgcagaacctggacctgtcgcagaacgcctt

SEQ ID NO: 280403 - DNA, 598 bp, Zea mays
  unsure (1)..(598): unsure at all n locations
gtgtatatttcattttgctccttctgcagtgattggctacatgtatgtatttggctctggcttacttggtgcatttcttttccgtttctttgttgaggacaaaacttttccctatggttggacattagtcatggagattgtcccaggattttccctctatcggggcctatatgaacttggtcagtatgcattctcgggaagcagtataggaactactggtatgacctggagaagtctgaaagatcccctcaatggaatgcgtgatgttatgatcgtaatgagtgtagaatgggcagtgctgctcatattagcattctatttagatcaaacctctttgctaggcggtggtgtcaggaaaaatccttttttctgcttcagatgtttacagaagaaatgtgcaacatcattgcatgaacctagctttgtccaacaggattccaaagtcattctcgatatggagaaatctgatgttgctctagaaagaaaaagagttgagcaatttttgatagatcccaatgcaaaccaagctatcatctgtgataacctcangaagggttatcatggaagggatggataccctgacagctggctgtagagg

SEQ ID NO: 280404 - DNA, 645 bp, Zea mays
gctctggatatctttcccagcaggaaatcagatctgccattttaaaagcatcacaatctttaaggaaagcaaaaggggagtccaatggcaatgatgagaaaacagatgcctcagcagttgataagtatccacttgtatctgttcctgatgagacactgacgccagaacagttaaaggaaaagaagaaacagatattacttaaaaccacaacagagggcaaattgcgcgcaaagcagaaacgtgctgaagaggaggctttgcgggagaaacaagaagaaaagaggcgtgcggagaacccagagttataccttgaagagcttcgggcccgatattcagaactttctgataaatttgagcagaggaagcgacagaaagttaatggtagtcagacaaatgggaaccatagttcatctgcaggtgtaggccgtggagaaagactaaatgcagctcagaaagaaaggatgcggctgcttgcctcagctgcttttgatcggggcaaaggtgaggacacttttggaatgagagacgaggattggttagtgtacaacaagatgagcaaagacaatgatgatgacagcaatgatgatgatgaatcggaacttgttcgaatttcatcgaagctccaggagattgatcctacatttg

SEQ ID NO: 280405 - DNA, 1078 bp, Zea mays
gtctaaatgaggaaatggagcgtgtctcacactacttggatgctggcagtgaggcaaagataactagtgtagtggagaaagaaatgatagccaatcacatgcacagattggttcacatggaaaattcagggcttgttaacatgctagtagatgaccaatacaaagatttgggtcggatgtattccttgttccgaagggttcctgatgggttatcaacgattagagatgtcatgacttcttacttgagggaaacagggaagcagttagtgatagatccagaaagtttgaaagatccagtggaatttgttcaacgcttgctaaatgagaaggacaaacatgataagatcatcagtgttgccttcggcaatgacaaaaccttccagaatgctctgaattcgtctttcgagtatttcctcaacttaaacagccgatcacctgaattcatatcattatatgttgatgacaaactccgcaaaggacttaaaggagcaacggaagaagatgtggaagttatattggacaaagtcatgatgctgttccgataccttcaggagaaggatgtgtttgaaaagtactataagcagcatttggcgaaaaggctcctgtctagcaaaactgtttctgatgatgctgagagaagtatgatagttaaactcaagacagaatgtggataccagttcacttccaagctagagggcatgttcactgatatgaaaacctcccaggacaccatgcaagacttctatgccaagaagtctgaggaacttggggatggccctacgcttgatgtccacattttgacaactggttcttggcctacgcagcccattcctccttgcaaccttccaactgaaatacttacagtatgtgagaaattccgggcatattatcttggaactcacaatggcaggagattgacatggcaaacaaacatgggtacagctgatataaaagccacatttggaaaaggccagaagcatgaactaaatgtatccacttatcagatgtgtgttctcatgctgtttacaatgctgatggattgacctacaaagacattgaacgggatactgagatacct

SEQ ID NO: 280406 - DNA, 975 bp, Zea mays
  unsure (1)..(975): unsure at all n locations
gattaatcattggagatgcaggataaaaccaaggaaatgggcatcatatacattgacagctggattcatcaacagatcattgaaaacactggcatatgtcagtgtcacactgaaaggacgctagatgttattgaagtaaatgaatatgaaacttacagttctaatactgcttaaccagctcagaaggaatttactaatggttccaaaccctgactggatgaagatagtaacctgaacctttgtccccccactcaaaacacagatgatagtacggaaaccagggctgttaatcaattcacacaaacagaattatacactcctccattaaaagaactttgcggcagtgccaaaattaaggaacataagaatgaaaagcttgcgcgtcatggaagctgcagaagatcactgcaggaagagctcggcaattgctagccagagcagccagacaaggaaccaaaagctgatccaaacatgcaacctgaaattgaattccatgacaacaaacaccatantaggtaagttgacaaaattcattcgagctcttcgaacagcatggatttggtgctcttccttggaactaggcgccatgaaccttggattagagcaagacttcttcgagagcgtaacactctgatttaactaggacttcgccctttcaaaaggatttaacgaagctgtatccagtttcagtaagagtatctacttcaggaatcaatgggcactgtacatataaggctgcaatgaaatgtaagctgccaatatgccagtggcagatggattgctagtctcaaatggtttcttgggtgataaatggatagtttcaacgcaagtggcaagatgggaagaaatgtcatatatgacaatttttgaattaacaggctcaatttatcataaatgataaatgattgttacagtatgcagagaagctattgcaatatctgaactgagggagagttatttacatctccaggccat

SEQ ID NO: 280407 - DNA, 481 bp, Zea mays
ggacgcggtgcttcgtgcagctcggcgcgaaggagcagcgggaccctacgtcctggatctgcgacaccggggcagccgaaccacatgacggggtctcgggcggcgttcgcggatctggacacggcggtgtctgggtcggtgcggttcggcgatgactccatggcggagattgaagggcgcgggaccgtgctgttcaagtgcaagaatggccagcatcgctctctcaccgccgtttactacatcccgcgactcacggcgaatatcgggagcctacggccgttggaggaggtcgactccaacaaacacctccggtgctgagggatgaagatttcagagcctgaggggcgaatggtgtcaaagatcccacgtgcaggctaccggctgtatttgctcaacgtccacccgggacggaccgagtgcctggccaagcacgagaaagaaagtgcctggcggtagcatgccacgcttgggcacataacat

SEQ ID NO: 280408 - DNA, 582 bp, Zea mays
cccattcgttcgcccacgcgtccgtattcagctcggctagcacagtaaaaagctcaccactcaaattggcacatgtttaccaatgcactgggtgcaattcattttacctgcaaaatattggaagaattcattcaaaggataaggaaaacatagctgtaccaaattttcgccttactctgcctgaagtatgttctgaatgtggccatcaatttgttatggggggacctctttggagttatccaatacatgacaaggtatgggctgcttcaatattatcagatattcatgctatgagagaagcatatccagcttatccaaaaatttcggctatactatcttcagtctcagaggaattgctggaggcacctttatttgtgagtcttcacaatctgtgtgcaatactgaagtgcactactccaaccatggttatgttacaatgtgctatcagaaatgctgggtatcaagtatcaggaagtcatgtggacccgctagctcttaaaacagatgccccgatgtcagtgatctgggacatcatgcgatgctgggtcaagcttcacccagttacacatcgacctggaaatc

SEQ ID NO: 280409 - DNA, 1028 bp, Zea mays
  unsure (1)..(1028): unsure at all n locations
cccattcgtttgcccacgcgtccgagcagatctacttgtagatgtggcaaggactaaagcaatgcatatcagttccttccaactggtgagactttatgtggacagcatcaccgtggtgcctgttgctcccatctgtagatgcctctccgcaacctccagatgttaatcttctttcatgattggcggacagagaacttcatggaagagaaggacatggcgcttcagctcctcatgtctcttcaagaattgcagttcgaacattatagggccctacaatccctccctcaagggttgtatcgccttccttctctctaggaaatacatatcactgggactcaaaacgtcagatcgctaccaaacaagggactccctgattcactgcgagtgttatttctatactatatacttaaagcaccagtttcaacggtctagtaaacacaatgtccttataagttacttagtttgttctttttggttgctgattgtttggttccacattatcatattattagatttcataaaccatgatgcatatgctcatttcaaaatcaccttgtttctgtcacaatacttttttcccccacacaactatgagatgatatgctgattttcttttacaagactatgcttcatcgtaatgttgcacagcgttcaaggcaataaacgagaacaagcatgggatgtggaaaattttagaaagtaaagacaagtgaattcttgacgacgttggcttggcaccttagtttgagtacataatgaaagaacaaccttttagcaaccctggagcatctagaaaatatcaggtgaggcagtaagtggatctgaatatgtgaaaaaattggcagtcactaatggacttcttgtatatggcattgtctccctctctctgctgttttatagttcaaggcattctatttacagctattgcaactntttttgtaatttcagtcatgtaactatcgttaatcatttgtaaaccactggaagacaggagatgtagcaccacaagccattccttngatcatttg

SEQ ID NO: 280410 - DNA, 646 bp, Zea mays
ggagaaatctgatagaatctgaagatgctagcttcaggagctcctacagaaggatggggtctcatgaaccttttgaaggcagtgtccggtttagccgaacattaagtgttgggcggcttcgggacagagttctcaggcggcctccattctcagatgggctattcaccccttcacttctttatgatagggcagtatggccgtctggaaatgctagtgctaggcaagattcagcagtaatgcaaaggactaattcagacaggagttcagaaccacggtctgatccttcaaccagcgatatgtacagctcgagctctgagaggcaggctagcaacggcgatctactggagcgcagatcagctttttttgagaggaggaggaggataagatctcaggtcagagctctacaaaggttgggcagcacgtttgaaaattctatctggtcatgagagatcctgcatactatctggtcagcctagaacaggaaattgcaactgccgaacaggtagtcctcaaggacattctgatgaaaaaactagcacaagggcttgcatatctagaattgttatgttagcagaagcactttttgaggttctggatgaaatccaccaccaatctgccgcattatctgcatcaagaccatcatttt

SEQ ID NO: 280411 - DNA, 564 bp, Zea mays
ttcccattcgtccgcccacgcgtccgcggacgcgtgggcttcgacaagactagagagtttgggttatttcccacagccagatatggttcagaagttctggaaactatgtgaacaacagctcaacatatcagatgaaacagaagatgaagatgcaaatgaagaacatattgaagacacaaacagggatgctgtcatgattgcagctgcaaagctagtgcttgctgatacagtatcaaaggattatcttggtccagagattgtttctcactatgtatctcatggggcaagtacgacagagataatcaaacatctaattacttctctaaagaaaaatgcaaactttgacatgggaactctattttttgaggccttgaaaagggcatatgaacgttacatggcccatgttcacgacggagaaaaccaaatcttgactggcaagtcttattcagaatgtcaagatcttgctagtcgtcttgcaggatcctatgttggggctgctcgcattaaaaataagtcagatatcctgaagattatccgagatggtgttcttttgcttttgtgagc

SEQ ID NO: 280412 - DNA, 539 bp, Zea mays
tttacatatccataccatatcactgccaacactacgagctgagctatagccagacgatgctaccgaatgaatgcagggcgggcggatcccgttcgcggggcaggtgcagaactaccagacggcggtgcagacgctggtgagcatcctgggcgaccaggacacggcgtcggaccacctgagccggtgcatcttcagcgtgggcatgggcagtaacgactacctcaacaactacttcatgccggccttctacaacacgggcagtcggtacaccccggagcagttcgccgactcgctcatcgccgactaccgccgccacctgcgggtgctgtacaactacggcgcgcgcaaggtggtgatgatcggggtcggccaggtcgggtgcagccccaacgagctggcccgctacagcgccgacggcgtcacctgcgtcgaccgcatcgacgacgccatccagatgttcaaccgccgcctcgtcggcctcgtcgacgagttcaacgcgctcccaggcgcgcacttcaccttcatcaacgcatacaaca

SEQ ID NO: 280413 - DNA, 672 bp, Zea mays
agaagatgggcgagacgagggccaaggagggggtgtcgcttagactagcgaatccatccgccaagattccgtgcacctcgaccgccgccgccgctatctgtttgtccccgcccccgcgaccgcggcagcctagcaggaggggaggatccatgtctagtttctagagcagctgcttgcgtcccttgcaaatcacatcgaccgatggggatacccagcgacgacgtggtgcaaatccgccacgccgacgccgctggcgagcccaccgtcgtcaccgtcagctgccccgacaagacgggcctcggctgcgacctctgccgggtcgtcctcctcttccgcctcagcgtcgtcaagggagacatgagcacggacgggcggtggtgctacatcgtgctctgggttctgccacgcggggggcggccggtgcccgtgccatgggacctactcaaggacaggttgcttcagctctgccccgtcgcgccgccgttcggattcgacaacgcgtacctcgcagcggctggcctacaggaccttgcgcctcccccaccaaagctcttcttgctcaagctatgctgcttcgaccggatgggactcttgcatgatgtgacacgtgttctgtgcgagctagagctcacgattcggagggtgaaggtctctaccacgcctgatgggagt

SEQ ID NO: 280414 - DNA, 727 bp, Zea mays
gacaacaactactgagcgcattctgtattacactggaaggaactacaagattggcgaggttcatgagggaacagctacaatggactggatggaacaagaacaagagagaggaataaccattacatctgcagcaacgactgccttctggaacaaacacagaatcaacattattgatactcctggtcacgtcgacttcactcttgaggttgaacgtgctctcagggtgctggacggtgctatatgtctctttgacagtgttgctggggtagaaccacaatctgaaactgtgtggcgccaggcagataaatatggggttccaagaatatgtttcgcgaacaaaatggaccgccttggagctaacttctttagaactagagacatgatcgctgcaaatgtgggtgccaacaccattggtgattcagttgccgattggttgggacgacaatatgcaaggagtcgtggatatagtaagaatgactgctatcgcatggacacgggatgagctggatgcaaaactctagtacgaagacatccctgctgatcttcaagagatgggtgacgactatcgcgttaaaatgctgagaactcttattgaattggatgatgaagttatggacaaatatactgtaggaactgatccagacgaggagactgttactaaactgatcagaaagggagcaatttttgtcaactttgtcccaaccttatgtgggccggcattcaaaaa

SEQ ID NO: 280415 - DNA, 670 bp, Zea mays
caagggttcctgtgtttctcagtctttgactgagagcttctttgtgcaataccatggtgcggtttttcctcaccggccgagtatctgtttttgaaggtagggtttgtacttttcttcttttttaacaaagagataaattgctcgcctttgtgttccagaagaaaaatctcagcaattgtcaaacttcagtttttagttaaggttaatagataccaaacaaaggatactatactattgtttaatacatcgtatattatttggctagtgccagcctttgggctatagaatcctctaccaaataagtagcggatttattctggatggaaggagtgcatctcttattaaatgcatacgacaaacatttagggaacgaacgtcacaaggttatcaatagtaagcttgactgaccttgagttgaacaaaaactttcatgaagacgtatctctggcaatgaattggacagcgaaggttcaagaacacttcagcttaataaatgagtagagttgacatatatctttctcaagggatgggggactaggggagtcactagcattgattgtgcaccttgaatccctttcttttcttatataaggaggtatcctctacactaaactacgaacaagtatcagagacactctctgtcaggtgtctgcaatggacaacctcaaaa

SEQ ID NO: 280416 - DNA, 572 bp, Zea mays
gttttccaggtgaggaggaagaggcagcgtcaggaggtggcggcgaagcagaggacgggcgtcgtgttcaagaagccggatcccgacgactctccggacgctgtcagccggagcctttcctgctgcctgcgcaagacggccggcgacgacagcgactactcggaggaagtcacggacacgtcgccggcctccttcgcagatcacaagaacggcaaggcggccggagctgaagcggcgagcaataagaagatgggcggggacggcgcggtgctagtgacggtggacggcggcgcggagctggagctggagacgctgctgagggcctcggcgtacatccttggcgccgccggcagcagcatcgtgtacaaggccgttctggccgacggcgcggcgctggcggtgcgccggatcggcagcgagtgttcgggggtccggcgcttcggcgagctggacgcgcacatgcggccgtggcgaactgcggcacgacaacatcctcctcctgctcggcttctactcgggccctgacgatatgctcatcatccacggcttcgccatcaacggcaatctcgcca

SEQ ID NO: 280417 - DNA, 1306 bp, Zea mays
tcccacgcgtccgatgaacagtttggtgcatggaagactcggaagcccaaacagtccttcaacatgctttggtatgcatttttatttctaatattgaaatgtgttttctctgttctattttctgactgtaaggcataatgcaaggttctgtcaatatggcacccatcagatccactagcacagaaagtggaactgttcaggttttaccgttctagaggttcagacaccgataaaccaattccaagagggaaggaattttctggatcttccctcaactaccataagtagatcctctcctgttggaattacacctgcaggatcacaaagcggccaccacgctcttgatgagcacatccattcacttggaaagatgaatgtacagaacaagggacgaatggattgtggatttcaagagagtactgctttccatcctcattctctccctgacttcaatgacagactaagaaatggtatctcctataactgctcaatacctcccatcggtgttaagagcaatgctagagctgctgaagcaatggatgtcaggcacatttacaaaggaggttgtgggcatctcagcaatcaatcttctgctcatactgaagcacttgggttttcaagaactggtagctgccctctctatggtcaccaactagcatggagtaattctaataacctacaccagcagccttcttctcccatgatatggcctagcatgggcccatttaccaataatatgccatctcgccagttgatgcaagtgcatggaatttcaagagcaccattgcgcatgcttgaaaataatatccctatgaatcaccaacatgtgggatctgccccagctgtcaatccatcaatttgggatagacgacatggatatgcaggggagatgatggaaacaccaggattccacccagggagtgctggaagcatgggtttccctggcagcacacatctgcatcagttggagaccaatggtatgtttcctcacaatggagggactttcatggacccagctatgtctcctgtgcacatgagtgctcgctctcctcagcagagggggcatattttccatcgaaggagccatgtggctcctattccatcctctttcgattctgctggtgaacggatgcggagccgaagaaatgactcgaatgtaaatcaatctgacaacaaaaggctgttttacgttgacattgagcgtatagtccggggcgaggactcccggactacactgatgataaagaatatcacaaacaagtacacatcaaagatgcttctggcagctattgatgaaagtcacggg

SEQ ID NO: 280418 - DNA, 1222 bp, Zea mays
atttcatccccggaaagggaaagaaagttactatattcacaggttgccaaagccctaaacagcagtgcttctgtagatgaagcatcagcatcaaatgtcgttatgctatccgggttcagtatacccaagctcgtcttgcagattgttactattgaaactgtactgagaatggataagccaaacaaggagcttgctgttttgaaggacatagcattcacagtgtacaacaaggcacgacgaatcccacgggctgtctccacaagcgatatgttccagtcaccaacttatttgggtagatctcagtccacaatgatgcatgttacatctcctgctcctactctttggaaggaatgtttagttcctcgaatgtctgggccaactctctctcgagaaaccgattttgatgcatccatgaggtcggcaacatgggataactcatggcagcctgctcgttcgggaggacttctggacccaagtaagctgcctgatttatgtgctcaggatgataggaaatatgcctttgagccacttttcatactagcagaccctgggtctgccgatcttaatgctttaatggaaccatcaaaatctggagcagatgcatctggcagcagggtatatggctcaatttcaggaagtaactctgatagtggagtgagccctctactcgacgtatctgagagtgacagtgcagcaagtcttcattgctgttatggttggactgaggactggcgatggctagtgtgcatttggacagatgctagaggagaattattggacagcttaatatttccttttggtggtattagtagccgccaagacactaaagttctccaaagccttttcatccaaattctacagcaaggctgtcaaataatgtcgtcttcacctgaggctagcaatatgagaccacgagatgtcataataactcgtatcggaggtttccttgagcttgaaatccaagaatggcagaaggcaatatactcttatggtggcaatgaagtgaagaagtggcctgtgcagttacggcgatccatacctgagggtattccacctagttcaaatggtcctacgctccagcagcagcagcagcaagacatggccttaattcaagatagaaacatgccttcctcaccaaaccctctgtatagccctcatccaaaatcaagcttcatgaaaggtgcacttggacaatctggcaacaaaaaacagatccttgtgg

SEQ ID NO: 280419 - DNA, 490 bp, Zea mays
cccactcgtcttcattcggtgaagctcactccctcacccaacgctccatagtccacactcgccgtgctccccatgcagcaaccgcttgggctcctccttctcttcttcatcggctcggccacagtatgccgtcgcctcccgcgccgacgccggtgcggctacctacattgtctacctgaaccccgcgctcaagccgtccccctacgccacgcacctccactggcaccacgcgcacctcgacgccctctccctggaccccgcgcgccacctcctctactcgtacacgaccgccgggccgtccgcgttcgccgcccgcctcctcccatcccacgtggcggcgctcaccactcaccctgccgtcgcgtcagtgcacgaggacgtgctcctgcctctccacaccacgcgctccccatcgttcctccacctcccgccgtacagcgcgcctgacgcggacgccgggggcccggacgtcatcattggggtgctcgac

SEQ ID NO: 280420 - DNA, 499 bp, Zea mays
ttaattcgcagcacggaaaaagagagtccccctccccaccaccacatcccggtctagggtttgcgccatcccgaaccatccgctcgccgccggccgctgctgccgccatgggctccggtgacgacgagcgctccacctccaagcaccatcaccgcgataaggacaaggaccgtgaccgctcctcgtctcgccaccatcgcgacaaggaccgggaccgcgagcgctcctcgcggcaccaccgcgacgatggcgaccgggaccgggaccgccatcaccgggacaaggaccgggatcgagaggagcggaaggagagggagcgggaggagcgtaaagcacgggagcgggaggagcggaaggcacgggagcgggaggagcgggaggagcgggacagggagaaggagaaggagaaagagaaggagcgggcgcggcggcgcgaggagagggaccgcgaggagcgggagagttccaggcggctcggggatgctgatggagaggagga

SEQ ID NO: 280421 - DNA, 503 bp, Zea mays
ccgtgttagtccaccatcccattcccgtaccacccgcttcttccaactccaactctccaaggcgctgtgctggctgctggcctgctgctaccgactgccgcaactgctccgcatcccggccttgattagcagcagttacgcccgcgcaggacagcggccttgattagcgaagtattcctttgccctacctctctccctaccccggtccgacgcggcggccgctgagcacctgcccggtagctatagcttcggccatggcccaagatgcctatgacggcggtggggaactcccgccgcccgtaaagaagaagtcaccggcggaagaggaggcccagaagaggaggaagaagcttacacctgggagcttaatgaagggcattatacggtctgggagcggcgatgcacacccctgcagagggccatcaggttatacttcattgcactactgggacaattgatggtatccttgtaaattctacacgaagggagcttggaggtaaagg

SEQ ID NO: 280422 - DNA, 531 bp, Zea mays
taaaaaaaggtgaactcctcagcatgcaagctagtggaggtgaactccccagtatacaagggctgccgagcaaccaacatatttggaagtttctctcagccatcgtattctgatactggtgcagagcgcacaacaaggtttcttataccatgcgaggcagggtcgttgtaggccccgcttgcatctaagtaatagtagtatcgatctaacagaaacggtgtggccttcctggatttaaggcccaatgctgggttataagattacacaaccagcatgctagattatttactggacccgcagtttttttaattattggctaagggatttgttggtggttgatggaatgcgtttaatttgaaggctttagtggtactgtagaacttttcaatcagattggctgaactgatcatccttgcgttcacatatactaaatatagacgcacttatagggtgtttggtttgaggagtgagttagtctcatctttttattcaaaaaaaaaaaaaatatagccttttgaaatctttaaatag

SEQ ID NO: 280423 - DNA, 368 bp, Zea mays
ctttaagaagagttgaactccccagcatacaagggctgcagagcaaccaacatatttggaagtttctctcagccatcgtattctgatactggtgcagagcgcacaacaaggtttcttataccatgcgaggcagggtcgttgtaggccccgcttgcatctaagtaatagtagtatcgatctaacagaaacggtgtggccttcctggatttaaggcacaatgctgggttataagattacacaaccagcatgctagattattcgccttcctggatttaaggcccaatgctgggttataagattacacaaccagcatgctagattattttgtacctgcagtttttttaatgattggctaaggtatttgttgt

SEQ ID NO: 280424 - DNA, 902 bp, Zea mays
ggtttgatccgagcccacagtctctcctcgggcccaccgcgtccgaccggcgatggcaaagaccccgtcgttcgcggtggcggcggtcgccggaggccgcgggccggttcacaaccggacccagctcctcctcctcctcctcgtggccgtcgcagcctccgcatccacagcagggttcctcctccgcggtgccctgcgagacccttgcgacggccgtggggaccccgccgccctcaacaccgccgtcgccagcgggagtcccctcgggttcatgaggtccaagctcgtgctcctcgtctcccatgagctctccctctctggtggtccacttttactgatggaattagcatttcttctgaggcatgttggctcgcaagtggtgtggataacaaaccagagatcacaagaaacaaatgatgtcacatatagcttggagcataggatgttgaaccatggagtgcaggttttaccagctagaggacaggaggcagttgatattgctctaaaagctgatctggttatcttaaacactgctgttgctggcaagtggcttgaccctgttctgaaagatcatgttcctaaagtccttccgaagattttgtggtggatccatgaaatgcgtgggcattactttaaggttgaatatgtcaaacatcttccctttgttgctggagccatgattgattctcatacaacggctgagtattggaatagcaggactagcgatcgcctgaaaatacagatgccacaaacttatgttgttcacctggggaatagtaaagaactaatggaagttgctgaagacaatgtcgcaagaagagtcctacgggaacatattcgtgaatcccttggagtacggagtgagggatctcctgtttgcaataataaaccagtgtatcacg

SEQ ID NO: 280425 - DNA, 644 bp, Zea mays
ctcataccttgtcacctaaatcggggttatactcagagtaccattaaaattcttttgtgtgttctgttacttgtggaatatgcagcttataaaggaattggcacagcctgatgtaagacatgaaatatctcggctagtaaagcccatgactcaggccttggatgccgccttcaaccatgatttggaacagcagcagaaatcgtccaaggccggaaacaggcacaacgggttttgagcctaggagattggtttgaccaacacatgaagcgagacggacggacgggctgtgcccgaatacacaagagctgctgcagaattcttgaggcttgtacgattttgttctttttcccctcgcttattaatagctgccggaggagcctgctgtttgcagccccggaatcttgatctatgcatcaattgtttgtaactgactgaatagtgaagactcgcaacgcatgatgctgccgacgcgttgtacttgtacatggcagtaatggctattcgagatagaaccaaagctttcccattttgttttatgcggttcgttcatggcccccgggcagaattatacccatgtattgtcatttacagccgtacaaacataccattttttattacagtacccttgacatctgtcagctccc

SEQ ID NO: 280426 - DNA, 1028 bp, Zea mays
cggacggtgggcggacgcgtgggctggaaatcagcagcaatcgccagcaattagtgtggatgcaatgtcctcaaggacacaaccagtgctggcggcaagcacacccccatcagacatacatgtgggacccctagcagcctcagccttgtcaagtttacactctgttctcccttcaacctcattaccctcaagcttgcatcctagtcacctggcacaacgtgtgccaccaactcctaacccaactttacaagccggggcaccgaaaggctcgaatgcaacaatgccttccatccctacaggcatgcagctgccagattctggttccctatcgctggatgcatggcttacagctaatcttgggttgaatgatgcgtctacagctcctgctaaggatacagccagtcttgggttgagcagtgatgcccctagggcagctcctgatacaaatacggccagtcttgggttgagcagtgatgtgcctaggggtacggctcctgctacaaatacagccagtcttgggttgagcagtgatgtgcctaggggaacaactcctgctacaactacaaccagtcttgggttgatcagtgattcacctagggtgattgctcctgccagcagtaattcgcctggggcgattgcttctgctacaaatggtggttccgagatagatgtggtatgcctgtcagatgatgaatgatgctagcacgtgtacaaggctgacagttatagatgactgcttgaaaggactaggcattattttacggctcccttgagtccgttctgacaaggtgggaatgttgtttgtgctgtgaatggctggtaacagcaatgacagttttattaagttcattgtaaatgtgtattatgacaaatgcctgccaacgtttgctgtaaatcgctaacctctggggaatgtggatattaacctctgagatggagttgggtttcaagcccttaaaaaaaaaaaaaaaaaaaaaaaaaaaaaaaaaaaaaaaaaaaaaaaaaaaaaaaaaaaaaaaaaaaaaaaa

SEQ ID NO: 280427 - DNA, 250 bp, Zea mays
gggagcactagcgcttgtcgcctagggtttcagggttctccacttgccagtgaatctttcatcctttttagctcctgatatggatgaagtttgtagcactagcgcaaccgccttttgctgctgccttcccactcacttggtaccggttgttcagaggacgccagtttatatttgtatggaccacctaaactgaagctgttttgtcatgtgggtggcatggcgaagtgggtcgatatcgcgacggttctgt

SEQ ID NO: 280428 - DNA, 628 bp, Zea mays
ctcatactcattttaaatttgcgtgacccaaaagctcctgaacatgttgttcttggttcttgcagcattctgatctcacagactgttttaagacacttgaccactgattctgattcccttttttcctttatcatgggaattctggaaagctctcatcatgaatcgttgaagtgtcagaaagctattactgagctctttgtaacatataatatacgtttctctggaatatcaaggagcttctttaaaactcctgaaaatcaagctgacaagccaggatttctcagtctaatttctcaaattaatgctttgggctttgagactaatggactacattggaggtacaatttgatggccaacagagtattactattactaattttggcatccagaagcgaatctggcatatattcacaaatgcttgcaaaaattgctggtcatttcttaagaaatttaaagagtcaactgccccactcaagaatgcttgctatatctgctttgaacacattattgcaaggatcacctcattagacatctgcacaaaattctaagcaaccaatagatcaccctgaagattgcaatatttcatcaacagaagagattttgaatgagataatccgggaggaaggat

SEQ ID NO: 280429 - DNA, 684 bp, Zea mays
gaccatcgtcgtgctttcgaacaggtttttggcaggacagtcatatgccgagatctggaaactgcgactaaagttgcacgtagcaatggtctagattgcattacacttgatggtgatcaggtagggaaaaaaggtgctatgacaggaggcttctatgattctagacgctcaaaactaaagtttgtgaagataataagggataacaagacagcaattgatagaaagacgggtcatctagagagtgtcgtaaacaagctaaaagatatagatgagaaaattacagatttagttaccaaacagcagcaaatggatgctgaacgtgatcatgcgaagtcagagttggaacaatttaaggctgacattgccagggctatgaagcaaagggggtcacttgagaaagcccttgtcaagaaggaaaaatcacttaacaacatctgcaaccaaattgagcaagtccagtctagcattgcaatgaagaatgatgaaatgggcacagagcttattgatcagctaacttcagaagaaagagatctcctttcacgattgaatcctgaaattactgatttgaaggagagatttctaatgtgtaaaaacagtcggattgagatcgaagcacgaaaggaagaattggagaccaatttatcaacaaatcttatcaggcgtcagcaagagctagaagcgata

SEQ ID NO: 280430 - DNA, 541 bp, Zea mays
ccgtcgccgtctcgtcggtgccgcgtcccttttcccctccccccctccgtcgccgcctcgagcgagctccaccacttgctcctgcgcgaggtgaacactgggttagggccactgccaccgctgggctgcctctgcctctgcctctcccgccagcgcgcgagcccgggggcgattcggcgccggcacgcgggaggggaagccgaggaatgcggtgagtcggcgggggtccggcgtttgtgaactcgtggagggctcggattggtgcgccatggacggcggcgacgccacgaattcggggaagcatgtggccgggcaggtgtgccagatctgcggcgacggcgtgggcaccgcggcggacggcgacctcttcaccgcctgcgacgtctgcggcttccccgtgtgccgcccatgctacgagtacgagcgcaaggacggcacccaggcgtgcccgcagtgcaagactaagtacaagcgccacaaagggagcccaccagtacacggtgaggaaaatgaggatgtggatgctgacgatgtgagtgac

SEQ ID NO: 280431 - DNA, 507 bp, Zea mays
gagacgaaagaagcgcaggggaaggaagccttttgcttttatcaggaaatcaatgacattaatacaacttagaaggtaatatatcaaaagccaattgctgcaagtgacgtgttgctaactagaaactaatgaacgagggagttctttactgaaaaatcaggtgcatgaaatggatgatatcttataactatttatgtgaacagacttagtgttaatgtgatatgtttaatttcgatgtgcttgtgcacacagcattgtcagagcagttgctcccatattacaaagttgaaaacgaaaattatatcatgaaataaccttcgtgagatattttttgaatggatgttttctagttgccatttcaactacaagaaataaaatccgagttcatagctatcactggagtgcttttctgaactcattttcactgccaatgtatataggtgaattaattgcgagatatgtccacatcacactcggaacttgaactaatgtgtgcatctaacatct

SEQ ID NO: 280432 - DNA, 666 bp, Zea mays
cgcaccgcgtcgccgcacaggtgctggcgagcagctcttcttcatgttcctgacgctcagtgataagagcagacagggccgatcagtcgccaggttcataagcaagtacgtcattgggtattttcccgtcactttgcacgtggaagactatagcgcctttgatcccaacagggcttatgtgttcggttatgagcctcattctgttttgcccatagctgttgggatcctcggggaccttgttggattcatgccgctaccaaagatgaagattcttgcaagcagtgcggtgttctacaccccgttcctaaggcaaatatggacatggttggggttggctcctgcgtcgagaaagagtttctactccttaccttggaagctggttatagctgttttatagtgccaggaggtgtgcaggaaatacttcatatggatcatgattcagaggttgcttttcttaaaccaagaaaaggttttgctaacatagctattgagatgggttgccctgtagtccccgtttttgctttcggacagagctatgtttacaaatggggggggccaggtggctggttaattgtcaagattgctttgagcaatcgaattttctccaataaatccttctggggaaaactggggacttccatcccttttgcaacaccaatgcatgtg

SEQ ID NO: 280433 - DNA, 723 bp, Zea mays
ttcgttttttcgttgtttgacagcctatgcgctcttaaagcggcgcacggatgccacgagccactgaggcggcttcccagttcactccaggcccagggcgcccggtcgccatggtctcccgctcctcctccggcggcggtgtgcggtccgagagctcgctgtcgttgggggagcgcctctgcgcggtcttcttccccgtcatcgccatcgccgaggccgttttcttcgccttcaccgactgtctcgcggacctctgcactgactccggctcctcgcactcgcgccgcttcggcgcgggcgcgtcctcctccgccgccaggaacagtcggagcaaccattgccagccccaccacagacctttcctacgccgcgccgctgcgggtggatggacctcccccaacctccgccagctcgcacgcctcgccgacgagtcccgatgctgtaaaaaaatcgatccaagcctactccaccttttgctcttccttggtttctccgcctccatctcgcaattccgtttcatctgactctgtttcgattgaactgaattggactaaatgaagtctcggtgaacgaggtggaggcgctctttgagctctacaagaagatcagctgctccatcatcgacgacggcctcatccacaaggaagaacttcagctggcactgttcaaaactccaagcggcgagaatctttttcttgatagagtttttatttgtttgatgag

SEQ ID NO: 280434 - DNA, 466 bp, Zea mays
tcggtttttctttatcatttgggcatctgaagcaaagctctatggagaaaaggcagggaaatgttgtctttctcatttttgcaggctgacgaatttaatgcagtggcaagagttggggttgctgctgaccatcgtggaatcatctgcagtcgtcgtgtgtccacactccctaacatgttgagcctcttgctgatcagatcaggcttgagaaggaaaatttggttttaataagtgttcttgtctggttcgattaaagaaagattcagtaattgtcttttttaggaacatagattcttcatctgtgtataatgtatttttattatctagattgtgatagttacttcaaggcctggtgatctgctagcttgaccattgattgatgattatctgttgtcttaaggatcggtacactgtatgtgttctttggtgttggcgggactttgctgacttgtctatttatgggatc

SEQ ID NO: 280435 - DNA, 500 bp, Zea mays
accaacctgccccaaaacctagctagatttagaaaaacaaaaaacctgtccccaacccgaaccgtgagatggctgagtacggcgagcgctaccagggcaacggcgaccaggccacggccgagggtggctatgcgcagaccgagtacgccgccggtgccggtggctcgccgccctccgacagcaatccctccgtgttctccgaccacgccgacggccgctcctcccagccccagcatgagacccaatcacatgacagtggttcctccaaatctcaagaaagggaccgagaacgtgataagggcaaggacagggagcgaggcagagaccgtgtcccgcgaaaaggagaggggccgagacagggacaaggatcgtgaaagaggtgacagagacagggatcgtgatcgccaccacagggatcgtcgcgagcgcagcgagataaggtaacaccgtgatcgttctgatgatccggaccgttgcaggagtcatgattttgagaggag

SEQ ID NO: 280436 - DNA, 679 bp, Zea mays
tgaaactgagttgaaaagcaaaattgatggccttaaagcgaaacttcgcgctcatgaagctcaaagaaaggaggaagaaaaggtcctgtttgctattgataacctggatacttccactacactaatgcataaacccaagaactatggcaaggcaaccgacctgctgaaatctgaggaggatcggatgaagcttctgtgtgaactacagaaggcccgcgaacagcgctccatggtacataaggaaataagaagcatgaatgagtgtgattatattgatcgtgagattgcagtccttgaagcagaaatagaggattcctgcatctccatactggaaactgacattgagaagtttgtccgtgacaacactttagcagagatttgggagggtagcgcaaaggatctggaggcattgctggtcgattaccaagactgtgttttccaagtcaacttgaaggaggaagagatcaaggtgtgcagtgagtccttgcagtatcaagccagggacatggatgaacttcagtcgaagctgaaccaagcgatccgggagctgggtgagcttctgcgagatagaagaagcctaaccgcttgcagtctggatgaacccacgcttgccgttggtgaaaaggtggcagcagaccttgaggccgtccagattcatgtcgatgaagctaagcagctt

SEQ ID NO: 280437 - DNA, 748 bp, Zea mays
cacgcattgtctgttgctcagcttctcctagcccagctcctgctagctaggctaggcctaggctgctacatactgccatcatccatggagtcgcctcctgatcaggcggcggcggcggcggcgcgccaggacaaggagcagcgggactacagactcatcgcaaaagccgtggacgaagcgtaccgggcggtggagtgcgacggcggcgggtaccccttcggcgcggtcgtcgtccacggcggcggcgacgacgaggtggtcagcagcagccacaactcggtccggaaggacgccgacccgtcggcgcacgccgaagtgaccgccatcagacaggcgtgcaagaagctggggaaaaccagcctcgccggctgcgagatctacacgtcctgcgagccgtgcccgatgtgcctggggctcattcgcctggccaagataaagaaggtggtgttcggagccaagtcggaggtcgccgctgccgccgggctcaacggcgtccccccagaggtcttcagagagttctaccagatatcccgcgtggagatgaggcatgtcgagggctaggcactaaccccgatcgtcgaggaggtgttctagaagaccaagggcaagtttcgtaacaagtaaacgcgcttgagaatgcgccgggtggatggctgttgcctgttgcttgtggaatggttgccgtttccacgcttttttttcgggggacctctgataagaggtaacatgtctcgagaccggaataaat

SEQ ID NO: 280438 - DNA, 538 bp, Zea mays
cgtcctgcaattccctccccccgctccggcccctcgcaccgtttccctttccccgccgctcctccgaagccaccaccgtgccccgccccgcgagggcacgaaagaggaggaacgcggccaccgccggcgagggttcgggctccgctcccgacggtttgcaacccgggagggagccgaccgtgcgcgcgcattgggcccgcgcgggggaagcggcaggcgcgtgccgtttttatttagcccgctccgctccgcgcccggcggctgcggggtgtggtgctcctgctgattttcttctcggcgccatggaggccggctactgcaaccgcaagaagaccgacggcatctgcgacggcgtctgcgacagcgagcttggttcaaagtcagtcctgagcatgtcgaggctgaagtgcgcgctgcggacattcgatctgagggttctcttgattctgctgatcggtgtgccaatcctgctcttcgcgatatacgtgcacggccagaaggtgacctactttctccggccgatatgggagaagccccc

SEQ ID NO: 280439 - DNA, 418 bp, Zea mays
cctatgcgtccgcccacgcgtccgcccacgcgggcgcggatgccgcggggcaaggccgacaaacggcgaccaggcaggcgagctcgtcgcctcgggggcagggaggaccggagcccctcgcctcggaggaagggaggacctgagttctgtttctcagctttatgatcaagcaggagctctgattaacagaattttttgaattctccccatattgaggggtgcacctgaagggagttatggatcggaagaatcaaactcctcaaggtcaaatagcacaggtggttgtggaatttcttgaggtagcaatcagctgcatcgtcttcctcaaaggcttctatccttctcgtgcctttgagaggagaaggttcatgaatgtggtggtccagaaagcactggatcctgagcttacttgctatat

SEQ ID NO: 280440 - DNA, 282 bp, Zea mays
cttatttatgagctaccactagcagagatggttggcgatttcttcgatcaactgaaatcacgaagtaaaggatatgctagcatggaatattcagttgttgggtacagagaaagccaactagtaaagctggatatacaaatcaacggggatcctgttgaggcgttgtcaacaattgtgcacagggataaggcatatgctgttggaagggcacttactcaaaagctcaaggaacttatacctcggcaaatgtttagagttcctattcaagcatgtattggcaca

SEQ ID NO: 280441 - DNA, 310 bp, Zea mays
tgtttttgcaacctgcagataatactgtatatggaactatatgcatgttgcattgagtatttgatcttagagagcgataacttatcaaagttgctcccaaatgcacacctaaccatgggtaacttgactctggattcacatatgctatttgccatcttgactgctcttgtcgtcatgcctaccacttggcttcgtgatctcagctgcctcagcttcatttcagctggtggagtcattgcatctatcgtcattgtctcctgcttgttctgggtgggacttgttgatcacgttggcacagtcgagagtgaag

SEQ ID NO: 280442 - DNA, 562 bp, Zea mays
aagaaagtgcggtttgataatttggaaccagagagcgtgaaatttatggcaagggaaatcctcattttgcgccgccttgatcatccaaatgttatcaagctagagggtctagtaacatcaaggatgtcctgcagcttatatctggtttttgagtacctggagcatgatctagccggactagcttctttccctggagtaaagtttaccgagtctcaggtaaagtgttacatgcaacagctccttcgtggtcttgagcattgccacagccgtcacattctgcaccgtgacattaagggttcaaatctcttgattgataaccgaggcatattgaagatagcagattttggattagcaagtttctttgatcctgaacaacgacaccctttgactagtcgtgttgtcacgctatggtataggccaccagagcttttgcttggtgccaccaattatggtgttgctgtagacctctggagtgctggctgcatttttgccgagctatatgctggcaagcctatcatgcctgggagaacagaggttgagcagttgcataaaatatttaaac

SEQ ID NO: 280443 - DNA, 500 bp, Zea mays
ttcccccctgcttttttcttcttcccttcaccccccgcgtgcgcgctcagtccctctcgcctgtggcgacgcttgagcgaccgctgctgccgctcgacgccagatcttcgccgtgccgctccggtgacgagcaccctccagcgtaaggaggggagccggagatgttttactcgcagttcattttggccaaaaagggtcccctcgggaccatatggattgccgcgcacttggagcggaagctgcgcaagaaccaggtcgcggacacggacatcggcgtctccgtagattccatcatattccctgacgttccaatcgcacttcggttatcaagtcatcttatgttaggcgtggtcagaatctattctcggaaggtcaactacctattccatgactgcagcgaagctggtgctgaagataaaacaagctttcaggtccactgtgtgacttctctgagagcactgctcgatacttatacttgctggcatcgactgtgtttgact

SEQ ID NO: 280444 - DNA, 318 bp, Zea mays
cccacgcgtccggtcacgctcgagaaggccaagctcgatctctcccagcgtcgcaagaagatcatgcccgagctagcaaccggtggtggcggtggagatgttggaaaaaggatcggtcatggtgggggtgatggtggtgatgatgatggtgatgatgatgattactttgatgattttgatgatggagaggaagaagaaggcgggcttttcaggtggcatgttgctgtacaagagcttttcaatcgagagtgtgttgtaacctgtgttgcaagaatggtgcaagacgatgagtaaattgcctgctggtctacaccaagc

SEQ ID NO: 280445 - DNA, 438 bp, Zea mays
tcgttaagatttagtcagctgctctctcttgagcagtgaagaaccaagatcacaaccaactgagcagcaacttgccgctcaccagaggactcttcaaacaattcagaaatgccgcatcgatagtatatttacagagagcaaattcttgcagcctgattcacggctgcaacttgccaaggctctgatttgggctgcaggccggcctcaaaaggttgccagttcgcctgatgacgaggatacagcagttttctgcttggagctgctgattgccataacccttaataatcgagacaggatcgtgctcctctggcaaggtgtatacgagcatattgccagcatagtgcagtccacagttatgccgtgtgctctcgtggagaaagctatttttggactcctgaggatatgccagaggttgctaccatacaaggagaatcttgc

SEQ ID NO: 280446 - DNA, 592 bp, Zea mays
tcgtgatgggagccaccgtcaccgagcgcggttgcgggaaaatccaatctctcccccaggctcgtttcgactcgcgccatggaggcgcaggcgcaggacaacagggcggaggatggggacggcgcgcggcaacacgtagccggcggcgtcgcggcgacggggatggctatgggcgcgatctccatgcacgggttcatggtcccgaagccagagccggtggagttcttcggcgggatgcccgtggtgcggagcaagccgccgccgcggaaccgcgaccggcacaccaaggtggagggccgggggcggcggatccgcatgccgtcgggcgtgcgcggccaggatcttccagctgacaccggagctagggcacaagtccgacggcgagaccatccggtggctcctgcagcagtcggagcccgccatcatcgccgccaccggcaccggcacggtaccggcgatcgcgaccacggtcgacggcgtgctccgcatccccacgcagtcctcgtcgtcctccagcccctcgtccctcacctccgtggtcgacggcgacgaggcgtccgccaagcgccgccgaaaaatacagccaacgcga

SEQ ID NO: 280447 - DNA, 503 bp, Zea mays
gttgttttggcgtttctgttagatctcgctgtgattgtgtagacatgaatgagctgttactgcaaacgagattttagtcagatgagcttcaactgggtacagctgagagacattgatgtgttatgacctggccttctgtgcgagtcagctgcgctgtagtatctagaccaagtggaaatgctcttgtcatatcccatatcagagatgcagttcaggtgctgccggacgtgaaacagtagtgtgtgtctgtgagctacaacacgcgggaaggttcgagtatgatgatccatcagccgggctaagaggaaaggggtacttaactggtttggaggacaagcgggcgacagttttggaaattctgttactcttctctaacaaactgtattcttctcccttccagtctcttcatctgttttcgttgtaattctgtatgctgttgaacttgtggagaaagaagaggagcaattttcttctcacattcgtgtgtgcgtttgcaccgtttt

SEQ ID NO: 280448 - DNA, 381 bp, Zea mays
  unsure (1)..(381): unsure at all n locations
ggacaatagatgttggagatttctgggtatggatggagttcctgtgggaaaggagcaccgcgacgtatctttacctatttcttgtacatcttccctgctggcttttgtgcgtccttgtgttcctgcacccatgtcaccaatcagaatataagctgaagcaggaatagctgtttggcatccatagtcttgtctttttggatggtcaatcttgtagactagtgttgaaatttctcactttcacaaactgttgggtacccataattcggaaattattcacccagttggagacgacttgtagacgatgtatcctgcctaacgtactgtctgcaacattttcganggctagaagaggatgattgcaaagagcatactttcatacaa

SEQ ID NO: 280449 - DNA, 597 bp, Zea mays
cctcatctcatctcttgctcctcgtccgtagttgcagttgcagtgtcctcggccgcctctagtcctagccgtttactccttcctttcaccgcatcaagcagagagcaagcgaggcaagagccatgggcgcctttctgctcttcgtctgtctcctggcgccggtcgtcgtgctcgcctgcgccgtccgcggcaggaagcggcgggcgtcctccgcggcggcgggcggcaaggcgctgccgctgccgcccgggtcgatggggtggccgtacgtgggcgagacgttccagctctactcgtccaagaaccccaacgtgttcttcgcccggaagcagaaccggtacgggccaatcttcaagacgcacatcctgggctgcccctgcgtgatggtgtccagcccggaggcggcgcgcttcgtgctcgtcacgcaggcccacctcttcaagcccaccttcccggcgagcaaggagcgcatgctggggccgcagcagtcttcttccagcagggcgactaccacgcccacctccgccgcctcgtctcccgggctttctcccccgaggccatccgcggctccgtgcaggccatcgaggccatcgcgct

SEQ ID NO: 280450 - DNA, 758 bp, Zea mays
tggttggcataatacggaaggcaactctgtccaatggctttgcatagcctgtgttgaccgaaaagggatgatggcggaggttacatcggctcttacagcttgtggaattaccatatggtcttgtgtggcagaagtcaataaaaggaggggaatgggtgtgatgctgttccattttgagggaagctatgagaacgtggtcagtgcgtgttcaagtgttgacatgattcttggtgttcttggttggtctgtgggatgtagctggtgtccattgggtgttcttgagtgctaatcggtaccaagagacgtgtaccacaatagttcaccactgtcttctccaagatggagttaattttggaagcactaagacatcggtggctcaaaattttgttggtcagatcatggttggtgactggtgagcgagtggaaccctttacttctctgtcaaatcagaaagtgggggtgatcgaagtagaaccagatgtcattctgaaagtgagtgtacatagcagagcgagtagggtactgttagtgcagggattgatttgattgtacagaaggccttacaaaagattgttaagggcagttcgttcttctccccactttgtggttcgcatatactagtttgcttaaatgtgcagctagaattttgacctggacactgatcccaaattttgcctgtttaattttccccccccgcccgtaaatgttattgtccagcttcaattttgccagtgaaaatttgaacaaagttaacgggg

SEQ ID NO: 280451 - DNA, 675 bp, Zea mays
tcgggagttagcgtttgcgatggcgtccacagtggcgggagcttcctggaagtggatggatgagagcgcaggaagttgaaaggccgatgttttcattccaaccctcacgctttttatttttgtttatttcatcttggagagcagctcttcctaccgatgttcctcaccaattatctcatatatgttcatactcattttttttgaaaaatacatttgtgcttaaattatgtcaaacattttagcagctagctaatcaaaatcgatccttcgttggggtgcgcaaagcagaacagatctcaacgtcgtgatctgccacgcatcaagcttggggaggatgagcacgtcactgaagaaattgtactgagctccttgaggtcggctctggaccagttctcttcactgcaagccagcgatgggcactggcctggtgatttcagcgggattatgttcatcatgcctggtttgatatttgccttgtatgtcactggatcactgaatgttgtcatatcaccagaacatcggcatgagatttgccgctacatctacaaccaccagaacgaagatggtggatggggcacacttatcttgggttcgagcaccatgtttggcacatgctcaaactacatcaccttgaggcttctccgtgaggagccatacgccaacaacagtgtgttg

SEQ ID NO: 280452 - DNA, 703 bp, Zea mays
gcatctcctcccttgaagcatttgtcaccaattgttgagcattctccgaagttaaaattaaagtagatgagctattacatccacaccttgccaagcaggttggagaagttgttgatgcagctgcagggaaggttaagaacagaacaccgcccatttttattaaatgcaccagtattcctactcggaggcaaggagtagcaagtccaagccgtcaacacactggggtaaagcgagctcacaataaggtcatggcagagcatgcaaggaatccttgtcagcatctccatagtccaagcaacgctcttgtgaaacttccaagtgttccaatggttcctccaagtcatctagaagatcttaagagaaaaccagacaatacacgagcaaaatctgctcctcctagggctttagcaaccaaggaagacaacagtgcttgctccagttctacgattggtaatgctgaaaacaccaaccagtctgaaccgtctgaacctgactcaccaacttatttggtctcatcctgcaaatgtttgatacctgacactatcatacaaaagcacggcataacaagtaaagcgagttcagaaatcatcacaaccaattgtgagaagaaaatgactagtaatggtggatcttagtctaagcgcagccatggtgcaatcttctgatattcctgaacaaggagttatttgcagggatggaatgc

SEQ ID NO: 280453 - DNA, 529 bp, Zea mays
gcttagctatctctgctgagccgattagataaatccggcggaggaagagggaagaattatcgtgcgatatttcccccctcccactccctctctctctctctcgatttgcccgagaaatttttttggttgtttcccgcatcactctccactaggccgccgtctcccccgctggtgctcgtcgcttcctgcccaattcggcgcacattcgcccggcgcactccctattaattccctgcctcggtagtcactggccgattgccacgtgaaatttcctgttccgttgcctttcgggtgcgcctgaagtacccacacgctactagggttcaatcgtcgtcagcaggcttacctctcaatcactgcggggcggcggctcgagagtttgtggacagttggcgaagagatagttaggtttttttttttgtctcccgtgtccgatggaggaatcggacttgggaggtaatctgggtaagcaaacggatgaggataaggctgctggagaatcaggggatgagggtaagatcgagaggag

SEQ ID NO: 280454 - DNA, 640 bp, Zea mays
cagacgcgtggcggacgcgtgggcggacgcgtgggcgcaggcaagcagatcgtcctgactcctgatggcacaggcacaccaccctcttctcctactaattcttttgctcttcctctcctccactgccattccttcctccaagagaacccagccgaagttctctgccgtcttctacttcggcgactcggttctcgacaccggcaacaacaaccatctccccacggtagctgtggcgaaccatgctccttacggaagggacttcccagggaagaaaccgacggggaggttttccgacggccggcttatcccagacctcctcaacgagaggctgcagctcaaagagttctcgccgccgtttctggacgcaaggcttccgaacagcgacgtcgcgacgggggtgaacttcgcttcggctgggtcaggattcaacgaccagacgtcgcggctgtccaacactctgccgatgtcgaaacaggtggacctcttcgaggactacctgctccggctcagaggcatcgttggggacaaggaggctttcaggatcgttgccagatctctgatctttatcagctcggggaccaacgatttctcacactactaccgttcgccaaagaagaagatggacattggtgactaccag

SEQ ID NO: 280455 - DNA, 825 bp, Zea mays
  unsure (1)..(825): unsure at all n locations
cgttcgcgtgggcggacgcgtgggcttcctcacatcttccttcgtcagccgcagatgcgccagcatctctcccacgggcaggaggaggaggagcgagaggcacagtgacagacagagagagagcgcgcgcggggggagcccagcacagcacctacactagctagccaccggccaccaccaccaccaccaccgaccgaatcgggtgcgcgcggcgcgctgctcgtcagctccggccggccggccgctttatanagccacccacccagccccgcccgatcgccatcgccatacccccgcctccgtccacggacacacacccgccttgccagccggcaccctcccggcctcccccacctgtgtcctccggcctcgccgccgcaaaacccgccgcgcaggccggttgctccgattgggagtgccaatcggagccaacagcgagggaagcacatgctgccgttcgtcctagagttcctcattgatgtcgcctgtgatcagtgagatcctcctctcggggtttatgatcaactccacactccggcgccgcacccacctggtccagtccttctccgtcgtcttcctctactggttctatgtcttctcatgaactactcgcccccatcatagccacgccccttctctcccactcctcctnctcctatttcccttccatctagtagcatctaccgtcctcctcttctctccgtgtcagtctctgccttcgtcgtcgccgtttcagtcgttccctaacctttttagcttgatgcacttcctactgctgtagcaagaccttatactagggcaataagtcccgaagaagagaagaag

SEQ ID NO: 280456 - DNA, 498 bp, Zea mays
tcggctttcgaggcgccccctgataatgccactacacaaaatcgtttgtcactaacaaataccgtatcgaatagcgagattgtggaggagtccgaacagaacacatccgtcactgtggatagtcttccaactagccaacaaccctatgtgccagttgagcaagcatggcaggtcggaaacaggccatacaccagtcctgaggtggagcgcgcgctgtgcatattagacacttctattgcacttctcagaggcgatgataaggctggaaatgtcaccacgctacaaaatctgctcagttacgatgcatctttggaagcgagtactgctgctggttccgtaacttgtcaaacaaacgttcttaacgcagacagtcttccgaatggccatcctgttgccgcagcgccacaagacttcagagagaaagctagcgatagtgccgcagaggaagaagacgccggcgactaaaactctctgaaaatccgacagctttcactgtga

SEQ ID NO: 280457 - DNA, 466 bp, Zea mays
gcttccagcattgcgagaggtcatcagaggatcgtctccagtcgaagcgaaaagcgaaaaggaggagaaggggcgggggattgcgagcctgtgctgatggcggccgcggcggtggccgcggcggggagcagcaatgtcgagttcatccgcgcgcgcagcgacaagcgggagtaccgccgcgtggtgctcgccaacgcgctcgagatcctactaatcagcgaccccgacaccgacaaggcggcggcgtgcatggaggtcgaggtgggctcgttcagcgatccggagggacttgagggcctcgcgcacttcctcgagcacatgctattttatgccagcgagaagtatcctggagaacatgaatatccgaaatttttcatagagcatggtggctcttacaatgcatatacaagctccgagacaacgaatttctttttcgatgtcaatgtggacaattttgaagaagcct

SEQ ID NO: 280458 - DNA, 586 bp, Zea mays
gcgtttcccactctccctgctcgtcacccaccactctccagtccacacgagcaaccccttccacccgcctccccccacacccaatccctaacctccctccgcctcccccgacctcgctcccgaataggatctatgatgccgtgattaagacggggacggaatccaacgcgggcaccgaggccgcgctcgacgcgttgggcgctgagctgactacccctctcgtcgccgacgtgctgcaccgcctccgctacgaggagaagctggcgttccggttcttcgcctgggcgtcccaacaggacggctacagccacgaaccgacgacttacaacgacatcatcgacattctctccggcacgcggtacaagagccgccagttcggtgtcctctgcaacgtgctcgatcacatgaagcgccatggctcgaggtcggtgccggttgagggccttctggagatcctgcgcgcctacacggagaagcatctcacgcacatgagaaagctggccaagaagcggcgggttcggatgcgtacgccgccagagactgacgcgctcaacgttctgctggacgcgttctgcaagtgtgggat

SEQ ID NO: 280459 - DNA, 1233 bp, Zea mays
gagaggtgacgacgagtgaggagtctgtgtgaccagtgctcggcgtcgtcccctgcctctgctagccgctaggcgacgggcccttcgccgggcgacgagcacaccggccctgttaccatggcagcgatgaatactggtatgggaggtttaggtggcaggccgatacatccacaagcaaatccttttggacctgctttgcagggtgctggaccaggattgatccgtactgggctagaaacatatggcggaaggattttagattcaagttctgagtttatgcagagcaatataacacaatatttgtccgaccctcagtactactttcaagtcaacagccagtatgtgaggaacaaactgaaggtcatcttgttccctttcttgcacaggggccactggacaagaataactgaaccagtaggaggaaggctatcctacaaacctccagtccaggatatcaatgcaccggacttgtacatccctttgatggcatttggcacctacattgtagctgctgggtatgccttgggtgttcttggaaggtttacccctgaggcactgaccctacagttttctaaagggatacttgggtggtttctgcaagtcgtcctcatcaaaggtctgctgtactccctgggaagcggcgaagctcccttgctggacatcgtggcgtatgctggatattgcttcgctggcacttcccttgcaatggtggcccgcatcttctggagctacctgtattacttcatcatgccatggttctgcctctgcacgggagtcttccttgtgaagaccatgaagagggttcttctgggcgggccaaggagctacgagagacaccccggccggaaccactacttcctgatcttcttggcggtcgtgcaattccccatgctgttctggctcggcaacatatgtggctgacctttgatcctattggtcgggccacagacctgtttcttcttcttcttcagaataggcatgtgctacttctggcttgctgatgaatcttaggtttatcgtggagatggtacagaactattagctatagatatctgggcaatcgaattataaactgtttttgtttctgttagctatagaggcgaaaaagtaaaaacgatcgtttgggataggataaagatgaactgcttcgtgtgtacccttttgtgtcacgagcggctagccacgaccctgcaatctgacttgttttttaacgtatcactgctacttgatctt

SEQ ID NO: 280460 - DNA, 1156 bp, Zea mays
ccctctcgtccgcggacgcgtgggttcggataaaggagggacagcccaatatatggttaatgttattacaccccaattcaacctacactctgaagaagcaaatggaaggtttctacttgctgcagccagtggtcgtgtactggctcgttcatttcattcagttgttcatcttgggaaagaaatactagaacaagcacttggaacaagcagtgcacagattcttgagttacaacctgaaatgacctggaacaagtctgaactctcggtgatgcttaaagatgttcaagctcatgtagcccccactgatgtggatcctggtgctggtctacagtggctccctaaggttctgggtagctctgagaaattgaagcgcacaggtgccttgttagagagagtgtttatgccttgtcaaatgtatttccgttacactagacacaagggtggaactgcagacttgagggttaaaccactgaaggagctacgctttaactctccagacattactgcaacgatgacctctcgccagtttcaagttatgtttgacgtgcttagaaatcttctattcgcaagacttcccaagcctaggaaaaacagtcttcagtatccatcagatgatgaagatattgaagaagaggctgacgaggtagtacctgatggagttgaagaagtggagcttgcgaaaattacactcgaacagagggaaagggaaattaagttactgcttgatgatataaggtctctcactggaaatggtgataatgggaccgatcactgtcattctgcagaaaaaggtgattgtttatggatgatcaacagcgggaaagcttcattggtggaaggactgaaaagggatttcgcaaacctacaaaagtctagaatatttgcatcatcagcattgaggaaagcactttcaaatgcttcacaatcacatttggagaaagaaaagaacaaaaccacttcttgtgccatgcggatttctatgaaaattagcacggttgtatggagcatgctcgcagatggaaacacttttgcagaagctgagatcaatgatatggtgtatgattttgatcgggattacatagatataggcattgccctgtttacaactaaatacttttgtgtgcggaattgcatggttaatgcgaaatgtgacacc

SEQ ID NO: 280461 - DNA, 516 bp, Zea mays
cccactcgttcgcccacgcgtccgcccacgcgtccggcggtattggaggaggaggagcaagtagagcatgaattgcctgctggggctgctccacaaccagttctcgatgtgccattggcagggaagggagagcttaaacatcatcagcccgttgaagaagctgccgaggtacacgaggatgtgcagtgcaagcaggaagctgagtgtgaggcccaaacagttgatcaacaacaagaactggttcctgaagaggagtcggtcgcaggaaaaaatgatgatgtcaatgttatccatgaatgtagcttcagtgatgaagtggttaccgaattgcctgtgggggcagtgacatcgcaagggctgccgaaggatgaccctgaggcagacatggagtttgaggagtgggcagggatccagaggagtgaagtggagaagaggtttggtgcggctgcagcatttgctgctagtggggctggggcggctgccctgtcaaagctcgatagtgatgtgcagctgcac

SEQ ID NO: 280462 - DNA, 752 bp, Zea mays
ggaagaattcgagtccaagtcttggagctctcgctttaggcggccagggtggaactgccccttgcccgtggttggtgaggcgattcgtggtcgggagcttccgtttctcttcggaggtgaagtggatctgacctactgtaggggaaagagcaaagtacattatcttgtacaaatgtgcattacgctacctttatcataaaccaaatcatctctgtttctgggaacagcaaccagtaatttcccatgcaacctcttggttgatggatgttcttcctgttgggtcagaaagagaaagtcaaacagatagtcaccctttactcatggagcatgcgattggcatcccaaggcatgatgttgcttctacttcgacacctcatcgagacaataatgatggcatggatcaactgccccgtgattcagaaagttcttctggaacaactgatgcatcttactctccgaatgctcctctagcaaggagagatgataatcgccttcggcgtcagcaaagtctaaattctggcttctggatatcaattgaactagctgtaaatcttagccagactatagctgctatctgtgttctgtctgcgccaaagaatgaacattctcatgctccattggttgagtgggtcattggttatacaataggctgcattgcaactcttcctcatctatactggcgctatctccagcgcaaccagctggccactgtgcaagggtcaaatcagaactatgttccagacaacagcttt

SEQ ID NO: 280463 - DNA, 495 bp, Zea mays
agctgttcctttcactatcttcatctgcttttgttctccagcttcttgccgagaaaggtgaacttccaacaagatttggttcagctacactgggaattcttctcctgcaggacattgcagttgtccccctgttggtcatactccctgtgctggagtcccagaatattatagagcaaagtgtgtggccaattttactagctgagagcttaaaggcactgggcgggcttggcttactttcccttggtgggaaatacttcataagacgtgtctttgagtttgttgcagagtcaaggagttcagaggcatttgttgcgctctgtcttcttacagtcgcagggacatcacttatcacccagaagctgggatttagtgatacattgggtgcatttctggctggagccattcttgcagaaacaaattttcggacacaaattgaagctgacataaggccattcaggggcttgttgcttgggctgttctttgtgactacaggga

SEQ ID NO: 280464 - DNA, 605 bp, Zea mays
cggactcgtggccgctaatcgacgccgccgcctcggcggtcgcgccgcccccaccccggcgagtggctcaactccgcttcttcagcactcgcagacccggaatcctatccctaactgccaccagctgctccccctcccctccgcccccggtcgctgcggaggtgcctgcggcgccacaggaagcgaagtcgaagccgaggccacggcggtacccgaagcagtaccccggcgagtcggtgggcgttgctgaggagatgcgctttgtcgccatgcgcctgcgtaaccccaagcgcaccaccataaaagacaagtcggggacggaggacgcggacgccggggcgggggtgtcggagggcgaggctgaggaggacgacggcggcggcgtgaaggaggaacacgaggaggaggatgagggcgagctcgaggaaggggaatggatgcccagcatggaggggttcgtgcgatacctggtggacagcaggctcgtcttcggaaccatcgagcgggtcgtggccgagttcaccgatgtcgcctgtgagtcacagttctcatccccattttttgtgcgagtgcccatttgattaattgtcgtggcctgtgatttt

SEQ ID NO: 280465 - DNA, 530 bp, Zea mays
tgtcttttttgatttacaagtgatgctcgaccaatttaaacaatacttgagtcagtgaactgtaagttccaaagaaaatttcgtagattaaaggcccaacataggggctactgtctattttttatcagtaagcggtccaaaacctaccaggattcatgggccagtggaaggctcctacttgattagatatattataaacgaattaatgatgtcagaaaataaatattagcatacaaaggctaggaacttgcatgatagttctaagtagtaatgattagcatgcctttcagagacctctcaggaaataaattgcataacggacctgtcacaactcacaataacaattgttagcaagacggcatatattttagaatcttggtatctacgatgtttcgttttctcacacctcacgaaataatgtatcttcaatctaaagcttcgaactacaggaaaaggatattcttgactttgcaagacagacatttgtgagggaaaccatgcgtactatggctcttaccttcagttttacc

SEQ ID NO: 280466 - DNA, 484 bp, Zea mays
ccagagttcacaaaaaatcacaagcaagcagtcgcgtgtgtagctcgcaacaatggcgacgaaccccggcctcttcaccgagtggccgtggaagaagctcggcaacttcaagtacctgctgctggcgccgtgggtggcgcacggcggctacctagcggcgaccaaggggtggagggcggccgacctggggtacgtggccatcctcccgtcgctgctcctccgggcgctgcacaaccaggcgtggatcacggcgtcccgcctgcagagcgcgcgcggctcggcggcaggtcgtggaccgcggcatcgagttcgagcaggtggaccgcgagcgcaaactgggacgaccagatcctgctcagcggcatcctcctgtacctgggctccacctacctgccggggggcccgcacctgcctgtgtggcgcgcggacggcgccccgctcatcgcgctgatgcacgccggccccgtcgagctcgtctactact

SEQ ID NO: 280467 - DNA, 934 bp, Zea mays
ttcatgcgtccgattaggcataacaccatacaggtaagacttttgggttattcccctgactttcaatccttgactttcttctgtcaaatcatttattaacagtgaacttgtgttccacttgtacgcttacctagaaatacaacgcttggctcttaacaaacaatggtttcattttcttatccattcatgttttaatattcttccctgtgtgctagtgcttcttttgacttttgttcatggtccaccttttatgtgcatatacatttcaggctcaggttttagtgggatatgatgaagctaaaaagtggacgacgaccgttctataaggatgttaagcctgtagactgccgttcaggctcaagtcttccacatttggctgctcaagcaaagtttgcagccatgaacatgcagactgaagatgtcaagcctcgtcgaccagttcaagtcagacgaagtagatggattcttggtgatgtaaccgaggtgttggatcataattcgtggaggcttgggaagattacagaagttctgaagaatgactattttgtcatcaggctagtgggttgcatccaaccaagagaattccacatatcttgcttgaggattccacatgatcgcaagcagttgactgttggaggcagggaccatcaagcctatgaagaggttgatcactatgctaagaggaaagcagccaatatctgtgcttccaccggtgctagagctgtcaagagaaaactagaagcaagcaggatcccacctaatggtttagtcagaagaacaggcaaggaacagaaagtatctacatatgaatttcgccagttaaccaagaacgagttgcctccgaaggtgtctgctaggaatgccatcgacggagatcattttcataggcctttaagtagcagatacaacgatctgcctgagaaacctctgcgca

SEQ ID NO: 280468 - DNA, 355 bp, Zea mays
cagaagtgaaactgcttagatcagatttcgtggattccttcacttcaaagtttgcatgtcattgaactgaatgatccaatctgatttgctgactgctcctctcatcactcaaaatttgtgatggaacaggaccatcaagcctatgaagaggctgatcactacgctaagaggacagctgccagtatctgtgcttccactggtgctagaactggcaacagataactagatgcaagtaggattccacccaatgatttggttagaagaacaggcaaagaacagaaagtacccgcttatgaagttcgtcagttaaccaagaatgagttgcctctgaaggtgtctgctaggaatgccatca

SEQ ID NO: 280469 - DNA, 350 bp, Zea mays
tttatttttaatctcaaacggaatccccatgacaaacgcaagaaatacgaaagcatgaaccggaaggaacagccacgccaatatacagagcgagccagcacacagtattttttttttcatacggctggtctgcaattgggtgcctcgcactgcttgctagccgccggattaacctttccctaccctaaggctcaggttttagtgggatatgatgaagctaaaaagtggacgacgaccgttctataaggatgctaagcctgtagactgccgttcaggctcaagtcttccacatttggctgctcaagcaaagtcttgcagccatgaacatgcagactgaagatgtcaagcct

SEQ ID NO: 280470 - DNA, 662 bp, Zea mays
tgtgatttcacttaaacttggtctcaaacaagctaaagttgttggcttgttttctggagggcttaacgctgcatcaaccatgtctgtggttattgttgttatttatggcgccaacttaaccatcaatggttacatgacaactggctctcttacatcattcatcttatacagccttacagttggttcgtcagtatctgccttgtcaggactatacacaactgtaatgaaagcctctggtgcaagccgtagggtttttcaacttttggaccgtgtttcgtcaatgacaaactctggggacaaatgtccaataaatgaaaaggatggggaagttgagcttgatgatgtctggtttgcatatccttctcgcccatctcatatgattcttaagggaataactctgaagctagcaccaggttcaaaggttgcacttgttgggccaagtggtggtggtaaaaccacaatagcaaatttgattgagcggttttatgaccctctaaagggaaggatcttgcttaatggagtaccgctggcagaaatttcacatcaatatcttcacagcaaggtaagcattgtcagccaggagcctacgctcttcaactgcaccatcgaagagaatattgcttatggactagagggcacaacgaactttgctgacgttgaga

SEQ ID NO: 280471 - DNA, 497 bp, Zea mays
ttcttttttccggcgccgacggccgacccacacgcgcgtccagcgatttcgccggggggagatcttgccattccgtggagcaccatccgcggtagcctagccgcgactggggatcggggcttgcgggccgtggagccacccagaaggtagccgggaaaagcttgatccggccggggacggggccttcggaggttcgtccctcgatcgggtgtcgtctgcgaaagccgggtcgaacaaatcgtcccgactggaggcggcgcggggtcatgggggcgtgggtctcggtcctgctcgggatggacggagccgcggcggccgggcctgctgctgtgggcctgggcgacctgccggagctctgcgccgcccaggtgctgctccggctcgacccgccggagatctgcaggctcgcgcaggtcaaccacgcgttccgcggcgccgcgggggctgacttcgtgtgggaagccaagctgccggagaactacaactatctgatggag

SEQ ID NO: 280472 - DNA, 637 bp, Zea mays
ttcgtttccctgcccccccacgaccacgccgccgcctcctccccacgcccgcccggcgctcccggaaccgccgcattcacatgatgtatcatgcgaagaatttttctgtgccctttgctccgcagagggcacaggataatgagcatgcaagtaatattggaggtattggtggacccaacataagcaaccctgctaatcctgtaggaagtgggaaacaacggctacggtggacatcggatcttcataatcgctttgtggatgccatcgcccagcttggtggaccagacagagctacacctaaaggggttctcactgtgatgggtgtaccagggatcacaatttatcatgtgaagagccatctgcagaagtatcgccttgcaaagtatatacccgactctcctgctgaaggttccaaggacgaaaagaaagattcgagtgattccctctcgaacacggattctgcgccaggattgcaaatcaatgaggcactaaagatgcatatggaggttcagaagcgactacatgagcaactcgaggttcaaagacaactgcaactaagaattgaagcacaaggaagatacttgcagatgatcattgaggagcaacaaaagcttggtggatcaattaaagcttctga

SEQ ID NO: 280473 - DNA, 1284 bp, Zea mays
tttatggcaaatgttatgtataccaagttccaaaaatattggataaatcctaatattgtgttgctcatagctgctgttctagatccatcaatgaaaactgaatttgtcaagttctatttctacacagttggtgacaatgttgatatgaagatgagggagctcaaaaggtacttgaagaaatattacctagagtacgagaaaatcatgaggagtcatagtttgcatgtctttattactcccgatgatcagatgagaagtgagccttctacctcttcacctctttgtggtaaaagaagggtggaacatgcatttgctcaatttgcatctcaaaatgcgaatgcccgtccagagcgaacagaaatggatacatacttggaggaccctaggatccttatcaagccagatgaatgcttcaatgttttaggatggtggaagaaaaattcagatgcttatccaatattgtctttaatggctagggatttcatggctattcctgtgagtacggtgtcctcagaatctgcctttagtgcagctggtagagtccttggaaaaaataggacatcactatctcctgaaacacttgaagctttagtctgtgctaaagactggttgattggattcaatgacgaagaagaaggtaaattatcatataaaagtagacttttatatgataatgagttaaattgtctacgtcatttcactaggtgaaccaatgactggaaagcgaatgtttgattcagatgatgaggaatatgattgggaaatttgaagcaggctaaggagttccttggtgcttccggtgacaagcgaaaggaagtcaattaactctgaatcagtggttctgctgcaagtttgcatgcaggttacacacaacattttattgaatggaaagaggacactcggtgaccacaagatcatcagatgatcatttgatgaactaattctcatcaagcatcaatgtcaccaactgtgtagaaatactgaattttagcatggagcgtctttgtaaacattttagcatggagcagtttctcatcgatcatggctgtcaagttctatttctctacacagttgcactttgtggttgttttctatcatttgtttgtgagcccatggattttactaatttattagcctggggtggggcttgcttgtatatgaaggcccttggattggcccgtggatttttaaaaggatccaggcggattaggatgtcggggcattaaaaaacggactgaattgagttgtatcaaatcaatttggatttaagtagggctgggttcc

SEQ ID NO: 280474 - DNA, 439 bp, Zea mays
tcaattaactctgaatcagtggttctgctgcaagggttccccccaacattttattgaatggaaagaggacactcggtgaccacaagatcatcagatgatcatttgttgagctctggaactaaatcctctccgcaggtggtaaccaggcgggttcccatccgagttccgaggtcactgtaatgctaaattgtcaagttcagttatctgaattcagtttgagttataattctcatcaagcatcaatgtcaccaactgtgtagaaatactgaattttagcatggagcgtctttataaacattttagcatggagcagtttctcatcgatcatggctgtcaagttctatttctctacacagttgcactttgtggttgttttctatcatttgtttgtgagcccatgaattttactaatttattagcttgtggtggtgcttgcttg

SEQ ID NO: 280475 - DNA, 572 bp, Zea mays
ggcaatgtctcttccccaagctcctccagcttctgcaagatgagtacaacctgcagaagggagtgaggcatcaaatccagtttctttcggaggagctggagagcatccatggcgccctccgcaaggtggctgccgtgccaccggaccagctggatgagcaggtcaagatctgggctcgccaagtcagagaggcatcgtacgacatggaggacatcctcgactccttcctcgttcgcgtagaggggcgccctgagcccagtggtgacaaggaaggctcaaaggcgctgtgaagaggatgggcaagctgttcgtagatgccaaggctcgccgcgacatcgcaagcgccattgaggccatcaaggggcagctacagcaggtgtccgagcggcgtgataggtgcaaagtcgatgatattgtggccaagcttgccgcaagctcaacaattgatcctcgtctcgaggccatgtacagagaggtgacacaacttgtcggcatcgacggggcaatgggtgagctgataccgatgtgtccctcacgggggatgtgtgtccaacaagagcttaggaagctcg

SEQ ID NO: 280476 - DNA, 731 bp, Zea mays
atcttccttcattggatccagaattgtatcggcatcttctatttttaaagcattataatggtgatatctcagagttggaactatattttgttattgtaaataatgaatatggtgaacaatgtgaagaagaacttctccctggtgggaggcacatgcgtgtaacaaatgataatgttattacttttatccatcttgtcgccaatcatcggttaaactaccagatccgtgcacaaagtacacacttcttgagaggttttcagcagcttataccaaaagattggattgatatgttcaatgaacatgaaattcaggttcttatatctggatctttagaaagcttggatattgatgacctgcggtcgaacaccaactattctgcaggatatcatccggaccatgagcttattgagatgttttgggaggtcttgaagagcttaagttcggacaaccagaaaaagtttctcaagtttgtgactggatgttctcgtggccccctccttggatttcagtatctcgaaccaaaattctgcattcagagagctggtgttccaggtctggaggagcatgcagaccgcttgccgacatcagctacctgcatgaaccttctgaagctccccccctataaaagcaaggagcagatgcaaaccaaactattgtacgcgataaactcagaagctggtttttgatctaagatgatcatgatcgggattcagtatttgcagttcaaatag

SEQ ID NO: 280477 - DNA, 456 bp, Zea mays
ccattttccaaaagcgaggaaaggaaggaggacgtcgcgcaagaaacgaaagccacccgccccgcccgcctccaaccgcgcttaaatgcgcgcctttcttcttccgcgttaaaccctccggctgtctcatcgctccgcgtagtaaactcttgttacaaaaggccagctgctcgtttgctccgccgcgcgccgtcggttggctgctcgctcgctctggctgggcggcgtcggttgctcggctgagtccggccggggagcgagcaatgcacattgcgacctgcgtgtggcaagagaaggcgtcggccggcggcatggggggagctgctgctggtggaggcggctgcgccggcggagagtggggcgcggcgcgcgcgaaggtggcgtctgcgctgggcgtggccgggtgcgcgctcaactgcgcggtgagcttcgtggtgttctctgcgctggacgtgc

SEQ ID NO: 280478 - DNA, 544 bp, Zea mays
catttctgtactgatattcttacagtaaataagatcaaggaacctatattgtgtaccatgtaatatcatttttaacagtttgatgaggaagtactactactattacaattgatgcttcagttctacgacttctttcaaaccaagcgtccacacatatcttgaggtatgtttctgatctgaagtacttatttacaacttctctcacttgtcatctatgtaccatgtatgtttctgaaattacatgaacagtaatgtttttttggaagacacagcatacctttaattattcagctactgtacaatgtacaaattcttaatttactgctaggcaaatcaatgctctcaaccatttcaacttctgttgccatgagatgagagaactgaaatgatagtctcattgttagtactttaaccgtgctgttctatggatccttcatccttcactatctagcagtcaatatgcttcagttcaaattgtttgcattttctttcctttgttggtctgacatgtaaaactttatgctgcagcattctcactgggctt

SEQ ID NO: 280479 - DNA, 468 bp, Zea mays
tttccttcgcgtccggacgacgaccggcgggacgagttgttgggcgcggggcgggaccatgaaccagagccggcggacgcggaggaggccaagaaacccgcacccggcgaggcggaggccggcaacggcgccggcgcggaggcggcgacctgcgactactgcgggaccgcggcggcggcggtctactgccgcgccgactccgccaggctctgcctgccgtgcgaccgcctcgtgcacggcgccaacggggtctgctcccgccacgcccgcgccccgctctgcgccggctgctgcgccgccggggccggcttccgccgcgcctcgacctccgccttcctctgctccaactgcgacttcgggaggcaccgggatggcggtgacccgccgctccacgaccgctgcgccgtgcagccctattccgggtgccctcccgcgagcgaccttgccgcgcttctcgcggtgcccctc

SEQ ID NO: 280480 - DNA, 572 bp, Zea mays
agagtctgcagactcaccgctgactctggcaagatcatctggatattcaaactacccttcggccctgctggtgtcaaacactaattctagattctgtccacttcctgagtccaatgtgacgtcaccgtgcttactgtggcctgcgtacctcagcgatgatgggattttacatgtgcttggcaatgccagtagttcaaccattgtgcagcagagatcatcattagttcaaccttccacatcagatactgcaaatctacagcttgaacagtttgctacccctatggatgtatgtcctggagagccaacttcatttaataacatatcagatgcagtaactgtgcctacttcaaatgcaattgaaatgcatggtgctggcggccagtctaacccaagactgcagggcagcagctctattagtaatcttgagaggttcagtgctagagatgctttgcaagtgtcttccctgagcagcattgagccaatcccatcaacagctgggtcttcgggatccaattcacgccgtgctatgccactgaatatgctcctcactggtggattagatgttcaaaatg

SEQ ID NO: 280481 - DNA, 543 bp, Zea mays
tctggtctcttgggcggacgcgtgggcaacctacgccgcagccctagccagagccgaggccttcatcggtatcttctccggcgacgagcacccacagtgctatgtaaaggtggatgtctcctacaaagagaagaggacttggtcgccgtggtcatggtcgtggaaggggtgccacggcagaaaaggatatggatcatctcgatatctctgtaccttcttcaccaagtactacctctgacagagaagatcagcctctgttgattccaagacaatccccagcttgctatgtaggaccgtcagaagtatccaccatgttactgaaccctaagatcaaccatcgttccgatgcgatttttggtgatcaggctgtggagcagctgaagttacgtcatcacaagcctctgaaatttcatgagagatatcgtccttacctgagagatgcaggtttgcttgggctctcacaaatttgccagaagatgccccagttggacaaagcattgataactgcccttgttgagcgttggaggccagagacccatagct

SEQ ID NO: 280482 - DNA, 551 bp, Zea mays
ccttcgcgtccgctcggggagaatgctgacgagaaggacgctgaggagattattgacttggctagcaaagcttctattgctgatcagcagaaacaagtgcaggataatgttcattatgaacttacgcatatgtgccaagcaatggatagcattttatgtcctgatacaataaacgacccatcaaaaggaccttcagatgcacataatcattctcagcgtagtggcttaagttttgccgttggtggtgctgcatctgcaaacaagcaaagtgcaattatccctgctacacgacctttaactcgagcagaattgtcaaagaaattcagggatcattttgggtacacacttgacatcggaccatctggaattcctcataaagacgcaggtcaaggtttattcttatcaggacaagcaaatgccggtgctgtcctagccatctatcctggtgttatatattcacctgcttactatcgatatatacctggatacccaagaattgatgtttgcaacaactatctaatcacaagatatgatgggacaaatattgatgc

SEQ ID NO: 280483 - DNA, 549 bp, Zea mays
tgtccttccacgcgtccgcccacgcgtccgcccaggcgtccggccgtcccttacctccccttccatcctcgtcctcgagcgagccgctgcaggcgtcacaccgtcgccagaggcgcctgctgacggcgagcctgaatccaaggcctgtgcaactggcgacgacgaccatcagagggccgacgagtggtccctcgcctcctcctccggctagatggtcctgtcgcccatgtatctcccctttcatggccgtcctcgagcgtgctgttgcgggcatcacgctgccgctaaaaacacatgtcggcggcgaggacgaggcctatgcagccggcagcgacgaccaccaacagttccagcttgccgagcctaaccagagggccgaggagccaccttctccgtctagatgctcccatcgtccgtgcatctccccttccatccctgtcctcgattgtgtcgttgcgtacgtcgtgccaccgccagagtctcctgtcaacggcgaggccgagaccaacgcctgtgcacccagcggtgacgaccaccaccagctgcagc

SEQ ID NO: 280484 - DNA, 754 bp, Zea mays
cggtggaggctgtcggccccaaatgatggttcagcgcatacggaggctaaccttccattggcagcgcacagatcatccggggcggacctataagatgtcaagtgtgtacgccccaacaacccacagatgcggctcgacgctctccatctgcatgtctctttaattatctctatatatatggatagacgacaaccttctatctatgaattatatgtcatgtctctttaattatctctatatcaatgtctacctatgtgatataagataccgtagcaacgcgcgtgcacctaattagtgaatttggaagtgtgactttataaaaacaaatgagttatatgtccaagataatgttagtagtcatactatttaaagtccttttactttcttatttggatgagtctttgtccacatatcttccgtcctaatgcaccattcatggttctattgatagctcaaggtcgtgtgaatgttgccgctgagtactacaaacaacaggtagagatgttagagggttttagtgagatgggcgcatttacagatcatgctttcctacctgtaatgtccaaggtatgttatatatggactttctgtttgaacattagggaaggtaacttatgtggatgttaataatcaaattttcttcactatattttttcttctttataatagtgacgacatcaatagatatctggccactttattgacctgcaggaagaacacgaaaaagttatcaggagtgaaccattagccatat

SEQ ID NO: 280485 - DNA, 472 bp, Zea mays
cgggggccccggtgcggaatccgtggggcgacaccacgcgcgcgtctatgcgtccagccacgcgtccgatctcctttgcactccagtccaaccaaccgtccatgggtttcttcatcccgccgcccaaggtgtacaagccggcggcagaggtcgacctcgggccggacagcgacgagcactacatcagccccaacgtgaaagcgccccgcgtggccgggttcctggtgaagatgctggcctgggtgctggagacgccggtgcttggctggatcgtgctcggcgtcctcaagagggacaacctcgtctacaagctcgtctcggacgctgagatcccggagccgccgctattcacggccacccacacatggcaagcagcgatccaggagcagagcgtgcgcgtgacggagtcgaggctgtcgccggtggagcgcgtgcaggaggccgtcacctgcgttccagctgctgcccaggc

SEQ ID NO: 280486 - DNA, 535 bp, Zea mays
tgccctaccctttcccagccaagcacactgcacatcgccacccaccagcaccccagtgtatacgtcggctgtgtcgcatgcctcgctcactcgtcgtcggcgacctcgccgtaccggagatggcgcatccgtacatgaagaaggacgacgacgacgaagatgtcgagtattcaccattctttgggatcgagaaggggtctgttctgcaggaggcacgagctttccatgatccacagcttgatgtgagacgatgttcgcaagtcatcatcaagctattatatttacttaatcaaggagagacattcaccaaggttgaggccacggaagtcttctttgcagtaacaaagttattccagtctagtgatgctggtcttaggaggctagtgtacttaatgatcaaagaactttctccatcgtcagatgaggttaaataaatgatgttttcagatgaatacaatgtttttgatgccttctaatctaattaaaagatggttgagctttatgattgtaataggtcatcatagtcacaagctca

SEQ ID NO: 280487 - DNA, 768 bp, Zea mays
ggtttgtatcatataccatggaggtaaggctgcccgggctgttatccgaaggaaatttatgcccacaaatgttggccctgattttccgatagtagtgacttcatatgagatggccatgtttgatgctaaatttcttgctgcctataagtggaagtatgttgttgtggatgaggggcatcgtctgaaaaatgctaagtgtctattattgaagcagctgaagcgcataccaatggataataagctccttttgactggaacacccttgcagaataatcttgcagagctctggtcactattgaacttcattttgcctgatatattctcgtcacatcaagagtttgagtcatggtttgatttttctggtggaaatgaagaaactgatgagaagaaaaggctgcatgttgtttcaaagcttcacgctatcttgcgtccattccttctaaggcgtatgaaggaggatgtggaacagatgcttccacgaaagaaagagataatcatatatgccaacatgactgagcaacagaagcaaatccagcatcacctgatcgaaaaaacatttgacaactacttgcacgaggaatcagatattatattgaaaagacctggcattagggcaaggttgcataatctaatgattcagctgaggaagaattgcaaccatcctgatcttttggaatctccagttgattcaactggtttatatccacctgttgagaagctcctggaacagtgtggtaaattccaactttttgacaggttgctaaattt

SEQ ID NO: 280488 - DNA, 385 bp, Zea mays
gtccgtcttctcgtccgggccagagctatcggaatgagaatagtcattctaagatggcgatgagtgatcctggcatcttagtatggcattgtcgtggttcgtgagcattttgccacagccaaaatcagatgccctgcaacactctggccagagctatcggaatgagaatagtcattttttcatgtcacaaaggatgttgttgctgttgaaaagaatcctccgaattacatttaacttgtaactgtatgggctgtagtttggtggccatgagttgcttccatgcgtcggaacaatgagggctacacaagtcgagatggtgtatgggagctttgtcttgcaattgcaaaggtatctctccagtctatgctttttatgaaaaataaaa

SEQ ID NO: 280489 - DNA, 548 bp, Zea mays
ttgtgttcaacgcagaggcagaacaacagctgccccaccaagcgccgtcctgtcggagatggcagctgcggcgccggccgcgggcatggggaaacgaaagcgccacctctccgaggacgacgtctggctcctcctccacaggtaccatccggggacgatcctgacggcgctgcaggaggtggcgcagcacgcggagggccggcgcatcgactggagggcggtggtggcgaagtcggccacggggatcacctccgcccgcgagtaccagatgctctggcgccacttcgcctatcaccacgacctagacgagagcgtcgacgccggtgacctgcctctgggcgatgacagtgacctggaactggagcttgaacccgatcccagcctgaccaaggaagctttatctgaggcctctgcattggccaaggcgctaatatccggatcttcacgtgagcaagcctcgggtcatcgcattaatttggatgttcctgcgctgaacactcaaaatgaaaagatagtgcgggttccatctaagcagcttgctcagagtc

SEQ ID NO: 280490 - DNA, 494 bp, Zea mays
cgtttgtgctgtgaagcttattaactgtcctttctaccatgttggatgtgaaacagcctttccacaaggtattcttgagaaccactgttcgaagctacttcaaacgcatatgttgtgtgttctccaagcaagtacaagacaaaatgctgctggtaatgatatgaatcagcgattacaacttcttgagaaggctcagtcacttaacgaaatctctggggctttagatgttaggtcgctcactctgataataaaggagcaagaagcaaagatcaaggatcttgagagcggtatcaaagcacaagaagcaaaggtgaagaaacttgagaacgagcttaggtcgaagaatgcacgataacttcctacacaaaccagagtggcatactttaggacctgtaaataatcagtagcactgacatatatttggaaattatgtttttttgttcatataaaaagtatagagtaattgcgggcttagacttcagaatatgaacttt

SEQ ID NO: 280491 - DNA, 501 bp, Zea mays
gataccttctgtttcctctcgccttcgcactcctggatctccagttccaggctaggcccgagctggggaattccgatccccccaccaagggctcgccccgatcccaaggactcgtgcctctcgtcctccgatgtggcaactcatcccatccggcttctaaagccgcggccaaggttgtcaattccggtggcaggcggcatggattccggcgccaacagcgtcggcgagtcggtgggcgagtcgccggtgcccgcgccggcgcctcagacacggccagccgaaccggtcacaaagggccgcgggctccgccggtggcgtcgtatcccgcgcgagcagcaccacgaggggtctccggtgagccccgggctcggtaacagtgctggtgctagcgcgggtgaggacttggcagcgcagctccacaagcgtcgttacggtcctgccgacgacaagcccaagggaaagcaggacccggctgcagaggaagtggagagctcggtcgcg

SEQ ID NO: 280492 - DNA, 442 bp, Zea mays
ggccttcgtccgcctcctctacgccggcaggtgcggcgaggatgaggatgacgacatggaggagcacgcggtgcaggtgctggtgctggcgcacgcgtaccaggtgccgtggctgaagcgggcgtgcgagggcgccatcggcgcgcgcctcaccgcggactcggtggtggacgtgctgcagctggccggcctctgcgacgcgccgcgcctgcacctgcgctgcgccaggctgctggccaaggagttcgcggccgtggagcgcaccgaggcctggcgcttcctgcaggagaacgacccctggcaggagctccacgtcctgcagcgcctgcacgaggccgacatgcggcggcgcaagtggcggcggaagcgcgcggagcagcgcgtgtacatggagctgagcgaggccatggactgcctggaccacatctgcacggagggatgc

SEQ ID NO: 280493 - DNA, 923 bp, Zea mays
tatgtccgtgaaatggatgtcatgagagtgaaggagtcgtcctattccgtgttcaagggcttaaacattattgtgtgcaggccattcaagttgatctggttgcaagttcacttaattcctcgcactgttatattttgcaagacaacggtttgttccttacttggttaggaggcctgtcttcaccaagcgatcataatatacttgacatgatcatgagcaagttgtgtccaatggaacagtcctatgctagtcagagcaggctctgaaccagatcacttctggaaagctttgggaggacgatcggtgtactcgaaagaaaagcgtgtgaaaggttggcctgcagatccacatctgtatgcttgtagatttgaacaaggtttactcaaggtcaaggaggtattcagcttctgtaaggatgacctggcaactgaagagacgttgattctggactgcaatgaagaaatctacgtctgggttggcctacactcagatattacatccaaggagcaagctctcaatgttggcaagatgttccttaaggatgctgttcacggtggaaggtcaatggaaacgacagtgtatgctgtcacagaaggggacgagcctggatttttcaccagcttcttcgactgggacaattcgaagcaatcatatatggttggcaactcatttgagaggaagctcgccgtcctgaaaggggtctccccaaaactagagacaccggacagaagcctgcgcaggccgtcgaggaggcccggggtatcgtcggagccgaccacgccggagcaccagcaaccgaccgcgagaagggccttcggctccacgtctgccgggcggtttgccagggagcgctctccggctgttgcaccgccaacgttgtcgccatctcccaaaagccgctcgtcgtcgtcgtcgtcgtcgag

SEQ ID NO: 280494 - DNA, 474 bp, Zea mays
gcgcactctcgctcctgctcccggttttgtcgctccccactctctcctccagacctctaccaccaccccacaccgccgcacgcccacacgcaaccacgaaacggaagttttcctcgccttgcctgccctctcgatccgatcgggacccaaccctagcccggaatggcggcggcgaccggcggcatgcggaaggcgccgtcgctggaatgggcggtgggtgtccacggaggacgacgacgactaggaccgcgccggggacggggccgccgccgcggtcgtcggggcggtgagcaggggcgggagctttgagtcggtggatgacgaggatgatgaagaggaggaggacgaggtgaagaaggggaggatgaggctgatccggaccgtgccatccgtcgactggttcgacgtcgtggggaacgaggtcttccgcgcgcagtagctcgacgactgcgaggagtctgatcttggcaggac

SEQ ID NO: 280495 - DNA, 681 bp, Zea mays
cgcacctcgcgcacacctcctgcgggatcaggcagcaggatggcgtcgggtacgtcgaccggcacggggtgccgctggcggactggcctaagggcgccgaccctgcgccctgcgggggagcttccgttgacgggacggtggcggagggtggtgctcgtcctgagcatggcgatgccgttggaggggatgtggatgtggacgacattctcaaatccatccgcgtcgtgacggatgtgatggagtcgcttgtgaagagggtgattgtggccgagtccgaagctgctaacgagaaagaaaaggtgaggatggggttggaagagatcaggaggaagacgttgcaggttgagactatgtccgccaaagtcgaggagatggagaagtttgccgttggcacgaacgggatgttgaatgagatgaggcaaagggttgaggatatggtgctggagaccactcggcagagacagcgcgctgctgaaaatgaggtggagcttatccgggtaaagcatgatttcgagtcgctgagaacttatgttagcactttggttagtgttagagaaactttttttctcatcagaaaagcaatttgagacaattggaaaactttttgacagactaggtgccaagactaaccagcttgagagtgagaaagctcacaaagaagctgaagtccacaaagtgatg

SEQ ID NO: 280496 - DNA, 725 bp, Zea mays
ttgcccacgcgtccgcccacgcgtccgcccacgccgccgcccgcgcgtccgcatacataccccggctagctgtctggactctggagtgtcctccgggctaagcaaacccatagcccgatcagatcgatggcgccggcgccccgcgcttccagcttcttctcggtgctcctcgtcctcctctttgcgctgtcggtggggcgcgcgtccgcaaccggcgtcttccaggtgcgccgcaagttcccgcgccacggaggacggggtgtggcggagcacctcgcggcgctgcggaggcatgacgtcggccgccacggccggctacttggcgccgtcgacttggccctcggcggcgtcgggctccccacagataccggcctgtactacacccggatcgagatcggctcgccgcccaagggctactacgtgcaggtggacaccggcagcgatatcctctgggtcaactgcatccgctgcgatggctgccccaccagaagcggacttgggatagagctgacgcagtacgatccggctgggagcgggaccactgtggggtgcgagcaggagttctgcgttgccaacagcgcgggcggtgtgccccccacgtgcccctggacgtaggctgcgggccagttcaggatcacctacggagatgggagcacaaccaccggcttctacggtacaaacttggtgcaggacaaccagttgtccggcaacggccagaccaccac

SEQ ID NO: 280497 - DNA, 839 bp, Zea mays
tgactgtgcagccaaacgagctgcctcatggatcccaactaattatgggtcttaatcctccttttggagtcaaagcaagtcttgcgaacaaatttattgacaaagcattgacattcaagcctaagctcattgtactaattgtccctaaagaaactaaatgggtagatcagaggagaacaccttatgatttgatttgggaggacagtgagtgtctttctggcaagtccttctatttgcctggttctgtggatcttaatgataaaatagttgaagggtggaatgcatctgcgccacccctctatttgtggagtcatcctggttggacaaagaagcacatgcaagtggctgaagagcatggtcatacttgtatggggaagatagcttgccatgttgaagagagtaatctatcagatgacctgtccgtgaggaaacaatctgatgctacaaacaaactgaactcgagatcagggaaagagactccattcaatgacagaatgtccaatctacttgatgatggttctgctaggaagcaagcaagatctgaagaagagaagagaactctagggaagatagaacaccatgtgaaaaaggctaatataccagataacctcccagtgaagaaagaacctgaagcttccagcaaagtcatgtcgcattctggaaaagatagaaagattggcagatacaacaggaggagacatgacaacaggagcagcaaggggacactgatcaccagagagctacccctgaaaacaagtggagttgatatgaggaacaagagtattctagcaaaaatgctcatatgaaatagacgcgatacactagagcaactgcacagg

SEQ ID NO: 280498 - DNA, 508 bp, Zea mays
gcgtgtagtcagctcgccttgcccgctctaatcggtcaccactggcctccgcccatggggaccatgtctggaggccctggccatttccttaccgtggttaactcgggtggccgtcgcaagtacgccctctgcttcctcgcgcatcaagagagccacacaattcaggtgctgcgcggattcttcttcccaggagcaggagatctccggtgcccctcccgccccgccgctggacaaatctgcaagatcgcccccttcctctctgctgggcatttccacgagcacctggtctgcgggtgtcgctgggctggggttcctggagactggttacctcacttacctcaagctcacgggctccgaggcgttctgccccatcactggcgcaggctgtggcgacgtcctcgacagcgactactccgtcgtctttgggatacctcttcccatagttggtctggtggcatatgggttagttaccgcactttctctgcaaaaaaatggaaaggacttactc

SEQ ID NO: 280499 - DNA, 528 bp, Zea mays
tccggggcttttgggcttgaaccccaccgccgccgccggcccggggaacggctcgccccgcgcgcccgttcccgcagacgtcccgcttcccgggccccgccggcgccgggtgcatgaaccagccgctgctgttccacaaccgcaccgcgctggacgacgccggccgccggctccgcggcggcctgttcgggacctacgacctcgacgccgccgcgggtctcggcgccggcgacgtctccttctactccgtgacgtgggagaaggaggtggcggcgagcggtcgcggcggcgggtgggcattccaccacaagctgcgcacgtccaccaagtacccgtggctgatgctgtacctacggtccgacgccaccaggggcttctccggcgggtaccactacgacaccagaggcatgaccaagacagcgccggagtctccggacttcaaggtgcggctgaccctggacgtgaagcagggcggcgggcgcaacagccagttctacctgatggacatgggcagctgctggaagacga

SEQ ID NO: 280500 - DNA, 526 bp, Zea mays
cggtttcgtgggtcaggctaggtttcgtctttttccgttcacaggcggccgtcggtgttcggtgcccctctcctgccaaacgatcccgagcagtgccaccggtgcggtcgtgcagagggagcggccggggtacagtacaggatgcgggggttgacacgcgctgcgaaacgcgcaggggagatggcgttcaacgccggtggtggcgccgtcaactggttcccgggccacatggccgcggcctcccgcgccatccgcgatcgtctcaagctcgccgacctcgtcatcgaggtccgcgacgcccgcattccattatcctcagcaaatgaagaccttcaaccagtgctctcagcaaagaggcgaattcttgctctaaacaagaaggatctagcaaaccccaacataatgaataggtggctgaatcattttgaatcatgcaagcaggattgtatctcaataaatgcacatagctccagttctgttaaccagcttcttggttttgctgagctgaaactaaaggaagcaatct

SEQ ID NO: 280501 - DNA, 1263 bp, Zea mays
gctttatagccttcggcgacattcttgagttacataagaagttccttgaactttctggtggcattaaccggatctttgagcttgaggagtttacacgcttcgctcaaagaaataccgtggtgtctcccaatgccatcagtgcagcctcagaagaaacgatttcgtttcatgaagtggatattgtaacaccatcacagaagctattggctagaaaactctcgtgcgatgtggtacaagggaaaagccttcttctgaccggtcccaatggtagtggaaagagttctatttttagagtgctcagggatctctggcccaccttctctgggagagttaccaagccctcagaagggatgtttcacgttcctcagcgcccatataccagcctaggtactctgcgggatcagatcatataccctctctcaagggaggaagcgaagataaaagttctttcgctacatagatctggtaacaattctagtgcctccatgctgctggatgatcacctgaagacaattctagagaatgttcggctggtgtatcttctagaaagggaagggtgggattctacaccaaactgggaagatgttctgtcgttaggggaacaacagaggcttggaatggctcgtttgtttttccatcatcctaagtttggtatcctggacgagtgcaccaatgctacgagtgttgatgtcgaagagcatctgtacagacttgcaactagcatgggcataactgtgatcacttcctctcaaaggcctgctttgatacccttccatgccttggagctgaagctcattgacggcgaagggaactgggagctatgtgcgatccagcagtgagtgatggtgcccattaggagttgatgccattaaatgcaccatcagctgcatgtacaaaagcaagcagctagcacattgccattgtttgtgtatggacaacgtagacagtggcagcgttgctatgttggaagatgctatattcttgtcatagtctgcctcaggttgagcagcaaagcattgtgatgatgtatgattgtgagccatgcatggtagctgaatcctgatattagcttttagatagtggacatgattgtgagccatgcatggtagctgaatagcagagcagaagggttgtgtgttagaagctgtacctattgattcattacattatattgattctgcgtagcagatgtatattacaggcaagcaaaatataaataaatacgatgtggaattgtggatgctgctgccatgcagtcatcag

SEQ ID NO: 280502 - DNA, 753 bp, Zea mays
gtccgccattttttccgccaccgcgtccgcccacccgtccgcccacccgttcgatcaaggtgtaaattccggcacaacaatgggcgctggtataatggatgcattataggctttgaaggttcaggcgatgcaaggatctcatttctgacacctacatctgaaaatatgtcgatatgcaagttcttcctacagcagcgatgtcgatttggtagtaactgccgcatgtctcatggtattgtaatgccttctaaagccttgaagcgattcactccaactaggtgggagcagtccttggtaggctccagcatactggcaacttctgggtataactctggcctttggaggagagcagagcttgagtcatgggatgataatctgaagattggccaagttgtttttcaagatgatgggagttctgcgagtctgccaagtgattctctttctgtctcggaatacgctcacatgagtgacgaagatgaaggaagcttaagtgacgaagaatctgagttcagtgacgatgctgatcaagaggacggaagtgttcatcagggtcttggccttttagaattcacaaatgttagtggcattcagacagataccatgatcttcgcaaaatgggagcaccacacacggggtgttgcctccaaaatgatggcaaaaatgggttaccgagaggggatggggctcgctgtgtctggcccaggcatgcttgatccattccagtaaggtactacccccaagcatcactgatca

SEQ ID NO: 280503 - DNA, 736 bp, Zea mays
  unsure (1)..(736): unsure at all n locations
aaagaagataagtgagaggatgaagcttcttcaagatcttgttcctggatgcagtaagatcactggcaaggcagtcatgctcgatgagattatcaactatgtgcagtcattgcaacgacaagtggagttcttgtcaatgaaactcgcaactgttaaccccgagcttggctttgacattgagcagatcatatccaaacaaatgctgctttcacaagacagacatcttgctttctatggagtcgaaccaggatcaagcggccttactggcccatttaaccaaggaatcatgcagccataattgatgtgcaccattgccaatcccgttgatgttttgcatggagctattcacgaggcgtcaacaatgaaccattattgatttgtccactgttatgttcgttgctggtgcaatcatgggatacattatgttcactgaatctacactcccagttcacactgaacttacccctaaatcttgtggcttccaagattgcagtctagactacggtgatgaatccaataaccaaatatccttggacttttattgtagctctttgtgtgcatttgttccgatacttaacaattaacattatatgacaccatagtttctcttatcacatgtaacttcatctagccatctaggtttgttctaagtcaaacatatccttttatntttgattagaaatatctataaaacataatcgccttaattagcagagttatttggtttagtatgaat

SEQ ID NO: 280504 - DNA, 616 bp, Zea mays
gtgatgggatgacatacgatgaaataaagaaaagtaaacctgatgaatatgaatcacgtagaaaagacaagctgaggcatcgttatccgagaggagaatcctatcttgacgtcattcaaagactagaacctgggataatggaactcgaacgacagcgtgctccagttgtagtcatagctcaccaggctgtgttgagagcactttatgcatactttgcggacaaaccgcttgaggaagtcccaaatattgagatacctctacatacaataattgagatacaaatgggtgttgctggtgttcaagagaaacggtacaaactcatggatgcaatccatcccacagcggggttgtaagaaataataaatggagctcgccttctaaaagcaatggtagcacaaataaattttgtgatgatatacgtatcacaacattaatcaattataagctatagttcgaggtggaatgtcacaccactaggtttagctcatagatgatttgccatttgacttacaagttttggctggttgtgtagtgtgtactcttaattcatgagttctgaacatgtttaattcagatccgagttctgagcaagtttattcaggccaaagctcgcgcc

SEQ ID NO: 280505 - DNA, 618 bp, Zea mays
  unsure (1)..(618): unsure at all n locations
tggtacgcgtgggcggtgcggtctccacgagcgctccagctccactcctcgcacccgaatcagccgctcagatccccaggcccgcctgtccctccggcggcagttcctcgccggggtcctgcccgcctgtcccttcatcccctcctcagaacttatggatggacaggtggagacctttgtcggagatgaggaaggcgggtcgcctcaagttccttacgatggggagcagccaacgctgtatgatagtgtcgcgaagcagtacagtgaagagctaggtgaccagtacaacgagcaacctcgtgcccaatatgatgaagggtctgggaatccgtataatgattatgaagagcaagcaaacctgtacagtgaggaaactgggaatcggtacaacgaggacccagcagattcttaccaggaagagcaggagaatgcattcagtgggggcatacaccaacaggactacttgcaggtcaacaatgttgacgataacaaatggcctggatggcctggagagagtgttttccgcatactcgttccagctcagaaggttggaagctatcattggtcgcaaaggngagtttataaagagatgtgcgaggagacttaagcgcgcatcaa

SEQ ID NO: 280506 - DNA, 1151 bp, Zea mays
  unsure (1)..(1151): unsure at all n locations
ccggccccgaaccggaataccacgcccgtcccacgcgcccgatttcttttgccccaccggccaccaccaggccaccacacctcgatccccgcaccgcccagccggccgcccgcatccaccgcacaaaaccctaggcatggccccaccctaaaccccttgctccccacctcgcatggtcgtcgtccccttctccctccgcattgcgcgaaaccccatccgcctccgccttcttccggtctccgctgctcgcttcacccgtctcgccatgtcgaccacgccgccggcggcggctaccatatccgccgagtatgccaagtccgggcgctcaacccgcagggggtgcagcgggggcaatcgcctccggggcgctccgcctcggcgcctcggcgcgcgacccccgtggcttcggcgccaccaagtggtaccacgtctcctgcttaccctcctcgtcgtacccgcttggccccatcgggagtatcaaggggttcgactccattaaggaccatgatcgtgcggaattgcgagaactagagaagaatcataaaagagacaatactgcagtcagccctccggaggaacaacgtccaaagaaagcaaggattcagatgttttcccctgcggagggggtgccagataatgtaacagtctctgttgagtatgcgaagtctggtcgctctacctgcaaaggctgcagtgagaatattgccaaaggtgccctccgccttggtgcctcttttcctgatccccgtggctacgaaaatactaagtggtaccatgttgtgtgcttccctacatcatcatacccattatttccaatgtcaaatctgaaggggtttgattcaattgaggatcatgaccgtgacaagttgcacaaattggtggagaatcacaagagcgatggaaaagcggctgatgtattgaatgagtcaaatctgaagagagaaatggctcacagcatggatgactcgaatgaaggtgctgaaaaggatctggaaggaataaagattcactgcatgggggagtttgaagaaggtgctgaaaagaacctggaagaagcaaagttacctgcagggaacaaaatgattggtccatcgatatccttttcactttctgatataaaaaaagaatacangaatgctacccttcctgct

SEQ ID NO: 280507 - DNA, 503 bp, Zea mays
acccacacgcgctctctgcttagaaatcccgcgtcccggtcgcgctctcccactccgcctccgctccccgctcgccgccgcgattgctggattggctgccgccagcgccccggtgctagctcccgttcctcgcggtggtcactggactagcctggacgccgcggcccgccgcctggtcgaagagatggactcggtcatggccgcccccgactcgccgccgcagactgtcgtgctcgtctctgccggcgccagccactccgtcgcgctcctcacgggcaatgtcctgtgctcgtggggcaggggcgaggacgggcagctcggccacggcgacgcggaggaccggctcgtgcccacggtgcttagcggcttcgacgcgcccgcgatcacgtccgtcatctgcggagccgaccacaccaccgcctactccgaggacgagctgcaagtctacagctggggctggggagactttgggaggctggggcacggcaactccagcgacgtct

SEQ ID NO: 280508 - DNA, 720 bp, Zea mays
gcggcttcttccttctgcgtttctgcccctcctcgcacccgcactgcccgcccgttcgtccgtcgtcgtcttcgccgctccctcccggcctcccgggctggacgaaacgaaccctcgctcgccctccttataaccgaacggccgaacccagccaacccagccgtttctcttcgtacggcctctgccagccagtgtcctgctactagggaagcataccaactccccattcttctcttcgccgcagccaggaaggaaggatgtgcgggatcttcgcctacctcaactacaacgtctcgcgggagcgccgctacatcctcgaggtcctcttcaacggcctccgccgcctcgagtaccgcggctacgactccgccgggatcgcgctcgatgccgaccgccaggtcccctcccccgctcccgcttcctcttccgacgcgcggcacgtacgccggggcgccgccgcttcgtgttccgccaggaggggcaagatcgagaacctcgtgcgatccgtctactccgaggttgatgagagggatgtgaacctggagcctgcgttcagtgtgcatgctgggatcgcacataccaagtgggccacgcacggtgtgcctgctccaggaacagccacccccaatcgtctggtgccggtgatgagttctggttgtccacaatggcattatcaccaactatgaggtcttgaaagagacactaactaggcacggtttt

SEQ ID NO: 280509 - DNA, 666 bp, Zea mays
  unsure (1)..(666): unsure at all n locations
tgctctcatcccacccccctccactccactaccacggcggcacggcctgcctctgcagctctgccctgctccgcacccctcgctctccaaccccaacgcgcggcgttgctaaaattcaccgcagcgcttactccagtttggccacctcaccacccgccgccgctgtttaagaaggccccgcgcccgatcggggatcacgaaccttggccgccgctgccggagtgggggcgtagatttccggcggccatggggggcgccgtgatggtcgccatcgcggcctctatcggcaacttgctgcagggctgggacaatgcgacaattgctggagccgtcctgtacataaagaaggaattcaacctgcagagcgagcctctgatcgagggcctcatcgtcgccatgtccctcattggggcaacagtcatcacgacgttctccggggcagcggccgactgcgttggtaggaggcccatgctggtcgcctcggctgtcctctacttcgtcagtgggctggtgatgctctgggcgccaagtgtgtacatcttgctcctcgcaaggctcattgatgggttcggtatcggattggcggtcacacttgttcctctctacatctncgagactgcgccgacagacattcgtgggctgttgaacacgttgccacagttcagt

SEQ ID NO: 280510 - DNA, 505 bp, Zea mays
  unsure (1)..(505): unsure at all n locations
gttgtttttttgttgttgcaaatttgtactctagaatactttgttctgaggaattatgattagattttaggaagcttgatgttctctgcacaaaaagtgttgcttctttacctaataaagagtgaccgtgcagtctggtcatttgtcgagaggaagcatataagcgaattggccagtattaaacagcattgtgcattttcccgttgtgcagtgttacctgtctcctggcacatgttgaagtattcgcgaaacaatgaccaataccatttatgtgctcagataccaatagcatgttctcatgtttcttaattcatactctagcaacggtgcatatgtgcaagctagatgttgcatcttggctggattgtactagttacgtcggtatgcctgggtcataatttggtgtcgacctgcagttgatttgagttatttattctgtcttttaacattntttgtgcctgtcacatgtctagagatttatattagacatttggtgatcagcaac

SEQ ID NO: 280511 - DNA, 564 bp, Zea mays
cggatcctttccccaatcccatccataatccatcggccacgagctgatgcgcaacgccgccgacctccccacctcggcttctgtctatccctcgacaaaccgacctctcccgccgccgaccgccgtcgatctaccgatcggccggacgaaagacccacctctccccaaaataggcggctgagacatacgttcctatctccccttcgctgccggagaaaagcctcgcagcctgcccctccctcaccttcacctcgatttctctgggcctccgaaccccgccgacaggagcgttccagcatctcctatcccgtgccgcgtacgtctgcacggattagcgttccttctattggtaagtaggtcacataatgtcttctgaagataaagcaatggctaatcgtgtcacttcacactcgccaaaagctatggtgtcggaaccagatcccaacaggatgatgatgtttagatcaaatatggagtattcacaaacaaatggccagacaaatgctgttcttggtcctgtggctatcttttgggacattgagaactgtcctgttccatgtgatg

SEQ ID NO: 280512 - DNA, 719 bp, Zea mays
tcggtcgcgtgggaggcaatcaagaacaccacctaccggtgacttgtcaattcctgtctgtgcgcgcgcgcgcgtggcgccggccgagcggccgttgacccgatgaccggcgcggcggccgtcgatcccccggtgcctcggccgcggcggctcacggtcctcccgctcatcgcgctcatcttctacgacgtctcgggaggccccttcggcatcgaggactcggtccgcacgggcggcggcgcgctgctcccgatccttggcttcatcgtcctcccagtcctctggtcgctcccggaggcgctggtcacggccgagctcgcatcggctttccccaccaacgccgggtacgtggcctgggtgtccgccgccttcgggcccgccgtggcgttcctcgtcgggttctccaagtgggcgtcggggacgctcgacaacgcgctctacccggtgctgttcctcgactacctccgctccggcggcgggctggcgctgccgccgccggcccgctcgctggcggtcctcgcgctcacggccgcgctcacctaccttaactaccgggggctccacatcgtcggcctctcggtgctggcgctacccgggttttcgctcttcccgttcctcgcgctcaccgtgcttcggggccccaagatccgcccgtcccgctggctcgccatcgacgcctgcgctcgtgaccttagggggtacttcaactccctgttctg

SEQ ID NO: 280513 - DNA, 455 bp, Zea mays
ttctaccaatgggcaggaagagtttattttaccttgcattttatggatctgtgttaggtgttggttcctatgctgtacactacttctcaacattggtctcttctattcttgaaaacttcggcttgagtgaagagttatacaaccctgtttctatcttcctgctggtagcaattgtcttgactggagctggttttggctattggatggtcaggagatttatcctttccaaagatggaagtgtagatgctgggatagcgcagtttgtgaagtgggctatgcgtgttgttgctacatttttcattatgcagagcacacttgatcctcttctggcactggttgctcttgcttttagctggtggttatgctctctgttgactacaaagaaagttcagaagaccatgacccagaaacaaaagcaatcaaaggttctttctcagcaaatgcttactcaagga

SEQ ID NO: 280514 - DNA, 514 bp, Zea mays
  unsure (1)..(514): unsure at all n locations
ctttgtttcattgctaaaatctagatcatcataccagttattctgcagtccaggtagtaccattgtatcattgcactggattaaatcgatgctattcagtcctatatccccgaaggagacgccttgaagttgatagccggacagttcatcaggtagacaagtcaaatcagtgctgcataatatacttgcctcttctgaagtaagcaaaatattttagtataagacaggataattatcgatcataaatacatatgcatgcttataatataatttcagttgatagtagcgattgtttgcaatagattttatcgaaaaacagaccattcagtagttatagattctctaatatgtcagccaaatgaactaagaattctgtccagatgaaaataaaagattaaagatgttctcaaagacaaataaaatantgttcgttgggtcattcacttgaaaagttttctgctcccaaaagccagctttggtgtgacaaaaaatatagcaggtaaatagactccac

SEQ ID NO: 280515 - DNA, 458 bp, Zea mays
ggtctttatttagatgaagatgaacagattgcacaggctcttcaagaaaatattggtcataacctagctgaagacgaacagcttgcacgggctctgcaagaaagtatgaatgatggacctcctcgtcagcacattccagttgaagatgttaactcagaaagtactccagcaagcatcttgccctcaaatattttccgcacaagtggcttgagggtttgtgctggatgcagaagtccaattggccgcggtcggtttctcaggtgcatggactctgtttggcatcccgagtgcttcaggtgttatgcttgtgatagaccaatatcagagtatgagtttgctgttcatgaaaaccatgcctaccacaggccctgctacaaggagcgtttccatcctaaatgtgatgtttgcagtagctttccaaaggacagtcaatacataacattagatgatggccggag

SEQ ID NO: 280516 - DNA, 980 bp, Zea mays
tgatgttgttagatcaagaaattcaagtgcatcctatgacgaaacagaggacacgtcgaatgctcggcatcacaaactagatgacgcacaagaagacactggaaccaacttggatgatgaggaagcagcagcgttgcaagagcaagtcaggcagataaaggcgcaggaggaagagtttgaaacattcaatcttaagattgtgcatagaaaaaacagaactggctttgaagaagacaaaaacttccatgttgttctcaattctgtcattgctgggcgttatcatgtatcagagtatttgggttcagctgcattcagcaaagccatccaggcacatgatttgcacacaggaatggatgtatgtgttaaaattataaaaaacaacaaagattttttcgaccagagccttgatgagatcaagcttctgaagtatgttaacaagcatgatcctggtgacaagtaccaccttttgcgtctgtatgattacttctactatcgggagcatttgctgatagtctgtgaacttctgaaggcaaatctgtacgagtttcagaaattcaacagagaatcagggggtgaggtttacttcacaatgccaagactccagtcaatagctattcagtgtctggaggcgctgcagtttctgcatggtctcggtctaatccactgtgatttaaagccagaaaacatattggtaaagagctacagcagatgtgaaataaaagtaattgatcttgggagcagctgctttgagacagatcatctatgttcatatgtgcaatcacgatcttaccgtgcacctgaagttatactgggcttgccttatgacaaaaagatagatgtatggtcacttggttgtatattagcagagctttgcaccggaaatgtacttttccaaaatgattctcctgcaacattacttgctcgtgtgatgggtatcattggctccatagaacaagctatgcttgcacagggacgcgaca

SEQ ID NO: 280517 - DNA, 483 bp, Zea mays
gagcggtatgatcgggggcaccctgatgcagaccatgatcctggtgtgggttacattcaggaccaactggaacaaggaggttgaagaagcgcagaaaagactgaacaaatgggaagacagtaaagcgcctgtccagtgagcccaagaacgaaataaggcttctctgttgccaaaccaagaacgagagacgtgggaaattgatgcaattcaccctgatgcagattcggcaattgatgcaaggttgcaattcagtgtcctgaaatgtctacgaggagaggagaggagatgagatggctggaattttaaatactactcttgcatcacgcaattcaattctgtgttccgttattatatatcgttcactgatgcgacagcatagcagactagtagtcaataataatttttgttggaattgccacgaacccgccaccataaggcattgttcgtttctactgaattggtggatcggaacgatttctaacc

SEQ ID NO: 280518 - DNA, 860 bp, Zea mays
cggacgcgtgggcgtcaccaataccacgcgagccgtccccccctccttgtccatccccggccggcacgacgaaccgcctgaggagggagcaatagctcggggctctcgctcttggctgcgtgtctgaagctgttgatgcgagtgaaggctcggtttccatggctctcatggcggcggggatggacgaccacgacgagtacgccaagctcgtcaggaggatgaacccgcccagggttgtgatcgacaacgaggcctccgacgacgccaccgtgattaaggtagacagcgtcaacagccacggcacgctgctcgccgtcgtccaggtcatcgccgacctcaacctcgtcatccggaaggcatacttctccttcgatggaaactggttcatggatgcgttcaatgtcaccgaccgtgacggcatcaaggttctggacgcctcaaccatctcctacatccagaagacgctggaggtggacgactggtactacccgggggcgcacaactcggtgggcatcgtgccgtcgggggactacacctccatcgagctcacgggcacggaccgcccgggcctgctctccgaggtgtgcgcggtgctcgcggccatgggctacgcggtccagagcgcggagctgtggacgcacaacacgcgcgtggccgccgttgtgcacgtcacggacgccgagactggcggcgccatcgaggactccgcccgcatcgccgacatcagcgcgcgcttgggcaacctgctgcgcgagcacagcgacgtgcgcgctggcggcggcgcgggcagcctggcactccacaaggaccggcggctgcaccagatgatgttcgacgatcggggagtggaaggccacgcc

SEQ ID NO: 280519 - DNA, 778 bp, Zea mays
  unsure (1)..(778): unsure at all n locations
tcgttacgcgtgggcttttttcgagggaaggcacgaacaggcacaggcaggcgcgcggcacggggtaggaacccgtcgcgattgtgcccgtccgacgacgaaccggtcgcgggcctcgtgcccgtggtggatctgactccacctgcgcgcggtcgcggtcgcgggcgccttgcttccccctcccccgctcatcgccgcggcgtccacggggcaatttccatccgcggggcgccgccgtgtcgactccatcttcctcggcggtcaatgcgggcgcggagatgagagccggcggggaggggtaaaagagggtggttgtgggttttttttgtgtngtggggttgtttgnttttttttttttttgttttttttttttgtttttttttttttttttttttttttttgtttttttttttttttttttttttttttttttttttgttttgttttttnttttgtttgtttttttttttgtgttttgtttttttttttgtttgtttttttttttttttttttttttttttttntttnttttttttttttttttttttttttttttttttctttttttttttttttttttttttttttttttgttttttttttgtttttttttttgttttttttttttttttntttgtttttttttgttgtttttttttttntttttttttttttttttttttttgtgttttgtttttttttggtttttttttnttttntttttttttttttttgtttttttttttttttttttttttttgttttttttttttttttt

SEQ ID NO: 280520 - DNA, 714 bp, Zea mays
ctgctgcctgctggctgctgcctcgccccgcgtgaatcaataatcattgaatccattctaccgctgctcctcctccttgctctgccgagaagccggcgatgaggggccgcaagaggcagcaggtgagcgccagctcggccgccgcgctggtgaaggggagggagagcaccaagcagaaggagaaagaagctaggaaggagaaggaggcgagggaggccggcagggagccggcggcgaaggagaggcagatgaggcgcaaggccgggaaggagaaggagacggagacgggcggagaggggaaggagccagccaaggagaaggaggtcagggaagagggcaaggagaacgacaagcacaaggagaaggcgaagacgaaggccaacgtctgcccgcagttcttcaaggtcttcttccccgagcagtccacggagcggctgagaatcccacccatgttcaaccagcacctcaaggagcagcagccaaccggagcagtttccctgagaggcccgagcggcaacagatggcaggcagcgctcgcttcagagtccgagtccgaggccgcgtggtgcttcgaccagggctggaaggagttcgtcacggaccactccctcaggccaggccacttcctggtcttcacgcgcgacgggcccgcccagttctccgtggcggtgttctcgtcgtcaggcgtcatcgacccggcagccctggacgcga

SEQ ID NO: 280521 - DNA, 494 bp, Zea mays
tcgtgacaacctctggagcgtcgataacgaccgcgccgccatggaggcggtccggggcccgatgcaccgccgcaggaaacgccccagcggtcgccgcctgccgccgccgaggaggaaggggatggatgcggggtcgagggttctagtgtctggagccatgctcgtggaggtcgaaactgtgctccaaactcaggaacctgttataaagccttcttgggatacatttgcaagtagtttaactggtaactggaagggtgttggagctatcttctcgccaatcacagcagagatggagcctgttggggttgggaacaaagaagagtacctttatgactgctacactctttctcacattgagagatcttttgatggtggtcatggctctgagatccgaaagaaaacaaattgggtcccaatcaatccgtttgggaagctgagaagcaatcacatcatatgatggtgggagtcaaagcacttccagggaaagggaattg

SEQ ID NO: 280522 - DNA, 479 bp, Zea mays
ttgtctcgtgggcggaatccgttcttcctaccgttcgtctatcatccatccgttgctgtcctgatgcctttaccgcttcaccattgatctgagttctgaagaaggtcgtttccctggccgactccttcgccgctgcttcggcgactgcactctcactgcaagaaggaggaaaccaatccaagatcaggcaaagacaggcctaactccaccgataagcttcttgtgctccattgcatagcagtgtcgttccacacggtgtctctcctctcatcgagaaatcgtctccaacgacgacaatggctacgccgagccacctcctgctcgtcgtcttcacggcgcttcttgcgttgctcccggggacgacgcagctccagccttcgcaggtgtggactctgatcaagatccagcagctcctgaacgcccccccgatgcttagccactggcgccggagcaccgacttcttgcgcggcggcggcggc

SEQ ID NO: 280523 - DNA, 1048 bp, Zea mays
  unsure (1)..(1048): unsure at all n locations
gacaaaatttcctccacccattctcttcctcctcttcttccccaccggctccaccgatccacctctttctatctgaatttcctctcgtcttgcccaccgctccatctgtctgttgcctctctctctctctccctctctcgcaaccaatcggttcttgtttcctccgtctgctgggttgattctctctctcttcctctccgtggagaggagaggatcgagaaacaggagacaggaaagaagagaaatcagaacggagcctgttctttttgcctggattgcggttcttgcgagttgttcagaaactctgggccagtttctggtcctttaaactactggaaagaggaaccatcagagatgccaaggcagccaacaaattgatatctaattgccctactttggatcatcataatgcaaggacagaggaattctatggagcattttgctgatgtctttggattcgacgttgcatcgagttcaggcaaccctgtgatggatcagcagtcatattggaataatgttcttggatcagtagaatcacataatcttcaaggttatcagatggctcacagtgatgccgccatgccatatggaaatgaaccacagcaagatggtacatttcttggtttctgggaatcaggcgaagcaagttcaagtgccagtgcactaaactatggcagctctaataatgtcaaaacagagcatcttaacatggtgtngaaagtggactgaggattggtgaaagccgactggtagctgacaatggcatttctctggatgtggatatcaaccttaacgccaacgtttacgatctttgtggtcaaagttcaaatgttaactgtgcctctcacggtcctgagcagtattgtggcagtgatcgtaatgctataaattctcagccgactgacccgggattacacccattcaggacattcctactagatgcacagcaagcagaatcttttactttgaatcctagtgaaaaccctttgggtgatttttcatcaatgcaagaaagcattgaacgaagaccaggtggttccctggatgg

SEQ ID NO: 280524 - DNA, 574 bp, Zea mays
gctgctggtgacgggctaatggaactcgagggtttcacgtccgtttacaagaacacgtacaccaaatcgtctctcctgacccatgaagctttcgagaacatgcatggcaacacaaaggctgctctcgactactatgtttcggtcaacagcgacgcctatgtcgccacattctttggaaatatggacaagatggtaactgcgatgagaacaatgcaaggtctccagaggacactggtcttgagcaggagggccttcgcaatctacactgccgctgggctagcagggcagcaactggctaaggctatgtgggacgctcatcgagaggagtatgtcagtggcagggggtcggctctgcccgagtactgcttttgtgagtccaaattggagcgctagtggctcagcgatatgagggttacctagacggacacctgttggtctggcgcagctcttatatctcactgtgattgtctagacatgaatgagctgttactgctaatgacatttcagtcagatgagcttatactttactgggtgcagctgaaagacattgatgcgctatgacctggctctctgc

SEQ ID NO: 280525 - DNA, 474 bp, Zea mays
  unsure (1)..(474): unsure at all n locations
actcacgcccgctctnggacaagaagccaggagagatatccgaagttggtgcagaatcatacggcggaaaggatgcaggtgatgcaagagtcaatggtggtgaggcaacgagtgctgatagaggtgtaaacacaaatgacagtccgaccagcgaatcagagtacgccttcgaggaagagaggcccgggcttcttggcagcttgtggccctctgcgaggatgatcttctcgtctcttggcatgaacaggtgcgcgatactctgaggtgtccagtgtgtactgcggagacatccaaaatcatggcagtgaagaggaactgccccgaggtttctggtatttattagagtaagtttggatgtatggaaaatgaacagtgggcaagatgtaaatgagaaacaatatgcagggaattttaatagctatctaggattcattatcttccccggcataaaataatttcccaggtttcttctag

SEQ ID NO: 280526 - DNA, 774 bp, Zea mays
catatatatcatttttccccattttatattggtagggatttgtcttacaaccgctttactggaccaatcccattcaacattggttgcctgcaagtggctacactatccttgcaagggaacaagttcactggcccaattccttcagtaattggccttatgcaggctctcgctgtcctagatctgagttacaaccaattatctggtcctataccatctatactaggcaacttgacatacactgagaagctgtacatgcaaggcaacaggttaactggatcgataccaccagagctaggaaatatgtcaacacttcattacctagaactgaatgataatcaacttactgggtcaattccaccagagcttggaaggctaacaggcttgtttgacctgaaccttgcgaataaccaccttgaaggaccaattcctgacaacctaagttcatgtgtgaatctcaatagcttcaatgcttatggcaacaagttaaatggaaccattcctcgttcgctgcggaaacttgaaagcatgacctatttaaatctttcatcaaatttcataagtggctctattcctattgagctatcaacgatcaacaatttggacacgtgggacttatcctgtcacatgatgacgggtccaattacatcatccattggcaacctagagcatctattgaggcttaacttgagccagaatgatctagtcggatccatccctgcggagtttgctaaattgagaagagtcatggagattgatttatcctataatcatcct

SEQ ID NO: 280527 - DNA, 572 bp, Zea mays
tgctggtcgcctgctgtacgcaccccgacttcctggctcgacccacccagcgcgcttccgcaatctcttcagcaacggcacatcgactgagttccatatgtcatctcttttcatcttcttcactgctatttactgccttggactagtgacttacggtgttgctgtcccatctggtctctttatccctgttattcttgctggagccacgtatgggcgcatagtgggaactcttcttggatccatatctgatcttgatcctggcctttttgccctacttggcgcagcatcttttcttggtgggacaatgagaatgactgtgtcagtctgtgtgatccttctagagctcaccaacgatctccccatgctccctttagtcatgcttgttcttctcatatccaagaccatagcagatagctttaacaagggagtttatgatcagatagtggtgatgaaaggcttgccatacatggaggctcatgctgaaccatacatgaggcacttggttgctggtgatgtggtgtctggcccactaatcaccttttctggggttgagaaggtggggaacattgttc

SEQ ID NO: 280528 - DNA, 959 bp, Zea mays
cttacttgtaactggctacgctactttaagaatgacagagacaggagagatttgatcacatgtggatctgcagctggtgtggcggctgccttccgtgcacctgttggcggtgttctgtttgctcttgaagaagcagcatcatggtggcgaagtgctcttttgtggagaacattctttacaactgctgttgttgcggtggtattgagggggctgattgagttctgtcgtagtggaaaatgtggtctctttgggcaaggtggattgatcatgtttgatctcagttcaactgttgcagtctacagtactccagatctaattgcaattatagtccttgggataattggtggaatctttggaggcctcttcaactatctgttggacaagatcctccgagtttatagtattatcaacgagagaggtgctccattcaagatccttctcactataacaatatcaataatcacatcaatgtgttcctatggtctgccttggcttgctgcatgcactccctgcccagttgatgctgtggagcagtgtcccactgttggccgctctggaaattataagaacttccaatgcccaccagggcattacaatggtcttgcatcactcttcttcaacacaaatgatgatgccatccgcaatctcttcagcaacggcacatcgactgagttccatatgtcatctcttttcatcttcttcactgctatttactgccttggactagtgacttacggcgttgctgtcccatctggtctctttatccctgatattcttgctggagccacgtatgggcgcatagtgggaactcttgttggatccatatctgatcttgatcctggcctttttgccctacttggcgcagcatcttttcttggtgggacaatgagaatgactgtgtcaggctgtgtgatccttctagagctcaccaacgatctccccatgctccctttagtcat

SEQ ID NO: 280529 - DNA, 726 bp, Zea mays
gtcactttcacagctgagattggtttcaatggggctcagttccgctgtgagccgccggacattttggaattcacttctgatcgcaaaagaatgtctgtagtggtaaaggaaggggagactggcaagacccttcttttatcaaaaggtgctgatgaagctctcctgcctcgtgcctgtccaggacaacaaatacagagatatctggaagcattacaaatgtattctcagttgggattgcgaaccttatgtttggggtggcgcgacctaaaagaacatgaatctaaagaatggtccaaaaactttcaaaaggctagctgctcattggacattagagagttaaaaattgctgaagttttgtaataacttagagcaagaccttcaaattcttggtgttactgctatagaggatcgtcttcaggatggtgttcctgaaaccattaaattgttgaggaatgctggaattaatgtgtggatgctaaccggtgataagcaaaatacagcaattcagattggacttctctgtaacctcataacttctggtcccaataggcaattggtatctatcaagggtaaaactgaacaggacgtgctatgaatcctacagagggcattactcattatgaaaaatacatctgaaacaaagggtcttgcatttgttttggatggttgggcacttgaattaattttgaagcattccaaggagtcttttactaggttggcgatgct

SEQ ID NO: 280530 - DNA, 544 bp, Zea mays
catcgtcgtcccacccagcagtgcagagactctctctccctccctctccccggccacctctcgctcacgagcaccccatcttcccggccagggcctgggtatgggtgctccgctcgcctcctggccatgggcaagcctcggatcatacaagtacctgctgtacgggcctctggtggcgaaggtggcgcacgcgtggagggagacggggagcctgccgctggggtcgtggtgcctccacctcctgctcctcctggcgctccgctcgctcaccttccagctctggttctcctacggcaacatgctcttcttcacccgccgccgccgcgtcgtcaaggacggcgtcgacttccgccagatcgacgccgagtgggactgggataacatggtgatcctgcaaaccctggtcgcggcggtggcgatgggcagcgcggcgttcccggccgtgtcggagctgcgggcgtgggacccgcgcgggtgggccctggccttgctcctgcacgtggccgtctcggagcccgtcttctactggacccacagggcgctg

SEQ ID NO: 280531 - DNA, 505 bp, Zea mays
ccctcgcttccggcgccggggccatcggtagcagagaggttttgctgcagagagctcaagaaagatgtacgtggtgaaggatattggcggcgccatcgggctgatggcggtggcgctggtgctcctgggcacctggccggttgtcctggcggtgctggagcgccggggccggctgccgcagcacacgttccttgacttctccgccaccaactttatggccgccgtgctgatcgccctcaccttcggccagatcggccccgccaacagcacgcccaacttcctgacgcagctcactcagttcaagaacaactgggcttcggtcttgtttgccatggcgggcggcgtcaccctgagcctgggcacattggccacgcagtacggctgggcgttcgtcgggctctccgtcactgaagtcatggcctctagcctcaaggtcgtcatagggacaacggtcaactatttcctggacggccggatgaacaaggcggagatcctctctcctggc

SEQ ID NO: 280532 - DNA, 679 bp, Zea mays
gaaccatgtgaaggctctgtacgtgctcggggctcggaagttcgccgtgatcgacgtcccgccggtcgggtgctgcccctacccgaggagcctgcacccgctgggcgcctgcatcgacgtgctcaacgagctggcgcgcgggttcaacgagcctgtcagggcggccatcaagggcttcggcgtgagcttccaggggctcaggtactccgtcgggagctcccacgccgtcgtgcagagcatcatgaagcaccctcaaaggctggggttcaaggacgtgacgaacgcgtgctgcgggtcgggccggttcaacggcaagtccgggtgcacgcccaacgcgacgctgtgcgacaaccgacaccagtacctgttctgggacctgctgcaccccacgcacgccgcctccaagatcgccgccgccgccatctacaacggctcgctccacttcgccgcgccgatgaacttcaggcagctggccgaagacgaccggtgctagctagctagcacagctagagctagcacgaggtcgtagggacgtgtctctgttctctgctgcggactgtggtgaatatggtcgttggtgtgtagaggacgatggatgtgcatggctgctgtgttcgctgtatgtttctcgaccgtggtttggtttagatcctgatgaccgacgccgccggcgtagttt

SEQ ID NO: 280533 - DNA, 748 bp, Zea mays
  unsure (1)..(748): unsure at all n locations
ttgttcatcgcgtccgcccacgcgtccggattatggaggtgctgtcgctgtccagttggcctctaccgttggcccatgcatgcttgccgatacacatgtttaattgtgctgctcgctatatcattcctgctgccaccgcacgtcgccaggaatcgactgcatcaagataagtcatcgatgcgggagaacaagggagctgcaattggatctcattcaacaccgacacagtcgatgcgggagaacaagagagctgcaattggatctgattcaacgccgacacaagacacatnctcccatttcagaacggagttctcctctaccttgcaacgtacctcgcaattgctttccatcctctaggtctaggtctctgcgcgtggacatctgccattgggggagcccgcctgcgagacggagcagccagcccttctcgactgggtttcaaagctctgaccatcgactccgtagccgcctcctacacatgtgctgcctctctcgccaccgctctccattccttcctccgcacccaagcgaaaaataccgcgggaaagtaccggcgaagcacgcgcaaggatggatgaggaaaagaccttgctcacggatatttgcgtaaggatatttgttggatcttttatgggcttggcccatttattgaataaactctatggtgtgtaatggtggagaataccaatagtaccacattgtaagtccaagggtcttttgctttaacttatatggtgggatttattcc

SEQ ID NO: 280534 - DNA, 539 bp, Zea mays
cttcatcgcagcatcggcgctccatcttctgctccctcccccacttcgtgctcgggttccatcttccgctccttcccccactcgcggtcggcacgcaagctcggccggcgtcagcggctccccatcccgccagtacaggaagagggccgccgcttggagctcgcgggaggtagcgtcgccaccgccgcatggaggtcccgaatggctgaatcctgaccgctgcctggagagtctcgcgcctaaatcacatcatattgagcttctcgcctttggatccgtcttattatttgctcacactgaagaattagtttgcactttggacggaaatgagtggtgctccaaagaggttgctcgaggaaggtagtcactccacaccaacaaaacgccctttggatgacagcagcttgtattcgagtcctgggaaatttattcactccggtggcagtgatttccatggttcttctgaacatgatggtagatttgcgaaatttcaacgtgtggagtctcgtgatgataagaggccatctgtacatcggatg

SEQ ID NO: 280535 - DNA, 604 bp, Zea mays
  unsure (1)..(604): unsure at all n locations
cgccgnggcctacggctccggcttcacagttcggctgctcatcgccgacaccctgcgcgcgccgggccgtgccgtccccggcttcgtcctcggatgcagcctcgtgtacgtgcaccagccgccgtcgggcctcgcgggctttggccgcggcgcgccgtacgtgcccgcgcagctcgggctcccgaaggtctcctactgcctcctgtaccgccgcttcgacgacaacgccgncgtgagcggctcgctagtcctcggtggcaccggaggcggcaagggcatgcagtacgtgcccttggtgaagagcgcggcgggcgacaagctgccgtacggcgtgtactactacctggcgctgaagggcgtgacggtgggcgggaaggcggtgcggctcccggcgcgggcgttcgcggccaacgcggcggggtccggcggcaccatcgtggactccggcgccgcgttcacgtacctggacccgaccgtgttccagcccgtggcggacgcggtggtggctgcggtgggcgggcggaacaagcggtccaaggacacggaggacgagctggggctgcacccctgcttcgcgctgccgcaaggcgccaggtccatggcg

SEQ ID NO: 280536 - DNA, 409 bp, Zea mays
agttaatttcatttccttccgcgtctgtccccaagagcgggaggcctgtcgccggaacgagccatcaaagccaagcaagcatattgacggaggaggcggaacggcggaagcgtgaatccggaggctctgcagctgttctccagaagcagccgactgggtgtccgtccgcggaccggtcggtgtataaatggttggcgaggagagcggctgcggcgtcgagggagggacaggaggaggagaagtgccggcggcctctgctcccaacggggaccgctcagggaatagccgcctcgccgtgccggcatccttcgcagatgatagaggctttcatagatcaagcaccatgccaggggtgattaagaatgatgaaattaccaatgaatctactggaccatcaaatttggaaagg

SEQ ID NO: 280537 - DNA, 1178 bp, Zea mays
ggtttataactaacgggttaaccccaatcaagttgtaactattctttactacaggttgctgatgttaatttggatggagctaatgcttctgtatgatctctagccttttgttcattaagcatgactttagctgttgggacaacaagtggtctggttagatcttgtcagtcttacgaattggtcgaagggtggtcatttgtatcattttagaatatgtttttataccattttttgtagttgtgcatctataaactccgagaacacattgggggttcaagcttccattttgtgagtgaatttaagcaagaaggtaaatatttcatacggaacctgattatatatgcctaaagcttcacctgctgcctattccccaacaatgttgtcatctttgttaagacagttttatgccaatttcacttcttctcaccagcacgtacaagatgtctgtcgtgactggtcatctaacaagcagaatccataacatgcttctttggtagagagagacagtaaattggtactgtcacttacgtgaatgtttattattgaaatgaaaatacatttgattatgatcggacacttataaaaacttgacttgcggggctaagacaacctccgagcattgtgtgatagagaagacctctcatacatgccaaaacaaccttgcccacgtgagcgaccgcgacctggtccgggtcatagtcacaaagtttgtggatcgatagggttgaggaacatcgtacgctacgtgtgagagatttttacatggtgggaacaaaaatgaccttgcgtacccgggtcgagggtcgctaccactgtacccatttcttgtgactatggttttggtcttcgacccgtgctttggtgtggtggcaggcgaggggattttttaaccccagtctgaaataatgtgtttgtttttatgtaatctttgtgctctaatatactgctccgattgatatgttggcctgctaaagctattattttcagtttgcttgcatggaactcattatttttactagctctgttttatttaaacttatagtagcacatgtgtccattattgatattgattaatctagctcctatcattatgttcactatattgaattagttttgacaaaaacccctgtaagcttgaatcacaattgtattgagatatttttcttcaatataaatgc

SEQ ID NO: 280538 - DNA, 459 bp, Zea mays
tcttggaaccgcccccaccccgccccgagcgccaattgcaccgccgctcccggccaaaccggccaagtcaacggcgcatccacttctccttaccatcccggaggtaatcttgcgccgattcggtgccgatttgcgccatccgcgaccggaggctccgccgggtcttgtgttcttgcggggcgggggctcaggacaacctggcctctgcttgattggattcggggcgttcggcgcctccagctcgcgatctttcctgccggtttcgtcgaccgctggtcaacctggccggtcggtcccgggggctcttcacctccgtgctgcctgccaccgtcgctttagtcaagtctcggccaagattttagctatcttcggtcaaaaggctttaccgattcttggattggtggcttcttgggggcgagaagccggttcctgtttcgtctcttgtgctccagcatgttc

SEQ ID NO: 280539 - DNA, 330 bp, Zea mays
ttcctctcaccaatcacgaccagatgcccagttgcccaccacggcgtccagtcatgtccagcaccaccgccgctgctttccgcctgggccagcgcgtgcacgccgccggcgtcccccgccgcctaggcacggcgcgctacctgggccccgtagagggccacggcggagtctgggtcggcgtcgactgggatgatggcgctggcggccggcacgatggctcgctcgccggccgccgatactttgttgccgtgcgagagtgctcggccaccttcgcgcgccccacggcgctcagcggagggatctcgctcccggacgcgcttcgactacgtt

SEQ ID NO: 280540 - DNA, 420 bp, Zea mays
tcgcgacacaaggcaaggacaaacaaggatggctctccggcgcaacgccggatccctcgcgctccgcgccgccgcctacctccgccgccaccgtccccatcctcctcccccactggccctcgccgcccccgctcccactcccatacgctccccgctggccccgcctttccggcacttcgctgctccgcctggtactcagaccaatcggaagcgaggcaaggaggaggacgatgccagcgcgggcccgcgcatgaacaacgccatcgccgctcccttcgtcaggctcgtcatggatgaaggccacaacattctcccccggcatgaagccttgcagcttgcgatcaggatggacatggacttggttgaggtcgataggaaatcagacccacctgtatgcaaaatcatggattttcacagaga

SEQ ID NO: 280541 - DNA, 364 bp, Zea mays
tcgtccacgcgtccgaaaactgattttgaggagttattttctagggagctcttggagatgctcttattcctattggtacggagtaatatgtatattgtgcaattaaaatggcctttatatggtattgaacatttcccacaataatctgtaatctttccatgaattgttttcctatatgtggtattattaattggcagtgctcctagacactgcacatccatttcctgtgaaattactaaaagattgccgggaagtggcaatgggactgttactgatgaaattttatgagaattattggtttccaagtaacttctttctggacttttttgccagccaacattggtttccatagaaaaaggttttt

SEQ ID NO: 280542 - DNA, 476 bp, Zea mays
tttctcacgcgtccggcgctctggtgcactaatgagcggatagcgagagaacctctaacatagtatgcaagattttctttcctgatagaatcttccagagtacaaagctaacacaatacctttctaggataaatttgggagtatcaactctaatattttactcttaccttgtctcgaggtgtgctcgccactcagaccatttcaataatttgcattaggttttcttgagatattaataatgtgtaaaggtatagatgctaccttcagacatttattcgaataaaattttcacttaactggatagtggctctgattgtcattaagtattttgacttttggcatgatcactgcactcttcagcactgtgtccttgcttggagccatcacctctctgtctccggtttccttggcatgatgactgttggtattgctgtaatcattgtctgcttgatcacccacttcttttagctctgttc

SEQ ID NO: 280543 - DNA, 550 bp, Zea mays
aggcggctgcgacgacgccgacgacggcgccctctccagcacctataacatcctgcaatgccagaaggtcagcgacttcctcatcgccgcggcctacttctccatcccgctcgagctgctctacttcgccacctgctccgacctcttccccctcaaatggatcgtgctgcagttcggcgccttcatcgtgctctgcggcctcacgcacctcatcactgtgttcacctacgagccgcactccttccacctcgtactcgcccttaccgtcgccaagttcctgacggcactggtctccttcgcgacggccatcaccctgctgacgctgataccacagctcctgagggtgaaggtcagggaaaacttcctgatgaacaaggcgcgtgagctggaccgggaggtggggaggatgaaaaggaaagaagaggcgagctggcatgtgcgcatgctcacacaggagatccgcaagtcgctcgacagacataccatcttgtacaccaccatggttgagctctcgaaagcactggaactgcagaattgtgctgtctggatg

SEQ ID NO: 280544 - DNA, 576 bp, Zea mays
  unsure (1)..(576): unsure at all n locations
gcttggcctgaggcctccgccggtagcagcaacagtcaatcacagtccccgcttcccggcggccaccgctgcatcctcccctttccacgctccactctcctagcgcgcccgccttcatgggccccgttcgactcgccctcctcctttccgtcgccgccgtcctcgccgccgcgggcgcggtgtacatcccctacaacacgtcggcgggggtggtgccggggaagctcaacgtgcacgtcgtgccgcacacccacgacgacgtcggatggctcaagaccgtagaccagtactacgtcggatccaacaactccatccagggggcatgcgtgcagaacgtgctggattcgctcatcccggcgcttctcaaggacgagaaccgaaagttcatctatgttgagcaggcattcttccaaagatggtggaggaaccagaatgacatgatcaaggatacagtgaaggggctcatcagctctggacggctggaattaataaatggtggcatgtgcatgcacgatgaggcggctgtacactatattgacatgatcgatcagactacactnggacacaagtacatca

SEQ ID NO: 280545 - DNA, 411 bp, Zea mays
tttattcgagagtttggttggacaagtgtttggattacttccatattttcaaggtttctgaagctatgtgggtacaagtggcgtctctgcacttggaagggattgctgctcgctggtttcacgtgcatagactgaaacagaggacggggtggaatcattttactcgggatgtgttgaacaagtttggcgcagacgagtatccaaaggcgatgaggagattgatgggtctcaggcagacggggtcactggacgagtttgtgcgggcgttcgaggaagcacggtacatggtatcgctgcataacccaaagttgggtgaggtgctctttgtcactcagtttatttggggtctggagtatgatttgcaaggggcggtgcaatctcagatgcccaccactttggatcgagcagtac

SEQ ID NO: 280546 - DNA, 563 bp, Zea mays
cccacgcgtccgccacgcgtccgattacaacatggaagatgccttattgaacgacgaaactcgacagcctctatctaggaaagttccacttccttcctccaggataaatccatacaggatggtcattgtgctgcgattgattgttctaagcatcttcttgcactaccgtatcacaaatcctgtgcgcaatgcatacccattgtggcttctatctgttatatgtgagatctggtttgctctttcgtggatattggatcagttccctaagtggtttccaatcaaccgggagacgtaccttgataggctggcattaaggtatgaccgggaaggtgagccatctcagttggctgctgttgacattttcgtcagtacagtcgacccaatgaaggagcctcctcttgtcactgccaataccgtgctatccattcttgctgtggattaccctgtggataaggtctcttgctatgtatctgatgatggagctgcgatgctgacatttgatgcactagctgagacttcagagtttgctagaaaatgggtaccatttgttaagaagtacaaca

SEQ ID NO: 280547 - DNA, 425 bp, Zea mays
  unsure (1)..(425): unsure at all n locations
aaatgatactctttggttagccagccgaaattctctagcctggcagcagccatgggagaagcacaagactactacgacacctccacggctctggccgccgccgccgccgccgccgccggcctcgcgctgctcgcggtctgctcgtactacctgctcgtcgggcggcgccgcggcggcggcggcggcaaggcgccgaagcggtacgcgccggtggtggggacggtgttccaccagctgtaccacgtccggcggctgcacgactaccacacggacctgttccgggagcgcaagaccttccagctgctggtgccggccggccggcggcagatatacacgtgcgaccccgccgtggtcgagcacatnctcaggaccaacttcgccaactacgggcagggaagcttcaactacgagaacatgactgacct

SEQ ID NO: 280548 - DNA, 474 bp, Zea mays
  unsure (1)..(474): unsure at all n locations
attgttggaccccgcctgctcgctcctcttcttccctccaaccgcccccccctcccctcctcctcccgccgccgcagcgagagccgagagcggagcgagcaaatcttggcgtttcgcgcccgctctcgcagtctccgggcgggggccgcctggcggagtggttacttccccgctggcttcttgctgcgccccgccattaaagccggcgcatttgggtttctctctccacctctctctatccgccccccaccgcgctctcgccctccctctccctctctagcggtagattgcggctgttcccccctaatcggtcggcggctgggggccgggttccgacggctgcccgggagctcgaccgggcctccgatccgggctcccaagccgccgcctcccggggcgcccctccggaattcttgctttctcgggctccgaatctcgccgcctgtcgtcgccagcggctggcgcggnggcttg

SEQ ID NO: 280549 - DNA, 828 bp, Zea mays
actttgtaagcgcagtgctgaaaatcgtgcttgtattggagatgctggtgctattcctattcttgttagtctgctatcaaccactgatgttagcacccaggaacatgtggttactgctctcttgaatctttccatctacgaagagaacaaggcaagaataatatcttctggagctgttcctggaattgtgcatgtgttaaagaggggcagcatggaggctcgggagaattcagctgccacacttttcagcctatctattgtagatgagaacaaggtgactattgggtgttcaggggcaattcctgcacttgtgcagctattgagtaatggaagccaacggggtaaaaaggatgcggcaacagcactatttaacttgtgtatttaccagggcaacaaggggaaagctgtaagagctggattggtacctatactactagaactgctcatggagactgaaagtgggatggtagatgaggcccttgcaatattggcaatcctctcaggccatcctgaggggaagacagctatcggcgctgcttctgcaatacctgtacttgttggagttatcagaaatggatctccaaggaacaaggaaaatgctgctgctgttatggtgcatctatgcagtggtgagcagcagcaacagcatcttgctgaagcacaggagcagggcatcgtgtctttgctggaggagctagcagaaagtggcacggacagaggaaagaggaaagctgtgcagctgctcgaacgaatgaatcggttcctaaagcagcagagtcaagccgaaagccgaagcagaggccatggcacaggctcatgcacaagcac

SEQ ID NO: 280550 - DNA, 768 bp, Zea mays
  unsure (1)..(768): unsure at all n locations
gtaaggaagccagaattgggacgcaacctgagctggaaagttgggccttttccttcgaaagggacggggccgcggcgaaccggggcggcaagatcgcccttggacagttcttggtaggcggagagagatattatatcatattctgatatcactcacctacccggtctgccgttcgcctataagaagaccggaggcgaggagggagctccctccctctgcaagtacaagttgtcctgtatttggtttagtttgcgctgctgtatttgttcagggttttggtcgcgtgttgaggaaagattcggggttcttgaaagttgagtgaaacaaatggggtcatcaaggaatgtgccgcacaaagtgatgcaagatgagatcacacctcttctcccgatcaaagctgaggaggacgcagttcatgagttcgacggagcttctttctctggcgcggtcttcaatctgtcaacaaccattgtaggagctggaatcatggctctgcctgcgagtatcaagatgctaggccttatacctggtattctaatgatcatccttgtggcgctgctcaccgagacatccattgacatgctggtcaggtgcagccaccagggcaagattacatcctacggctggttgatgggtgacacatttggtcagtgggggagaattgcgctacaagcatcggtggtgataaacaatgtcggcgtgttgattgtatacatgattattattggtgatgtcctatcangaacatcgtcaacaggtgttcatcac

SEQ ID NO: 280551 - DNA, 405 bp, Zea mays
agcggcggcggcacacgccatacagcagggaaagcattcgccgcagacccgtggtagaagaagagggtgagaccagtccatctatttctagctatccatcttctatatatatacgcattatattatatggccaattagatagagattagagagggagctgggaatgaaattttgtacagggaagagagagagagagggtagttgatgggaagggtttgatgtgactgccctttcttttcgctttgcttcctggatccaactgccgccgccgcatgtgtattagttgattcagtgatcttcgatcggatgcatttatctgtctaggtacgagcgccgattattgagtctggggatataattctcggatgggcggaggggagattcattattcgtgtgactgagcta

SEQ ID NO: 280552 - DNA, 580 bp, Zea mays
  unsure (1)..(580): unsure at all n locations
cggctcgtgcgggtagagtggaatgtctctccccaagacgtgtgtctgttatccagtgttgtgtttgctggcatgctaatcggagctccggcttggggctttatttccgacagatacggaagaaagtaaggatctgctccagcaaactctttatgtttcaatttacaggccttggcttcttaaggcaggcaggaataagttcaagtcctttaggattcacaggaaactgatttcatttctcactagtctgaagatattggatctaatcacacctacgtccaaataaccaatacagttttgacagtggtcgtggtactggtattagttttactatgtgacctgtggttggaatcagttcactgagtcaataaaccaatgagtcatttcagttagcgacctcatgtagtgaatcagcacggtaaaaggcaagcaatttgttcttctctttcgtctagtttgcacctctctcttttatcttccctcttgctacctgtcaaataataaaaccagagtgggatgcctcatnaacggccagatttgcataaacaatttgataacccccagcactgctaaatagtga

SEQ ID NO: 280553 - DNA, 667 bp, Zea mays
gttttgtggtgcctgatccatgtggtgttgggctaatattgttgtatcaagtttgaagaccacatgttagtgtgcaactttggttaaaggtcatatccctaaagctacttggaacttggagaaaagatggtccaaagtggagctgtcagacttgtgatttctggactttgattcagaaattgatgtccagtttcagcatttttagcaaactttagatctctgttgtgataaacttttgatgttatggcatgcactctccacagagaagtcttagagggtagtgtggtgagtaacttctattcagtttcatctccttgagcttgtttagaaaggggagaaaatgctgctccaagtcgctatgtcagacattggtgtgctgaaccaaattcagctaggctgaattgttgagttcgctggtgctgccccaactttggtgctcgataacttgaggtcagttgagcttttgatagtaaccattaaaacaaagttgaagactttgtatcagtgagcaatcttggtacaggtctgttgtaggttgatgcactggtgttggagtaaattgtgttcaaactctctctgtcaggtgcgagttcagcttttggttcagttagctgaatctgaatttcagtattttcatcccactttgaagcaccataacttttgatcc

SEQ ID NO: 280554 - DNA, 566 bp, Zea mays
tgatttttttgacagaaaattgggactgagatccatggatgtgcgtctacgccagccagttcaaagggttgatctaactcatgtagatgatgagccctttgagttaacagaggaaatcgaggcgcaaataataggaaacatacttcctgatgatgatgacctactatcagatgttcttgatgttgggtacacagcccatgctaacatgggtgatgatgtcgatgatgatatattctacactggaggcgggatggaactggaaaccgatgaaaataaaaaaaatacagaacttaatggagctaatgatggtcttgggttgctaaatggcacaatgaatggtgaacatccatatggggaacacccttcaagaactctttttgtccgaaacattaatagcagcgttgaggattctgaattaaaactcctatttgaaaattatggagaaatcagcaacctttacactgcctgcaaacatcgtggttttgtgatgatatcttactatgacatagacagcatggatgcctgagggactcaaaacagcactcaactaaaactgcatacatact

SEQ ID NO: 280555 - DNA, 785 bp, Zea mays
ctttcactcagtcgaatgaggacttgtctcagaaacctccagctgtggcagtttcatctaccccccaaagtaatggtcctgtggtgcctttttctggtgattcaactaaaaaggaaatacgcccatccacaaagtctgaaaggggttccgtctcccatgattcatatgggccgtcaaaatgtagtgaccaaaacagacttaaagtccggataaaagttggctctgataatgttttggcaagaaataatgcagctatctacagtggcctgggccttgatatttcttcaccttcatcaaacgaggatagccctgatggccgtgggagcctgtcccctgaagttaacaatgtgccacatgaatctccacaaaccattcttcagatcatgacatgcttttcagttcctggaggcttcctgttatcccctctaccagccaatatcttgcagttgacaaaaaaggtcgtgtcttcatcaaagaagcgggaatcaaatgtggctgttgaaaatgtacaagaatcatatgaaggccatgtggctaaaaaggggaaatctgatggtgacaaaaagaggctgatagacgcaaaaaattcaaagaacagaaatgatattagtgcagttatgaaaaaggagattgatgtggaattagttgctggtcaaaagatagtttctgaagctctcaatatatcattgatgactgaccccagagctacggatgcagaaggtgagaatcgtctttgagaggagccagcaaaaaacaactctgctggaattagagatgctcgattg

SEQ ID NO: 280556 - DNA, 234 bp, Zea mays
ttgctgtgatgagcaggggcagacaatggagatggatagctaaaattttcagtactatgcggtcctaatgatgtagggttgtcagagtgcagccacaagtactgctactatttctgtaccaataatattcagttagttccatgtctagtggtcctactagctaagatgtattttctgtacgttgcataagggagcctttgcaaacaatggagatggataaccaaagttttcagt

SEQ ID NO: 280557 - DNA, 876 bp, Zea mays
cttgctcaacctccgcgtgctggcgccccgcgtgctgccgctcccggagctgctccgcctcgcctgcgccaccctctcggcgcgcctggcgcgcaagaagcggcagcgcggcgcgggccatggccacggccacctcaccatccgcatgaaggccggcgtcgaccacttctgcgtgcacacgggcggcgccgccgtcatcgacggcgtcggcaagggactcacgctcacggagcacgacctggagccctcccgcatgacgctgcaccgcttcggcaacacctccgccagcagcgtctggtacgtgctcgcctacatggaggccaagggccgcctgcgccagggcgaccgcgtcctcatgctcaccttcggcgccggattcaagtgcaacagctgcgtctggaccgtcgagaggcccgccaccgacgccggcgtctggaaggaccgcatccaccactacccgctcaaggacgtctccaacccattcatggacaagtacggattcgtcaaggacctcatagacttgtgatcgccccctagctgctcaactcaacgtctcaaccccaccaacgcacatactttttatttacaccattattattgtattcattgtcatgttagtactactctgttctagtattgagcaactactagttaattaaggtgagcccaacaatgctagctgaggattcatagtagcttatgattcttttggtgatggcgggaagatcgacttttacgtagcaacggatatggcttcgctctttgttctttcttcagttctgtcatttcgtgtgtgtcaatttagatgccccatgtcgtcagtcaatcagtcagtgtcgtcctgttcctatttactatatcaaatgattatggtgc

SEQ ID NO: 280558 - DNA, 994 bp, Zea mays
ggagggtgggtcttctctatccccttcgcttcctcgtgcagctccgaccacggtgagcgtagccacgccgctcccgcttgcccgcttccgatccccgcgccgcccccacaaaattccaggccggcacgcctcctcgtccacttgtgcaccgtggctaccgtttccctttcctggatctgaatttcgtcccgcgtagcgcagatgccgctcggacgggaggattaatctcgtggcccatgagcttaccggggaggaaggccccagcgggggcctccggagtccggcggtggctcgtcaccgtcgtcgtgtcggtgctggcgctggtgctgaccctcgttgtgatatcgctgtcccagggctcgtccctgcctcggacgtcgctgcacggttacctccccatcggagctactgacctggggaagcgttcgtcgtcggagcatgctgatgaaaacaggagtggcgctgcaattggggaggaattgtcgcagggtgagcgggagtccttagtggagcagaatggtcagggtggcgacgtgaattcaagccaaacgtctgcagcttcaggaaagatggatgacaacgagccggatccagcttcttccagtgataccacaacgattccggaccaggatacatctaatgaatctcaaaaggctgagcaagataattgtgatctatatcgtggagagtgggttactgattcttctgggccactatacacaaacaactcctgccctatcatcacacagatgcagaattgccagggaaatgggcgaccggacaaggactatgaaaattggagatggaagccagaacagtgtaacctcccacgcttcgatgcaaggaagttcttggagttgatgagaggcaagacacttgcgttcgttggggattcagttgctcggaatcagatggagtccctcctttgcattctgtggcaagtagatgtcccacaaaaccgaggcaacaaaatgatgcacaagtggctcttcaa

SEQ ID NO: 280559 - DNA, 983 bp, Zea mays
attagattggataatgaaccactgcttctcacttcgagatgtatcagacatgaaggaagccatcatgaagcatttggaattaaacaacagtgatggacttgaaattgttgcggtaggcagtcacactggaatccatacaacagatgagcctaaaacgccggaaaatgttcagacgtcattattaactgactcaagctgtgtagatattaagcctgatgttagcaaacagaggacatgcaatgaagtagctatagaagaaaaggcttcacatttgcgggcagaacttaatgagctgaaagaatccagaaaaataatggtacacctcgatggtaaatcaacaatgactgaatgcattacacatgaatccatcttcatatctggacaaaatacgggcaagcaagagggggttagttgtcttgaaccgaagcatcagcttgaacgttgctccactaaacaaggctcaaaaagtgtcaccgagaatgaagataaacatttgcaggagcttgagatctcaacagcatcagagaagctgatcgagtgccgggagacaatcataaacctgggaaaacaactgaaagcgctcgcatcgccaaaggacgccatcctcttcgaccaggttcttcagaccgctgttcgttctgagcgaaaaccccgatcgcagtcactaagcgagatgttatccatggaggacggaggattctattactcaggctccccaaaaaccaaggagatcatctgtactgaaccaagtgcgtcaggcgaaggaaaccgtcctgccgacgacgagggagacggcggttccgccgcagcatgtagctcttcacacccaatgccggtggctccacacgtaaagcaggcgtgcagggtgaacaggacctgcaagggagaagccgacgtgaaggtagtgaggcttgccgttgtcccgagaaagcagaaggggaacggcaacctgctgaagaggatcctgacgggcaggaggaagg

SEQ ID NO: 280560 - DNA, 1186 bp, Zea mays
gagagatgaaaaatgcaacaaaaaggatgacaacaatattcttgaacttgagagcatagcgaggggatgtgaacaggacagaatccaagatgactgcggaaaactgctgcactcagatagtagaaatggcaacacggtggccaagaattattcatcagttaatgaacacacaaattcaagttctcttgtttcctctgtggccgaggtagatgatatacagtcttcagttggcaagaatggggattcatccttttttactggtttcctcaagaaaggtttaaaggacctttctttattcaaccagtctgtagacagtgctaaggtttatatcaacggtcatccaatctctgaacgagctctccggaaatcagagatgatagttggtcctgttggccctggttcatattggtacgactaccgtgctggattttggggtgtcttcggacaagagtgtagaggcatcataccaccattcataaaagaattcaactatccaatgcccaagaactgcgctggtggtagcactggggttttcgtaaatgggagagagctccaccagaaagattttgatttgcttgtagggagagggctccctcgaatacctggaaagtcatattctgttgagatatcaggaagcgtgatcgacgatacgactggcacgaagctacgtggtcttggaaagcttgcacccacaatcgagaaaatgaaacgtggctttggcatgcacgtccccgaagagacaaagtagctctatggatacttttgttgatgcttctgttgaaagttttacacacctagaaagctgccaattatggggagtccaggtttgttgatcttgttaggattggtgacagcggtagaaaggctttcacgtcttgaagctcgacagcgatgcagcctccggacattgagagaagaaatggagagatgtcataactcatacgcattcgcatcatcctacttggaattaaatgtcgtgtttccatggtgacagctccggccggcggcatacagttcctgtctccctctcgtttgtaaaattcgccacaccgtaggtgctaggtagcattcggagcatgtatccgtttcgggtttgtgatacagtggcgcaactcttcggctatataaatgtacctagtactttgtaacatgttgtccagtatgcaacgacgcatcagatttgtat

SEQ ID NO: 280561 - DNA, 850 bp, Zea mays
tttctcacgcgtccgcccacgcgtccggtttaaaggacctttctttattcaaccagtctgtagacagtgctaaggtttatatcaacggtcatccaatctctgaacgagctctccggaaatcagagaagaaagttggtcctgttggccctggttcatattggaaattaatccatatcatttgttcctggcacctgagtaaatagaacgataatgctatttgccgacataactgaaaacaactgaattttcggtaagaaattgcttattcgtgctttagcttcatagctatggccatatcactaggtacgttctatagcttgcctgattcgtgttcagatgatatgttctatagttcattcgtctgtattgacaagcaataaatttaaaaatttcttgacgatctgttcacatgtgacagggtcattaatttactcaagacatttttgggcaattgtttacacaacatctaagcatgctgttctactgatcacactaatttatgattttaaccattcttctttgatcttgaatggaagtctaccaacatttcctctcaccctgttttttccgttatcaaaattgatgctgaataatggcattttcacctgagttgaaggtacgactaccgtgctggattttggggtgtcttcggacaagagtgtagaggcatcataccaccattcataaaagaattcaactatccaatgcccaagaactgcgctggtggtagcactggggttttcgtaaatgggagagagctccaccagaaagattttgatttgcttgtagggagagggctccctcgaatacctggaaagtcatattctgttgagatatcaggaagcgtgat

SEQ ID NO: 280562 - DNA, 496 bp, Zea mays
acatcttggtggagacactatatctgtaacaaaaggcgttgtgtcgcgcattgaggtcactccatatgcacatggaacatcagatcttcttggcattcaaattgacgcagccataaatcctggaaacagtgggggaccagcctttaatgatcaaggggagtgcattggtgtggcatttcaggtgtacaggtcagatgaagctgaaaatattggatatgttattccaactacagttgtatcccatttcttaaatgactatcagaaaaatggaaagttcacaggatttccatgtttgggtgtcttacttcagaaattggaaaatccggcattgcgtgaaagcttaaaagtaccttcaagcgagggtgttcttgttcgtcgggtggaacctactgctccagcaagcagtgttttgcgaaagggagatgtaattgttagctttgatggtatcgcagtaggatgtgaagcaacagtaccatttcggtccacagaacggatt

SEQ ID NO: 280563 - DNA, 678 bp, Zea mays
aatatttcttccccgtagaaacggtgtttttcaaacaataagttctgaagaacctcgtgaagatgtaaagtgtggtccagttgacagggtgggattttcaaattcatcagaaccaaatgcaagtgtccgcagtgagaattatgtttctagaatgcgcaaaccacgagataactgctatattgaagtttcaagaaaagggagagcaaggtcaagtgtctgtaattgggaagggcgggaccagtcccctagtcacgaagaaccgatgacagccagttcttcgctggctcctacaggccgtccaaattcatctagaggaagcagtcaagcttctgaaactccaatcatagctaatgatgaagatgttatatctcttttcatggaacaacatgagttatttctaagctcgacaaagtctcggctgacaaaattgcagatcattcatcaaatgtgggaaagaaatgacatcaggggtgtgctctctgcgatggacaggatgggtgatcatgctgtctgtgctgatatggctagcgttctcatggagaaaagtgatgcaatcacacttgatgttgtgtacctctatcctgcctgccgccactgatcttcttgagagtaaaattgacagacacttaggcgtcgcattggaaatgttggtgaagctgtaaggacttttgtccatga

SEQ ID NO: 280564 - DNA, 516 bp, Zea mays
ctctcctcttctctcctctccccgtcatttggctccgaaccctcacaactgtgcatcggctctcctgtccccgccatttggttcggaactctcgcggcctcatctcctcctcgtcatcgtaacacccacgcttagagttcgtgagggtcgcccccaggggatctcgagacgtccgtttccaagagtggaccggctcgcaggcgctgctgttaccttgggtggagctcggacctgcggatcagctggattctcaagggagacggcggttcctgatttcctttctctaagcataccaaatcctttgtctcgagtcgggagcaactggttttgggcgtcgcggagcacatggcttaagaataatttcttccagcccggcgacaaattcgcagttggattcagcatatgcattttttatgctgacataggatgtgctcaaccatcccgggactccctctagttgcacaaaccacctcagtgctctctctttcttcgaatcgggctaataatgggcagtgc

SEQ ID NO: 280565 - DNA, 513 bp, Zea mays
cccacgcgtccggagctatttctgtcaaaatttgtcctatcctcgtcagattttccagctagggtaaaggttcacttctcaatgaagcttagctacaagaccccagaatatgatcatgataatgaaactttagattctgaagctactgagccattgactgaaaatgaagttgtgaaccaccctagaaaactatgggacgatgattgcccttgggcagagtggtactctgctgaggatcctgttaaaggtttcgagtggtctgccacctggggagagaggacatttgaagagacccttgagatggctgaagtggaaaatgccttgtcctttgatgctgatagctggtttcttcacccagttgtatctcgatacatggtagatgattttattggaaaatttgttgggtttgcatcccagctacatcttttagtaaatgcatatgaatcatcagtggaggcacattttttagaagacttttgttgtatatactttaggtccaggataattgcaaaa

SEQ ID NO: 280566 - DNA, 383 bp, Zea mays
cgtccggtcacgcgtccggccccggcgaggtcgcaccgcaccagccatcgtctccttccttccttcctatactaccatccaaccagctgcccagcgcaacgttacctgcccgacatccgacaagccagtccatccggcagcgagcaaaggtctgagatgggttccgtagacgcggcgatcgcggtgccggtgccggcggcggaggagaaggcggtggaggagaaggcggtggtgttccggtccaagctccccgacatcgagatcgacagcagcatggcgctgcacacctactgcttcgggaagatgggtgaggtggcggacgggcgtgcctgatcgacgggctgacgggcgctgttgtacacgtacgctgaggtggagaccct

SEQ ID NO: 280567 - DNA, 638 bp, Zea mays
cactgttgtacttgggcatctggccaaagaagatacaagtggcagtgaaattgagggaggtcaaagtagtaaaaggcatgggaggatacaaaagaaacgaacccggagcatctcacctcagggtagaagtggtagtccagtgggggcaaacaagagcagtccatcccaaagttcttcacctggaaagcagagcaggccaccatttgctaagcgtctccattctgctgatgatggtaatgattcagaaggtagagttgttcagcaagagggcctgtcattgacatcaaaattggatagttcttctaatgatttaattggtaaagtgggagatgctgctgcggttggtgttgcccttgggcagcattgtcacagtgacaatttaatttctgagcattcacaactaatggctgctggtgctactcataagatgcaaatgccatgccccccatctgagtctctatcagacttaaatgtgtcttcatcagcaggtggcccaattcttacgaaccaacctgctgcaggtgtcccatatgtgtctgccgaaactaccaagagctccatgacatctaaacatctccagtctcatcctcagagtttgagtccttctgaacacatgccatcctcaaatatgattcagc

SEQ ID NO: 280568 - DNA, 570 bp, Zea mays
aattcagatcgtgcttggtttcagtggcctttggcgcaatgtcgttaaattgctgagcccattgtctgctgtacctttggtttcgctagctggatttgggctatatgagctaggttttccaggggttgctaagtgtgtggaaattgggcttccggaaatcatcctaatgctcatattttctcagtacttacctcatgctgtccatgcggcaaagcctgtgttcgaccggttttctgtgattttcacaattgcgattgtatggctgtatgcgtacattctcacggttagcggtgcctacaagagtgcccgaacaaagacacaactccattgccgtgttgaccgctctgggcttgttggtggagctccttggattagtgtcccatatcctttccaatggggggccccaacatttgatgctggtgaatcatttgcaatgatggtggccgcatttgttgctcttgttgagtcatctggggccttcattgctgtgtcaagatatgcaagcgcgactatgatacctccttcagttcttggtcgtggcattggttggcagggcatcggtactttact

SEQ ID NO: 280569 - DNA, 514 bp, Zea mays
cattgcgtccgtttttttttcaggagtttagctggaaagatgacaagacctgatgttggttctgatgcttcacagattgactggaaatctggccagaggtttgctcatgtagccaataaccaaaccaaatcagctgcagataacgttggaagccctggtgtcccagggtcattcacttcagacatgaaaatactgagttttgcttcaaggagtgaggagagaaatgtcaatataccttctcagcttccatctggagagcgcccgtttcctggtatggttactgcacaaaatgataatcagaatcaagttcagcctatgggcacaagtgcaacatcaaattctgttgaaagaagtgagaggccgaggataaaccctcaaatggcaccttcgtggtttggacattacggaaactatagaaatggtcagagtgttgctgtgcttaatgctcagaagcccacggctttgccatataaattttcgaaagttcccttgtacaactgaaaataataactct

SEQ ID NO: 280570 - DNA, 613 bp, Zea mays
cggccgcccttcttttttttttttggggtccatacgctcggtggtaagaagaatggtaattctatacattagaatgaaaagacaactagctccatacaacaattgggtactacctagtatttcaaaatactagcattacaataaatgtgcgtttgatatatcaaaaactaggcacggatgcggttagcgatcaacgaactcgacttgatagaatagaacaaaaactagaccggataatagctagaacccctccaaaaatacatttctggttcttactttgaccacctactaactttcacaactatgcaatcaaatctcatctccactgaagcttttcttatagcctcaaagcaccaaacaccgataatgaatcccatattccatcttcaccaatcctgtgttatccagtgattactaacagacgaggagcagtcagcaatcagtgactaaacaaaccttatttctgtggttgaagttttccaattgagtgcaggtacactgagacggaaacaactgtgggatcaaaggaagaatgcgagggataaatggaagttgaacaagaagacagatacaactgctgtcagaagcattgcaactgaagttgaatagacca

SEQ ID NO: 280571 - DNA, 882 bp, Zea mays
aattcttggttcgacgagcttttttgtcggcggccgccctttttttttttggggctcaagcgcaatttgaacatcttgccatcaggttgcagtaacgagtttgccacactccacaataaaccggatacatatgttcacacttcaaaaattcaatcactcttttgccctcagccccaagagcaattttgacagcttgccttcaggttgcagcaattcagggattccacacgtgagcaaatgaaaaaaaaactaagctctcgacaagcaaatgaccttacgataggaaatttagggatttcacattacttatgaaggaattaatcctgtctgcatcttttcggataccatctcgaccacatatgccgctgctaacatcaacaccatctggtttcagagcagaaaaggcttcacaaacattatctgcatgaagccctccagctaatagccatccattcttgcttttgacagatggcatctggaacttctgccagttgaatccctttccacttccgccctttgcactgtccactaagtaccaatcaagttcgtattcaatatcaggaatgttgattagttttccatcgtcatcagcatttagtacataaatgatacgattattctttgaaagagtatgaaccaatgcacgagattcatcaccatgaagctggacaaagttaaggtcacatgaatcagacacccgtagaattctctcttcattatcatccacaaagacaccaactgattcagcgccataagattgcgcaactcttgatatttcttttgcctccaataacgagacagagcgtttagagttgggccatagtatcatgcctataagctcagctcctgcttttacagccatttctgcatctctagctgatg

SEQ ID NO: 280572 - DNA, 1015 bp, Zea mays
aacctataaactttggtatataaaatacaacaccacttttttaagaagtacatataaactctgttacgatacaaagctcttgattattccacgatattaatatttttaggctgctctagaagtctttcttatccttccccatcacacttcttatccaaactttactatataaataatatacgatgtaaaacaatattttttatggctatatacacgcttgctcatcacgtgcataacctacacaagtccaggagcacagaattttttgtgccatcactatcgctgtcccccatctttgctacagacagcatcaagtcttctgttttcagcttcagaaaatgtgcagctatactcctgtactgtggcaatcgtgatttcaagccagtaataattgttgcgagtggggtggcggtgaatatgcgtgaacatgataggagccacgtacctttacttgcaggagcacagcgtgcctgcctacgagcaacagttctgtccccctgaaactacaaattcaagcaaaaacctaccgtgaagtttctgcaacattcagtcttccttcgatgacatctctaacgaaactgttcaaagaacaccgagaagatccaccttcctgaactgcgcggcgtgaagcctctctcagctccgcagcccttcttctcatctctaggctatcatcgtcagtcaaatccataagcttcgttacagtatcgcagatcgcggcccttccgacaacaccatcctcccttctccgttccctcaagtcgacgccgatcttccactcatcagccacgagatggccaatcaccagctgatcccaagcaacgggaaaggcaagcatcggcactccagcgaacacggcctccagggtcgagttccacccacaatggctcaggaagccaccgacggaggggtggcacaggaccttcagttggtcacaccacggcaccaccaagcccttgccaccagcagagatctgctcaagggtggcggtgctagctctgtcccgggccaccca

SEQ ID NO: 280573 - DNA, 283 bp, Zea mays
attattattatatacattcgccagaagaaaggtttttttcccataagttttgggggaacattataataataagcgaggctatacattttttactttattccctaaggatatagggcaggtccgcatatgaaaggaccacctagatctacaggaaactggaagccaaatcaggattagctggtttatttttttacaaaaaactgaaaaattttcataacagggggcttttttatttaccaaaggaaacaagctcggttactaatacctactggtcaaaacaaaa

SEQ ID NO: 280574 - DNA, 401 bp, Zea mays
  unsure (1)..(401): unsure at all n locations
cggccgccctttttttttttttttgggtaaattaactaccttttcaaggttggattatctagctgctcaatatggtcgaaatttgtgagtaaaaatgatgaaatttggcggtccgagttctggctcagattcatttcgagtgtctcaccaccgcattttcgcaactatatatatgtgtctcaatacaatcgaggacagagaaacacatctagtctagcagataatcattttactgattctccaaagacagacattngctgtgccttatgttgaacagcatctactactatactgctgctcttgctggatcggccgccctttcatctgaactacattggagggctttctctccagggctgcctgactccatgctttacttttcttaattgcagcatacattg

SEQ ID NO: 280575 - DNA, 1055 bp, Zea mays
gatgtaaaatctatatagaatttctcgtttaaaaaatcaaatgaattcattacaacaatactcttggcgtagaatctatatagcgttactcgtcaaaaaaatgaaatgagttcagcacaacaaagcgtttctagatcctgaataacgcctttggggcgagtaacttacaccaatataaagctgccttacagcaatgagcaatcagaaactaccgataaaatcatttcggccctacagcatttagtattcctcggcaccctactacatagcctcattttttggtcgtcaaataaaaattggggaaatttgagcaaccaaaatttatcctcaaactgccttcttgtgtactatatatgcgtaatctttcctacctgtttctatggattctgctactcacaactcgtcgtgagattcaggatctaaatcactactgttggctgatgctgaatgatccccttctcgagccttaggttcctgagacgtttcggtgtactctccctcgttgggtgcagattccgaagatgtggttttccccttgctagcaggctcttcctctgctattttcttctcggccttgggttttggttttggaattctgttgacacttgagaccttatcttgtaagtccagaactttctcataaacttgttcagatgtgaaaactggtgagctatagacaggggtatttttctgcaggttttccttctcctccagccaagctttcactttctctgcttgactctcaacctcatctactctctttttggggagccattgtttatttgtctcccacttgttcacaatcttttgcagctcatcaagatacaatcgagcattttcacaggccgctggtcgggcttttaattcactcaatctgaaaagaatcgggtcaccaatggccttaagttggccaaggcgctctttgaattcattagcttgagcatcttcaccgtccatgtacaaccaatcctgcacctcgctaagtttctccgcaaaggattccctctcctgttcagttgagacagtcaaaatatctgtgctttcttccaacataa

SEQ ID NO: 280576 - DNA, 378 bp, Zea mays
gcagcaagggaatggatatcttgggtggatccataggaatactagtacatatcacgaagaaaccagcaactaattggctctcagtttgaggcagatttccagcatgatccagtccgcactccgcacaatcgatggagcctggagttattaatcctagcaatttggcgcgccatattccacgcatccacctgtatcagagaacgatcatcaatcagttgggcacgcggaccgcctggggcatgagcgcctcctgacgcgccggcacgacgacaacgacgcccgcgccagcgccttcttccgcggcggcgcgggcgatctcgccgtcgacgatgccgaggagaaccctggcgaggtcctcgaagccggcccacccgcgga

SEQ ID NO: 280577 - DNA, 480 bp, Zea mays
caccatgtaactgcatcaaaggatttaataccatttatgtactgccttatgttttctacatccaaactgcacttgaagcttgttttggtacctgttaattgttgggcacttgaacatgttcgctcgatttctacgtcgccattatactagctcatctttgtacaggacatacttggagcaaccttgaacatgggttgagacaaacacaaatgcagtccagtttctacgttcaaatgcagagattttgacgggctttcttttgatcctatccctgttctcgcggcagcgataatctttatgcaaacattcatgtattggcagttgctgaagctcatgtaccattctcccttcactggccgcttatcaatagagctaatctggctaaatattgggcggaacatttaaccccttatattcaccggtacacccctttttttcatgacccgataaatgctggcatgagatggtggttttggtagg

SEQ ID NO: 280578 - DNA, 730 bp, Zea mays
tcgtccacgcgtccgatcgcgaggtcttcgtgtgcgcctgggtccagctctcggatttccgcgcgttccacttccacccacacacacacccccaaggacgcaggccgcaatggcggagcccgaggtctcccccgcagcggccggcggcggcgggcggctccgcaacgccttcgggggcgtgctctgcgccttcacgcttctcctcatcggcgtcgtcgccttctcgatccgcctcttctctgtaatcaagtacgagagcgtgatccacgagttcgacccctacttcaacttccgcgtcactcagtttctgtccaagaatggaatttatgagttctggaactggtttgatgataggacatggtacccccttggccgtgtgatcggtggcactgtgtatcctgggttgacattgactgctggaactatgtggtggttgctgaactctcttaacatcccattgtcggtggagacagtttgtgtgttcacagctccaattttctcagcaaatgcatcatgggctacctacctgctaacaaaggaagcgaaaggtactggagctggattaatggcagcagccattttagcaatggtcccctcatataatttcaagatctgttgcaggcagctatgataattgaagctgttgcaatttttgcctcgatactaacaatcttatctatatgtaaagacgctgaacacgggatcacttttttatgccaccacctcaatg

SEQ ID NO: 280579 - DNA, 694 bp, Zea mays
gaaaatatctcaaggaatgctgcagaattgagcggcactgaagattccagtgcaaaaatcaatcatgctaccagtgcagatgttaaggatcgactggataaccaagaatccagaactggtgtacgcagggttgtttctgatggacaatttccagttgctactgacattccagacacattggatgcaaaatggagaggtcagaatgaacctgctcctgattcaaacttggcaaaaccaccactttcagtcgaagacacaacagttgatgttaaaagtcaagccaaggctgtgcatacttttactttcactgttcgttctggagatgcagcagaggaattacttagatggattaagatgccatacatgacatcaaacagttccttaaacacaacttctagttcaccactgagattcacttccttggcagagtacattcctaaatacgtcgagttgttttgtgatctatcacagaaaggtggagcaagacttttcttacctactggagctaatgacattgttatccctgtatttgatgatgagccaacaagtgttatttcgtacccacttgtttcacccatgtactgcttccagttgtctgatgacagcagcaaaaatagagacaaggagtcttcacttccattgcctgtatatgattcaggaaattttaatccatttcatttgtttgaggaatttg

SEQ ID NO: 280580 - DNA, 713 bp, Zea mays
ttcttgactacaaatcgctggagcagtatcagcagaaaaagattccattaaaaattgattctgatgtttcagtctcaggcacgaggcacacagtaagaatgacagtagagaacatctcaaagaagtccgtggcagacagcacacgttcagtatcagcaatggatctaggtgatgcaagtggttcccacagcactcgcaaagaaactactcggaagggaaacgggagcgatggactgtggaggaaaatacgcagtggcctcggggtcgcaaggccaagcgacaaccgaagaacactggaggtcaacgggaccgattcaggggttgccttcttcctccatttctcagtgcacacctccgaatcatccacggacggggaggaatacaatgacacaagaatcctcccggtccactactcggacaactacttttcgctgacgccgggggagaacatggccgtcgacatctcgttcgaggctccccaggggtccagtcccagagttgtcctcagaggctggaaccatcatctggaccacgccgtgatgatctgagatccgtgtaataaaataagcacgtaccgaataaagtgcagacatcagatcgtgttcgtgcctgctgttggattataattaggcttgtcctaattttattttattttattaaataaatcgtacgacctaaattgaattctaggtgaaatggcttcaaggtcctct

SEQ ID NO: 280581 - DNA, 485 bp, Zea mays
  unsure (1)..(485): unsure at all n locations
tctacgcgtccggacgccgtgaagtcggcgctggtgcgcgccgggtacgggggcgtggacgtcgtggtggccgagacggggtggtcgaccaggggcgacgccggggagcccggcgccacggtggagaacgccagggcctacgtgtccaacctggtggcgcacctgcggtccggcgccggcacgccgctgatgccggggagggcggtggacacgtacctgttcgcgctgtacgacgaggacctcatgccggggcccacgtcggagcgctcgttcgggctgtaccacacggacctctaccatggcctacgacgccgggctggccttcaactccaacgccgggggaggtacaggtactgcggcgccggcgcagcccaaggcgggcgggtggtgcgtggaactgcgacttccgggcgttcgncacgctcaccttcgagaacccaagctacggcgcatgcgtgtacaccgggggaggccaataatacacc

SEQ ID NO: 280582 - DNA, 447 bp, Zea mays
gtcggcgctggggcgcgttgtttacggggacgtggacttctttggcggcggagacggggtggccgaccaggggcgacgccggggagcccggcgccacggcggagaacgccagggcgtacgtgtccaacctggtggcgcacctgcggtccggcgccggcacgccgctgatgcctgggaaggcggtggagacgtacctgttcgcgctgtacgacgaggacctcaagcccgggcccacgtcggagcgctcgttcgggctgttccacacggacctcagcatggcctacgacgccgggctggcctcctccgcggcggcggcgggtcggggcggtggcgggggcggcgcggcgcagcccatgggcggcgggtggtgcgtggcgcgggcccgcgcctcggacgcggagctgcaggcggtcctggactacgcgtgctggcaggtgggcgttcact

SEQ ID NO: 280583 - DNA, 514 bp, Zea mays
  unsure (1)..(514): unsure at all n locations
ttctctccccacaccatgtgtgtgcccagattcccctaaataggtgtctcgcctctggcatcagtcccctcttccccttccttctcctcggtccctatccgctgctgcgaacagcagaagctgcggcacggaggtgcgctctccccggcggtggagttgcagctgcagggggaagaagcgagctagagctgcagggatgataagcgccaagtccaacgccgccgtgtacccgtgcccggagtatgcggaggtcgaccccaccggccggtacggacggttcagcgacgttcttggcaagggcgcgtccaagattgtgtacaaggcgttcgacgagtaccaggggtgggaagtggcgtggaaccaggtgaagctgcacgacttcctgcagagccccgaggacctggagcggctctacgcgagatccacctnctcaagacgctcaagcaccgcaacatcatgaagttctacacctcctgggtcgacgtctcccgccgaacatcaacttcatactgag

SEQ ID NO: 280584 - DNA, 276 bp, Zea mays
cacagccttggctagaatactttgagaatggagtccccatgtccagaacttttaaccataagttgtattaaattgacttctatcatgttttaaactgtattaaattgactgatatcatgtttttttattggcaaagcaatgaacgggagttgttaagtgtggggcagactaccatgactgggggtcagctggaaaagtacgtaaatgaaggtgacaatggtgataaaatactcagagcattcatcacatgcttcacttgtgatgagaagttcaatc

SEQ ID NO: 280585 - DNA, 462 bp, Zea mays
tttcataacaggtatgaagatgatgagattctcgggcatagattgtatcgtgaaattagacgagtagaacaggttaagaaggagcctggaaagaggtccaggggaaaaggaggatcttcagctatttcagttgtgtcctaccaatgggaaactgttgcgtccacctttgatgagtttgatgatgtggcagaaaaactcttttcaagtcggaacaggacacacgtttctcttggaaagaagttgaagattgaatatcttccagagatagaaaagctccataaaaagaaagagaggttgctcaaaaagcaacagagagaagctcttcttcttgatagctacttggcatcagatggacttaccaccggccgctctcttcgtgatagaaagcccgtgacttatacatttgatgactatgatcgctcaataaatgaagccatcaaaattacgaagaaaagagagaac

SEQ ID NO: 280586 - DNA, 432 bp, Zea mays
cctgtcctgccctgcctttccccccgcatgctctcgctcgctctctcgttctcgtggttctcccgagtcccgtgccgctcgagtgcgccctctgcgtctctagtggcgacgactgggcgaccgccgccgccgccctacgcaaggtgcccagctctccattttcgggcccttcgccggacacgagcacccgccaggataatatgttgtccacgcatgaggcaaatgctgatcagtttgatcttctctcttatggtaatctaaggggactagaggctagtagaagttctgaggaatctaattttggaaatgacttaaaggatggttcttcagtttcttctgagaacttcggctcctcttgtctgcctggcgagagctatcaatctgccacagtagatcatgaaaaacgacctctttctgatgtcaagacatgcc

SEQ ID NO: 280587 - DNA, 457 bp, Zea mays
aatggaaaacatggaccggattcctttccaaaaaaaaaaagcttgtctgggggtggaactgtgaaacctactcaagaggtgatctgtaatgttgctacaatttgataaagataaacagcttcacccatcgcagcatcttacatacagattattgagtctacatattttacaaatacagattactacaactttaaaaagcctaacttactacagtctacagtacctcgagccttgccgtaggatacgaggcacacgtgttcggactacaagtcgtactccggtcccatggccaccaacttcacagctttaagatggtcctaaagtgagaggtgacgcgcagaatgcgctatcagtgctgttcattgcagagccgctgtttgtgtctcccgtgagtgacgggaacaagggaattgacttgagtatcaacttcctgccaccttttcggttcggggagctg

SEQ ID NO: 280588 - DNA, 688 bp, Zea mays
tttaggcagtcaggccggctggccgaggcagccgtgcccacgtgcacgaagcagcgggccgtgacgtggtttggggcgagcaggtgaccggcgagtagaagtagaagtaggctagcaacctgcacgcctacccgtcccacgcacctcccgacttctccgggtctcccttcttcatagcagccacccacgcatctcaccgccgaggcgagcgaggacctcgtggttcgtgccctgctcacctcgtgaggatgtggatcgcgagccggctcttcctcgcggcggcggcgctgctgatggctgtgcttctgctcgtcgcggggccggtggcggcgcaggacgcggcggtggagggcgtggccccgcctgccgaggagatcgcggcgaacgcgagggccaaggaggcggcggttctcgccgccgagctagtgcagctcagggcgaagatctccgcgttagaagtctcgcattgcagagcagaacctggagttcaagaccaagaatgatgcaatcgaaacactgaatatgattgtcaaggaaaagtcacagaagattgctactatgcagaatgaagtaacttccctcgaggccaaagggtctttagctgcagaggagcaggcaagcaaggccaatgcactggctattgagctcaagaagcagaccgagaagctcaagaaggatattacagaac

SEQ ID NO: 280589 - DNA, 583 bp, Zea mays
tgtctcactggacatgtcgccacggttctcctactgcatgcctgccgccgtcagagagaagatgtgcaacagaagacactccctgaatgtaccagagcaattgccaggtcattactccagaaaagcaacagaacggacccaaaaggctagctcaaagtctgttgcagatttggttggggagatcgcagcgctcgagcaggaagtcatacgccagggacttgcacctgctcgctctctacagaagagcgtttgaccaatacgtatctgaatcctgcagctccacatgcgagcaggtggaccaagaatttctgaaaagcatcgacgagggcgcgctacgtctgagggacataaagcgctccgcggcgttcgacctgccgacgacgaccatctcaggctctgaggagcaggaggaggcaccaccagaggcaaaggcaggcgcgaggcattccagcctcgtcaacttcctgagcgcctccatctcggagtacgtgcccaagatctcgtgcaagctgtcggaggacatcctgggctgcatcgccgccgtctactgcaagctctcgggcgcagaaggggagtgctgcgt

SEQ ID NO: 280590 - DNA, 509 bp, Zea mays
cagaagacactccctgaatttaccagagcaattgccaggtcattactccagaaaagcaacagaacggacccaaaaggctagctcaaagtctgctgctgcccaaggtgctgcactgctacgcccgggacgccgcgctggagctgcggcacctggtggagctggtgtgcgagaccttgtcggacgcgcagcagaagcagctgcagctcggcctccggcggagggccgtcgacaagtgcgtcgagtggatgccgtacaagtcgtccttcagatacgttgtacatagggatctggctgacgactaggcgggagccagccacgtacggtttgctctgtgtgattgcttgcttggttggttggtttacaaagtgtacaagtagtgggggtgggggtgtacatgcatgcatgtaaatacaggtgtgcatgctcactacttttgagctagtgagctgtggctttggaacactgcacatgctatgttagaggcctctggtgcagggaatgtgggattt

SEQ ID NO: 280591 - DNA, 346 bp, Zea mays
tctatccgccccgcgtccagtgctcctctcttcctttctctctcgccgcacgcaggcagttcgagagggcgtgcgttgctcgaggggcggtaaatggcagcggcgggctcgtccgcggcgagggccaggagggcggggctcgcagccgccgccgccgcggcgctcctcgtcctcgtggtggtcgccgtcagcgcggcgctccctggcgggcgggtgagggtcctcgacggccttcggcaaaggagcacgtccgtggtggcgggaggcgcgaggcggcggctgcgggactcctccttgccggcggcgacgacgaggggcagggccgacggtgacgccggcgccggcg

SEQ ID NO: 280592 - DNA, 470 bp, Zea mays
atgccggtgatcgagttccaccaggacgaggtgtgggagctgccccccggcgccgaggcgctggcgcggtcggacaagacccgcgtcgagatgttccgcctcggcgcccgcaccatgggcgtccagggccacccggagtacagcaaggacgtcctcatgagcatcgccgaccgcctcctccgccacaaccacatcctggactgccaggtggacgtggccaaggcgagcttcgacgtgcggcagccggacaaggagctgtggaagaaggtgtgcaggggcttcctcaaggggaggctgcagtcgcagcagcaattccactaaccgctgcagaggaggaaattgggatgtcttaggttaatttttaattcacccttgttttgattgtgcttcagagctcaagagttgtacataaactactattgtccgaagcattaataaagagagaccgggcaaatggttcgtttggtttt

SEQ ID NO: 280593 - DNA, 444 bp, Zea mays
tttctgggaagggtgattctgaaacggaggaagatcttggttttggatgaggcaacttcatccgtggatccaattacagacagcttgattcaaaaaaccttaaagaaaccttaaagtcttgcttctggataacggtgaaattgcagagcatgacgccccagcaaaactgctagaggacagttcatccctattctccaaacttgtatctgagtataccatgggatctgataagtggcgaatgcaagaaagcagctaaatcaatactctacagataatacaggacaaacgccctaggaagtgtgagtatctacgtgttaccaattttatagcttaataaaaagcaaatttttaaaaaacaaaaaaaaaactatgaatatccatattccccaaggcccttggaagtgtgatatatttgtttcattgtatactagttaagggcctgtg

SEQ ID NO: 280594 - DNA, 475 bp, Zea mays
tccctcgcgtccgcacgaaaagagaggagccgggaagcaaagcgccgacgactacgccgcaagtcccaacccaacccaccctatccagaatccagggactggactgggaacgcaaggttctgggaaggcgtatgtaggcgttgccgtcttggtgcctcatcccggagctgctacttctcccctggtcgttggtcgattggagccggtagcgcgggggggatatgcacgggaatttcgggccccaggagcagattctgtggccggcgtcggttctcgccggcatcgtcatgtgcggcgccgtatatcagatgactcgacatgtcagttctcgatgtttcaaatgctacagtatgttaaataacaggcaaaaggttgagtggaacaataggggtttctctacactccatgcattggtagctgctgccgtttctttctacctggtcatgatctctgacctcttaatgaagatgcgcac

SEQ ID NO: 280595 - DNA, 705 bp, Zea mays
cccacgcgtccgcgtgtttcttctgcctttagttttggttcatcgcgtccgtccttcctcctccttcgccgcctcttgcgcctcccctcccctccccactcctctcctctctccccgaaccaaaccaaacccctcccactccaactcctcgattctcagagtgctgtacaagtgtctcgccctaccgcggccgtcaaaaatccgatctttccgccgtttccggaggccacacggctgcaagactgaccaatcccccgcggatcgagccgcagacgccagcagttcctgctcgcggaccgcaggcggggcccggacggagcatggggtcccgatccgccggcgcggcgctgcggctgtggctgctggcgctcctgctgggctgctgccaggggaggttcgtggtggagaagaacagcctcaaggtgacggcgcccgacggcctcaagggcacctacgagtgcgccattggcaacttcggggtgccccagtacggcggcaccatggtcggcttcgtcgcctaccccaaggccaacaggaaggcctgcaagagcttcgacgacttcgacatctcctacaaggccaagccgggggcgttccccaccttcctgctcgtcgacaggggagattgtcacttcgcaaagaaggcatggaatgcacagaaagcacgagcagcggcaatccttgtcgctgatgacaaacacgaac

SEQ ID NO: 280596 - DNA, 790 bp, Zea mays
ctaaggaagaatgggataagaaacaagcagaagaagctgacaagaacaagaaacaaactgaggctgatggcagtggtgctacagaattggaaaaagaaaaagaagaaagtcgcccaaagaacgtcaagcccaacaaggagaagatgataaaatgagggcgaatgctgcaaacgtcgctgcccggcaagcagttggaggaagtgatatgctctcaaagtggcagttgatggctgagcaagccagacagaagcgagaaggcattgatgtgtctgctgcttcacagccaggcagagggccaggttccaggcaattatccaaatttgggaaaggtcctggtgagcacccagaaggttcaaagaggagccattcgatggcattcggaactggaggcatgaaaagacccggcaggacagcgtttgctggtccacagcgattgatctccgtgaaggatgtcatttgtgcccttgagagggagcctcagatgacaaaatcaaggctaatctaccggctgcacgagcgattgcctgtagattctaccgtagattagaccggaatagtcatatactttattgtgggcatgcccaattgcccttgcatggtattgaacagcgaagaagcatacccgccactcccatttgttgtgctttggagcggcactgtatattggtgtaaaatttgtatcgcaaaggcggcgaattaccagcaaaaaagggtttctgtacaaaattcactgtaagcggggtctggcatttgccttttctgcaaccacgtctgtgaggttatttctagc

SEQ ID NO: 280597 - DNA, 512 bp, Zea mays
caacactaaaattgacaacgagtagatgccatttgaacaagctgaagtgtttcaacgtaacagcagcagctcatcataagctcataacacaagtcgttcactgattaaaactgagaccacctaatttctaattcaaacctcgcccttccccccttatccatatccatatccctacacctacatcaccatccatacacaatagtaagattatattgctactgacacaaagttaacaatactagcatgaacagcagtcaacgcagagcgaggaaggatgcccccaagggttgacagaccagaactagagcgaccgggctacatggattgatcagtcctcttccattgcggcagaggaaggggagaccctggccttcttgtgctgctgctgctgctgctgcttacccaggaaggcctcgaggaagagctgttgggcgtcgagcatcgtttgggtgcgcttcatctctgactccattcgttccttctccatctgaagcgacagctcgagcctgcgt

SEQ ID NO: 280598 - DNA, 829 bp, Zea mays
accatctatcttccctccccatgtgggcggcctcgagctctgcttaggtctcacagctgtgctctcgttggttgggtgatccgccccttgtcggctcctttcaactcgagagctccgggacagcgagatctgcgctgtcgccgccttacctttcttgcgagctcgcgtgcaggcaggcactgagcagtgagctcccccccgtcttcctcagcctcgtttcccctctcgttgctggatctggctcgcaagatccaatctttcgtgccccctttctccaaagatcctcgcttgggtggttcttcctggagattgctgggaggatgcagcacgaccagaagaagaaggcaccttcagagatggattttttcacagagtatggcgaaggcagcaggtacaagatagaagaggtcataggcaaaggcagctacggcgtggtttgctctgccgtggacactcatactggcgaaaaggtcgctataaagaagataaacgacatcttcgagcatgtgtctgatgcgacgcggatactccgggagatcaagctgcttaggctcccgcggcatccggatattgtggaaataaagcatatcctgctccctccgtcgaggagggagttcagggatatttactgttgtcttttgaactcatggagtctggcctgcaccaagttataaaggctaacgatgacttgaccccagagcattaccagttttgcttgtttcaattgcttcgaggattgaaatacatacatactgcgtaattgatttgcttttacatggatcgttacggtttttctgtataccactttaatacgcccgtatcctgtgat

SEQ ID NO: 280599 - DNA, 456 bp, Zea mays
tttggacccactacaaggtggcgattcctcttcaacggctgcgggcggcgagcccgtcggccaacaagaccaagcccgcggagaagttcatccagctggtgtcggtggacagtcacgagttctggttcatgggcttcgtcaactacgacggcgcggttgcgcacctgcaggaagcgctgagcgggtttccgcaacctgcaggcgtgacatggaggacctcaatgcaatggacagtgttgtcttgtacgtgctcgccagaactgattgatcgaacagagcgattgtgtacccgctctctgtgttgtgttgcggtgctagtgtttgcatcgtgttgtgcgtgtgcggatttgtatgacatttttttgattttggttgccattgtcagcgagagaacagtccaatcattttattcagatttcagagaagaccatggttatccatggcgatggctttgat

SEQ ID NO: 280600 - DNA, 809 bp, Zea mays
tggacgcgtgggcggacgcgtgggttctgtaaaaaaaaaatattgttctttggcgtacgctggtgcgcctctcctccccgcctcggcatcgacgcgatttgcgtgcccgacatgtcggactcgccggtggagctgccgagccggctcgccgtactgcccttccgcaacaaggtgctgctccccggtgccatcgtgcggattcgctgcaccaaccccagtagtgtgaagctggtggagcaagaactctggcagaaggaagagaaaggcctgatcggggtacttcctgtgcgggactcggaggcaacagctgttggctctatgctgtctcctggtgtgggcagtgattcaggtgaaggaggcagtaaggttggcggttctgcagtagagtcatcaaagcaggacacaaaaaatgggaaggagcccattcactggcacaccaagggagttgctgccagagctctacacctttccagaggggtggagaagccaagttgaagggttacatacactgctgctcttgaaggtctactgaggttcagcgttcaggaactcaatgcaagaggaccataccattatgaccgtgcatcgcgccttgacatgacaaagactgaattggtgcatgcacagcaagacgcagatcttatagctctttctaggcagcttaaagctactgccatggaactaattcctgtacttgaacagaagcagatgacagttggtcggacacatgtgctccttgatacggctacttgttacaggctagctgatattctcgttgctagctttgcgataagttttgaggagcatct

SEQ ID NO: 280601 - DNA, 806 bp, Zea mays
ataaggtctggccaggctgctcgtcccgtcctcctctcgtggtcttccagaagccatggccgccgccgccgtccactgttccagggcatacgttcctttgagctctggcgcttactcaaggaaaaaaccaacttgccacaagtattgtgcatcggtggagcttacttggaaaccatgccgactagttggatatcgggattttcgactgaaagagctagcttgccaacaattggcccatggagtggatgaacaatatcctgtgaaaagtagcactgtggagcaagctcaggaccgccagccctgtctgccacaaggtgatgcttacttcgctggcctgtcgaagaaagaaatcgagagagggcggaagattggcgctgccaacaaggggaaggttccctggacaaaaggcaggaaatggagtgaagagcacatgatggtcatcaggcaacggactgctgaagctctgagagatcccaaggtgatgtcatatcatgaagaaaatgttagggcaccgtcagctacatagacaaacaagcaaagacaagataagtgcggcgctgaggacggtctgggagaggcggatcgtttctgtccgatccagacagaaggttctgcagatctggtccaacagtatagctgaagcagcaaagaacggtggtcacggccaagatatgcttggctgggacagctacgagaggatgaagtcagagatggtttctacgttcctgtggatcaaggagaggggacgtatggtgaagaagcttgacagggccgtggcaaaaatagctgccaagaggcttcatgtg

SEQ ID NO: 280602 - DNA, 440 bp, Zea mays
cgttcactttttccgcaacagtcgacagcagcacacacactcgggtctcgagctccctccccccgcgtgtcgccctcgacggcgtcgccgcgccgtgcccaagccccatggatcccgccgctgcggaccggccgtgtgtcatccagtcgctcccggcgaactgcaacaccctaccgccgcccctggtccaggcactcccggcgaactgcaacaccctaccgccgcccctggtccaggcgctcccggccaagaccaaccccagccagccttcctcccccaccgccaaaacgccggcacgcgcccttctgcggccgggctcgggtcccgggcgcccccgagcccgcgccgcacccgctcgggtggcgcgcccgagtggacgcccgccgagacgcttgcgctcgtcgcccaggtggcggccgtggacgacggctggtcccgct

SEQ ID NO: 280603 - DNA, 587 bp, Zea mays
ttgctattctattcctagttgtattcgctgcgtgctggtggaagagacgccagaacattctccgtgctaaaagattagctgcagcaagggaagctccttatgcaaaatcaaggacccagttcacccgcgatgtgcaaatggccaagcatcaacggacacatgaaaatgctcggagcagcaacagtgaaggctcgccacatttgctttcctagctcggtgagaagactgcgacagtgacttggcttccatctattcttcagttcctcctttgtatgctcctctgcagtcttgaaagacgaagctgctgtacatactagctaggtcacgaatggtgtatatacttgtattttttttggtgatctagaactcagtccaggagagggatcagtctatcagatgagagaaattacccatttcatcctacttactgttctgattactgctgttgatttccccttcactgttcaagtatgcttattgtcagttttgtactctgtggtctgaagctctgcaaaactgccttttgccaggagctggagctccaggctgggctgtgctgtgctgagatatagagtgaattctgcacc

SEQ ID NO: 280604 - DNA, 458 bp, Zea mays
cggacgcgtggcgctgttcgctccacacgcgccaccaccagagacctcccgctggttacaccaatggaggccgtcctacggcatccatcgctctcgcgcaccaggcctccgaacctgaaccctcccacaacgccatctccatcccttcatgcaccatctcttctccgcctccgcgcgcgccggctcatcgccgctgcggtgttccaggaccagaagccgaaggagccagcaagcaagggaggtgatgacgaggaggaggcgtacggcgaggtggaccgcatcgtctccagccgcacagtcagcagcccggtgttcgcggaggacggctcggccaccgccgtcgtcgccacggagttcctggtggagtggaaggacgggcacgagccgtcgtgggtgcccgcggaggccatagccgcggacgtggtggccgagtacgagacgccgtggtggactgcggc

SEQ ID NO: 280605 - DNA, 706 bp, Zea mays
ttgttcgtgggacgctatacgggctggttcatttatatgcgagtatgttggtgaggttattgatgatgctaacattaatctgaatgatattgaagatgattatatatttcagatgtcgtgtcctggtgagaggacattaaaatggaattttggacctgaattgataggggagcaaagcacaaatgtttctgctgatacctttgagactctacccattaagataagtgctaaaagaataggaaacatatcacgtttcatgaaccatagttgtgctcctaacgtattttggcagccagttcagtttgaccatgaagatgatcatcgcccacatatcatgttctttgctttgaagcatattcctcccatgacagagttgacttatgactatggtgacgttggagctgatcctagtggtgtacggtctcctagagcaaagaactgcctttgtgaatcctcaaattgtcggggattctttatctgaccgtggaaaatgcatattctatctatcaacattcaaccctaccagctagatcctttttggtggcacctgaagaaaaagtaggactgttcgaacagcttgcatcactctgtcgttgtggaaccattatattaattaatgtcaatcttttagatgaccattcagcaactaatgcacaaacgtttcttttgtgggggaagaatgttggtttggaagtcattttgtgta

SEQ ID NO: 280606 - DNA, 480 bp, Zea mays
  unsure (1)..(480): unsure at all n locations
tcctcaaatgtcggggattctttatctgaccgtgaaaatgcatattctatgattctatctatcaacattcaaccnctccagcagatcctttttggtggcacctgaaggaaaagtagggctgttcgaacagcttgcatcactctgtcgttgaacattttacgcagatcttttagatgaccattcagcaattaatgcacaaacgttttttttgtgggggaagaatgttggtcttggaagatcaattttgtgtagtttgtagacttgtagagcatttagtgctgctaaacttgtgcaccttaagtcttttggctgtaaaagagcctccaggctccagctgaattggttagtcagtctaagtagcatttctttgatcctgaatttgactccacgtggagtcaatttcaagctggagttaaaaaaacattcttatgttctatactaaagcacagttctaaggctcaaaaaaaaaaaaaaanaaaa

SEQ ID NO: 280607 - DNA, 478 bp, Zea mays
tagcactctcgattaccagccctctcgccttctccgctcctccgtcgtcgccgaaccccatggccccaaaaccctaaactgagcccgccgctgcttctccagtccgcacgaagcgccccacaaaatgccgcggctgacgccggcgcacgccaccctcatcctggaccacgtcctgggcgatccctcgatccccaccgcagtcaccatcgcgttaatcgctgggatcccctctccctccgatccgaccccgcgcctccgccgcggggtccttctccgccgcctcgccaccgaccccgtatccgaatcctctctcgaaaccctccacctcctggcctcgctcccgccctgcgcctcccccatcgcagccgcccacatcgccgtcgcggcattcctcgcggcctccgcgcccgacttcgacgccgttgccagggctctcttcgcgcgccccgacggtcgcgcgcgccaagcggtccacggc

SEQ ID NO: 280608 - DNA, 714 bp, Zea mays
gaagcgggcatttgctgcttttaagaaagcagcaattttagctgattctacacctgctgtccctgtggctcttcgtgttgaacctaaacctaaaagtgatataaggcaacaagatcttttgaagaacattgttgggatcaaaccaaagcgaccaaaagttagcagcccttcacagccaccagatagcaataagcctaaacatacggaagaagaccctgtcggcgagttgtcgccatcacggaatccgttgggaccatctcatgggactgtgaatcctgaccacacagcgccaaggttagatgaaccaacagaggtgaagcaacagaacagagctggaagtttgcttggtttagcttatgagagttcggatgaagaatagttgatcatgcgattccaatgggaactggactatttcttgtcagatgtctgcattccaaacgacaggcctggtgtattgatgagagctctcactgagtcatcctcaggttacgggtttgaaacagcgtgggttttggaacagtcagtcaccaggtcatgccaggagtttgaaacattgtgggtttaaaacggccttccttcatatttgcagaggaaggctgcctcattttatcctctttagtatttagctgtgtaattggttttataattagattatatttaatattcataatgggcgttgggggatacgacggatatataaaaaaatccagccct

SEQ ID NO: 280609 - DNA, 564 bp, Zea mays
ctgaactcaactgtggccagtggagcagcaaattcaggattcaagctgcttgttacaaaaggggctccgcccccgcgggcggtcgggatatggctctttggttgtgctgcctgggtgttcagcttggtcatactgggagggattactcggctcacacgttctgggctgtcaatgactgactggaagttcacaggggaaatacctccaatgacagacgaagcatggcagctggaatttgagaaatacaagcagtcacctgagtacaaaagggtgaacaaaggaatgagccttgaagatttcaaatttatatactggatggagtatgcacacagaatgtggggaagagctttgggctttgtatttgcgggtccttttgcatacttcattgcaagaggttatgttactcgccaactggggatcaggctgtcggctctctttgcacttggtggtgcgcaaggactcattggctggtggatggtgaaaagcggtcttgaggaaccaacatctgagtatgttcaaccaagggttagcccttacaggctggcaacttacctgacatctgca

SEQ ID NO: 280610 - DNA, 540 bp, Zea mays
ttttaaaaagcaatggatgaactgagagccacagaggttgacgctgagtacaaattgcaagatacaaaaaaacttgccaaggagtgggaaatgaaggtgaaaacattcaagaaaaggcttgatgaaattcagataaatgttgttaaacacatggatcaaatccaaaaggatgctgttgatcctgagaaactcaaagcgactctaggtgatgagcaactaaatgacacatatgacatgaaaagggcaatggagatggtagcattgttagaggcccagattaaagatttgaacccaaatctggattccatagcagagtaccgcacaaaggcttgcttgtacggtgagcgtgttgatgagttaaatgctaccactcaagaacgtgatgatcttaaaaagttgtacgatgggttaaggaagagaaggctagatgaattcatggctggattcaacataatatctttgaaactgaaggagatgtaccagatgattactcttggaggtgatgctgaactggcacttgttgattccttggacccattt

SEQ ID NO: 280611 - DNA, 861 bp, Zea mays
gaacttgaaggtatcaaactgatgatccaaagcaatatgttcaagtatcttgggattttgctagagggccgcgagcgttttgaggaagaggctttgtctagattgaattacacgatttctcagggtgaagaaactcagcatgatgaaaataaagccaatggatcaaattcttgtatatactccataaatgcgaggctaaagaaattttcagattggcttttggatatcatagcaatgggcgacctagatgcattcttccctgctgcaacgcgtgaatatgctccgtttgttgatgagatgtggaaggaccccgccatacaagcaacatttaaaagaaaggaagaattgcattttctccctgatgtggctgagcacttcttgagcagggccgttgaggtgtcaagcaatgagtatgaaccttcagagaaagatgtactcttcgctgaaggagtaacacaaggaaatgggctagccttcatcgagttcacacttgatgatcgcagcccaatgtctgaaccttatatcgacaacagtgaggcacattcgcagcctctcaccaaatatcagctgatcagagtcagtgcaaaaggcatgaatgatggctgcaaatgggtggaaatgtttgaagatgtccgcatggtaatattctgtgtagcactcagtgactatgaccaattgggaccccctgtaagtggcagcagtcggcctcttgtgaacaaaatgatgcaaagcaaagagttgtttgaggctacaatccggcagccatgcttctgcgatactccatttgttctggttctgaacaagtacgaccttttcgaggagaagatcaaccgcgcgcccctctctagctgcgagtggttc

SEQ ID NO: 280612 - DNA, 310 bp, Zea mays
aatgttttcacacttgttcaaattacagtatgtgctgttgcaatgttcacttcttttgcggcccagtatatctaatgttgaaagtagatatgctcaatctggcagctttggcattttattcaagaacgtagatttctctagctatgataactgaaatggcgtgcatagaatcagaccacatcagcatattaataccccgtttcttatagtgaggaatcatcatctgtctacaagcttatgaatgaatcgtgtgtctcctaaaaaaaaaaaaaaaaaaaaaaaaaaaaaaaaaaaaaaataaaataaaaag

SEQ ID NO: 280613 - DNA, 576 bp, Zea mays
tccattcgtccgcccacgcgtccgcccacgcgtccgcccacgcgtccggtcgataaaaccgatgcaccgtgccgcctcgcgaaccctagcggcggcgggacgaggggaagaaggttacaggcacggcgcgtgaagggtcctgtcctgcccagtcccgtctggtccgccgcgatgccgtggcccgagatgtggctgcctcccgcggccggggagggggcggtggcggcggggctgtttctcgatggcgtcgatgggacggcgcacggcgcgctcctcgcggccatgcccgggtgctccctgtcgttcgggcaccagcatcggcgccgacgtggggcgccgctggggtttctgtcgctgacaatgtcggtgaaggggactagggggttcgcgccggccccggttgggttgctccccgacgcggaggagaaggccagggcggaggagtcggacgcgctggtcgcggggaagagggctgctgaagtggccgcggaggcggagggagtgattctgctgcaggagaaggagaagaaggacggtcgtgctggagctggagcgatgaacgtgagcaagcatctc

SEQ ID NO: 280614 - DNA, 455 bp, Zea mays
tcgttcccatccgccaggacactcttctcccgggcgcagtcaggacactcttctccccggcgcagtcaggacactcttcttctcaccgccgccagcactgctctgggcgcgcgccgcctaccctcccctcttccctccctcacctctcgtcctcgaagcaagggtttccctgccccaggctgcctctcgtccgttctccttctctaccgccgccacaactcgcccgccgccccgccctcaccgccggcaacgtgacacgacaagcccacccctttattcctgcagctatactccgatggccctcgtgaagtccgacgctgaggaggagtggtccgactctgacttcgatgatgcctccgactccgaggtcgtccgaagctctggactggctcgacgccgtggagggccctgacggcttagctcgcccccacgtcgccttttcggccttcggaggc

SEQ ID NO: 280615 - DNA, 598 bp, Zea mays
  unsure (1)..(598): unsure at all n locations
ccagtgcgtgtttgatgatgaaattgtgacagtaaagtgctttgacttgtttcctcaatcagaatcaggagcaagcacaacatcaggagctacgagttcaatcagaagttactctctgtcaagcacaactgataaacacccagagcaaggaagggatgataacaactcagccatgccggctggaaacttgttttcgtctgatcgcatgcctttagttatcttactgagtaggaagggtcaatatggcattctttatcgcaagtgaacaagttctgactatacggcagcctctggtggacagttctaaccggaactgtttgggttataacatggaaacctattgacaacctactctagtgtgggtgtttgattgtgcatctgcttccaaaatgtatctggttacatttttgcccccgacaaaaaatactccatttgctagatgtgctgatgcatgcagtttatgaaacaaatttggacttggcatanaatctgaggctgggagcagtgggacagatctgttactttttcggtttatttttcttatgggatgttgtaccatngctgaagcatggatggaagtatcatatttgtaagaaca

SEQ ID NO: 280616 - DNA, 343 bp, Zea mays
tcggaaaaaaggttgggtctagtcgttgttgtctctatactggcaaagggaatgcggagatacatttcgagaagaaaaaggcaatgatatggaggtgttttgtcttcctgcgataaaaaattagaaatgagcaggtgatgaatgtcacatgaatatatttagctatttcaaatggaaaccaactttgttattgtactggcttttgttcataataaaaacacagaaggcaatggaaaatctacatgcaaaaaaaaaaaaaaaaaaaaaaaaaaaaaaaaaaaaaaaaaaaaaaaaaaaaaaaaaaaaaaatttaaaaaaaaaaaaaaaaaaagggggggccgtt

SEQ ID NO: 280617 - DNA, 548 bp, Zea mays
  unsure (1)..(548): unsure at all n locations
acggcctgtacctatgcaacctcggagtctatggaggcaggctcatccgagaacttgcttggaatcgtcaagctgtccttggaaaatgttcctgtgaatgagcaccgcaagatggtgttgctgtatgcgcttctctctgcatgtatcgctgataagcccgtatcgcaagaggaagaggacaggaagtcgtctcacttcaggaagggctatgacgctcggcatcgtgttgctcttcggttgatagcagcatggcttgacgtcaagtggatcaaaatggaagctatggaggtgatggtcgcatgctctgccatggctgcggcaaaagaacaagaacaggagcgtgaaaatgcatcaccaagaagcaagtgggagaaatggaagcgtgggggaattatctggtgccgctgccttgactggtggagcgttgctggctattactgggggtttagctgcaccagccattgctgcaggatttggtgctctagctccaacactgggcacacttgtccctttcataggggctagtgganttgctgctatggctgctg

SEQ ID NO: 280618 - DNA, 482 bp, Zea mays
gtttgctgttccggccccagcgattcggtttggtgcgcctcgtggtccacgtgcgcgggctttgtgctctctctttcctctgtgtgtgtgtcagttcgtcgggtaggttggtggcggcgtgagagatgaagagctgcggcgggggaggagcggacgggcagcagtgcccgtgcgactactgcggggaggcggcggcggctctgcactgccgcgcggacgccgcgcgcctctgcgtcgcgtgcgaccgccacgtgcacgccgccaacgcgctttcgcggaagcacgtgcgggcgccgctctgcgcagggtgcgccgcgcgcccggccgccgcgcgcgtctccctcggcgccgacccggcgttcctctgcgcggactgctgcgagggctgcgccgccgcttccgcggcgcgcgtgtcggttgagggcttctcggagtgcccctcggcggccgagctcgccgcgtcatgggggctcgacctccgc

SEQ ID NO: 280619 - DNA, 667 bp, Zea mays
atgctgcctcattttaactcttcttttactgaagctaatgaatgtgaactgaagattaaggatgaaccagttgcagctcctaggaagggaagagcacctgcacctcgttggtatatctcaaccgaggagcttgattcactctcatcgtacatgaggggaagactgactttggaaaaggttaatatcgcaataaatgaagtggcttcatatgcagatgccaatgctcatcttgttacatgccctaagaaaaagttgtcagaagatacatgggaaaaagctttggaactaagggatattgcagcaagtggtgcagtaaagggcaaccatttcttcctggaagcagatataaaaggacctgggttaaaacttgacaatactggcaaagctattcttaccatttggtgaatgataaataacatgtctacgtggcgattgtcgctgtggagacgttggtttctcatcaaatctgacatgtcgattcttcttggggcagagcaatcgactgcctcagattgttggcattattcccaaggcgggggatttcaatagtgaatactttctgacttgattcgattgtaattttctttggattggagggaggaatgatcaacaaatttcattctgagactagcttctgcacaatgcttaatctgcataaatggtatgt

SEQ ID NO: 280620 - DNA, 591 bp, Zea mays
ataaaacatatagaagaggattctttgagagaagcacatgaagatgccatgaggaaggctatcagtgcttttaatgtttctgctgttggtgctgggtcagctcgttcaaaatttgaaaagcttcttcacagttcttcaaaaaggcctttgaggactacaaaaggaatgcttttctggaggctgacttgcaatgttctaatctagttcagaacatggaatcataggtgcgagcagcatgtaaccgttcgaatgcaaagtgagatgacatagctaggctccttgctgatctactcacagagtgtgagtcaatggcctatggtcctggaaaatggaaaaggctagccacattcttacagcaatgtttggctggccctgttctggaccttctgacaagacagttacagcatatagatgctgaaaggaactccctgaaattgaaatgcaattgatgcgatgataaattggcattgctgaggaagcagcttgaagcaagcgagagtcacacatctgcgtatgtgaggcgctatgatgaagttctgaatgattaacagaaaatctgcaaggatgactctattcgtataactgaacttg

SEQ ID NO: 280621 - DNA, 431 bp, Zea mays
ttgttttcgttccattgcaaaccacctcccgttctgatttctgcgggcggaattccataaggccctcccccctcccctatcctcctccccttgccactccaattcctctgcaaaattttctcatggcagccgacgtttccatccgcactcgatccgcctcaaccacccgctaattcctcctagttctagacttctagtcttctctctctctctctctctctctctctcctgcgccgactcatcttcatcctcgtctcacctccctgctgctgctgacgctgctgccggcaagatcaaatcgttcaaaagaccctggatttcggcgaattctagatggatcatgtgttttaagtgattggtgctttcgacctcattagtgccttttgttcaattgctggacccaaggagcagagttctgtcgacatggcatc

SEQ ID NO: 280622 - DNA, 560 bp, Zea mays
tttgaaaatgttagatgagaaaggtgcagaagctcataagcttgaggccactgagctttacatcaggaaactatcaactaagattagcatagccatccaggttgtaaacactatttcagaaaagattagtaagttgagggatgaagagttgtggccacaaacatgtgagctcattcaagggttgatgaggatgtggagcgttatgctagaatgccatcagatacaattgcatgccatatcccaagctagatacatagactccatgatagacactgcaaagttcggtgatgatcatatggacttgatcaagcggttagagcttcagctattggattggatcgcttgttttgctgcatgggttagcgctcaaaagaattatgtcaaaactttaaataagtggctgacacatggtgtcatctatgtacccgaggaaaccgaggacggggcgcctccattttctcctggaaggttaggagggccaccgatattcgccatatgcaataactgtgctgccagtgtggacagggtatctgagaaagaagtggtcgaggcaatgcagg

SEQ ID NO: 280623 - DNA, 450 bp, Zea mays
cacagcagttggcgcgcaccaaaaccctaccctccctctgctctcagccgccaacgccatgggctccaccgccgctgcctccgtgctcccggtgtccgccggctccggcgagaacctcgtcctcatcctcgactacggctcgcagtacacgcacctcatcacccgccgcgtgcgccagctcggcgtcctctccctctgcgtgtccggcacggcgccgctcgcctccctggagggcctccgcccacgcgccgtcatcctctccggcgggccccactcagtccacgcccccggggcgcccgccttccccgagggattcctgggcttcgcggctgccgcgggcgcgcacgtgctcggcgtctgctatgggatgcagctccttgtgcagtcccttggaggcgccgttgtgtccggggagcgccaggagtactggaaaatggacgttgaggagac

SEQ ID NO: 280624 - DNA, 675 bp, Zea mays
gtttcgacctacgcctacgcgaagtttaacaggaaaacaccggccagaccatcctacaccggccgtccgggacacgcgcccgcctctgccaagaatttcgccttctccggcgccgatcccgcccattcttgtgccgccggcaggccaaggatgcggaaccttctcacggattcgtttgagctcggcaaacgggggcagtcctcaggaaatgtcgacatcgagcttggattgcaaggtgacctgactagttctgcgcagccaggttttgagggattctatgaacaggtcaaagaggttgaaagcttgctcaacacattgacaaagttactgaaggaccttcagaactcaaatgaggagtcaaaagttgtcacgaaggcatctgcgatgaaagaggtaaaaaaacgcatggagaaggatgtcaatgaagtgacaaagattgcacggctggcaaaatcaaaagtagagcaactgaacaaagataatgctgtgaacagaggaaaaccaggatttggcaagggatcgggtgtggaccgatcccggacaacataccactgtcgcattgacaaagaagttgagagaacgtatactggagtttcagacattacgagaagaaatccagcaggaatatcgtgacgtagtggagcgtcgtgttttcactgtgacgggggagcgtgc

SEQ ID NO: 280625 - DNA, 497 bp, Zea mays
cccacgtttccgtggacgcgtgggcggaggtgacaggccccactaccgagcaagaaaagttggccaggaaggcgatgaagccgggaccccgtcgttgtgatggaagccatgcgtggcttcttccactccccaaaaggagcaaaggcatttccagcatgttttttagtgggaaatgggcatttctgacatccgcattggccatccgcgctccaggtccagggtgcaattactgaaagaaaggtcttccttctggtcatagctcgtgtaaaaattaaagtacggctctttataatgctactgcttaggaaactcgtatcgggtgccagtgcacgggacgcatagtctttcgtgcatcagacagttaacagcgggtgtataacgggagaaatgtcataattcgtatttattttttttattcgtccttatattaacacgtctgaagtctagccccctgctgtacatcgaaacccagttcataaattgaaattttaatttat

SEQ ID NO: 280626 - DNA, 544 bp, Zea mays
tacagcatatatcaatccaagctcgactctgagggtgtttggaagaggggatcttgtcacaaatcccaaggaaattgcgtggaaatatatcagatctgacttagctgttgatgtggcagctgctttgcctttgccacagattattgtctggtttgtgataccagctataaagtattcctctgctgagcacaacaataacattctggtgctcatagttcttgctcagtatcttccaagattgtatctcatattccccttaacttatgaaattgtcaaagctactggtgttgttgcaaagactgcttgggaaggagctgcatacaacatggtgctctatctgatagctagtcatgtgctacgtgcactgtggtatgtgctatctgttgatcgccagacattctgctggaagacaaactgtctgaatgaaactggttgtgatcctatagacctatattggacacgacaccaaatgctacatgggctaatacgactgctgtcttcatctatttgtatgctagcgatatcaatttaagtcttgattttt

SEQ ID NO: 280627 - DNA, 674 bp, Zea mays
gccggttttgttgccgtcgcccgtgttcgggatggtgaacgtgatggacgacccgctgacggaagggccggagcaagggtcggcccccgtcggccgcgcccagggcctgtacatggggtccgtccgggccaagatcggcttcctgcaggccatgaacctcgtgttcaccgcgggggactacaacggcagcacgctcgcgctgctcggccgcaactgcccgctcgacgccgtccgcgagctccccgtcgtcggcggcacgggcgcgttccgcttcgcccgcggctacgcgctgctgcgcacccactggctcgacttcgccaccggcgacgccaccgtcgagtacgacgtctacgtcacggactagctaattaataacgtaccgccttgctagccctcaccctcactgatgagtgccataagcattactacaaagacaggaccacgcaacaacaatggtgccaataaaggctttgaagcatgcttcgccacagagcgcctgctttttcttttaaaaccagcattttcgtttcagcttatatatatatttatagaacgcatgatctgtatccaatacaagcttcagaacccctttatgttttcgggaaaggtcgtccaaaactccggtccagattatgttgctatttgaaaactgaggcaatatatagctttatatc

SEQ ID NO: 280628 - DNA, 731 bp, Zea mays
aggcgaacgccaagatgggtaatggcgcccagaggaacgctggcgccatggagtggcattggcatgctgggcctaagccatggcctgggagcgggcggcgctgctgctgctgctcctccacctggcttccagcaaggctacgcaggcttcaaccacccgccctatgccgctgctgccggctatggaggaggtctacagcagcagcaccaccaccagcagcagagtaacagcctcatggcgagcatgcaggggtaccatcatcaccagtaccctgccgcgacggccgccgtggtgaacaacttgaggggcctgaacggcaacatggtgatgatgcatcagcaccagccgcagccgcagccgcaggcccagatgatgtaccactcgtcttcccagatcagcagcccttacaccggctactacaacccttacaattactactaccaccaccacccccatcccggcagcgctgggtaccctgccaccgccagcaacggggatgtggagagcatgttcagcgacgagaacaccaagggctgtgttgtcatgtagggcgggacgagaacaccattcctgctacctatctttctctctttcgtttctttttcattattttactgctcttatggttttcgcctgtatcaagagtgaatcatggtgttgacttagatgtgttgttgaaagtaagggcaacttgagaggggtgaccaaacagtggaatgtacaattggagt

SEQ ID NO: 280629 - DNA, 536 bp, Zea mays
tttgggccgttaaacggtttatcctgatggagacaaggagacgccacagcaacaaaagaatggcaatcattgcaaagaacacaccaaatgcaattgcgagaatggccttcttatttcttcctcctgtggataccagaggcacatcggctgaatcgcatcgacgaccgatcataaagccgcacagcttcggattccctagaaagctggagttctgaaatgtaccaaattggccaccggttggaataggcccctccaggtcattgttagaaacgttgaatgtggaaaggaagtgcagattctccaatgcaactgggattttacccgtgagatcattgctggataaatctagcatccagcaggtttgtgagattgcagatagatgtggggatcggtccggttaagctgttggagctgatatcaagtgaaaggaggcctttcaactgaccaatctctgggggaatttgacctgtgaatctgttgttgcttagattagaaccttaggaaaagcaatccggatgccgtcctgacgtgatgga

SEQ ID NO: 280630 - DNA, 488 bp, Zea mays
tccacttttccggaactgtttgacgcgttcgttcgagctcttcttgaagcagtttgacaagctgtttgtggtcgtctcgttctctgtttggttgtccagtttcagtcccgagacgtcgtaatcgctagatgatcgatgaacgccaagaagattaagctgcgcgactatcaccactgctacggatcgccgtcgccgatgtgtgacccacagctgttcccgcccgccgccgccgccaccaccgcagggctctccttgcacccggggccggggctcgtgggctccctgccgcagcggcatggcggcggctgcggcggctgggtgcacgaggagcacaccgcgacgaccccgagggcggcgcaggggcagggcggctgcgttgtcggctccgacgccgccgcgttcttcgccgccgaggagctcatgatgggcacggcgcggttcgactcccctctcggggaacgacgaccgcacttccagagctgacagcg

SEQ ID NO: 280631 - DNA, 719 bp, Zea mays
aaagaaacggacggctatgagaaatcttgggacccggctatacatatggccacctcacataaagactcgatcgacgatgcagggcaagacgagatcatcttggttcgcaagcaaaccaagataggccaggtcgtctcgttggttgttgcattggaggagcgagcaggtgccatggcagccgctgagatcaagataggccaggtcgacgacgtccaggagctgcaccggacgggcctgcagacggtgccggaccggtacatcagggacggcgacgaccggccggacggcgacaacgtctgcgctgtcgcgcacatcccggtgatcgacgccgccgagctccagcgcgacgacgtcgggcttgacaagctcaggctcgcctgcgaggagtggggcttcttccaggttgtgacccatggcttcgtcgcacgagctgctggtccagatggtgaggctggcgagggagttcttcatgctcccgctggaggagaaggagaagtaccccatggcgccgggcgggatccaggggtacggccacgcgttcgtcttctccgaggaccagaagctggactggtgcaacatgctggcgctgggcgtggagccggcgtccatccggcagccgaggctgtggccgacggccccggccgggttcggggagaccctggagacctactccgcggaggtcggggagctctgccggaggtgctcgcgcgcatcgccga

SEQ ID NO: 280632 - DNA, 424 bp, Zea mays
cctataccttcccccttcatgtcgtcgccttcctccccgcgcgcttgcccctgcatctctccgctgcccaccactccctcgcatataacgacgaaggctcatcatctctgatggaggtcacagtcggctaacacaccgccccgccccgcccctgttgtctgtcccttcattttctagcttacaagagtattcttgttccggcttcttcgttccgtcgagcgcggcattctgtgggtcgtgtggattttggcccgggggacgaggaggaggctggtcaaagatctgtggtcaaaaattgatggtggggttcatggaatgggtgcatgactggctgctgtgggacgccttcctggagtgcggagggatcatgaggccaccgattagatagcggctggggagcgagggaccacaggaggcggaggcc

SEQ ID NO: 280633 - DNA, 840 bp, Zea mays
gcagcgagcgtcggtaggggagcccgggcagcggacacacttgccctctccacctggaaccccgagcaggctccgccggccacggccggtgccgcgacgactcggcacgcgctagctagctagctgttcctcttcccgagggccccaccactaccaccatcctgccgcccggcctcgtgtggcggatgatgattcctagggagccgtggcggccggagcacccttccaactcctgatcccgagctgacccccgccatcgcagcggcggctctgccgcagcgtctgtgtccagacttatgatgatggagacccctcaaatcgagatgggcggtttcaaggtcaacagcccgcaagtgcccaacggcgtgttgcggcccaccgtgtcttcctcctggaactcgcgagggacggtcgagagggcgctcaagagcatcaggatcgtcattttcactttcaagctcaacttgctcatgccgttcgggcctgcgtccatcattctccacttcacgactaggaggcatggattgattttccttttcagcatgctaggaataacacccttagctgagcgtttaggatatgcaactgagcagcttgcaatatacactggtccaacagttggtggccttctgaatgctacatttggaaatgcaaccgaaatgatcattgcagtatatgctttgaaaaatggaatgatccgagtagtgcagcagtcactattgggttccattttgtcaaatatgctgttgcgtaatgggctgcgctttctttgctggtggtattgttcatcgcaacaaagaccaagtcttcagtaaggcaactgcagctgtcaactcaggt

SEQ ID NO: 280634 - DNA, 653 bp, Zea mays
tcggattgacaaggcgcggaggcacttcacccaggcgggtcatcttcagcagtcagaccccaccgactggcagaagctgcaggaggtggaggtgcatctgggaagatgcacagatgcaaggaaaattggggattggaagagcacgctgagggaggctgatgctgccattgctgctggtgctgactcctctcagttgcttcttgccttgaggtcagaagcacttctccaccttcacaagctggaggaggctgagtcgactcttgcgagctttctgaaattggacagtgcattgccctcatcattgacagcagcagaactctcgggcatgcttgctgagtcatacgtacatattgttcgagcgcagattgacatggcattggggaggtttgatgctgctgttgctgcagctgagaaggctagagatcttgatcccgggaatgcagaaatcgggatggttttgaataacgtgagactagttgcaaaagccagagagcaaggaatgatctcttcaaagctggcaagttttcagatgcatccatggcttatggtgaagggctcaagtatgatccctcaaattcagtgctccactgcaatcgagctgcttgttggtcaaagctagaaaagtgggaaaaggctgttgatgactgcaatga

SEQ ID NO: 280635 - DNA, 575 bp, Zea mays
atttgtatcagttagatgttcgctattgggtgaaccccaaccaggtctaccaaagtggcctcaaaaccagtcacatcgagctacctgatgctaaaaccatctgcctgatggaatgcccacttcctgccgaagatggcttgaattttgtttgcgattatccagaaggtgacatacgcctctctgtcgacgactggattgacagggactacgattacttcgagtacctcacaccagacatgaggaatagttctcttcagctgcagggtccatgttaccctgtcatatttccaagtgtaaatgtctactggagctgccagtttattgcacgggcatccaatgcctctttaaagcattggaaggacatgggtggtgtcaccatcgacgaaaacatgctaatagacagaacaattcatgatgcaattaatagcaaatctgccgtcatgaagagatatgttgcagatattgggaagtcctggcctgtgttaatcctttgtgggggattactccctttgttcctatctatgatctggttactcatgattcgcttttttgttgctgggatgtcttggataaca

SEQ ID NO: 280636 - DNA, 903 bp, Zea mays
ggggctgccgaccgacgggcggcgcggtcacttcgcggtgtacgtgggcgagcggcgccgccgcttcgtggtgcccatcgcgctgctggaccgccccgagttccgctccctgctgcgccgcgccgaggaggagttcgggttcggcgccggcggcatcctcgtcctcccctgcgaggaggtcgccttccgctccctcacctacgcgcttgcctgcgcccggtgaaggggtgcgggttgcctgccacgccgcgtagccgccgctatattcgttcgattcattggtatctcggcgagcttactcacctacactagctactagctcggcgagagctccagcggctaacgttgatgatggcgtgtgtcgtacgtgtgtaaatatagattactcgcattagagaaaagcgctaagctaagaacaggccggtggcgcggccggccggctgctgcgcatgcgcggaggattgtgccagcgcgcccccggcccggccggcattggagacggccgaccgaagattcgaaggatgaagcacaaggacatcgacggatcagatgcatggagagctgagcgagagcgagagctccagatcagcttcgctgtcggctacgtacggctatcatcatctatctagccgtacgttgccacgttggccgctgctactagctgcattacatgcatgtacgttgtttgtgatgcgtttcacttactggcccctgctggtgcaacaagtgaaccatcatttttccccctttttttcggtacatgcaaagatactgctggctggctgtgggtacgtagccagagctaggtagttgcctagttggaatatgggcgaccgtacgcaccgacatcaagcattcagatatgcacacagcatacaaacaagtgtgttccgtccctccttc

SEQ ID NO: 280637 - DNA, 393 bp, Zea mays
gctccagatcagcttcgctgcagtcggctacgtacggctatcatcatctatctagccgtacgttgccacgttggccgctgctagctgcattgcatgcatgtacgttgtttgtgatgcgtttcacttaactggccccctgctggtgcaacaagtgaaccatcattttttcccttttttttcggtacatgcaaagatactgctggctgactgtggcctgtgggtacgtagccagaggcccagagctaggtagctggtatatgggcgaccgtacgcaccgacatcaagcattcagatatgcacacccagcatacaaacaagtgtgtgttccgtccatccttcaattccttgcagcttcggttcgtttttatatatcctgatgattcatcgatcaat

SEQ ID NO: 280638 - DNA, 766 bp, Zea mays
  unsure (1)..(766): unsure at all n locations
cccgcgcctccgcccgcccgtcctattctgactgaccgccccgttcgtctctcaatctctcctcatggctcgctccaagctctccgtagaattgttgctggcattgctcgtggtcctcgccgccggcccggcgatgcgactggtcgaggcggcttcggcgcacctgcacttttacatgcacgacgtgacgggcggcccgtccccaacggcggtgcaagtggttagcgggccgcggggcaacttcggcaacaccatggtgatcgacgacaagctaaccgaggggacgtcagagtcgtccacgacggtgggacgcgcgcagggttactacatggtggcgtcggtggcgaacctcgagctcctcgtcaacatgaatgtcgttcttacttcgggcccatacgccggcagctcgctcacggtggtgggccgtgacgacgtcagcgtcccggtgagggagctctcagtggtcggcggcacggggcagttcaggatggcgcgcggctatgtgctgtggaagaccgtcacccccgcgattcttgacctggagatcttggtcaacccttcttgagcctaccaggcaataatggtatgattcctgcatacatgtgaaaaattgattgggtgaactgtcaagtgtgtgtaatccttttcttttcattcggtctgggagcaacttcctgcactttatgatttgttgagcacatatgtaagtgaatgagctatggttctgttgttaatctggtggnttattgaggaccttttctcattc

SEQ ID NO: 280639 - DNA, 459 bp, Zea mays
ggagctggccaaaacgacatctacgtcgcgtcaggtttctactaccttgcctcacatgttgggttcatagtccgcggacccccgggcgcaaaggcccctcctgccgcattcagggctgcggctaagaaggcctgcaaattcgatgtcaacagagcaaaagtggcctacccagatgtttctaacagtgatgtgccgtacttgtgtatggatcttacttacacgtacacattgctcgatgacggcttcggtctgcagccaatgaaaaagattacatttgtatccaaggtgaagcatggcgaatactacatctaagccacatgggctttgggtacggctattgagggcgtgtgaccgacaaggcagatcggaaactaatgggctgctgctcgcactgaactgaactctggatatagcgcatgttatcatggttgcagttagcgctcctgacctataatattt

SEQ ID NO: 280640 - DNA, 912 bp, Zea mays
acaatggttaagattaatgaccgctatgaatttcctcttcaacttgaccttgatagagacaatggaaaatatcttgctccagatgcagatcgaagtattagaaacctctatacacttcataccgcccacgcgtccggtggaggagtacatggtggtcactactatgctttcattcggccgacactctcggatcagtggtacaaatttgatgatgagcgggttacaaaagaagacactaaaaaggcacttgaagagcagtatgggggtgaggaagagttgcctcaaataaaccctggtttcaataacacaccattcaaattcacaaggtatgcaaatgcctacatgcttgtctatatacgtgagaatgacaaggataaaataatgtgtaatgtcgatgagaaggatattgctgagcatttgcggataaggttgaagaaagaacatgaagagaaagagcacaagaagaaggagaagtctgaagctcatctctacactatcataaagatcgctcgagacgaggacttaaaggagcaaatcggtaagaatatatattttgacctggtggaccatgaaaaagttcacagtttccgcattcagaagcagttgccttttacttcattcaaggaggaagttgcaaaggaatttggcatccctgtacagtttcagcgcttctggttgtgggctaagaggcagaaccatacataccggcccaatcgtccattgacaccccatgaggaagcacaatcagtcgggcagcttagggaagtctcaaataaggcacacaatgctgagctgaagctgtttctggaagttgaacttggaccggagttatgtccaattcgtccacctgagaagagcatagaagacatacttctttttcttcaagctttataatgctgagaaggaagagct

SEQ ID NO: 280641 - DNA, 1154 bp, Zea mays
acttcctctcctagggcttccagggagggcctccatatccggggtgccagagtggacgtcaagtgttatctattacagtaagccagagtatttgagaatggagcatgctcttcttcatgaaatacgagggtcacttgctatgccagtttacgatcccagcaagggctcttgttgtgcagttcttgaacttgtcacaaacaaggagaaacctgattttgatgcagagatggacattgtttgcgatgccttgcagggtgtgaacttgcagacaacaacagatcgcagcaatcagaaggtttactctgaaaatcagaaatatgcttctaccgagattttggatgttctaagagctatttgccatgcacatatgcttcctttggcccttacatgggtccctacatcaaacggcaccgctaatggtttttgtgtcgcagagaatatcgggcttgatccgcaaccaggaaaagcagcacttcgtatccatgaatcagcttgctatgttaacgatgcaaagatgcagggggttcttcatgcatgtgctgaacgtcatcttgagaaagggcagggtattgcaggccgagccgttaaatctaatcttccattcttttcgcctgatataagagagtacagtttcgaagactacccgcttgcacaccatgctcggaggtttggtctgcatgctgctgtagccatccgactgaggagtacgtacactggtaaggatgactacatactagaattctttctcccagtcaactgcaagggctgtggagagcagcagatgtgattatacagcctttccagcacaatgcagagaatatgcaaaagcttgcgaacagtctctgaggcagagaccgatagtgctagcgctactgcaccaatgtatgagaagactagtggaactcgtttaccaactggtaactctgaaggttcctcacatgatgaccagccaatcacagaatctgcactccaggatctatcttcgggtgacaaacaaggagacagagaacctgctaaggcacggagtagctcaaagcgagttgcagagaaaaaacgcaatacatctgataagaattttagtctggatgttttcgaaatactttcctgggagcctaagggatgctgcaatgagccttggccgttgcccataacct

SEQ ID NO: 280642 - DNA, 762 bp, Zea mays
tagtttgtaacagaggctttttctggatttgactaaggcaagtgcccgatttgatatcacctctggttcattgttcttatgtggtgcttctcgccttgcacaagatttcttcttctctagaagacctgatgtagagacattctgcgatatttgtcctgatgtgacagtttcctttcaacaacagatagttgggcccttcagttttcgtgttgaatcctctgtagccattgaccccagaagccaggaccattttgttcgagtggatgatccgatcttcgcaattgattgggctctcaaagtcctgggttcagcaaaggccacagcgtggtattcacccaagcatcaggaggccatgatggagctccggttctacgaaacctgaagctgttcatcgtgaacgttgtataaaataatgcctggacttcatgattgctatggtcgctgatttcactaggatcagatggtatgaatggctgacgccgtgatggtcaaatgaatcaaccccctgtaatatctattcatatcctgctttaccggtttgagtcatcagttttttttgcttcaggtgatgtagcttgtgctgttctcggcgttaacagaggaagttaatactgtttgagtctttagtgaacttgctaggtgaaccagtctgagtttctgattgccttttgtcagtgtacaaaaaccatgcccccaccatttttatttctttaaatatatgaattttagggtgagcttattaaataattaatccttttttag

SEQ ID NO: 280643 - DNA, 254 bp, Zea mays
tcggacgcgtgggcggacgcgtggggttgcagatcacacacactaccctttccgcgacccttctttctgcatccatccaccctccccctttgtcctgtctctctccctcccacgcacacagacacatcacacagctggagagcaggtgcttctctcacacacacctcggcccacgccgccgttgccagccaagagcagtcgcggggcagcgctgaatcctgattaggtgaaaaagagggtggcgaccatcgttt

SEQ ID NO: 280644 - DNA, 251 bp, Zea mays
tcctttgcgtccgggaaaggagaaggtgatgaagcttgcctcgagtggactcggcaagggtgtttctgttgaagcctgaaaatctagctgagaatctggttttgcttatgcatgcatgcatccaattttgtagcagctgttgaaactgacgttgcccaacgcacgaatcacatttgatgtaaatgcagttttttgctgcgtttattagaaggccccagcggcatttaatgcattggagtgtatgatttgct

SEQ ID NO: 280645 - DNA, 365 bp, Zea mays
ctacgcgtccggcagacttacaccctgctactcagctgctgcaccgtgggtcaggcacatatgggtttgtgctgccagctcatggccatcactggacatccagctcacatgttcctgctgtacttgcctgatgcagaagctggtggccagaacgtcagggatcacaccggttatttcttggacatgatgcacagtgaggacagagagagtaaaaggggtctaatggatgctgtcatagacttcttgcacaagtccggtctcaaggaggaagcaggccttatatgggaggttgctgcacagaagaacgtctacccagattctgtaagggagaagagctcgtcgtattggctcatcaaccttcacct

SEQ ID NO: 280646 - DNA, 695 bp, Zea mays
tcctctgcgtccgcccacccccaccccaccccaccggcaccctcaccctcaggcctccgcctctttctcagcttctctccggttccttccttccggtcgccgattcttctacgcgaaagattcctggctgcctctcgtctctcgtctcgtttctcgcgtgcatggggctggacgtcggggagatcgggatgggcctggatctggggctggacctcaggctgttcgccgcgcggagcgccggagggatggccaagggcgctgcgccggcggggatccagtcctgcatcaggagcctcgaggtggagcgcaggaagatcgaggtgttcaggcgcgagctcccgctctgccttcgcctcctcgccgacgtgatcgacgagttgaaggaggaggctgccaagagaggagagtacgacgacggggcggcgacggtggacgacggcgacaaacggaaatggatgagcacagctcagttgtgggtggacagcgacgccaaatcggacgagtctgacaaagagcaacagagtgaaatcacgtcgccgccggagcccaagttgttgggtggtggcgcacccacgccgataagggcggccgtttcggcggtggcggtgccacaacccctaccgccgccgttgttcagaagagaagacagctccgccagctctggcctgtcgttggtatcgttgtcgccggcaacc

SEQ ID NO: 280647 - DNA, 547 bp, Zea mays
tcgcttgcttagctgttactcctagtaccccaccaaattagcttttggtggcgtttgcatattaggatatgtgggtgggaacgggaattgttgtggaggaatgggaaatataagggcatgtacaatctagacactgctgcacggtactataagtataagacacaactaaaacacaacataatacagtggtcatgtctaaaacatgtgtcttaccatattcattctaccaatcagagcattcaataaattaaagtgacctatcagctagtctcctgtctccaacatagagctaagacactgtgtcttcgtcaagatacatgtcttgagtttttttacattcaccccttagacacactttaagacacaacttaagacacatattgtacatgccctaaggggagtcggggtacggaaatggctatcctgccaattcaatcccagcgggagagttgggccttgtcatctgatggctatggcggcgatcttcaacttttggctccagcacctgcgggctagccactctgtactcaagaaagggagcagcagc

SEQ ID NO: 280648 - DNA, 873 bp, Zea mays
cctcactcgcgcgcgcgcgctgctgctctctctgagcctggcccttgccctcctctccctccgggaaccagccctgctctctatgctcctcttccattcatagcctcggccttcgtcttcctccatggatccgcgctaaatgcattgcgaggttccaaactggtagcacttctccctgctccatctgccgcaagatgtaagcacggcctcacgccctcacttgacactccgactggccatccagaatataccttcagatcttcctgtctgcgaaaagcgacgcccttttggcccgggcaatggaggagagcttcgtgcccttgcggggcatcaaggacgacctccacgggaggctcgcctgctacaagcaggactggaccggagggttccgtgccggtatcaggatcctggcgcctaccacttacatattcttcgcgtccgcgataccggtgatatcgttcggggagcaattggagaggaacactgatggagtcctcacagcagtgcagacgttggcgtccactgccctgtgcggcgtaatccactccatcgtgggagggcagccgctgctgatcctgggagtcgccgaaccgacggtgctcatgtacacattcatgttcagcttcgccaaggacaggcccgacctcgggcggagtctgttcctggcctggaccggttgggtttgcgtgtggactgccatcctactcttcttgctggccatactaggcgcgtgctccatcatcaaccggttcacccgcgtcgctggcgagctgtttgggcttctgatcgctatgctcttcatgcagcaggctatcaagggacttatcgatgagttccgcattcctgagagggaagaccgaagcgctagagttg

SEQ ID NO: 280649 - DNA, 541 bp, Zea mays
cggtacgcgtgggctgctgctctctctgagcctggcccttgccctcctctccctccgggaaccagccctgctctctatgctcctcttccattcatagcctcggccttcgtcttcctccatggatccgcgctaaatgcattgcgaggttccaaactgaatataccttcagatcttcctgtctgcgaaaagcgacgcccttttggcccgggcaatggaggagagcttcgtgcccttgcggggcatcaaggacgacctccacgggaggctcgcctgctacaagcaggactggaccggagggtctccgtgccggtatcaggatcctggcgcctaccacttacatattctttcgcgtccgcgataccggtgatatcgttcggggagcaattggagaggaacactgatggagtcctcacagcagtgcagacgttggcgtccactgccctgtgcggcataatccactccattgtaggagggcagcccctgctgatcctgggagttgccgaaccgacggactcatgaccattcatgttcaacttgccag

SEQ ID NO: 280650 - DNA, 360 bp, Zea mays
actaactccctagctagctcctagcaggcagagcagctgttctagctgtgtaagaagaataggaggactggaggaggaagaagactatcgatcgatcgatccatccatccatcgaattaatggcggcgacaacaccgtacaagcccaagaggatcctgatcacgggcgccgcggggttcatcgcgtcccacgtggcgatccgcatcgtgaacaggtaccctgagtacaaggaggtggtgctggacaagcttgactactgctccaacctcaagaacctcctccccgtcatgggctccggcggcaacaacttcaagttcgtcaagggcgacatcgccagcgccgacctcgtcagcttcatcc

SEQ ID NO: 280651 - DNA, 1290 bp, Zea mays
ggtgttgcagttggtgttgttttgcatgcaggtgctcacctgacatgtgatgttcctctgctgctgcatgcaagtgatgctgcctatgaaccaatgaagcctttctttggagacaaaaggccaccaaattactggtggtttgtaaagggaactgaagggtggacaggtgtggtcatggttgtacttatgactatagccttcgtattggcccagccatggtttcggcgtaataggctcaaggattctaatcccctcaagaaaatgactggcttcaatgccttttggtttacgcaccacttatttgttattgtgtatgcactgctcattgtccatgggacctgtttatatctaagcaggaaatggtacaagaaaacgacatggatgtaccttgctgtccctgtgctcttgtatgtaagtgagcgcattcttcggctatttaggagccatgatgctgttaggattcagaaggttgcagtatatccagggaatgttttggctctctatatgtccaagccacctggattcaggtatcggagtgggcagtatatcttcataaaatgcagtgatgtctctccatacgaatggcacccattttcgattacatcagcaccaggagatgattatcttagtgtccacattcgcacaaggggtgattggacttcacgtcttaggactgtcttctctgaggcatgccgccctccatctgatggagcaagtggactccttagagctgacccttccaaggggatcaccgcgaccaacgcgaggttcccgaaactcttgattgatggaccatacggtgctccagcgcaagactatcaggaatatgatgtgctcctgctcattggactgggcattggagccacaccattgattagcattgtgaaggatgtacttaaccacatccagcttggaggatctgttgcaggcacggagcctgagggcagtggcaaggccaagaagaggccattcatgacaaagagggcctacttctactgggtgaccagggaagaggggtcctttgaatggttccgaggggtcatgaatgaggtggctgagaaggacaaggatggagtcattgaactccacaaccactgctcgagtgtgcaccaggaaggggatgtacgttctgccctcattgtcatgctccaggagctccagcacgcgaagaagggagtcgacatcttgtctggaactagtgtcaagacgcattttgcacggccgaattggcgaagcgtcttaaacatgttgcagtgaaccacgagaaccaacgcatcggagttttctact

SEQ ID NO: 280652 - DNA, 1038 bp, Zea mays
ttgatccctcaccgctgcctccgtcgtggagccgcggcacgttcgacatactggatggcactcttggaacacacaactacgagtctgagggtgcgcttacgcttccaaagccgaccggcaatggcaatggcagtgccgctatcggcgttggcgcgaggaaatgcgctaagagagtcgacagcatctggggtgcgtgggtcttcttcaatcactacttcaagcctgcacttgtggagaactcaaaggggaagatggcgcgagacgcatccaggaacatctcgggcttcgacaagtctgatctacgtcttgatgtcttcctggtgcagcatgacatggagaacatgtacatgtgggttttcaaggagcggcccgacaatgcccttgggaagatgcagctccggagcttcatgaatgggcattccaagcatggggagccgtctttcccgttcagtgccgataagggctttgccaggtcacaccgcatgcagcgaaagcactaccgtgggctgtcaaacccgcagtgccttcatgggattgagatcgtggcctcgccaaatttgtccgcagttcctgagtctgacttgaagaggtgggctgaactgacaggcagggaacataatttttcagtaccatctgaagccagtgactttgagtcatggaggaatcttcccagcactgattttgaacttgacaggccacatccaccggccgcaaagagtgccactcatggccagaagaagggattgaatggttcaggtctcaacctttcaactccaccatcatcagacgatgggatggacctttcaccgaaatgtgccaaacgccgcaaggatttctttggccatggcgtagaggaggactgtgtgatggcgaacaattcttgttccgacagagagcaagaggcagaagctcacactggtgagccatcatggatgcacgagttcactggtgtggctaagcatgcaagcggtcctgtcactgctgccaagacgatatatgaggatgaggaagggtacctaatcgtggtgagcatgcttt

SEQ ID NO: 280653 - DNA, 563 bp, Zea mays
tatgatcctttatttgtagaaattgggaaggtgtttattgaagagcaaatcagagaatatggtaggacaagtcacatctacaactgcgatacttttgatgagaacactcctccattaagtgacccgaattatatatcttcgttgggtgctgcaacgttcaggggtatgcagagcggtgacaacgatgctatttggttgatgcaaggttggctgtttacctatgatcctttctgggaacctccacaaatgaaggcactactgcattctgttcctgttggcaaaatgattgttcttgatctttacgccgaagttaaaccagtgtggataaattctgatcagttatattggtgttccctacatctggtgcatgctccacaatttcgctgcagattttgaaatgtatggtgttttagatgctccggcttctgggcctattgatgctcgattaagtgataactccacaatggttggagttggtatgtctatggaaggtattgagcaaaatcctattgtttatgaccttatgtcagaactggccttccatcacagacaagttgatcttc

SEQ ID NO: 280654 - DNA, 582 bp, Zea mays
ttttccattcgtccgccgagatcgagcttgagcagaaacgggtggattttgaagaggggaaaaaacttgatcaacaacgagcgaaatttaagtcgcagacggctcagtacgaggatgagctaaagaggaagcgactgcaggctgaacatgaggcgcataggttaaggaaccaggagctcgtgaagatgcaagaggaatctgggattaggctagagcagatcaggcgggcgactgaggagcaaatccaggaacaacggagacagacagagagacatagggctgatctagagcaggcgaccatttcaaagaaagccatggcagaggcggaggggagaatactagtaacaaggcaaactgaagatgtgaagagacgattgattttggaggagataaatgctgacagagagaagtggatccaagtgataaatacaacatttgagcatataggaggtggtttgcgaacgatattaaccgaccaaaataagctagtggtagcagttggaggggtaacagcacttgctgcagggatatacacaacaagggagggtgcaagagtagtctggggctatgttgatcgtatct

SEQ ID NO: 280655 - DNA, 475 bp, Zea mays
tcccacgcgtccgcggacgcgtgggcgggagcggcgcccttttttttttttttggaaacaatcagagtaaaaaacgaatatgaaccgtgccaacaaaaatatagatggttgttaaaccattaaagccataatacgtatgatcgtaaaaaaatatggattgattcactaggctaaacaaaccacaagcatcaatcagaatttcaggccagagcaagaaaccagactagggaggtcagccgcgggtcaggtgtattccgatgacgtgtcgtgtgaacactgcggggccagcagataacagggcgctatttgaaccttttatacattcaaccttcaaatttgtcatggcttacggattttgaacccaaataccctgggaacgtattgctgcagcggcttctggggcttcaaatgcgggtatgtcatcaggaacaagtgggggaatgttgtcccaaagtaagtcccgtcgatgttgctt

SEQ ID NO: 280656 - DNA, 382 bp, Zea mays
tttctggagatgctagggaggctttaccagcggaggagggtacaagcgatatgagtactagcgaagcagcagagtcacaacaacattggtgcagcatccgataaggtctccgatagcagtgccaagaatactgcgcaggcagtggtgttggaggtttctagtgaaagagaagaggaaagtgaacagcagtgaagaccagtggattgactgctgaaaggaatcaatagaattccaccatatatgaatttgagacaaaaatgctccctggtttgaagcttgaaggagctatagcaagcattgatggagcgctattgctgagttttcacgggcttgccactgtgcatatactttacacatttaaaacacaaagttctgaagtaga

SEQ ID NO: 280657 - DNA, 294 bp, Zea mays
gagggaagtgaacagcagtgaagacaaaaatgctccttggttgaagtttgaaggagctagcaagcattgatggggcgctattgttgttgagtttcacgggcttgccactgtgcatatacttcacacattcaaaacacaaagttctgatgtagaccttttgtgaatgcgtttgcttttttgttttttttactattgttttgaggttttggtgggtttgttttagattgatccccccgcgtttggctgttatttgaagaggtaggttttgcaaagacagttcggtgtggctgcagg

SEQ ID NO: 280658 - DNA, 339 bp, Zea mays
  unsure (1)..(339): unsure at all n locations
cttgtttattgctgcatataccttttaggtgcttggagaaatttggtctgtggcatttaaatatcacttccgtatgccaccttactacacacttgttctccggtcacgtgcctctttggaaggactagccgtggcagcagatgggactttcaaaacatttcaagcagcatacccatatgttgttcggaagcttctgtccgaaaattcacttgaaacaagaagactcttgaatcaggcaatttgtaacaagaggaaagagttccaatggcagaagattgacgcgtttctanaattggcttcagcgaggaccaacttcaagtatagcagtgaagttttgcc

SEQ ID NO: 280659 - DNA, 345 bp, Zea mays
attttaaagggggagggggcttgatggatattttgggtgatgaccaaggggaaggcgatgagagtgatatgatggaatcctttagcagtggcgacgaggagggttggatcatgtagtttttttttgggtagtgcagccctgccgaagatggagcatggccctgtacaagtcaatatttatacgctcccattatgattgtaattattatttcctggttcttttgagcagctcctgccctgctagggaaatgtggaacataatggaagatggtgtaagtaaaggtgggaagagaacaatctaataccaatcgattaaaaatctatctatctattaattaattaattt

SEQ ID NO: 280660 - DNA, 472 bp, Zea mays
tggatcgcgcggccccttttttttttttttttgggttgttttttttttttttttgggagggcgataaacatcgattcattaaaaagaaaaccatttacatgagcagaagattacatgggaaattcacctccaatagcgggggattttgattgagatttcggcaactactaagacgtaggtacacaaaatatgctgtagggaatgctgatgtcttaacagattacataacaaaatgggggagtaatccacaagcaggttgcaatcgccaactaggccactaacttaaaaaaaacaacatcaaactaccatgttccggaatcacagaaataccaagccgtggtggaaatccggcccgccttcgttgtcacatcagcccccgccatgctttgccaccaacaccctaaccctatgcacagaagagggacacaaccaccggcaccgggctactggatttgctgtacacttttttttt

SEQ ID NO: 280661 - DNA, 774 bp, Zea mays
ctgagctttttggcaacccaaatgacattccggaactacgtctatgggcttcttatcgtgggcagaccttagctcgaactgtccgtggcatgatgtactataggaaagcccttatgctgcagagttatttggagaggatacaatctgaagatttggaatctacattagggttggctggttcagctgataggcattttgagttgtcacctgaggcgcgtgctcaggctgatttgaagtttacatatgtggttacctgccaaatttatggaaaacagaagggggaagggaaggctgaagctgcagacatagccttactaatgcaaaggaatgaagctcttagagttgcttacattgacgaagttgagaatgctaagaacggaaaacccatcaccgagtattactcaaagcttgtcaaagctgatattcatggaaaggacaaggaaatttattcgattaaattgcctgggaatccaaagcttggagagggaaaacccgaaaatcaaaatcatgccataatatttactcgtggaaatgcagtgcatactattgatatgaatcaggataactactttgaggaggcacttaaaatgagaaacctgcttgaggagttctctctgaagcgtggcaagcattacccttctattcttggtgttagggagcatgtcttcacgggaagtgtttcctccctggcctcatttatgtctaatcaggagacaagttttgtgacattaggacagcgtgttcttgctaaccccgctgaagtgagaatgcact

SEQ ID NO: 280662 - DNA, 662 bp, Zea mays
  unsure (1)..(662): unsure at all n locations
ggatgcgtgttttcgtcttggcgaccattccctcttcttgccgttgtgacgaagccgtcctgcaaagagaagaagaatacttcctatccgaagccattcaaggtgcgttcaacttcgtatccggagtccggagccattcaaggtccaagagctgctactggctgtactgtatccaagagctggtatttgacaattctccatcccactcccacctacccacgcccgcccacaggggccagggccacggcccacgggacgccggcgacgccaatacgggatggcctcgccggaactgcccggcgccaagcgtaacaacgtcctggtgccgccgtccccgcttttgcgcctcaacgatgacctcctcgccgatattttcctccgcctgcccaccctcgccgatgtagggcgcgccgtcaccacctgcgcctacttccgccgcgtcgtcgccgacagcaccttcctgcgccgccttcgctccgtccacccggcgcccctcctcggcttactgctcttctcattagtccaccccgcggagccgtcccaaccctccgngccctatgcgcgagctctgcagagggccgcagacctctccttctccttcgtcccctgcgccggccgctggatcccgatcgacgcccgcgacggccgcgttcttctggaga

SEQ ID NO: 280663 - DNA, 510 bp, Zea mays
  unsure (1)..(510): unsure at all n locations
cgtcttgtttggggggggctttgcctaaaccctcgttgctggccccttaacctcaccctaacccggccatggtgagctcggatccggacgggaacggaggcgcgccggacgtctccgagcttttctgccactacaactccctctacttccgcgattccctcggttcgtgcgctgtctcatggaccgaggacccactacctgattgtgatgtaagcacatgtgactattatccgggaggtggtggctgtataatactgctttccaaatcattatgcgggtctcataatggatctgatctgaagaatgctttgcttcatgagatgattcatgcctatatttgcatcaaagacaataacagtaaccatagtgatcatggtgcaaaatttcagaaactgatgaatacaatcaatttgagttctgtagctgatccccatcgaccagttgatggctacagcataactctgctccatgagatcccatagaaaatatatcactacanatgtcaaagct

SEQ ID NO: 280664 - DNA, 729 bp, Zea mays
tgcccgggttttcgtcggtcccttcgccatgtcttcgctggacccttcgccagcgacgagcacccaacagaagcaattggagagtttggtaaatctactgacgcagggaagcaggttctaccgcaaagcatataatgaactgttctcaggtgtaactactgagcaggatccggattcatcgactaatattcctgagtatatgctttttgggtggcatctcttcttaatgctccattcgagatcaccagaattgttcaaggacctggtgtcctgcatccatggattagttgctgtgttggccatacttttggttcacgtgccagctaaattcaggaccttcacgattgaaggctcttctcacttaatcaaacaaactgagaaaggcgctggatcttattgcttctttatgtcataactatcatacctctgaagaatgtttgaaagaaatgatggacaagtctcacaaggcaatagaagaagttttcagtatgaaagcactaagtgcttcagagtgcaaaacagagaatttggataagatagacacagatcgcctgatgtatttcaaaggtctcattgatatggagtgtttccagtcaaatctggaaaaaatggagaaactatgtaattctaataactgtgaagcggagcttgattttaaattaattttgaccaataatgattatattccctgtgccgagaatttgtcgagggattccactaatttaggat

SEQ ID NO: 280665 - DNA, 497 bp, Zea mays
  unsure (1)..(497): unsure at all n locations
cccacgtgtttggcgactctgtcccgaggcaagctttccggggttgaaggcatgaagaccaaggtggcggccggggtgaaggtggccagcgtgagcatcgagagctacaagtctgacaagatatgcttcatcgccggtgtgaagaagctgagaccgaaggatgcttatgaggtccctcgtgaagccatctctgtcgaggagttctgagctcaactcaactccattggtttgcctacgtagtatcattcattcgtagcatttttcgggtcccatgtgatcggcgattgatgtgctgtgatttggtagctttgtactgatattggaagcatgtggatctgttctgcctggcagaagataacccgtgcatgttatctgacgtgacgagtccttcacatgtgtcctggtcctggttctgcattggctgctcctagagttcacgtgttcctgttttattttatatatatggcattgcactgcatgtggntaaaaaanaaaaa

SEQ ID NO: 280666 - DNA, 796 bp, Zea mays
tgcgccaccacgcagcacgcacggacgccatcgaggaacccggggccagagcacatcacacggccggcgactggcgccccctcttcggtccccagcgcggcgacgccctcctgcttgagcaggtgtcctcttctgtctgcttgagcaggtgacttcctgggctttaggtactcgctttcgcttccaaccagcgcgtcctcagccagcgctggaggccgcccagccgcgcctgcgaccgcagaccgcgcgtcctcactcagccagcgctggagatctcctgtccgcccagccgcgcctgcgacagtgcgaccgccctcctgcccccagcactgcaagatgatactgctccagtccccatcgaggttcctgctccagatcctgcaagaccgtgttctcagtggcgagaagggcatggacattgactgtcacacggtagagttcgatgatgtccggtatcatatccagttttctatgaggaatccaaaggtaatggtgttgtcagttgctttgcctctgccacctcctgaagcgattctgtatgatgggctaccactaggtgccattgaagctataaaagcagcatatgggccagttgtgcagattcttgatcctccaaaggacgggtttgatctcacaatgaagataaatttgacaaaacttccgctagatgaagagcaaaggaatactatcttgacacaaattgcatctattagagaggttgtgttgggtgcaccactgaagctcctgctgaaacatttagcctcaaagacagttgcacctaatgttaacaaccttg

SEQ ID NO: 280667 - DNA, 483 bp, Zea mays
ttccacgcgtccgggctgaggctggcgtgcggacctaaaatccccactgatatcaaggcaactgcgcaagcaatctccctgcccctgctcattggtcagcaccagcagcaacagcagctgctggagtgctgttgcgttctcctcaagcgcaactgtgcaaggactgctggagtgcaagcacagttctgcttccactacttgaagtcgactccctcccactccagtctccaggggagagccgcattggcagcttgcctctgcccatgcccaggcattggagctcgtccccaatggcaatgcgtcaccagttcggggcttcggtgctgctgcatctactggtgttagcgggggcgggggccatggtcactgctgaccaggagagcgaccggatccgcgagctcccgggccagcccgcgaacgtggggttctcgcagtactccggctacgtcaccgtcaacccggcgcggtggcgcgcgctcttct

SEQ ID NO: 280668 - DNA, 608 bp, Zea mays
tgaccccttccacctccctccccagtgccccgctccgctttctccatcccgcctccgatccggccacccgccaccgccgacaccgggcgacccgtcccaccgccgcgccgctccaggggaaccgtccgggcaggcgggggaggatggagtccatcatagcgcgggcgctggagtacacgctcaagtactggctcaagtccttctcccgcgaccagttcaagctccagggccgcaccgcgcagctctccaacctcgatatcaatggcgatgcgctgcacgcgagcctggggctgcctcccgcgctcgccgtcgacacagcgcgtgtcgggaagctccagatcacgttaccatctctatcaaatgtgcaagtagagccaattgaggtgaacattgacaagctcgatctcgtgcttggagagaaggacgattctgaaaatctttccagccctagcagcactgcatcatctccatcagcaactaagagcagtggatatggttactctgacaagattgcagacggaatgacagtgcaagtagggattgttaacctgctactggaaacacatggaggggctcaccgtcaaggggatgcaacgtggtcaccgcca

SEQ ID NO: 280669 - DNA, 830 bp, Zea mays
gaacggacaagtgctgagatctgttgagctgtacaactcagagactggccactgggagactgtcccaggcatgaacctgcccaggcggctcgcttcaggtttcttcatggacggcaagttttacgtcattgggggcgtatcgagccagagggactcgttgacctgtggagaggaatacaaccttgagacaagaacctggagaagaatacttgacatgtaccctggtggaaccagcgcatcccaatcgcctccccttgttgccgttgtgaatagccagctctacgccgccgaccagtcgacgaacgtggtcaagaagtatgacaaggcaaacaacgcctggaacgtagtgaagccactgcccgtcagagctgactcgtccaatggctggggcctagctttcaaggcctgtggcgataggttgctggtgatcggaggccatagaggacctcgtggcgaggtaatactgctgcattcctggtgccccgaaggtggggaagatggtgctgactgggaggttctctcggtgaaggaacgcgcaggcgtcttcgtttacaactgtgcaataatggggtgctgagttaccttttgctcttcggtacatgccgccgctggtttagcaagccaaccatttcttgctgccatttagctgccctttataatgacttgtaattcagaaatgacaccccctcccctcatttcgcggagctctcaattgattgaatgttttgtagagagcatatatagagcattcagttaagttttcagtttacctggaactacttttttttcttcttctgttaaactcgttcagaattctttgttcttgcccc

SEQ ID NO: 280670 - DNA, 328 bp, Zea mays
ctttcacacagtattatttctatacttttgagtattctgttcatacctatatttttttaattgcaagagcttgaccagtggtctcttgtagggacaaaaaaaaaggagcccggcttgtcaccttctcgtttacttcgctgatggttttgcctcccatctgcagaacaacctcctgggccctggctctggctggcagcagggtacccttgctagtgacaggcgttgaaactggaactctgctaaaaaaacccccaagctggtatgacgcccccgtgaatatgatccccccataatgaatccaatgtatgaggggtcaatctcgcttttt

SEQ ID NO: 280671 - DNA, 333 bp, Zea mays
tcttcggtacatgccgccgctggtttagcaaggcaacgacccatttcttgctgccatttagctaccttttatagtgacttgtaattcagaaatgacctcccctccccgaaatctcgcggcgctctcaaatgttgaatgttttgtagagagcatatatagagcattcaaacaacctcctgggccctggctctggctggcagcagggtacacttgctagtgacaggcgttgaaactggaactctgctaaaaaaacacacaagctggtatgatgtgaacgtgaatatgatctctgaaccactgaatgcaatgtatgagcccccaatctcgcttttt

SEQ ID NO: 280672 - DNA, 647 bp, Zea mays
ccactcccccgcccacgcgtccgagctcacgatctgcatttttctgtggagctataaacaaagaatcagccgctctgatctgctcagcttctttgttcgaaagcatgacaacaggctgttactcgggtcttgaagtgatagaggagacttttccaatgacattttcagagagcaataatttggagtgtgaggatttgtgggtgtactacatcaaaatgcttcagaaaaatcttaaccgattgaatctatcaagggtctggccaagcatatcacgcggagtgcacaaatatccctacaatccaaaatcatattcagcgatgttaaccctgagttatctttacagtgtatccaacaatctccgtctcacactcgacaaatgtagtcaaagggacccttctgtgatcaccctgctctttgctctgccctttgaatggggtaaagctggatctgacaatagaatacacagcctgtttgagagagctctagctgatgataagttgcagaagtctgtcctattgtggcgctgttatctagcctatgaggcagaaatagcctgcaactcttctgcagcacggcgtgtgttcttcagagctatacatgcctgtccatggtctaaaagattatggcttgatggtttccaaaagttg

SEQ ID NO: 280673 - DNA, 839 bp, Zea mays
  unsure (1)..(839): unsure at all n locations
gtttcacctattcttaggaaaatgctttctctggtgcagtcctatgtatcaagtcagtacaactggaagtctaatatggtgtccgacctcaagaatttggaggctacattaatggaggtactcctggtagttgatgaagctgaaaggcgacatttaaaggacaggaatcaggtagcattgttgtgccatatgagagatgcagtttgtgacacagaagatgtgttagatacgtttgactataaacttataagagaaaaagttgagcaccaaagcatggctaggagcatagttgcctcttcgctttctcttggtaagcgtttagttggccttgacaagttgagatcagaactacatatggttatcaaaagcatggccagagttaaatcttgtgcagagatgtttgcaagtgttatggcagttgagagcactaactccattaagccttctgattgtgttggaactagagtcactgggtcttttccacgtgaaggaaccatttttggacgaaaggaggaggttgatgaactagtcagttggttgctgcacagaaggaatataaatccatcaaatgatgaaggatcattcactatacaactgcattctatacattaaaaaaaaatatagagttgcattctattgttggtattggaggcatcggcaagactacagtagctcaaagcatctataacgatcagagaatagtaaacgcttttgatagaggatgtgggttttctgttttacataactttgacaagattaatctaattaaggagataattgcgcatgcatctgatgatanaacatcaaattgatacatttcaatttcaatatgcttcaag

SEQ ID NO: 280674 - DNA, 536 bp, Zea mays
tatccgttgcgcgcttctcctcctcctcctcacacccctctctttctgtcggcggcgactgggcggccgtcgctgccgtcctacgccagctgcccaggtcttcctcgcgcccttcgccggcggcaaccaccgccagggtaagccagccatcagccatggctttgaaggcgagctccagcgacaaccggaccaggagcacggtatccctgtgcatagtgattggcatgtgctgcttcttctacatcctcggggcgtggcagaagagcgggctcggcaagggggacagcatcgcgctggaggtcaccaagcgcaccgactgcaccgtcgtgccgaaccttagcttcgacacccaccattctaaagccagtggcaactctagcagcctgggttctccgtcgaagaagttcatgccgtgccctgatctctacacggactacaccccctgcccagaccagaacagggcgatgaagttccctagggagaacatgaattacagagagcggcattgcccagcgcagaaggagaagctgcactgt

SEQ ID NO: 280675 - DNA, 427 bp, Zea mays
cgttgacgcgtgggcgagcaatggcacagcatgggcagccatcaaagctaggtcgataaaagctactttcttcttcctctcgccagccgtcatcggatatcatctcatgcatgtggtaaccacgcaagcgatcaaaccgttccgatcaaactctagcccggtccaaggatggtgatgacagattggtgatacagaggtacgcagggagttgtataattttttttttttgggttggcgaagagatcggccaacatgtaagctaagctccaatcaagggaagaaaaccatagctatatgtgacagtaataatacatgcatgcattcatcatcttttaaggttggacattgcatccattaattgtagtaataatagatcatatgatccaaatgattcttcgcaattagttcacaagtaaatataaatata

SEQ ID NO: 280676 - DNA, 596 bp, Zea mays
tacagatccagcagcatgcagtgaaacacactgccatcacctagctagctacaaacctacctacaacgaggactcgaccgatcatcgttctcgagagtgagctactgagctacgatgaggtgcacactggtggtatggctgtctctggtcgtcatggccgcggccaccgccgccggcgatggtaatacgccggagccgaggccggtgatcactccgaagccgaagccaccacggccgtaccagccgaaaccgacgcctcaaccgtaccagccgaaaccgacgccacagccctaccagccgaagccgcagccagagccaggacacccaaagcccacacctcagcccaacccaacaccggaacccaccaaaccgaagcccacgccgcagcccgagccgaaaccaaagccccagccacagccgtagccgatgccggagccccagcctggccccggcataccctagccgaagcccccggcgtactccccgggcacgcccggtccttgatcgtgttcgtatataaacacgcatgccgcatgagcttcgtatatataaataagcggtcgccatgcatgcatgcacacgacacgatgatgctt

SEQ ID NO: 280677 - DNA, 676 bp, Zea mays
tcctcgcgtccgcggacgcgtgggcgaagtctgcacgctccctttctcccgcttaaaaccttcgctccgtgtcgactctacttggccgggcattttctctcgcccagtcctggctcacgtcaaaccctagggccccgggcctcctactcgtaggctcagatccaatgggcgcggcgccgtcgacgccgaggctgggcgcggcaggcgcggcgccgtcgcccagcgcggcggagcagatgttcacggcgctggtcggcgagaaggcctacccaatctcctccgagttctggaagcagctgctcgagctgcccctcaccctgcagtggccgcgcgaccgcgtgctgcaggcgtgccacgccttcgccgagaataactacccaacatagcatcttgcaaagattttgatccatttggtttggtgcttgcaagagtgcacctcaacaacttctgtatcttctgtcgtatatcggagggcgatcaacgcggcatacatatcatccatatttctcaagttcatcattgaaaacgcaaaaaccgacagttggcaagagctatgccttgacattgacaggagtgagaaggggttggaaaaaattccagcagaaaacacggtggagtattttctgatgagaggtgtgctggactatattggtagtgtggatgtaagtccggagtt

SEQ ID NO: 280678 - DNA, 1001 bp, Zea mays
ttttacgcgtgggccgagacagacacacaccagagggagagggagacggagagaagggcgagcggcactagcaagcatggcggcggccgtcctagcgcccaagccgcctcctccgctgcctaccagggcctttccttcctcatccccctcgcggtttgcccctgccttcatctccccgcgtcatcccctgagaagattgctcctccgccccattccgtgcgcctcatcgccgtcttccgtcttgatgccgaacccggacctcgagactgagcctgcccacgatggagatggagatggagatgaggcgccgccggagtccaggccccgccgcatcgcccttttcgtcgagccgtctcccttcgcctacgtctccggctacaagaaccgcttccagaacttcatcaagtacctacgggagatgggcgacgaggtgattgtggtcaccacgcacgagggcgtgcctcaggaattccacggagccaagctaattggctcatggagcttcccttgcccctggtatcaaaaggttccgctgtcgctggccctcagtcctcgaatcatcgcagaagttgctagattcaagcctgacattattcacgcctcttcacctgggataatggtatttggcgcgcttatcatagcaaagttgctctgcgtccctctggtaatgtcataccacacccacgttccaatttatatacccagatatactttcagctggcttgtcaagcccatgtggctaataataaaattcttgcaccgagctgcagacctcacactggtaccatctgttgctatcggcagggatcttcaagctgctcgtgttacagcagccaataagatacgcctttggaacaagggtgttgactcagaaagcttccatcctcgtttccgcaacatggaaatgcgttcaaggctaacgaatggtgaaccagaaaagccacttgtattttatgttggacgcttaggagttgagaaaagcttggattttcttaagagag

SEQ ID NO: 280679 - DNA, 521 bp, Zea mays
tcgttcgcgtgggcagaaccatcctttcccacaactgatggttataatctagatactgatccatttttggcagacagaagcaacatgaataaatcaaatcaaggtattcatatgagcgaaaatggtgctgttggtgtatcttttgaaaagaataattataatgctgatgatgaaatccactcaccggaaaatttatctggaaacaaggtgtcaaacaactattttggttcagatgcaatgagtggtaatggggatgcaacttatcctgccaaaagtaatgcacagcagcctagcagttgtgctcctgacgtgagagaacaatcaaaagcaagcatcacagtttatcagcctgacatgagtgtctatttaacttctgacatggtcagttcttgtgagggatcatatgtttctgccggtgagccactgcaaaggagcttgtcatctggaagaactattgggaaagtaactgtggtgaataaaaggccttcttacccatcaagtaaggtggtctcagcacaaaa

SEQ ID NO: 280680 - DNA, 447 bp, Zea mays
gcgtcactcgccctcgccggaccaccacccggtgcggttttccgcctgtgcctcctcctgtagaagccgacgcacaaaacccaaaccctaaccgcctgccctccgaggcgcgccagatcggcggcggcgcccactgccgcggctccggatccaatgcagcggctgccgtagcgcgggagctgccgatctgaggcggcggcggcggcgctggcgcacgtgggacagggatgtcgcctgcgccggtggcgggggcggcgttcgagcggtaccagcagcgcggaggtggcggccccgcggcggccaacggcaacacggttttcaagagtgggcctctttgcatatcatccaaagggattggatggaaatcatggaagaaacgttggttcatcctcacaagaacatcattggtttgcttcaagagtgatcctagtgccttgccccagagag

SEQ ID NO: 280681 - DNA, 657 bp, Zea mays
gctggctgcaatctatctccttgcagtaagcaagggcagtgatagtacgacgacgacggcccagcaacttgctcgaacagagaaaaaaaaaagaacagcacctaacctagggaagattgacatggcggagaacaacgtcgtggccacgtactactacccgacggcagcgccggcggccatggaggtctgcggcgcggagctcggccagggcaagcccgacaagtgcttcgacgacgatggccgccccaagcgcaatgggacgatgtggacggcgagcgcgcacatcatcacggcggtgatcggctccggggtgctctcgctggggtgggccatcgcgcagctcggctgggtggccggacccgtcgtcatgctgctcttctcgctcgtcacctactacacctcgtcgctgctcgcagactgctaccgctccggcgaccccagcaccggcaagcggaactacacctacatggacgccgtcaacgcgaacctcagtggcatcaaggtccagatctgcgggttcctgcagtacgccaacatcgtgggcgtggccatcggctacaccatcgctgcctccattagcatgctcgcgatcaggagggccaactgcttccaccagaagggacacggcaacccctgcaaagatcttcagcacgccct

SEQ ID NO: 280682 - DNA, 528 bp, Zea mays
catgcatagtaatagtggcatcagctcttcagctaagcatgcagtggccattcactcggcgtccgcggccgcgtggcattctgtagaggtccttcaaacagacaaaggtgaaggtactggtactgatttgtcctgggtggaagaatgttcacaccatgctctggataacacaccaatgaaaaatggaaattctggtgccccggctttcttggcttcagatagtggtatcaaggacaatgttcgcatctcaaacataactgctgcttccaccgttagtcctgcattcacttcaagttatcagcattctgtacctggagatatgcccctgccaaaaccaaagccacttgttaccccgcttaccccaaaggatttaatgcctgtgcagttcagttcagtgcttcctgaccccactgcaattcgtttcgagggcatagcctcaataactacgcccaacttcgaggacactggcaacagagtcagtggtgctctaggggctaaagagatgagcaagtacccagcttttagaga

SEQ ID NO: 280683 - DNA, 535 bp, Zea mays
tcggacgcgtgggcgaagccaagattgccagggcattttccccaaattcctttccccttcgatcctcccctgcaaaccaagtctcaacgaccatggacgccttcccctgaccgcgccccactgccccagacgccgtcgcctacatccatgagacttcccgatcttcctgcggccgaggatgtcccagcgcgacgtcgactacagttgcggattctgtggataccctctaaacctttcatcttctaaccgaagcacgtctgaagtaggctcctcatataagaagtctctgaagaagggattgatttcattcatttctgttgatctaagccgatttactcaggtggacaaggtatcttgctttcccctcacctggcgcagttacaggccaaaaactaagcttctctgccgaaaatgcggagcatcgatcggctatggatacggtgagccagctgctttgcgcagttttgatccagcaagttcatcttcctccagtacatcccagaagtatttaataaagatccaagcactccaacct

SEQ ID NO: 280684 - DNA, 419 bp, Zea mays
ggaacaggcaaagttggattcatgtttgcccctattttggcattatggttgggtaatttgggatccatcggaatatataatcttgttaagtatgacatttctgttgtgagagcattcaatccagtgtatatatatttgtttttcgagacaaacggcattaaggcgtggtcagctcttggtggttgtgtcttgtgcatcacaggagctgaagcaatgtttgctgatttgggccatttctctgtcaaatcaatacaggtagcatttaccgccgtcgtattcccctgcctgctaattgcttacatggggcaagctgcttttttgatgaaaaacccacttgttgtagaaagaatattctatgatcctgtaccaggggttttattttggccagtatttgtgatgctaactgcagctatgatgca

SEQ ID NO: 280685 - DNA, 416 bp, Zea mays
tctttgcttcccgcacagctagagcgctcgaaccccttcccagccatggtcgtgcctgaccgtctccctccctgcgtcttcctccccgttcgttctgctcgccctgcatctatggagctcggcgcccatctctgatgtcttcttccccagctcgatctttcctccactggaccgcgcctctgctcctccctggaaccatggccgcgcccctcagctacctgctcgccaccatccggtgcttcttccggtggagcagagggcaacagtagacgtggcagccaaaaccaccgtgcagcctccttcaaccggaccaagcaccgcccgctttccatggccgcgcgccctggagctcttccccatcccctccccaagctttctctgctcgtcctgcgcgcgctcaaatttcttttcatctc

SEQ ID NO: 280686 - DNA, 747 bp, Zea mays
cccacgcgtccgagaattgtgaggccagcatcagtgaaccgcagtcaaggggcagctagtacagatgcggataggcttgtctgggcaatccagcgcactcataactctttagaagcaacaaggcggcaaaaactagatgacaacaacttgtgtggaaacggttctgctaagaaggatgagtcctgtgactgcaactccagctttgagtgcaatatctgtcttgacccagctaaacagcctgtggttacaccctgcggtcacctcttctgttggccatgcttgtaccagtggcttcatgcacattcaccccactctgagtgccctgtatgcaagggtgaggtgctagaactgaatgtcactccgatatatggaagaggcggtgaagaagggaattccaccaaccctgacttcccacctaggccacgagcaaacagaagggagagcctgaggcaacagctgcaaatgacagacacaagaggaattgcaacagtggtgaggcagttgatacaaaaccagggtataattagcgttctcccaagcccaacagggatcgagatgtcggtggttcctgcaggccggcaaagggctagggctcggagacagcacaggcaggataataatgcatcatcttccatacacgttgtagcgcagaatatgggcaatgttgcccctgagagcagcaaccaaatccagttgtcacattctaacggtgacaatgctgcacagatggttcttgcagctcctcag

SEQ ID NO: 280687 - DNA, 732 bp, Zea mays
  unsure (1)..(732): unsure at all n locations
tttcaaacccgtgccattctcgccgagctcgacaaacgcttttccgccatcgattccaagtgggagctccgcgtcggtgccctggagtcccaagcgaaagagttcgcccgccaccacgaggacatctcctccacgatccgggcggatgtcgaggcgcacctctcagcggccgatgcggataccctggaccggatccgctactgggaggcatccacaggtgctcgcgttaccgccctggagtccgccatccacctgctcgatacttggcgtcctcgaatggggtcttcagtggatgctttccacacctccatggatacagttcacgctgaactgtccaaaatggagatccaatggtccaatggagcgcgcgttgacggcttctccaggcccagcctccttgacgcgcgcgaatcggcaccggcgcgctcacctgcgcccgtcagcttcgccgatggctcatgttttgggccccgcctttcctctactaaccgggactgtggatttgggccctatgtggtcgatctccacttcccggtcaggggtacgtggtctcctcaaccccatggttcatttgagtttcctgcccaccataatttcagtcctggagaactagagcgtcgtggactctcgagtcgcgggttgggtggccttcctaaacttagtttnccagtattcaatggtacttgtcgcacattatgggcaaaacggtgtgaagactattttgatatgtat

SEQ ID NO: 280688 - DNA, 666 bp, Zea mays
aggccagcgcccctctttctctttgtgatgtaggcggcatgcactgcacgatagcgacgtggcgcgcccatccaattccgtgagcccatccagttcgtgttcgcgtaagaataacggcagccagccacagcccacaggcccccaaggactctcgtcgctcgcctttcccccaactttctccccccgctcggccatacggccactcgcctcgcctcgctgaaaccaatcgcctcttctctccctctccctctccctccaatgcttcccaccgatcgctcctgaagcggctcaactgctccagattttctcgaggctgaaattttggtgtccttgctcagccatgggtagtaggagatatgacattgatacgaggagatgtgggatccactcaagaccaaccaaatcaatgtatctggatgctcaacaaatcgtcagctgccaaactagagtgggagaccacgatgttggttcctgtgctgtgaagcatcacttcccgtctccaatcgtatcttggatagaagatctttccagctttggcaatgcttcttttaatcctgtctctgaatatgtggatgagcaagccagagcttcagtgggacagtcttcagcatcaagtaatttgcatgacatgcaaatatcagtgagattgacagccgaattcatgga

SEQ ID NO: 280689 - DNA, 663 bp, Zea mays
agctgccccgcctgcagcttccgctccagaatcccttggttcgcccacgctggtgaccacgcgtccgcccacgcgtccggtccccgaggaaccatcttttccctgcccaatatgttggaataagatggaggagccttccacgacgacttgtggccatgtcttctgcgacacgtgcatcaagcaggccatcaaggttcagaagaaatgccctacttgcaggaaggggctgaaaatgaatagtgttcatcgtatttaccttccgaacggttctagttaagctgagcagctttacatatctgatggcttgtaactttgggggcaattagcttaacctctgttatccgatacatgctgactggctttgtcaaagaaacttctggtaacgtaaggctgtgcaatgtactgtgaggatcaggaattcttagcctgaacagcagatagatgtttcatcccagtctgtattatttatcggcatcaccaggagttcatcatgagaacttcctgactagggaagtcgatatcagcctcagttttactctcttattgcatccatggttcccagaatgtgttgtcttgttaggatgtgaccatcggatggtgcatatgaccgtgcaaaaacattattttgcaccgtattctgtattatttatatagtagagtttt

SEQ ID NO: 280690 - DNA, 751 bp, Zea mays
tgaggatgccatttggctctggggcatgtctgttgtctgcgaactctggcttggcttttcatggctgctcgaccagctgccaaagctgtgccctgtgaaccgggccaccgaccttgccgtcctgaaagacaagtttgagaccccaacgccgtccaaccctactggacggtcggatttaccagggcttgatatatttgtgtctactgctgatccggagaaagaacctccactggtcacagcaaacactatcctgtccatccttgctgctgactaccctgtggagaagctctcttgctatgtttctgatgatggaggggctctcctgacttttgaagccatggctgaagctgctagctttgctaatatgtgggttcctttctgtcgcaagcacaacattgagcctcgcaatcctgacagctacttcaatcttaagaaggacccatacaagaacaaggttcgccaggattttgtcaaggacaggaggagggtcaagagggagtatgacgagttcaaggtcaggatcaatggtctgcctgactcgatacgccgacgctctgatgcgtaccatgccagagaggaaatcaaggctatgaagaggcagcgtgaggccgctcttgatgatgcagtggagcctgttaagatccctaaagctacatggatggctgatggcactcactggcctggtacttggattcaaccttctgctgagcatacccgtggtgatcatgctggaattattcaggtgatgctg

SEQ ID NO: 280691 - DNA, 487 bp, Zea mays
ccgagacccagctctccatggaaggcgtcaacatgccctcgtccccgctcgcccacgcatgcgcgcgcccacgtggctgggcagctcccgcaccctagcctgtgccttcgccacgccctcgcccacgccaacccctgcctctctcccgccgcgtccgcgttccggatctgtcgcctcccgccgcgccctgcctccctctcccaaccttgccagcaggaccaccgtcggcgatgcctccctcctgtcgcaccttacctcctcatcccgacctctccaccacgcccatgtccccattgtcgctcgtgctgggcccgtgccagactcatccacgccgctgatgtagagcgtgcgctaggcgagggggtgagtgcgtgaccgagatagaggctgcgacaacctccccggccaccttgccatctccatcgtcctcggggccaatgctggtagaggcactttggttcctggatgacctacaaggaatgggaga

SEQ ID NO: 280692 - DNA, 537 bp, Zea mays
ccagcggccagcaaaagccgcggcggcgcggccagggaccgacgtacccgccgcgagaagctccggttggcaccccaacggcatggatgctagcagcgtcagcccgtgcgatctagacagggagtttgcgctccaaatcgctcagctcctcgccacgcctcctctccaatcagcccaggaatactatggtgaactcatacggtccaagaagcttgatggcattagagtgagctacagtggcaagcatgggaaaggtgtttatgcaaatagggactttggtgaagacgaccttgttctgaaggaccaaatgttggtcggtgctcaggacagccttaacaagattgactgtgttgtgtgtagttactgcttccacttcattggttctatagagtaccaaattgggcgtagattgtatttgcaaagccttggtggtagtggtgatggcactaccgagagacactgccatgggagtgatgttgggtcaagtactggctgttccggtgcatcaaatggaaatagcaatgctgtgccacaaga

SEQ ID NO: 280693 - DNA, 417 bp, Zea mays
tccgcaggaactcgtggaaactgcaactgcagtgatggggattatggtggtgactacccgatggattattattcgcaagatggaggtgattggaatagctgctacatgaagaagaagccatctactggcgagaggaaactgcgggttcggattggcaacgaaattcaagccgaggagaagcgtgggaatcaggattctcgtgagctagtcaggtgaatagggataccgagaacagcttcatggctcaaaaaggatttttgacaccaggttttagtgtgattgtaacgatgtttagttaccagagggaaaatcttgtgactgtacctgtatcgatgtatccaccaccccatatactgtaaatttgttacgtacaatgtctcattgtaaacatcttgagaaggtatgaggtgttgtcat

SEQ ID NO: 280694 - DNA, 650 bp, Zea mays
  unsure (1)..(650): unsure at all n locations
cgtctctcttcaccgttggtgccaagttcacaagtatcagatctggtgataaatgaccgggaaaaagaccacggcctcctctgccggccgcactcgaaagaaggccaaggtggtgttggaggatgaggaagaggcagggttggaagatgaggaagaggcgactgtgacactatccgtggagaaggacgcactggagtgtgacatctgctgcctacccttccagtccgaagtttttatgtgcaagaacggacattctgtatgtgcaaaatgctgcatccgcacgaacggtaagtgctggacctgctccgagcgcattggcgacatacgttgccgtccgctcgagaagctcctggcggcggcgaccacctcctgcatgttcaagagcaacggctgctacgacgtcatcagctacctggagaaggtgacccacgaggagacatgccagcgcgcgccgtacaagtgccccgtccacggctgcgcctatagcggcctgcggctcggctaccacgtcgcacaggaccacggccacgacgacgacggnctcgccttcgtcgtctntatctacggcaaggcggtggcgaccgtgcgcaaggacgaagccgtccgcgtcctgctgcagcgcaacacggagcgcgtgttcctgctgctca

SEQ ID NO: 280695 - DNA, 460 bp, Zea mays
gaggaggggaagcagagagggacggcccttctcgtcctcgcaccctgtgaaacgcggcccgcgaccgacagcagctcgctcgctgtcatctctcgagatctcaagcagttcgttggttggccattttctttttctttttttgatatacttgctagcttggaagttggtaaaagatgaactcaacacgccgagcttcaaaagcggcaaagtcaacaatcaattaccacaggttttcattagatgagcaccacttatttgagccagatgctttgattaccaaggagcgagatgccaatcatcaatcaaggcaaagttctcaatcttgcagaacatatgcatacagaagattgaccactccccagcttgtatctgcattgtctggaatctggaatcttgttggccagccttgatcatctggcacagctcaaagatctagtattcatgggatttcgagtaggga

SEQ ID NO: 280696 - DNA, 750 bp, Zea mays
tccttattccttttttgacccacgcttgctgctcaccctctcaccgaatcacacacacaggcaggccagtgaggcaggggcacgaaggcgcggctccctctctcaagcccctcgccattactcgctcataaaggaagaacagagcgagcgggtagcgaggaagaagctgggccgcggggcaagaggagagaggtccccagccgtaggtctgctgtgcaactccggctcgccgcctgccaaccgcgcggcgcggccaccacgctaggcccctcgccctcctcgtaggtgaacagagcctgcagtcgatacaacagtaaattccgcggcattccattcgctttcccctctcgaaacgcaccctgcatttactgcacgtcgctcgccctccggccatccgcgatcttcaaatcttccactgtaaaaagcgggcggagacgggaaggccgtgcgctcaaggatggcgcgcgagcagctggaggagtccatcgtggccgacggcaacggcaaggaggaagaggtcggggtcatgggcatcggcgccgcggacggcgccgacgaccagcacggcggcggcaagctcagcatgaagagcctgctgtggcacggcggctccgtctgggacgcgtggttcagctgcgcctccaaccaggtggcgcaggtgctcctgacgctgccgtactccttctcccagctggggatgctgtccggcgtgctgctgcagatcttctacggcttccttggcagctggac

SEQ ID NO: 280697 - DNA, 1011 bp, Zea mays
cggacgcgtggcaaaagggtttctccctggagccaaatttgttcagtgctaatcatatatcaaactccaatggtggtttggcagagcgcagggctgcaagagcaggtttcagtgtcccgaaaattgatacttctcgagttggttcatcagcagttattcgatctcctgtgtcaattccacctggtctaagtccaactacactactggagtctcctgtttttctttacaataaaatggcacagccttctccaaccactggcacgttgccatttttgacggctacgaatgataagtcgacaataccaccagctaccaagataactgaagattctgcagtttataatgatgtgttttctttccaaccccacttaggttctaaagaaacaggtttctctactgcagaaaaggactatggcgcctatcagcaaaagcattcattgtggaatattcatcagcaggaatccagtcttcagtcaagttttaccgcagtcaaggacaacactagtgcaacaattggtgaaacgaagacatctagctccatgttcagtgatagtcactattcagctgaccaacagcaagctgacgagacaaacatgaaggtgctaggcagcggtgtcgaggctagatcagctgcttttgctcctgtatcagcgcacagtgatgcatctctcctggagtctcaagaagcacttgatgtctcctcaacgctgtctaatgaagaggacgagagggcaacacatggcactgtttctatagagtgtgatggtgatgaagctgagactgtatctaaaagaaggaagctggaactagatgctttagaagctactcttactgctactacctccaccaccagtaccatcgacatggggcctgcagcctcaagagctgtccgggagcctagggttgttgttcagaccacaagtgaggtagacattcttgacgacggttatcggtggcgcaagtatgggcagaaggttgttaagggcaatccaaatccaaggtctcactttc

SEQ ID NO: 280698 - DNA, 483 bp, Zea mays
acgacccactggtgccagcatacaacaacgagtccctttcgcctcttgcccgttgcccctcggtttcgtcgccgctacccggcgatctccgcgacagcgacccggtgccgccgccgcagatctcgccgagaagacaggtatcggtgccgccgccagatcaactggacctgtaaaacgagggcctgcgctacctgtggagttcccgaggcgctgttctgccaggattcggcatctttggttgcccacatggccacttccacatctcagcatgcgctttcatccatcaaattgctgtccacaggctgcttgcatcccgataagagaaattgccgcgtgctttctgtttcagtagggcgtcgctgccccagtgcccgcaatttgggtctactttgtgcttcaaactctcaatcttcagtgattgagccggtccagctaccgaggagcccttaaagtggcgtatgttcaaagaaatccggtgaaagt

SEQ ID NO: 280699 - DNA, 397 bp, Zea mays
  unsure (1)..(397): unsure at all n locations
aggaggttcgtttcttcgccgaccacgccagccctgactggggactctacgtcttcgccgccgcgtggtcgctcgacatgatggccaccggctacgtctggatcgccaccgactggctcgccgccgccatcgacgctgctggtgctggtgctgctgctgctgctggtaatatacagggtgtcctcatgctgcgccagtacaccccggactcggacgccaaggcgtcgctcgtctccaggttcgcggccaaacagtgcaccaacgcgtacggcctcttcgcctacgattccagctggatggcggcgcgcgccatcgaccagtttctcgacgacaacgccagcggcggtaacgtgtncttcttcgccgaccgcaacatccgggacgccaacgggagcgc

SEQ ID NO: 280700 - DNA, 864 bp, Zea mays
tccccaccctgccggcaaatgcttctcctgcacaaatctgttcccctccgcctgctccttccacgccgtcctctcaaaacctttctcctcccgccgccgtctcgcccccgctgtctctcgctcctcccacgcgctgccatgggctccgtagctggagacaccgccgcccgcctcgcgtacccgccggcccgccgcgacgattcggtcgtcgacgactaccacggcgttcggatcccagatccctatcgctggctggaggacccggactcggaggagacgaaagagttcgtggcgcggcaggcggagctggcggagacggtgctcgccgggtgccccgacagggagaacctgcgccgcgaggttacgcggctcttcgaccacccgcgccacgccgcgccgttccgccgcgggaacaagtacttctacttccacaactccggcctccaggcccagagcgtgctctacatgctgggggatttggacgggaaggcagaggttcttttggatccaaatactctaagcaaggatgggacggttgctctttcaacatattctatcagcgaggatggaaactacattgcttatgggctaagtgaaagtggtagcgattgggtctctattcatgtgatgagcattactaacaagcagcctatgcctgataaattatcctgggtaaagttctcatctatcagctggacgcatgacgggaaaggttttttctatggtcggtatccagcacctagaggaggggaagtggatgctggaactgagacaaacatcaatcttaatcatcagatatattaccatgttttgggatctgatcagtcagaggatatattgtgctggaaagatcccgaacaccca

SEQ ID NO: 280701 - DNA, 602 bp, Zea mays
gtaatgttaatgcatctgccattaatgttataaataccatcagtttgcaggaagtgcatatcagaggagtttgtaaataaggaagtgtgctgctgccctgtttgtagcattgacttgggctgtgctccactggagaaactcagaattgatcatagcctacagtatgtaaggtcaaaggtatttccttctaaaaaacgaaaggttgaggatccagaagtcacatcgccaattacatcacctataaagacgaaagtacggtctttatcttctttgacaaaacatgctcctcaaatgtctatgcaaaaatgcttgagaaagaggagaacaaaagcttcatgcttacaaaacctccctttgcactcaaccttgcggggcagtagtaatatcacaaaaaaatctggggggtggagaccttcagggtgtcactttcgagcagctaaaaagaaaaggtctcttagacctaaatcagacgatataaagaccagctggaaaaaggactgatgatccagctgatgtaactcttgccagtcaagcatagactaggaagcagattacaagacgtggaaatctggagaagagaactggaaccaagaaagtattga

SEQ ID NO: 280702 - DNA, 355 bp, Zea mays
acgtcgccgagctgaagcagcgcctggtgaagcggctgggccgggtgcgggcggccaagtacttcgcacacctcaccaggctgctgaatctgaagctcaccaaggtagagttcgacaggctctgcttcgccaccatcggcaaggccaacatcgcgctgcacaacgcgctcattagggggatcataggcaatgctctgtcgggagtgcctccgcccagccggcaggcggtgacggggcagtcgggcaccaccaccgccccgagcgggcagtgcgtgggcgtcgcgctgcccgtggtggggaatgtgggggcagtggtcgattccggtgatggtgagctggccagggagcttggggc

SEQ ID NO: 280703 - DNA, 418 bp, Zea mays
  unsure (1)..(418): unsure at all n locations
gtccaggactaaggagatgagttggattatgttgtggttggctctgaatacccgcgtgagtagtgaccaacacaactcactgaccatgttacaggcggaggtgatgttgaacacggcacatatggaggacagaatgtgggatcctggagtatctgcccaagtttcacctaggccaggacttatgcccttacctccatctcctttgtctggtggcaaggccacgggactgaatgaggaacaccaaactctagggcctttcagttccaaggatgaggatggaaggatggccgctctcatatcttatagaaaagccaaggggctctgtttggttattttgcagntagaagctacaattcgtcctgatgcaagggaacatctcctagctgttcagtctatctctgtactgactggtactact

SEQ ID NO: 280704 - DNA, 436 bp, Zea mays
gggtgtacactccgaagcggctgttccaccagctggagtcggccaaggaggagttcatccgggcgacggccggcgtgtggaaggagcagaagctgctgctccccaagctggtggaggcgtacgccaaggacgtgaagctctcgccgcagggcctcgtggacatggtccagcgctacctcccggagagcatgaggatggccgtgcagcggtgccagcacggcggcaggtcgtcgggcaaggtcgtggagtgggtgtcctacaacccggccttccgctacctgctcgccagggacctcgcgttccctcacctcagctgaccgttcgttaatctttagtagtatatgcgtgtgtgccatagggttagaagtagagaagggatcatgtgcagtttttgtgtggtggttgtcaatggcttttctagatgatgaacaggaaa

SEQ ID NO: 280705 - DNA, 527 bp, Zea mays
  unsure (1)..(527): unsure at all n locations
tcgtccacgcgtccggctctctgctcccatccccgcctcgtccgttaccataaatctagcttgggctctaatctaaccgaggcaacaggtgggatatgaggaactcggtgtcggagcggagcttcctcatcgagagcgacgatgacgacgatgccgccgtggaggacgggaagcggcgcggccttggcggcggcggcggcgacgacgacgacgggtccgactcctcgtcgccgtgcgacagcccgcgggtggtggcggcgcggtgcagccagccgagttcgtacacgcagcaatggccgcagagctacaggcaatccattgacatgtacagcagtgtgcactctcccaacctgagcttcttgggcacgccatcactgagccggttgtccaactcgttcctcacaaactcattccgggggaagccacctgagatcatctccagcttaatcaagccattactgccgacaagcattgcttccgccagcgatgaccagcagcagcagcagcatgaggacgtncggaagagc

SEQ ID NO: 280706 - DNA, 660 bp, Zea mays
cttacgcgtgggtgcgtttgctggtcaccgtggagtcagctgtgaattgtcgtctcctgacgcgcccgtttcccctctgcatctgcagtgagcaagttcaactcactcaagacgagcaggaagggggttgtggcgatggcgatgatcgagtacccgtcgctggaggcggcgacggggaagttcagcgcgagcaacgtgctcggcgtcggcggcttcggttgcgtctacaaggcggttttcgatggcggtgtcgccgcggcggtcaagaggctggaagcaggcggccctgaatgcgagaaggaattcgagaatgagctggatttgctcggcaggattcggcaccccaacatcgtgtccctgctgggcttttgtgttcacgaggggaatcactacattgtttatgagctcatgcagaagggatccctggacacacagctgcatggggcctcacatggatcagcgctgacctggcatatccggatgaagatcgcactcgacatggccaggggattagaatacctccatgagcactgcagtccaccagtgatccatagggatctgaagtcatctaacatacttttagattctgacttcaatgctaagatttcagattttggtcttgcagtgaccagtgggaatattgacaagggaagcatgaag

SEQ ID NO: 280707 - DNA, 974 bp, Zea mays
  unsure (1)..(974): unsure at all n locations
ccctttcatttgatcgccatcgcgcggattatcctctccacgctctacgcgtggatcctgtggcggcggtccccccggctgccccgcggcactgagcgcagacaccgcgagggggatcatgctggcgccgatcctgagcaaggtcaactcgctcaagaccagcaggaaggggctcgcggcgatcgatcgagttcccgtcgctggaggcggcgacgggggagttcagtgagagcaacgtgctcggcgtaggcggcttcggttgcgtctacaaggcagtcttcgatggcggcgttaccgcggcggtcaagaggctggagggaggtggccctgagtgcgagaaggaattcgagaatgagctggatctgcttggcaggattcggcaccccaacatcgtgtccctgctgggcttttgtgttcacgaggggaatcactacattgtttatgagctcatggagaagggatccctggacacacagctgcatggggcctcacatggatcagcgctgacctggcatatccggatgaagatcgcactcgacatggccaggttcttatgattttacccctgcactttccttgagatgaatttaaaattgaggtgctgatgattggctgcccagtagtttataacattgcactggttactcaaactgggcaggggattagaatacctccatgagcactgcagtccaccagtgatccatagggatctgaagtcatctaacatacttttagattctgacttcaatgctaaggtacgcttcccttttttctttaagtacaactcactattcgtactgttcttcgtttcacagtgctgtgaaacagctgaatttgtggaagttcatatcttttctttgcccacatggtgcagatttcagattttggtcttgcagtgaccagtgggaacattgacnagggaagcatgaagctntctgggaccttgggtatgtggccctgagtacctattagat

SEQ ID NO: 280708 - DNA, 798 bp, Zea mays
tgttttctggcatgctggagcccttgagggtagtgtctgcgcattagtggtggataggatgggccaaagtgaccctattttggaggatgaagtcaaatatcgctattacaccattatccagctatacagaagagccactttacaagataatgctcaaagagtttcacctgtgagctttgagcttgaagctgccttgaagttggcaagatacttgtgcaggcgagaacttgccaaggaggtctcagatttgttaatgggagctgctgatggtgccaaggctcttattgatgccagtgatcggctcatactatgggttgaaattgcaagactttttggtacactcggttataagcgcaaggcggcctttttttcaagacaagttgcacaggggtaccttcagcaagacaatgcatatgctgctatgagtgctatgcaggttctaactatgactaccaatgcataccatgtccaaagccgaaagactatgaaaatgaatcatgatccgtccaaggaacctcgtgctggcaatactgattctggaaaggtgcaccctcagtctatagtgtcattgtttgagtcacaatggagtacccttcaaatggtggttctaagagaaatattgatatcgtcgatccgggcggcagatccactctcatcatggagcgctgcagctcgtcttcttcgatcattttacccactcatcacaccagcttgtcagagtggcctagcaagctcacttgcaaacgctgctgacaagcttccacaggcacacgctgtgccgatccatgttttccttta

SEQ ID NO: 280709 - DNA, 629 bp, Zea mays
actggggagtagtgaggcgagagcttctccccgcgccgccgccaaaaccctcaaaacccgagacgccggcggtgaagaggagagggcggaggcggagatggcgacgcggatgaaggacgtggcgcggaggtcgaccaagaagtacgtggaggaggcgctgtaccggcgtctgttccggaaggggtcgacgccgcaggcggttcgagaggaggtcgatggcttcctcgacagccggaagcgggcgttcaagtgggaggtgggcgtttgcgtccgccggatgcggcggaacgcgctctaccgcccgtcgctcaagcatggtttttaaagtggtaagacgagacaaggcgttggaccaccgcctggacgcctaggcgagctttctgaagttatggcgagatgaggcatgaatcctactgtttgtgatcaagcaatccgcctggatctcattgtcaaatcgagaggcatctctgctgccgagaagttctttttggacctcccagtaacatccaagactcatcttacttttggggctcttctcattttttactgaaagagttgtgactgacagtgccggtccttatggagaatgaaggagtttacttgttttactgcctgtgctttacagctta

SEQ ID NO: 280710 - DNA, 469 bp, Zea mays
tccttcgtcaactagacactgccatcgacatggacaacgttgacggccacctacacaacaacctacctctcccccttgccactccaattcttggttgccgaccaagcgttccccaaggtgaatgccagggcggtggggcaggcccggtgggagcggcagtggtgtgcgcaacaggagcaagcgggggcgcgccggcgaccagggtgcatgagcttctcgaggaccctatctgcaccgaatccacgtttcccgctcatccatcaagttggtgccttgctcctggtgcaccgattttagattgggtttcgtgcggatttagggctcttgattggaaaggctagaatcttcatagaggaatccaattaaatcgacttattcttggcagattttcctcctacgaacgagtaatttgctcccttttgactagatcatttagctttgattaattgcaattagaatgtctaaatgg

SEQ ID NO: 280711 - DNA, 963 bp, Zea mays
tcgggttggctcgaaggggatgggttctcctgggtgcgcggagatagtcgaactggtggacgagccgaaagatgctcgttcgtgtgggcttacccacttgagggtgagggtcaagccagtggggcaggagcttggggcacggtcgtgctcggtggaggatgatcttgaccagctcatcagatcgatcaacgtgcgcacgtcggcgagggcttctgggcagacgagcacggataggcggcttattgcgctcgggaagtcgccagtgtcgagctcagagattgtggagtccgtgagcctgaagcaggccctgaggaagatgtgcatctcacaggcgtcggagatggcagccatgaagagactgtcaaaaccgacaggggtgtccaccccttctgattctggagcaatcaagaagctacatggctctggtgcagttcaaaccagtgaggagcaagatgacaagagtaaggcagggaaagtttctgtgaagcctgagaaatcggcaggaagttcagtgggtaagccaagtgaaatcagtaaggggcagagcaagagctcagccaagaggaatctgagatcagcattctcctaccacagggaattgttcttaaaaccagattccaagatgtgatcagtaacaagtcatcagagggagttgaaggtatttctgtagaagtaactctgccaaagcagagaaaaggtaaatcaatgaaaacatctagcccccgggctgttcctgtaggtggctcacggttggtgaggccaatgtttcggaataaaacctcgacgaaaaagaaggtgaaacctgaacctgctatagtgcccgcatcacacaagcattgtgagacgaaaggtcctaaatctcacactagtaaacatcaggagtcccttcaggatgaacccagaaccccagcgccaactgacaagaagctgctgtcagctcaccactgttgatggagctgattt

SEQ ID NO: 280712 - DNA, 484 bp, Zea mays
tccctcgcgtccgcggacgcgtgggcaagattgacccagtgattaatttggagagagactctgctgtggcagttaccgaggacaggaatgcgtctgaattgccaaatacagaggttacgggcaaaccgcaggaatcaaagaaagcgagtgtttcagattcaccagaaagcactgaagatcgacgcgaacagaaatctgattcaatttctgtgaaagaacaagaccaacttgaggaggctcagggattgttaaaaagtgctgtcaagaccggccagtcaaaagaagctaggttagctcgggtttgtgctgggctttcatcccgcctccaagagtataagtctgaaaatgcacagctggaggaacttcttgttcaagagagagagaaatctacctcgcatgaagctcacataaagcaactaccacaagaactatcaatggccagagtagaaggtcaagaaccgaatcaatatgttgatgctttgct

SEQ ID NO: 280713 - DNA, 453 bp, Zea mays
  unsure (1)..(453): unsure at all n locations
gacagaggagagaagagatgacaagctcccccatccgctccactcccggagtgagctccccaccaccacctccgtccccaaatgtcccgtcaccatcaccacgccgccgccatcgctgctgccgtgctcttcctcctcacagcgcctccttgcgccgccgaccctaacgacgagcgttgcctgactcacctccaccagtccctctccgattcctccggaaggctcaactggaccaaggcggcgatctcggcgccgtgcgacggcttcttctcgcacctccaaggcgtgacctgcaacaacgggcgcgtgtacaagctagccctcccggatctctcgctcgggggcaccgtcccgccggagctctccaactgcaccaacctccagtcgctggacctgtccgcgaacgcgctgtccggcgccatcccgacggagctcttcgngctgctgaacctc

SEQ ID NO: 280714 - DNA, 1213 bp, Zea mays
ctccaggtcgcgggagcggccatttctctggggcgggaccgcgggagagctctagctcttgcagcagtagaactctactgcagccagagttaagagaaatggataaggatggcagctccgagagaagtcgcccagatcatggtgatgtgaagatgctcaagttcagaccaaaggtgcctcgacagaagcaaaagccaaagcaacaagaccctaagccaattgatgaagatgtgatgaagatattgaggactcgccaagtggctgcaaaaagtgcaccaaacacagaagatgagtgctcaccacagaagaccctctcggcgccaccttctgcagatgttgtttgcttgtcaccagcgcaactcggagtgcaaaaacaaaatcaattgccactccaaattcctagatccttccctgttcctgttaattcaggattggtttatgaagaagagagtagtgatgacgacgacgataatgatagtgacaatgttgggttgctggagactcagccagattcaattgaaagtgaagctttaacatgtccggccgaggagcttgatttgcttcagcaagaaggtagcaaagaaagaatgttcttcttccagttcccaaactctcttcctttacccaaaaggtcgtccagtgccggcaaggaggtgatggaaggatccaacctgcagcagctgcctcagggttatttgggcaaaatgctagtatacaagagcggcaagatcaaaatgaagttaggagacatcatctttgatgtgaacccaggagtagaaagtaggatgctgcagcgtgcagtagctctcaacactcgagacaaacactgttgcttgcttggagagattgagaatcgtcatgttattgtgactcccaatgttgattctttgttgaacgacaagtagggaccaactgtagcagctttgtcacagattgtgtgtagacctgtagatatgcagggttagtgacatctgtagaaattatatcagctctgtcaaatgatgtataggattttagttgtgtagtgttgtgaacgttttattgtgattgcagtcctatgttagttttagaactgcatgcagctccctgtggatgaatgtttgtaaggatcggtatttgaccttgattgtattggaaggcaaatataataaaaatcccgtcgttcttgtgggcaataaaaggtctaaaaaaaaaaaaaaaaaaaaaaaagaaa

SEQ ID NO: 280715 - DNA, 669 bp, Zea mays
gtcgtaaagtcaatgagataaggagcctttttagaaagattgaagaatccgagtccttgccaccatctgctgcagaggttcaacggacagaatgcttaagatcactgagagaagttgccacttctctatctgaaaggcctgcccggggtgatcttactggtgaggtttgtcactgggctgatggataccatctgaatgtagcattgtatgagaagatgcttggcagtgtttttgacatcttggatgagggaaaacttacagaggaggcagaggaaatccttgaactcttaaggtcaacttggcggacactaggaatcacagagactgttcatgatacatgctatgcatgggtattatttcgacagtttgtcccgtccggtgagcaaggacttctgaaagtcgtgattgacaatttgaggaagatacctttgaaagaacagcgtggtccgcaagaatgattacacttgaaaagcctgcgtagttctgttgatgctgagggtagctatcaagacttcacatttttccagtctttcctgtctccaattcagaaatggactgacaagaaacttaatgactatcacctacatttttttcgagggctccagcttgatggctgttgttgagattgtggcatttctttcatggcggtttcttgttgtataaaatgtc

SEQ ID NO: 280716 - DNA, 1118 bp, Zea mays
cccattcgttcggtctgggtgaaagggcaaaggcaagcagcagagggaggccattacgtgtctccttcctccaggttcctctcggggctgccatggatttgctcagcagaggggcggtgttcaaggccctggtgttcctctgcttcatcagatcgtctcaaggaggagatctgaatctccctcccttggtgaaggcaagcaggttccaaagcgaggcatacgactacatcattgtcggcggcggcacggccgggtgcccgctggcggccacgctgtctccacatttgcctggccgacgtttcaccgcagtcaccgtcacaagctttcatctccacggatggcgtgataaatgcccgcgcaaatgtcctgggtggcggaacatgtatcaacgccggcttctacagccgggcgaaaccaagcttcgtccagcaagcaggctgggacgcagagctggtgaaccagtcctacccttgggtcgaagagaggatcgtccactggcccaaagtggcgccatggcaggctgcgctccgggacgggcttctggaagcaggggtctcaccatacaacgggtattcctatgaccacctctacgggactaaagtcgggggcaccatattcgacgacaccgggcgccggcacacggctgccgacctccttgctgctggaaaccctagcaacctccgggtgctgctccatgctaccgtcgacaagattctcctcgcaaggcagcacggcggggggaggaagcagccgagggctactggagttcggttcagagacgagaacggagcgcaccaccaggccttcctcacacggaagaggggtagcgacgtcattgtttccgccggcgcaattggcagcccacagctactgctgctcagcgggatcgggccgaggggtcaactcagcaggcacaacgtttctctagtgcacgccaacgaacacgtcggggaagggatgtcggacaatccgatgaactccatcttcgtgcctatgaagagccccacggagcagtccttgattgaaactgtcgggataacggacgctggggtgtttattgaagccagcagtggtttcagtcagccagacgatagcatccattgccaccacggaatcat

SEQ ID NO: 280717 - DNA, 967 bp, Zea mays
  unsure (1)..(967): unsure at all n locations
ctgacgcgacggacgctggtctgccccctgctcttcgcggctctgccatcacgtcttctctcagtctcttctctctgtctctcctaccctccgtcaccacctcgtccctatggcaagcgagcttctcccagcctcttcctaccagactatcctcctgccgcaacggacctgacggtttccctccatctggcctccctgtcgcgcgagctgatcgacccacgcaagcgcaatgccgtccagaggctagttcgagctgctgagcgctgatcacggtgaggccacccagatccacccgactgccacccggatttcgcaccttgccttttcttctctcgttcacccagctggctcggtcgctcctccctctctagtgggcaactgccaactgggcgactcgccgacgcccctacgccaggtgctcaggtcttcgtcgggtcttttgccggcgacgaacacacaccagggtattgtgtagagctatcatctccctcggtttcttggaagaacaattatttgacataattatcaccataagatgcctggaattacagaggatggagttgttgcagaggaggtgccgagcggggtgaatttctctccacagaacgaaagtctgcctgccccaaagtcgacagcagcttcaacgatggcgggtagcatgcaaagcgaggcgcttgagatgcatgttgaggcctccggtgctggggaaccctcaatcgagcaactctacaacaacgtatgcgagatggagagcgcaagtgagggtggctccccatcacgcgagagctttggctcggacggggaggagtctagaattgactcggagcttcgacatcttgttgctggggagatggaggccatgaaggtgattgaggaggaagaggagaaatggagntgttcccatacattgtaccccctgttcctgctgggaatgggacccccagtttagggacacttttcccagttt

SEQ ID NO: 280718 - DNA, 511 bp, Zea mays
tttctacttcctgctgcccgtgatgcgcggagtgcatctggtgtggtattgcgtaaggagcagtacaatcctcgtcccgtggatttcgttccggctcttgcagatgttcgtgatccggttggcagaatgcctcatggacacggagagcagttttacagggaacagcagcaagatcgttttttgtcacggaccccgcctgagatcaatgccaatggacagtttggcaggatgccaattggagagcagcatacacttcctatcttaggtggcaggaggctccatgtagatcagtacatgcctcccgtccaggaaggcagggcaccacagggtggtcatggcaagcatgaatcccgcttaaccaatccgctacaaagggagcagaggtggctgggtcttagggaggacaagggctatgcttcgcggaagctgccaaatgtgaatgcccattacacatctggtaaggcactggtgaaggaggtgcaccatttgacaatacctgctggcagttcag

SEQ ID NO: 280719 - DNA, 439 bp, Zea mays
attcttgggtgtgtgttcccacccttcagatgaacaccaattgggagaagcctgagggtacccctacgtctgagcttcgtaagagtccgctaggcagcccagtgaagactgaccttgcgctaggtcccatggatcctggtgctactgtagagaatgaccagaaggaaaattacacagaagggcttacttctatgcaaaaggctaagatagctggaatctctgatatcgagtctttcaaaaggctcctcaaggtgctcacacagaaggtcagctggcaatcagatgctgcctcagcaattgctgctgttgtaatacaatgcagaactggcagtgggaagagacgtaacattgggacaaggggcgacatatggctcctgtttgttggtcctgaccaggcaggcaagaggaagatggtgaatgcattgtctgagctgatggt

SEQ ID NO: 280720 - DNA, 640 bp, Zea mays
tgggtagaccgtgtacagcacctggctgctgaggcatcgacctcacctcctttcctttctccaagctccttctcatcggattcaagcgccagctcgaagtataattcagattcaccctccttatcacctacaactagctccccgccatcatttggcctctcgcctgcttcatctaatctgcctcaagctcttgtgccatcgtccaggtctcctctttctcaatcatctaatgcaggggcttcaaagccttctggcctggaatcaatacgccatccttccaagacctcttctatagcagaaagaagaggaggcttcacacttctaaagctaccatctctccaaaaggaccttgtattgccaccaagggtaccgtctagtattcgcagaactgacgaggccttggataagagttgtacaaatggtgtcaaaaggccgactggtgattttcgctcagaaaattgcactgataatagttcaagcttgcattccgaaaccagattaactgagcgtactgacagtaactcagaagcttgcagtaatgtgcaactgttggtttaccagtggcccagcatggaaaagctaactacgtttgcacgcaagattcttgactcaaactcggttttgatttttgttacatcga

SEQ ID NO: 280721 - DNA, 501 bp, Zea mays
ccgctcgcccgcgcacgccaggcagctgaggatcaccgactcgccgttcccgctcggggacgacgacggggactgtggccaggtggacctggacgccgaggatttcatcaagaagttctacgaccagctgcgcacgcagcaggccctcgccaccgccacgccggactactgcggcgggtatgcgcgaccggtctctggcatcgcctagaattcaacccacgcatccacacgcgtatgcatatgtaatatatatgtacgtgtccatagagtatttgtctgaacatgcatgatgcatgcatggataaagcatgttcgtttgagagctagctactggtggtagagctagtctagagcttggtcttggtgatatgagggagagattttgtacaacatcatcatatcatgtttgcaagctagatccatgcatgtatagtactcctatatatgtgtacgctgtatgtgtatattttggtgtagtgacatgtataaattttactgcaa

SEQ ID NO: 280722 - DNA, 489 bp, Zea mays
ggggccggcccgaattccgggtagaccaacgcgcctgggtttttaagagggtaagtccaggccgggcaaagggttgctgtgggatccataaagctggtagccatccacaatctggtccatgcttttggggagtctgaagcacaggactctagtttccttgaaatccaccatcatgctaatgttgtaaacccaaatgctgggcggcgccttgccatacaaaactatgtggatgcatatgtccacattcctaatgtgtgccccaagctgcgttcgcttctctctgattttgcagaagaccaacaacgcggtagctcaagctctggagagctgcaacctcagtcgttatggggcaatcttgcagagttgtgttcaagagcctgtggcacttccgagaatgttggctcaagcacattgcatgggctccacttcttacagggctccaggtacctacgagttgttgacctgaatggtcttaagacgcgaaatttg

SEQ ID NO: 280723 - DNA, 396 bp, Zea mays
cgctttctttttcaccacgtctcctccgcctgcgggggcggtctttcctcacgcggacgccctcctaaaatccccaaaatccgatccgaccaccaaaccctaaccccatcccgcactcccgccctcccgccctacgccaacacgcgcgcgctttcttagccgctaagcatatccctctccgccacgatctcgatggtggagatgtctgtggtggagctcaggacgctgccgctcggcttccgcttccaccccaccgacgaggggctcgtcacccactacctcaagcgcatgatcaccggcaggatcaactccgagtccgagggcatccccgagatcgacgtctgcgagtgcgagccgtgggacctcccagataagtccctgatccggtccgatgat

SEQ ID NO: 280724 - DNA, 423 bp, Zea mays
acatatggagcggtcttgaagccggagatcggccctgacggcctcgctggagattctgccgtactcggctacaccgtgagggtcattcgggaggagcagctggagctgaagaaatacatgcaggagaactattccaaagttcctgatgtggaaaaggagttagagagtctgactgtagaaatgaaactgacagctggaccaaagaaagcagcactagcgcatctgcggacgaagatggacatatcaacagagaaaatacgtttagctaacgcgaaagaggaacatgcaaaaaagacttgggaagttgctgcacaagttgttaaagacgaagaggatgcttagcagaaattatgtgatgacctaaaccatctagtccaggagagtgctgctttccaatatgcaagattggaggagctgtagaaa

SEQ ID NO: 280725 - DNA, 475 bp, Zea mays
cccatgcgtccgcccacgcgtccggtgcatcaccagatcctgacgagctccgccgtgcctccccagcaacggccgctgctggcgcacgccatccccgtccacgcccggccagtgccgctgccgcaggccacgggcttcgtgctgccggactgtgcccaccacgcgcggcaagggttcccggcgaaggccgtcaagtccgagccggagcgaggcagcagcgacctgcacgatgttgtgctcacgctgggagggcctggagggggcaagtgagcccccccatggaaggcctcaagaactgtcgaggtcctggcctgctgctgttggcctcttggattgctttgtaaattagtctggttgaggaaaaaaataagactagcagcttttctataatctttcccgggtgattttagggttctaatatgtgcctttacatatataaatatagtgttagcttgatgcagctagttttgttctg

SEQ ID NO: 280726 - DNA, 721 bp, Zea mays
gattatcaagagagtattcaatgtgatgaagagtgaattcttggccacatcaaagtcagatggggcaaccaaacaagaaaattatcctgcctttggccttggagatggtacagatactccaaaaatgttggagagaagcaatagcagcgtaccatttgaattatacaagaaccagactaccgttgttgtttcaagagaggagtttgtaagtgttgcatgtgatgccctctctttgtacaagtatgttggacccaaccagaaagctgacctgcttcttgcttgcagaattaaagagagaaaggaatcggtggcaatactcttgtgtgggacaagcggatgcggcaagtccactttatcatctttgctgggtagtaggctgggtatcacgacagtggtttctactgattccatacgccatatgatgagaggcttcgcagatcaaaaacagaatcctcttctctatgcctcgacctaccatgcaggcgaatatctagatcctattgcagttgctcaggcgaaggcaaagcacaaggcgaataaacccacggttgtttctcatccaaatacctgtggaggcacttcttcagacgacaaatcacagcaagggtcctcggaactacctcctagagccgaactgattggcagcaagcagatggcggtagaaggctacaaggcgcagagcgagatggtgatcgacagcctggacagataattaccttct

SEQ ID NO: 280727 - DNA, 665 bp, Zea mays
gcctagcctatggtaagggcgtcactgaagttgagagagctatgtctatgaggaaaggtgacagtttacatgatgacattgaaaatggagaccacaaagacaaaaaaaatcacaacagtccccatgttaaagggttcaatttcaaggatccacgaataatggatgggaattgggtccatgagcctaacagagttttgattagagattttttccggctcctagccattctgccacacatgcattgctgaaatagacgaaaatgagaaggtttcatacgaagctgagtcccctgatgaagctgcatttgttattgcggcaagagaactagggtttgagttttacaagaggtcactggcaactataattattcgtgagcaggatccaagttggaatgttgttgagaaaaggtacagaaagtatgaactcttaaatatattggagttcagtagctcaaggagacggatgtccgtgatagtcaaagaaccagagggaaggatattacttctcagcaagggtgctgatagtgtgatgttcacaaggcttgcaccaaatggaagaaaatatgaagaagaaacaagaagacacataaatgagtattctgactctggtctaagaaccttggttctagcataccgtgtcttagatgagaaagagtacaaggaatt

SEQ ID NO: 280728 - DNA, 520 bp, Zea mays
  unsure (1)..(520): unsure at all n locations
ttatgttacctccttcccccgcgtgctcctccagccactccgcaccccagatctccgaaccctaaccccccacacatgttattgcactgaacgcagctggtagccacaagccatgtcgcagccccgcagttacggaatcctcgtcgccgtccttgtcgcggcggccgtcgccatcccgccggcgaccgcggcggtggcgagcatcgacctcggctcagagtggctcaaggtcgcggctgtgcatcttgccccaggccgcgctccaatcgctgttgccatcaacgagatgtccaagcgtaagtccccggcgctcgcctcgctcgccgacggcaaccgtctctctggggaggaggcggcaggcatcacggcgcggcacccgtccaaggtgttcgcccgcgcgcgggacctcttggccaagcccttgtcctacgtgcagtccgtcacggactcgctcttcctcccctacgatctcgtncccgacgcgcgcggcgcccgcgcggttcgcgctgatgacgggcag

SEQ ID NO: 280729 - DNA, 523 bp, Zea mays
ctgctctcccagcctgcctttacttctcccgaatgctcgaggcctgcaaagctccagcacatccaatcgcacgacactccctgctgctctctgctgagaggtgctagatctcggactcgccgttgatttgattccaagttaaagacagcgagcaatccatagattgaccggtggagagcgagagaaagcgagagagagaagggaattggttggtaggtggagaccggagggagagctcagctcaggagattgatgcttgcatggtgatgcgggcgcgggcgatggggctgagcagcatccggcgggaggtgctggtctccgccgtcttcacggcgctcctcgtggcctccatcctcctcctcccctcgctcctcctaacgggcgctgggcccatcaggtggccgtccctgtccccgtcgaaggatgccggcaacggcgaggaggaggagcagcaggcccggtaccccgtgacgttcgcggacctgatctcggggtcgacgggggacgcgtcccgcgccgcgcg

SEQ ID NO: 280730 - DNA, 765 bp, Zea mays
tgtatatgcaagtgcaaggcttgcacttcctgctccccaggaggaaagcttagtgaagttgagcaatccatttgctttccagaatagcagcatgcatgctatgaattcgactcacctacctcgccttgaggggagtatccattcaagggagtttcttcctaagaactcagagccaataatcgaggagcctgcaagtccaagagaggaaagacctccagaaaccatggaaaatgatattgaagatttttatgaagatggtgaaatcccaacaataaagcttaacatggaagcttttgcacaaaacttggagaattgcattaaagaaagcaataacgaactccagtctgatgatattgcaaaagcattggttgctattagcactgaagcagcttcgattcctgtaccgaaactaaagaatgtgcttaggcttcgaacagaacactatgtgtatgagcttccagatgcacatccacttttacaacagctaggacttgaccaacgggaacatgatgatcctaccccatacttattggccatatggacaccagatggaataaaggaaataactaagacaccaaaaccatgctgtgaccctcaaatgggaggcgatttatgcaataatgaaatgtgccacaattgtactgcagagaaagaaaaccaatctagatatgtcagaggcacaattctggttccttgtcgaacagctatgaggggtagtttcccacttaatggcacttactttcaagtcaatgaggtatttgctga

SEQ ID NO: 280731 - DNA, 579 bp, Zea mays
gccggcggtgctggacaacaacgactacatgctgttgccgctcaacctgggcctctgcttctccgacaaccagctgcgcgtcaactccacgctcaacgcctccgtcaacagcttcgccgccaacgagacgctctggaaggagaagttcgtcgccgccatggtcaagatgggaaacatccaggtgctcacggggacccagggccagatcaggctcaactgcagcatcgtcaacaacggctcgtcgtcggtggggatccagcagatgacagtgcccaactcctactctggcgccaccgcgtcccttgatgatgagatcgccacgagctgatctagatcggcgcggtgtgatgtgatgatagatatttgcattgtgtgtccatctttaggctattaattagtacgtttgctcccggtacgcgcgagagtgcgtagttcgtgtgtcattcatatgcgcgtacacgagatttccagtatcaccatgcatgtatcccgtgaatcatcatcagtaaataaaactggtgctctttgaccgtctatttttctccaaaaaaaaaaaaaaaaaaaaaaaaaaaaaaagaa

SEQ ID NO: 280732 - DNA, 491 bp, Zea mays
cccacagaagcctggtaaactgaactgtcgtatttacatgtcaacagggaggtgctcatatgggtcatcgtgccacttcaatcatccacggctcaaagcaaaactagaagtttcaagtttcccttctgaacaaagaaatcatgaagctgaatttctggaactgaaccgtgttggcctccccattagagaaggagcaaggaagtgtatctattacatgcgtaatggtacatgcagatatggaaagaaatgttgttttaaccatccagagcaagttcttgatgttcaacaccacactgcaacaggatgggattgatactcacttgcaatctttcaccacactcaaagaaggcacctgaaccattaaaactatggatgacatattcgtctggatctgaggttcttcctccaaacatacttaggatgcttttaccttcccagaatgtgccccctagtacaaaagaaaaggaaatcaggataaaaaaggatcctga

SEQ ID NO: 280733 - DNA, 552 bp, Zea mays
cctcctagccgccatttcttctctccctggcttctcccccacgcgcagcaggcaaagcgcagggagcaaggccagccatggcgcggcaccctccctgcttctcctggcgagcggctgcgacagggggccttcttccccaacgccacccctgctccatccaacgcgcggcatctcctctggtccgagctcgagcagcgagctcgccggcatccatggcgtggcacctctgcaccttcacctccagcagccatggcgctcttccctgttctccagcgcccttcctccctccctttttctgtccatggcgagcaggagcttttccctcccatggcgagcagctttcctgcccatggcgcgacgccgctgctctctttttttttccatctcgctgtgctctcttggctgccagcagccatggcgtggactccttttttttttcctggcgcagcagcaagctcccccatggcaggcgcccaggcaagctttcccatggcgccagcagcagggatctctttcccctcccatggcgcccagaaaatccagccggtcccc

SEQ ID NO: 280734 - DNA, 703 bp, Zea mays
accacgcgtccgcggaccgtgggaggctttacaggtgtaatggttatggctgcaaaaaacggatccgtctagaccatggcatggaatgaagcttcctattcagcagcaagcaactgactgggggagatcactagcctagccttcaaactcgtcgaagtcttggaactcctagagatctgctccggcagcttcatctgagcaagggttgcaccgagggcaaccttgtgtctatataaaaagcaaagtgaatattacgcaccgggtatccaagtgaccaaaccaacacaatgcattgaaaaaggtgtgcttgcctcgaaggtaataaacccaacgcttttgtctgttgttcccaaggatggcgtaattgcagaagcaaagagaaaggccaagccagatcttgacaagaatgtgatgactgctgcaagtagacacaaaacaatgccagaagttgtaaaaaatgagttcgctataaaggtgagagataatcagaacgatgagcttaacaaaaaggtaacaaaggtgaaagcaaaggcagtctataaggatctcctgaattcaaagacgagaacaaaggcaaagccagatgttgccagtgatgagttaatagcaaaggtgatcgatcatcataggagaggtgagctgcgtttactgacagtcagtgatctgaagtgcttcctcggtgcgaagaagcaaatgttggagg

SEQ ID NO: 280735 - DNA, 955 bp, Zea mays
ttttctgtggtgagaaaggtgttgggactgttagtcggacagattcaaactaaaattttggaaaagagaaatcaattccggtattttcgaatcctatctcaagtagcttatctagatgatattgtgaacagttgggcatacacctaccaaagaacacatgttgatacccggacaggaacatcccgcatgaagagttcaagtgccaaagaatgtcaaaggaccaagtatgctgcaggaaccaatgtacaagttgctcctgttgccatccctgctgaggttcaagacattccagcccaacacactcaggatcatgaagttgctcctggtcctactgaggtgcaaggcaatccggttaagcatactgcagaacaacctggaagctattcgatgggactgtgaccttgataatcatgtgaactctgtttccagcaaggatgcagtagaacacgatcatgtccattcagctttacctgatgtgcataggggcaatacacatgcagatacagtaacaaatgacggagaacctattggagcaaacaactatgggaaagtgtccaggttaacctacggtgaaagataaattcagaccaggtattcaaagatctgaaaaccacacagaatctatggaaggtttaggctgtttgcaaagggcaggagattccgttggatccccagcaagtattaacaatacagaattaccaaagaacaatgtttcttctgaagctcatattgatgataatgagttgaggagaaatgatcttgtgaatgatgttgaatcaaattcgatcgatggtaaacatgacaccatgatgaatctttcagttccaaaaatttcatgtctctacaaatgttgttctccatgtttccaatctatttataagatggttcatggtattatttcaaatactctaaggcctaatctgcattgcttaacagctgatgaatgcatgacatt

SEQ ID NO: 280736 - DNA, 670 bp, Zea mays
cccacgcgtccgatagattgttgggttggtccaggacttcactcaagctcgttaggcccacaagcagttgcagtgccgccgctcctgtcgtcttccccgtggccttaactttacggcttcaccgaccgaaaacccccatttcctcttctccaaaccccactcaccgcaacgagccgccggatccatggccggcaaagacggctccgtcccttccccgcctcctccccggctcccatcctaccctgagatgatcgtggaggcaatccgggcgctgggactcgagaacggctgcaacaagactgcgatctcggactacatcaagggcagctacggctccaacctccctgcccagcacaacgccgtcctcacgggccacctcgcccgcatgaaggctaccggtgagctcgccttcctcaggaacaactatctcctccccaacgaggacgaagcctccccgctgagcaccggtgggcacaagggccccgccgccgccgaggagtctactggcgtgttggacgttggtgacgatgtgttgcttgcttcccctctcgtcatcgacgctgacgccgtcgacattgacgtgcctgctccagctcccgttgtcaccgctgatgtcgacgacattgacgtgcttgctccagctcccgttgtcagcgctgatgtcaaccct

SEQ ID NO: 280737 - DNA, 618 bp, Zea mays
tggtaattgacagttgggggtgcagtggagccatctcgatgcaatttcagtgcctgtgccgtagggaaccgtgttgttctatttggtggggaaggtgttaacatgcagccgatgaatgacacgtttgtattggatttaaacgctagcaatccagagtggaggcatatcgatgtgagcgcagctcctccaggtcgctggggccatactctgtcatgcttaaatggctcctggttggttgtttttggtgggtgtggaaggcagggtctgcttaacgatgtattcatgctggatttggatgcaaaacaaccaacctggcgtgagatacctggagttgcacccccagttccacgttcatggcacagctcctgcactttggatggaacgaagttggttgtttctggtggctgtgccgattcaggtgtactcctcagtgacacatatcttcttgatgtagccatggataggccagtttggagagaagttcctgcatcctggaaaccaccttctaggctggggcactcaatgtctgtttatggtggcaggaagatcctgatgtttggtggtcttgctaagagcgggcctctgcggctccggtctagtgatgtgtacacaatggac

SEQ ID NO: 280738 - DNA, 881 bp, Zea mays
agccaagcgagggagcgagtctaggcccgccgatcggcccggccatgagcgtcaagcagccaccgtcctcgtcgacggcggcggccttctacgcgacgctggcgcgcggactcgacgacctggaccgggcgctggcggcgtcctctcctccctcgtcgtcgttcctgtcgctgcccacgctccgggccgcgctggcgctgctccgcgccgcgcacgcgggcctggcccgcctcgtcgcgtcgctccacctcccggggggcgcggcctggctggacgagtacatggacgaggcgtccaggctctgcgacgcgtgccgcgcgctgcggctcggcgccgctgccgtcgaggggtacgccggaagcgccgcccagctcgcctcgctcctcatgcagggggcctcgtcgagcccccacctctcgagacaggtggcgcgtgcgatcagcgtgtgcaggcgcgaggccatggcggtgaaggaggagaaccgcgcgctggtggagacgcgcgcggaggcgctagcgctgcgcctgagcgagggcgtccccgccgacgccaagctgggcggcttcgtcggcttccccggcgtgctctgcgccacccgcatgctgacctcgttcctgctgacgctgctctcgtggggcgtgctccactactggcccgcccccaacgcgggcgccggggtctgcgccgcctacttcggcgccgcgttcgcgacggcgctgtcccgggcgcagcagcgctgcggcggcggaggccggcaggtccgtgacggcggccggcggcggcggcgtcggcggcggcggggtgatgatgcaccagttccggcgcgcgcggtcggcggtgccccaggccaaggaggccgtggagcgcgacaaaaacgtgac

SEQ ID NO: 280739 - DNA, 481 bp, Zea mays
tttctccgcacgaggtttgcgcccctccccgctcgccatcggcccgtctcaacgcgcacgcaccctaccctctccacaaccaaccccagtaccccacgagatctgctcccatctcttcttctcccccatcgcacgaggtttgctcccctccccgctcgctgtcggcctgtctcagcccctgatcctccaccgccaccgactccctctcttgccaccgagggaatttggatctaggagcccatgccactacagctctcccccgcccacgattagccctcggctcgggagatgctgacgcccatcgcgaccacgatttgctccctcgtgtcctcggcctcttcctccactctcatcctccctgctccccccgtcctcggttattctcgtcgcctccgccgcgcgttccgctctccccacagcctttgcccgccctcgcccaacgacccttgccgtacccctccctgtcctcgacaacttcccc

SEQ ID NO: 280740 - DNA, 510 bp, Zea mays
ctcggtctcgtccgctcctgctcttttctccgcacccagcgccgccgcgggcgatcctagggttcccggcgccggcggcaacaacctgcctgtagcgattcgacacccacgacgacggcctgcagatccagtccacctccgacgacctcgacctatctgcaacttgtggacagcctgcagaaacagctcgtattggaggctacacagaaaaacctgcacccaagaggtgctaagctcaccaagaaccttgcaggataacacaagtgctgaattttggaaatggatcatgggcgctatgctccacatcatggatgggagaacaacagtgcaccaaatgggtatggtgtaattaatgagccagattttaggtctggtggaccctacaatgcttggagatctgcggatgaaggctttcctagagattcatatggaaggggtgcattctatcatgatacacatgatagaaatatgtatgcatcaccaccctctgccgggtggatgtggtctcag

SEQ ID NO: 280741 - DNA, 681 bp, Zea mays
ggttgtgtgtgcatcattacatggacatgtgtgtacctgaaatgctagtgctatatctacctgccttcatattttctggggcttctggagctgatagatagtgtcatactttctgccttatgtccatttactttctgtttaacagaattatgtacaatttattattagtttctctcccaatgactaagcccgtttgacgggcttttcactccatgtaaagaattagaagattctagccaatcttcttatgttcaatataatgtatatgaactgtactgtttgataagtgctgccatataatttagttgcacactgtttcagcttctttggttattactgtattcctgttgttatagatgtttgtattgctgtcaataagttctttgccttcgaaaattggtcctttcacctggtgttgcacagagtcctggtgttgtgctgaactaatgttgtaaggcaactgtctttgttggttaggtattatgattttcatacttgatactggactactaaaatagcatctgtaatttgatcctaatcaatggattgtatagatgcttatctagtatttttctatcacatagagaaaagacaatgcagcctagatatgctgcttggaattatcttttctaaagcttgtctaagttaaacgctatatatatctactagtctctttggtat

SEQ ID NO: 280742 - DNA, 564 bp, Zea mays
atcgttctatgcccagaagattgaagaaagaactatgaggcagtgcattctaagacctcttacaccatcgtcaaacaaaatacctgcatctagttccttggataagttattaaaatccaaaggtgcaagagctggagagtctaatggtcctatcaaggttgctccacagctgtcaacacagccatctagcaactctgttcgcactccagtcaaaactgagctcgtaaagcaatctcaatcaggcagccttcaagtccttagccgcgagcagaatggtgctgtaaatactgctgccaaagacagcaccagcaacaatcctgtgagccctgttctgggtcgatcttcttcaatggaaccgatgagaaagtctattgtcagcccaaagcttaaggttggcactaatggccgttctttgcatccgctgcaaggttcatttgctgacagaaaagcatgtgcaaaagacaagtacaagttttttgagttgttgcggagtaagtctgtaaatggttcgagcgctgctattgagtctccatcaagcctgactgatgatcagcagaactctaa

SEQ ID NO: 280743 - DNA, 544 bp, Zea mays
cgtacgcgtgggccgcggtccccccttccccacccactagagaccgtgcccttcccccttactcggcaatctcgcagcggtgcccgccccatccccgcggatctccctgacaccttcaaccaccttccatccctcgtgacctggtcatgccgtcgccgcctcgatcctgtggatctccctgccgcctcccacgtccgtgctcatgacctgttccgcgtccgctgtcacccccagatcgcgcgaggcccatgtccacgcagtcatcgtcgccgccccctggccacgcgagatgccagcgccccctccaccttgcgtgagcgaccccttcatctaccttcaccaccatcttcaatccgcctctgcatcaccgccaaaaccctacccacttccctgctgcccaacaatgaatctgcctccgcaccaccgccaaaactctagcaactatggcagtgaacaacatccgggttcatggctctggcagctatgctcatggaaaatacgtctatgttgatggtgaccgatctggtctcgcagaatcagcaaa

SEQ ID NO: 280744 - DNA, 452 bp, Zea mays
cctcctcaaaacctgatcccagctccgccgccgggcaaatccctaggggcttcctattacgccgccgccgcgatggacgacagcctctacgacgagttcggaaactacataggcccagagctcgccgactccgacgctgatgatgactccgacgccgccggcgcctcaccgtcctccaccgcgtcccgctcgccgtcccccgcggcgcgctccccgtcgggctccccctcccgccctgcggcgctcatggacgtcgacgaagacgagggcgacccgtcccagcaggccgtggtgctcgccgaggacaagaagtactatcccaccgccgaggaggtgtacgggcctggcgtggaggcgctcgtcatggacgaggacgagcagccgctcgagatgcccatcatcgtgccaccacgcgtcgtgaagttcgaggtcgggacccgcgccgcggcacg

SEQ ID NO: 280745 - DNA, 501 bp, Zea mays
cacgatcaagagaaagctttgtggcctaccggacattgggggccatgtcatgaaaatacctcttgtggctttccaagtattgctttgtctgcgggcggagggcacaccaccaagcgctcgctacatcccaatatttgctcttttctcgccactatttattctgcaaggtgctggtgttcttttctctctagcaagattagtggagaaggttgttctgctattgcgtaatggaccagtttgtcctaacttccttacagcctcatcaaaagctcgcgactgcttttgcttctcttcatcatggttcaaggcttcttggatggtggtctattgatgaatggagcaaggaagaacaagcccgggtattctatactgaatttactgggttcaataccttttgaggctatccgccagaggtgtgtaggaaactgcctaaaatggaccttgcagaagagggttggaggctacaggcagctttgggagaacatcttgaatcaccaagtg

SEQ ID NO: 280746 - DNA, 564 bp, Zea mays
  unsure (1)..(564): unsure at all n locations
gagtaaactaaaagatcatatttcttcatttctgaagagaaacgtcaaatgcagttaaatacttctgctgtacaggaggagttggagaaaacaaacgaggaactggcaatcaatttcaggaaccttgaaagtgccaacaccaccattaattcactacaagatgcactatcacaggctagatcaaatatttttattcttgctgctgaaaagaatgaagctgaagctaaatatgaaacagaaataaatgctcttaatgctgagctaaccaaatgtttggaggagttggataaaactcatgggcacttacaaagtcattcaacagaatatcatggttaccttgagaagcttggcatgtttatgatggatgatagtctcttgtctctgatagctgaagaatatggaaagacattcaacagcttgagagatatgtgtcttatagtcaagagtatgcatgagcagctctctgtgaagagttttcagaatgattcaattgtggaggattcagaactctcatcacttttatctcttnccgactatgagaagcttgttagagaaagattggtc

SEQ ID NO: 280747 - DNA, 502 bp, Zea mays
ccctttctttcgggaagcatgaaatgcactgcaggttcattcagagtccaccttggccttggatggcaataacgacatcaattggaactcttgtgattgctttactgattggatacatagttcatgctaccgcaaaacggattgccagagttgaagatgactttcaggagatgagtgtgctcaagaagcgcgcagaggatgcagatattgccaagtcacagttcttggctactgtttctcatgagatcagaactccaatgaatggtgtcctagggatgctccaaatgctcatggatactgatttggacacaacacaacaagactatgttagaaccgcacaagccagtggcaaagctctggtatctctcatcaatgaagtacttgatcaggccaagatcgagtctggtaaacttgagcttgaagcggtgccctttgaccttagaacagtttgtgaagacattttgtctctcttctgtggaaagcttaagagaaggactggagc

SEQ ID NO: 280748 - DNA, 507 bp, Zea mays
gcgttttgtacagcatgggcatcgtgctgatggagctcgtcaccgggctcttaccgaccgacaagacctttggcggagacatggacatggtcaggtgggtgcagtcaaggatggacgcgccattgccggcccgggagcaggtgttcgatcctgctctgaagccgctggcgccgcgtgaggagtcgtcaatgacggaggtgctggaggtggcgctccggtgcacgagggcggcaccgggggagaggccgaccgcgcggcaggtctccgatctgctgctccacgtttcactcgattactaccgcgcctgcgaaaaacgttaggatttcgaaactgggggatgaagttgtcctagtagctgcttttctaagtcgtccttttaagctagcttaatcttttcattcatgaaactagggaaaaagagacttatttttagggtttgaagttgaatcgagtcaagaatgcccttcaaaattgtatttcttaagttcaaattttgggatcgcttgt

SEQ ID NO: 280749 - DNA, 286 bp, Zea mays
cgacgtgctgtccttctccatcggcgcctactcgggcacgcagttcaactacgaccccatcgccatcgcggcgttcaaggccacggagcgcggcatcttcggcagctgcgccgccggcaacgcggggccagagcccggcacggtcggcaacggcgcgccgtggatgctcaaccgtcgcggcgggcaccatggaccgcgcgatccggaccaatgtcaaagctcgcaacggcgaggagttccacggcgaagtcctgttccagccgagggacaacctccgcggggaccc

SEQ ID NO: 280750 - DNA, 527 bp, Zea mays
  unsure (1)..(527): unsure at all n locations
tgnctttcttactgtcatctcagcatggctaacagaggcacgctattgacaagattaccccacatgttgtatcatggtttactagctagagaggctactcaagatgaggaatttgaagttatgtttggtgaggacgatgatgaagacaaagatgacgaggatgatgatgattatgatacaaagaccaagggggctactggagggggaagggcagcagcgaacgacctgttgagtgcaagcaggagtgagtgctgcacattgaatattggcatgcattggttgtggagcaattagtctggttctacttgatgcaaggtcattgagttattgaagtgatattttgtcgaatattttatatgccattgcaaagcacgggcatctaactagtctttcttatatatgtacactacaatacataatcatttatgccattgtttactacaaatatatatattaggcaactcttgaactggttgcaaggaatatttccactaaaaaaaaaaaaaaaaaaaaaaaaaagggggggc

SEQ ID NO: 280751 - DNA, 715 bp, Zea mays
gccttctttgtcatgcctttcttcctcttcatcgtcggagtcgccctggcgctcgcgtacaagagagtccctgacaagttggatgcctcgagaaaggcattgctccgtgcgctgaagctgttttgtcttggtcttgttctacaaggcggattctttcatggtgttcgcagtctaagtttcggggttgaccttcaagaaatacggctgatgggtgtactgcagagaattgcaatagcttatctgctgaccgccctctgtgagatttggctcaggggagatgaagatgtagactatggatacgatttgctcaagcgataccgctaccaactgttcgtaggcgcagtcgtggcgatcacatacatgtccctgttgtacggtacctatgtccctgactgggagtaccagacatcagcccctggctccacagagaagcctttctttgtgaaatgtggagtaagaggtgacaccagcccacgctgcaacgcggttggcatgatcgacccgtagaatcctgggcatccagcatctctacgggcggccagtttatgcacgatccaagcaatgcagcattcgactcgccacaaaatggcccccttcctcctgatgctccctcttggtgccaggcccccttcgaccctgaaaggctttttagtttcctgatggccattgtcacatgcttgattgggctccaatacggacaccttattgtacattt

SEQ ID NO: 280752 - DNA, 519 bp, Zea mays
cttattcgtccgcaatcttctagttctcccaaaggctttttcggatccgaactgcaagtcctccttcgcgaccatggatccacgcgccaggtatccttcgggcgtgggcaacggccgcggtgggacccctaactacttacggccgcggcccatcgccgcaacagccgcatcagcaccaccagcagcagcagcagcagaagcagacatcgggggcgcatcaccaccagcagttcgcgcagaggcagcagcaacagcaccgccacagccacaaccaccagcagcaacagcagcagcaccagagtcaccagcagcagcagcaacagcagcagtggctgcggcggaatcagattgcccgcgaggccgcgggcgcagtcgtgaccagcgaggccgaaggccctggtgccatccacggccgccgacggcgtcaattcgagttcgcaagattggtaaggccaattgaagcttccaccttcttgtacacgcttcagggcaaaggatgtttcagcccccagggcaatg

SEQ ID NO: 280753 - DNA, 447 bp, Zea mays
cccacgcgtccgcggacgcgtgggcgcaccacagcttgcccgtgctcgacggcagcgtcgtcggcatgttcgcccgcgcaggggattttctcgacgccatcggcttctacgttctcccagatgccctccctgctctaaaaccgacgacggaccctgctgaacaagaagaaaaagaaaaggattctggccatcaacagaatgggaaggcaaaatctaaccaagaagaaaacgaggactccaaaaacgagaaggataaacccttgtcgtagttcgttttctacgacaaaaaatgaatcctaatctttgtcggatatctatttgtgctcttgttgtgagtctcttcagctattgttccaactattattaatatatgtacatgcgtgggagctatgcattgtaataatcaattttcagaaaataaagagtattttccctatttttatttct

SEQ ID NO: 280754 - DNA, 477 bp, Zea mays
ccccaacccaacccagagcccgaactcttcacgtcgcgtcggccggcaattggcattcccactgcgccgccgtcggatcgactgggtcctcgccgccgatgggcttcttccgccggatcgccggcttcctaggcatctcgcgggacgacgccgaccacccggactccccgacctccgtcggcggcgccgcggcggcggcggaactccctcatgacagggcggcggcgcacggggtgaggcaggggttcagcgtcaaggttcctgtccatgtcgagcggcaggtgcccgtgcccgtgctggtgccctgcccgcagggggacggcggcgtgcagggttctaggtggtacacaaggaggcttaggatcgatgaagacggcgacgtggctgacgagttcttggatgaaattatcccggcaggctcaatcagtaacgacaaaagccgcaggttccaagtgaaatatcacaataaaccctgct

SEQ ID NO: 280755 - DNA, 707 bp, Zea mays
cccacgcgtccggggcggcccacgaccggatcggcgactcctctccatccgtctcctctctcgccggcgttctgccgcactgcaaattcgaattcgaacccgaatcctcctcccccctcctctcggcgagaggaggctttgtgagggccgccaggatcgacaggatgcagaagaagccggatgacgccatggaggaggaggcggcgccggctccggctcctgggccggagatagggttctggttggcagcacggcggcgactcgccccagaagaccccttcttcgctgccggggacctcgagcgcgagctcctggccaagcaccttgccctggatctttctgaagatgaccgcaaccagcttgagaagatggaagtagccagcacgtgcacagtgttttgtccaattgctggttgtggtgctcatctagattgcctggaggagtttgaggaccactatgtcactcgacatactgcttcatgctctgtatgctcgcgagtttatccaacttcaaggttgctgagcatccatgtttctgagacgcacgactcgtatttccaagcaaaagttgcccgtggttgtccaatgtacgagtgtttggtggagggttgtggtatgaaattgaagagttacaagagccggcagcagcatctcatcgataagcatcagtttcccaaatcatttgagttcttaaaaaggcacgggact

SEQ ID NO: 280756 - DNA, 412 bp, Zea mays
gtcaagttagtgaacttagcatcgagaatagctagccaggtgtcggcttttttttggggcccgttgctgcagttgtacataggcaaatgttgggtttcatgcttgcaatgcaagtatttgatgtctcatctcgatggtcaagtgtcattcaagaatatcgtccccgacacatggcaattgatcacagtactgtctcaacgtcagccatatttcggctagctccttagtttgttgctttggatgtagaaagttataatgacttataatttggaacagatggagatgtagtatatcattaggacagtgcacttgagaaatgtaggccagaaatattgtttcatatatgcagatcttggagcccgtgcaatcctttaaaaaaaaaaaaaaaaaaaaaaaaaaaaaaagggcggaa

SEQ ID NO: 280757 - DNA, 466 bp, Zea mays
ctcgggtatcgtcgctggtcgctgccgcatccctccccctccctctcccactcccgatcgcatccaccctggaaccctagcggcccagcccgcgaccatggcgcggcggtcgacccctctcctacgccgccttctcgccccgtcaccttccctctccactcccctagccgacgccgtatcccgccgcaccgtcacctacatgccccgcccgggggacggcgctccgcgcggcgtcaccctcatcccgggcgacggcatcgggcccctcgtcacgggcgccgtgcggcaggtgatggaggcgatgcacgcgccggtctacttcgagacgtacgaggtccgcggcgacatgcccacggtccccgccgaggtcatcgagtccatccgccgcaacaaggtctgcctcaagggcggcctcgccacccccgtcggcggcggtgtctcctccctcaacatgcagctccggaag

SEQ ID NO: 280758 - DNA, 789 bp, Zea mays
cccacgcgtccgctgagcagaaggttgaccagacacaaaacgtgtcaggacagaacgccgagattgttcaagagaacaataatgaggctcatactccaaagggcgttctaaatgacgggatgggggcactagaggttccaatcaatgaggatcagcttgttcctgcagaagaaaagaaatcacaaaccctagcccatgagacacatccagttccagatgaacatggatctgatactaaaatgccatctgaagattctctagctgttgagatagagacagttcccatcgatgctaatgaatctagcgaagttcctcatgaacagcaaactgataggatagacagcacaattcctcctacacagtcaaccccaacaacagttagtacttatgatcaccccacagatccagatgcaccaaaggatctctcaggagctggtgctgttgagcagaaatctcttgctgagacatattttctgcaagatgaacctgatgtttcgaaagatgcaaccattaaggaaaacagaagtgatgaagttattcgtgaaaaaacttctaaagatggtaagattgtacttgatatcattgaggctattcatgccgccgaaaagaagcaggcagatgtagatgcatacatgtattcagaagagagaagaaagttgaaggagaagtatgaaaaggagctgaaagacaccagggccagggaactgatgtatgcagaggaggcagcaattctggataaggagcttaagaagagaaactgaagaatgctgctgcattaatggactgcaa

SEQ ID NO: 280759 - DNA, 699 bp, Zea mays
ccattctgaaggctcggtcattgaagaaagctagtgaagctcgagtatggaaactcactgcattccagcgcctagacttcaccagcgatgatgtgctggattgcctgaaagaggagcacattattggcaaaggtggtgctgggattgtgtataagggggcgatgccgaatggtgaacttgtggctgtgaagagactcccagcaatgggccgtggctcatcacatgatcatgggttctcggcagagatacaaacacttggtagaattcgacaccgtcatattgtgcgcctgctaggcttctgctcaaacaatgagactaacctgttggtttatgagtatatgcccaatggcagccttggggagatgctccatggcaagaagggagggcacctccactgggatacccgatacagcattgctattgaggcagccaaggggctttgctacttgcaccatgactgttcacctttgatacttcaccgggatgtcaagtcaaataatatacttcttgactccaactttgaagctcatgtggccgactttgggctagcaaaattcttgcaggactcgggggcatctgaatgcatgtctgccatcgctggctcatatggctacatagcgccagaatacgcatacacattgaaggtggacgagaagagtgacgtctatagcttcggcgtcgtgctacttgagctcgtca

SEQ ID NO: 280760 - DNA, 479 bp, Zea mays
agaggccgagatcaatactaacctcgactcgagtctcgagtcacgtttccgccgttatctgcatcaacggggtcaggcgactgaacagtacaggcccttggccgccgccgccgccgccgccgtactccaggtgcccaggtcttcgtccgaccctttgccagcgacgagcacccaccacaccaggatttcatcatggttgattctgttcatgacaatattgtgctgaacaagtgtatcaaggacatccttgcactaatcaaaccagtagaggatgatagaagcaagcggttatccacaattcaggagctggaaaattgtatccattctcttgcatctctgtcaggtgctgctgccaaaccgtttgggtcttttgtatcagatctttactcaaaatcaggtgacttagatttgtcagttcagtttgggaatggttcaaaccacccaataaacaagaaaaagaagcagaatgccttgagaga

SEQ ID NO: 280761 - DNA, 575 bp, Zea mays
  unsure (1)..(575): unsure at all n locations
ggtgaacccctcaaaccctaatgctttggccgctcacctatggcggacgctgacgacgcgccgccaacgccgcctcctgaggtagtagcccccgaggagcatcccgcggtcgccgaatccgccgttgccgcgcagcaggagggggcagcgacggcccaagtcgataacaagcggaagctcgaggaggctggcgccgacgcggaggcgaacggcaccggcgaggacgccaagcgcccgcgcgtggatggtgagcccgacgctgccacaggcattgagcagcagaacgatgggtcctccgtgaatgtctccgtgaatgtggaggaacccgcagctgcagaggaggattacgctgctcccaccgatggggcagcgacctgatggtgataatgacacggccgctcctgctacggattcgcaggcgggttctgatgacanaccgcttgaagcagcagctgaagctccacaaccggaaagtgatgcagcagcttgtgccccagagatctctcgtatgatcgaagtacccaacagcagggtcggtgtccttattggaaaagctgtgagacaatcaggaactt

SEQ ID NO: 280762 - DNA, 503 bp, Zea mays
ggcgtcttctccggcttccattttcgcgaggaggcgaggtggacagagacgccgccgccgcttccgcttcgacctcgacctcggcttcggcttccacgagaattctagcaagtcctctggagaatataatccacatctgtttattttgctgcattttggtatggacgaatctgcctgtagatccactgccccagttgggtttcttagaagaggttcgggcatttccttgagaaatcaaagcaatgaggataggtcaaatcagtacaacaagcagccagggaagagttcaaatcccaatcctgtaaaattacggttcactgaaaataaagagaaaccaaggtattttcaagggacatttcattcatcaggctccagggcctcatctgtaagctcttcaaaagctcctgctagaaaatactgcgacgagagacagaaacagccctttttggcagagacagacattgctgaaagcagtaacagaagaactgaggttagacgcctac

SEQ ID NO: 280763 - DNA, 639 bp, Zea mays
aatagcgtccgcccacgcgaccgcgcctgtgccaaattccgctgcccggcggcgaatttactgctctcagcctctacttctcgggttcgagctcaacccggcgggccactgctgcggcgaaggactagcaaggtttcattgcgctcaattgctatggctaccacacaagcctcagaagcagctgctgacaaaggattgcctctggcagtggacgctaccatggttgatgagtatgcctcccagtcaaagttgctgcaagaatttgttaaaatcccaactattggcaaggcttggatcttcaattccaaggatgacgacatgtccaaagcagtggtttcgattggcaaatcagatcttttggccaataagaggagacaattccttttgaatactcacatttcaaagagtccctcaaagtctgtcgattttcagtggtcccccttccctactgaaataagtggagtgtcagcaatagttccatctccatctggagaaaaacttcttctagttcgcaattctgaagatgattcccctacaaaactagagatttggggcccatgtcagttagagaatgagatacatattgcaaaatctgttcatggatcactctatactgatgaatggtttgaagggatatca

SEQ ID NO: 280764 - DNA, 584 bp, Zea mays
ctcgagccgtgccaatctccaactcatacccctattccagaccctgattcttccacaagggggcagttgtcggtgatggaggcgttcggcgggttcttcgtggacgagaaggcagcgcgggtggagaacatcttcctcgagttcctgaagcgattcaaggagtctgatggcgcgggggagccgttctacgaggcggagatggaggtgatgcggtcgcgggagtccactaccatgtacgtagactttgcgcacgtcatgcgcttcaacgacgtcctccagaaggccatctccgaggagtacctcaggtttgaaccatacttatggaatgcatgcaagaggtttgcgttggagcaccgggctggcgagaaccgtgccccgctcatctcagatgatagccccaacaaagatatcaacattgccttctataacatcccgatgctgaaaaaaactgagagagcttgggacagccgaaatcggtaagctcacagcagtaatgggtgttgtcacacggacaagtgaagtgcggcctgaactattgcaaggcaccttcaaatgcctcgactgcggcaatgttgtaaagaatg

SEQ ID NO: 280765 - DNA, 1282 bp, Zea mays
gtttgatggtttctgcaacagggaactaactgtggccgaaatcaaacagatcgctggtagggctgggagatatggatctaagttccctgttggagaagtgacctgtctaaatcctcaagatctcccattgctgcactcgtctctgaaatcagcttcctccattatagagcgtgctggactttttcccacatttgatttattatctttgtattcacgattacatggaactgacttttttcaccctatactggaacgtttcttggagaaggctaaactatcaccagactatttcattactgattgtgaagatatgttgaaggttgctgctattgttgatgatttacctcttgggttgtatgataaatacctcttctgtatgagtccggtggacgtaagtgatgatatatctgcccaaggactagttcagtttgcagaaaattatgcaaggaaaggaattgttcgacttaaagaaatattcacacctggaacattacaggttcctaaaacagacaatcaactcaaggagcttgaatctgttcacaaggtcctagagttatatgtgtggttaagcttcagaatggatgattcctttccagaccgtgaagtagctgcctctcaaaagtcaatctgtagcatgttgatcgaagaatatctggagaggtttggatggcagccacaagaccgaagaaaggttttgggtggagcacaaaagctgctccaagaatacgatgtatcacaaatgaacaaatattttcaagaagtgaacccaggaccgaagtagaaggactatacaggaaatgagcctcaccacttccagtccagatttgaggaaccaataccatccagagcatttgcgttctgcctcactggttatggatcaccggcacaaagtggaactacacttcggacgaccgaagatatacgtggacgcatctcaaaccgtgatcatctagattgatttggcagcacgcatttccatcagccagatcgtgatcgactagtaggacttttttccccaaaaatgaaactacactccagtcttaagtcataatgaatacagagccatgagcccatgatagggccgcttctgagacggagattgtgtattaacgggtacacagacggtacttgcattctagtctgagttcgatgagttgcagcaatagcggctgtaatcctgtatataaagagggaaaataatgttgcttgtgctgttatttattgcaagatctgaatgtttgtgtccaatgacaatttagtagacattttacatgcactaact

SEQ ID NO: 280766 - DNA, 253 bp, Zea mays
tatatatatacagcagctcgtcgggcactccaaggctccaagcgacatgtttgggcagcagtggcccaggcgagaaccgtcgccaatcaaacgagacaaggcagagaccgactgtacagagcgcgctagggcgagcagggccctgcttgactgttttgttctgtggacgttttgctagcgacgtacagcgcctaacagatcatgcaacttctgactgtcgcaacctcctctttgctcttatgtgagccttcgt

SEQ ID NO: 280767 - DNA, 440 bp, Zea mays
cggacgcgtgggcggacgcgtgggcggacgcgtgggcgctaccaaataccaaccacgaagaacaggaagaatgcccaaactgtcgtgtcgggtgctctttgcggctcttctcatcgcttcgctagccgctctgctcgtccggttcccgatccacaggctcctcaacccccacgccgccatggaccctgactccgagctcgagttcgagatgcccggcgtcttgcgtgtgtacaagaccggccgcgtcgagcgcttcgacggcaccgagaccgtcccgccctcccccgacggcgatcccgccaacggcgtcgcgtccaaggacatcgtcctggaccccgccgcaggcatctccgcccgcctctacctacccgcgggagtggatgccgggaagaagctccccgtcgctgtgttctttcacggcggtgcgttcatggtccaca

SEQ ID NO: 280768 - DNA, 555 bp, Zea mays
  unsure (1)..(555): unsure at all n locations
ccctcacatcatcagtgctacatatgagaagtcaacaccttcatgtaccagtgaaagattttccttttcttttcagcaatcagaaaaaatattctcttttggttgggtcttcagttatgtactgttttgtttccaaaatgacaggatggataactcgaaatttggacagtgcccacttttgttgcacttcatgacattgtgtattgcttaaaacttcaattttagtcacactttagctgtcctagcaaaattcagcggttgtgcaccaagagacgccttcaattctagcggctgatgctgtgtttctggtaactgactttgtttactgctggtattcctggccgtttagtggatgaccgcaatctgcgggtagctgattttgctcaattttgggcaactgcgaaggtaaatcctcagtctctgatgtgttgactacaagattactttgcttatggattccttctttttttggggtttggcccattaaagaggtgccgcttgcttngaaataaaaattcacctccaaggagaggatatatcttcttttcctaaaag

SEQ ID NO: 280769 - DNA, 578 bp, Zea mays
ccagaccgacccgtttttttttcgcccgcgcgtccggccacgcgtccgattggtaatggcaagaatgaaagtccaggcagcaagagtaacagatggaagtacaatttctttggaaagaaatccatagaggatcgttctccgcgcgctgaggacagcaagagtttcaggaagcaaaaatcatttggtgcaaaggatgtcatctcagaaaagtctgactttcaccatctcaatggtatgactagagagcaagtgataacctattttaagtctgagatcagcaaaatgaaaaggatgcacgaatcagctttgcaagagaagaccgaagaactgttcaggctcaaacgggagaaggggtcacattctctcaagaatgacatcgaatttgaacctttgagaaagaaaattccagagcttgtgttgagaatggaccaaatcatttccaagaatataaaggtacctgcaatctgcatgacccatgatgaactcgatgacagatgcagattgatgagcagaatcgatgctttgttctatgataatcagcattgtcgagggttgcttgcagacaggatgaaggacgt

SEQ ID NO: 280770 - DNA, 827 bp, Zea mays
cgaagctgttatagaagttcatctacaggctgggaccaccgacaagcacttttggagattttccacttctggccagtattctgcgaaggcagcttatgagctgttcttccttggctccactgccttcgggcctttgaaaggatttggaaaacttgggctcctgccaaatgcaagttctttttgtggttggtcatgcataacagatgctggacagcagatcgtttggcaaaaagggatctccctcaccctgcggtctgtcctctctgtgatcagcaagcggaaacaatccaacaccttctcatttcttgtgtttttgcaagacaattctggttcacgctgctgcaaaagatgggggctgccgaacctctccccagacttggatgccaccaatctggacagttggtggaatagtgctgctgagaagctgcctggagaccttcaagccggctttaattctatcgtgatccttggcgcttggagtatctggcgtccccgcaatgactgtgtcttcaatggcatgtcacctagtgtgaccacggctatcacccttgctagtgatgagctgaggatgtggagcctcgctggtgctaaaggtctcaacctgctgtcagccctggtttttgtgttcgatccagggtgggggttttttcttgagtttttgggtttttgggtttgtgtgtgagttgtgctgtgttttgtgggttgtgttctggtgaccttgtggtcgctgggctgtttgggtgtgtgtttgtgtgtgtgtgtcgtggtgttttgtactccctttttatctttaatggaaagatacgcagctctcctgcgtgttcgag

SEQ ID NO: 280771 - DNA, 308 bp, Zea mays
aacgacttctctttttcccaagatatcatcttgattatagactctttactctaccgaaaaccactgcttgggaaggccaattgtcatggatgttttccaggattatatattagttacttacaggccatttgcatgtacatatcttccatgtgatgatctcgaggagaattatcgccttctagcaatccagctttacagctttcaacagggcgagaactttcaatcatgagtccaaagagtccacctgtttcaatgcgcttcattcctgaacaaaatgacaaagaagtgctgaagcgagatactaatga

SEQ ID NO: 280772 - DNA, 678 bp, Zea mays
tcgccttcgcgtccgtgacggccctccactgtagtctggcgatcgagctcggctcggtcctcccctgcgaggttccccgtcttcgtccgcgctgcaatccaacctggcgccgccgaacccttctctcgcccggtgctcccgaagccgaacccttctctcgcccggcctgccgtagtcctccactccgccggatcctctctcagctcgagcggtcttggagatccgtccgtcccgggatcatttggcgcggaggtttggcctgggaaaatggcaaacatacgtgcacttctggtcggcttatcgcgggcaaggggatccttagcagaggctggacgatgtgcttccacgaggccatcaattctagcatctctgggcgcacattacaagatccccatgccagcccgctggttctcatctacagggcttcctccacatctggtggtcggaatgccagcactatctcctactatgaatcaaggtaacatcgcgaaatggagaaaacaggaaggggacaagatagaggttggtgatgtgatatgtgagatagaaactgataaagccactcttgagtttgaaagccttgaagaggggtatttggccaagattttagcacctgaaggttctaaagatgttcaagttggacaacccattgctgttaccgttgaagaccttgaggat

SEQ ID NO: 280773 - DNA, 414 bp, Zea mays
tctcaactccacggtcgaggcgctcgactccttagccgtggagatcgaggcgaaggcggagacgaacatgcgcttggttagcgagggaatcagggctctggaacttgtgacgatttcatgtgtgacgctgaatcttgtcgcactactggtgttgctggtagggaggcctctaaggctgcaaaagctctgttgcttgcgcatggccttctgctggatactgacagcactgttctggatgtacttcggcctgtactacttcttcgacaagtttgccggcgacacgtgcgttgccctggacgagtaccagctgaaccctcagaacagcacgctggccgccatcataccctgcagcaggaagctctccgctgacgtgatcctgcaccacgtcggcgcgggcattcctgacatcattga

SEQ ID NO: 280774 - DNA, 496 bp, Zea mays
tccgagccaagccgctgcctcgacgtccgcgcacgtcgtcgaccgccagaactgcatcgccgcccgccccgaccagcgccccgcagaccagtgcctcgccttcctccaccgcccgcccgtgcgctgcgacgacagcggctgcttcgccccgccgccgccgcactactagagatccatgcgtactctggctctgccggcggtgggagagagacagaaggagagggagacagtcgccgccggctcgccgcgtcggggcttgtaaacttcgcttgtgtggacgtgtggtgagggatgtgagagtgagaccgagagggggggtaaatccgtaaacagaaaacgaccgtatatattatacagctgtaattctttttttcttcttcttttaccttactttccacaggagtggtgtcgattggagtatttggtgggatatattgtagacagaaactatagtgaattttacagcgttaattcaattacccactgaccagtgacc

SEQ ID NO: 280775 - DNA, 669 bp, Zea mays
cagaagaatcaaggaaattgcagatgactgatacaagatgtcaaagatgcagcgaaaagaaagttggcatatctgatattatccatgcaggtcatggagaccgctatcagttggaatgcacttcctgtggctacacatggttttcgtccagagatgccatcacaacacttacagaggatgccccaagcactgctgggaatgtgggcactgcccccttggcaacagcaaagttcgaggtcgttgagaagaagctcacgagcccacgggaccaatccggcaagcctgcttctgatgctctgcagaagagcactgcagcttacatgccaactatggagaggcagaagtcgtttgctaggaccaagctgttggatgaaccctcccccgcaccaaaacaggggtagagccgtattcatgctgcagattggtctttgcaggatttcgagatacatacttgtacataggggtgatccaccccccgcaccaaaacaggggatgaaaccctcccctgcaccaaaacaggggccccttttcttgacatgctaccacctcgtactggttgtcttcgcttcggtagtttgttttgcagtcatgcatagccaggtaccttctcgttttattatttgcttgtttgttgtagcactcatcagttgacattaggacgtaggtttg

SEQ ID NO: 280776 - DNA, 470 bp, Zea mays
tggactggaacggaacgggagaattttcagtcggagtggcggacaccgatgatggggtctcgcgttcgcatcgtcttcctcctcctcgccttcctcttcgcgcgcgccgccgagccgatcgccgccgccgcacccgccggcagcaggcaccttacgaaggacgagcggtggatgaaccagcgcctcgaccacttctcccccaccgaccaccggcaattcaagcagcgctacttcgagttcctcgactaccatcgggcccccggcggcccggtcttcctgcgcatctgcggcgagtccgcctgcgacggcatccccaacgattacctggccgtgctcgccaagaagttcggcgccgcggtggtgacgccggagcaccggtactacgggaagagttctccattcaagcagctgaccaccgagaacctgaggttcctgtcgtcgaagcatgctctgttcgacctggccgtctt

SEQ ID NO: 280777 - DNA, 462 bp, Zea mays
ttcttagagaggacgagagggggcgtacggaatttcctctgcttccttttaccgcgaaacctttgccttgaaggaagaatccgttcctctgcttgatctgtgttgtagatgagacgagaggcggaggattaacagtgcaggaaggtgaattgggcgcagagactctcagacgcgcagtttttgaagctacgccgcgaaatgaaggaggcgaggaatcactaccacacccggggctcctcgcgcggcggcggcggcaccactgccgagcgcgacctggtgttacagtggggcaaccggaagcgcctgcgctgcgtcaaggtgcagcgccgtgacgtcgaggccgccgctaccgtggccgccgagaaagccggcttcagccagcgccgcgccgcggccacagctgcccagcaccacccagacggccacacccaccaccgtgttttcaggaacacagaagagttt

SEQ ID NO: 280778 - DNA, 458 bp, Zea mays
ttactacccttacagtgggacgctttgtttctcaggtcgttggttacgaacaagattgaacaggcaggcagaagatcatagacagggttcggtctcagagcattttatgtgacttccgccgagtgagattctttagttgtggaggcgaaccataacttctcccagatctgactgtcaaattgcgatagggaagatgtgttatgaaatctgcttgttgtgccatgtcggcttcaaattaagcagcatgaatggagtctacgaatgtggagtcgtattcctagccagatgacccgcgcagcataaatcaagaagatttccattgcatggcattcgatgaacggaacctcgcgctattacatcgtgatcttgtggatggaacccacccttgtttgtagaactgacagacactaaacgcctgtgatccgtttggtcctggacattaacaattttgaccacct

SEQ ID NO: 280779 - DNA, 443 bp, Zea mays
atctcctccatctccctattcctcctcaactcctggaccggccatggccgcaccttccggcacgatgcgcgccgtgcagtacgacagatacggcggaggagcacgggggctcaagcatgtggaggtgccgatcccgtcgccgaagaaaggcgaggtgctcatcaggatggaggccaccagcatcaacgtcgtcgactggaagttccagaacggtttcgcgcggcccttcatgcccaggaggttccctttcatctctggtactgtaacagcacgcagagcagagccatggcgtgctgctggccttgtccccccactccttccctcttgtttaatcgatggccacttcagttttggcttttgacgtgccgtacgtcccgagtgcgcttgaggacgggagatttgcacaggcgagtaatcgtgtttgctttttggaggacaggttt

SEQ ID NO: 280780 - DNA, 444 bp, Zea mays
  unsure (1)..(444): unsure at all n locations
caggttcctgttccggtattccttggtctacccacgctttcgttcacgcctccgcccacgcgtccgcccacgcgggctaacttagntccttttagggtcttgcccatcggcgggatcgaccacccaaatgtcgtgcccctgcaggcctatttacttcagcaaggacgagaagcttatggtgtacgagttcgtggccatgggcagcctttcctccatgcttcacggcaatcgcggctccggccggtcgccactgagctgggagtcgaggaggcgcatcgctttggcctcggcgcgcggtctcgagtacatccacgccacgggctccatggtcacgcgcggcaacatcaagtcgtccaacatcctcctgagccgcaccgtggacgcgcgcgtggccgaccacgggctcgcgcacctcgttaacctggcgggcgcggcgacgactac

SEQ ID NO: 280781 - DNA, 435 bp, Zea mays
aggattccccggccctacgacctttatgacctgctccgcgcgttcgccgaggttcttggcaagggcacgcacgggaccacgtacaaggccgcgatcgagtctgggccggtcatggcggtgaagcgcctcaaggagacctcgttgcccgaacgcgagttccgggacaaggtcgcggccatcggcgggatcgaccacccaaatgtcgtgcccctgcaggcctattacttcagcaaggaccagaagcttatggtgtacgagttcgtggccatgggcagcctttcctccatgcttcacggcaatcgcggctccggccggtcgccactgagctgggagtcgaggaggcgcatcgctttggcctcggcgcgcggtctcgagtacatccacgccacgggctccatggtcacgcacgggaacattaagtggtcccacattctt

SEQ ID NO: 280782 - DNA, 570 bp, Zea mays
gaagggcctccacaaaatttccaactgtacatctgggagacctatcagcctgttagtggcctacttgcacaacctgagtggactgtgtgggaccaaactgttgagtattgtgcatttgcttatcagcagtatatagtgatttcttccttgcggccccaatttaggtaccttggagatgtttcaattccctttgcaactggtgccgtttggcatcgaaggcagttatttgtgtctacaccaacaacaattgagtgtgtctttgttgatgctggagtggcagcgattgacattgaaacaaaaaggataaaacaagaaatgaaagcaagagaagctcagagtcgggcagctgaagagcatggagatttggctcttatcactgttgaagctccccaggttactgtgagtgaaaaagtatcattgaggccaccaatgttgcaggttgttcgtttagcctcctttcagtacgctccatcgataccaccatttatagtaccaaagcaatccaagttcgatggagatgattcagtgtttcagaaagaactggatgacagaaggtatgctgaagttgct

SEQ ID NO: 280783 - DNA, 514 bp, Zea mays
cggctcgagctcaagagccacgcacgcgcaaagacagacacagtcagagggagatcagggaagagaggggaggggaggaggaagaagaagcagcagcagcagctgcagggcagcaggcatggagcctcatcacgcaaacaagccaaagccaaggccaaagctcagcgcgaagcactccaagttcatctcctgcaagctctacatctccgaatcccgcgacgctacggccgtggacgcggtggagcgtgcgagcaagagcgacccccaggtggtcgtcgtcagccagttcggggaccatcactacaaccgtttccgctacacgcttgtctcctacatcgtcgtcgacgacgacggcgtcgacggcggcggcggatcgtcggcggctggagaggcgatagtagtacatagcccgatcaggaaggtgttgctggcaatgatggaggccgcgttctcaagcatagacctggaatcgcagtcgggagcgcatccgaggatgggcgtcgtggacgacctg

SEQ ID NO: 280784 - DNA, 652 bp, Zea mays
acagcacgcacggacgccatcgaggaaccctaacaagagcacgtcacacggggcgacggtttggcgccgcgccaccggcgactggcggctggtgcagcagatggtaaattatttctcagactcagagtgcaagaaagttggttcgtccagggaagaggaatagaggttatggttttgtgtgagatcgcgtggcgtctgccttcaaatcattcccttggtatttattgagcactgcaagcggttgaggacttgaggtaaacatgctgaagtgcatcttgagccagtcatggaagagaggagcacatatgctacatgcaggaaattcagcaccagctgtactaacttgctggagtcaatttcacagtgggcaggtctggagttcttccaggagcttcttcggcgtggaggacttcgtggacgaggacaacagtaggccatacacgtacaagaaggagaagaggtccaagaacccccacaagcacatctcgttcaagcagcgcaccatcgcccacatggagccgttcacgctggacgtgttcatctccaagcgcttcgtctcggcgtccctcacgcaccggtcgacctgcaggcaggtcgcggtcgccgggaccaactccaaggacatcaaggcggcgctcaggtcgatgtccga

SEQ ID NO: 280785 - DNA, 632 bp, Zea mays
tttagtaatgtggccaatgtatgctgtgtacaagtcgctccatactcctcccgcatgctagcttttggttcagctgattacaagatatactgttatgatctgaggaacacaaggataccttggtgtactattttgggacatgggaaagctgtcagttatgtgaggttcttggatccagacacacttgtctctgcatcaaccgacaacacattgaagatatgggatcttaaccagactaattgcagtggattatctaccgattcttgccgcctgactctgaatggtcataccaacgagaagaattttgtagggctatctgttcatgatggatacataacttgtggctctgaaaccaatgaagtgttttcttactacaaaactttccccatgccaataacttctcataggtttggttctattgacccgataactggacaagtgacaaatgaagacaaccagcaatttgtgtccagtgtttgctggagagggaagtcaaacatggtagtggctgccaactccagtggtagcatcaaagtgcttgagcttgtgtgaatgaacgagagtcatattggagaagaaggttctagtgttgccatgcgggcctgcgatgctttcggcccttgggcactaaa

SEQ ID NO: 280786 - DNA, 518 bp, Zea mays
ttgtacttacccccttattccatagcgagcgcgagcagcggcgccgggaggacgaggactgctgcgatggggggagacgccagcaccatcgaggggggcccgctcccgcatctcggcggccggccggcctcccgcgtgcccgacaccccgctggtgcgcacggcgggggacgccgcgcgcatggtctgggacgagtccaagcgcctctggggcatcgggctgcccatcggcgtgggcatgctgagcatgtacgccatcagctccatcacccagatattcatcggccacctcggcaacctcccgctggccgccgcctccatcggcctctccgtgttcgccaccttcgcgctcggcttcctcctcggcatgggcagcgcgctcgagacgctctgcggccaggccttcggcgccggcgaggtcgccatgctcggcgtctacctgcagcggtcttggatcatcctcgtcgccgcctgcgtcgtcatgacgcccgtcttcgtcttcgccgagtcgctgctcct

SEQ ID NO: 280787 - DNA, 509 bp, Zea mays
cgtgcgcccacccgtgacgggggaacgaaggcaagcaaggagcaccgcaccacgccactccagtactccactccactgtggtcccctcctcgatccagccatggcggcctagcccccccccctcccctaggggtatctgccagcccccaccgacccaggcgcctcttgccgctcccacccggggggggcgctgtcggagtcgaatgggagggcacccggcgctcggagtccggcgtgaccgcacgctgccggaggttccctgagctcgccggcggcgggagcgtggctggtccggagcgcgccgcgcgtgcaatgggaggttcgaggggggttcctgcgagccgccgcggcggtctcggttctgcaagcgcgtggcccatgcttcgcgaagggtagggttgtctgtctagctagctgctgcttggtctgatgagctcagttccggcgtcccgcctcggcttccccgcacgcttgctccgtcggctgcccagaacccagcttgcccgctc

SEQ ID NO: 280788 - DNA, 744 bp, Zea mays
tcgcctactcgtccgacagaatacatgcgcctgcgaaggcttaaaatgggcgttgatgactttgaattgcttaccattattgggagaggtgcatttggggaggtgagactttgtagagaaaaagctacatccaatgtgtatgcaatgaaaaagcttaagaagtccgaaatgttacgaagagggcaggttgaacatgtcagagccgaaagggacctccttgcagaggttgatagtccttacattgttaagctgtactgctcatttcaagatgatgagtttctgtacctcattatggagtaccttcctggtggtgacatgatgactttactcatgcgcaaggacacactgactgaggacgaatctaagttttatgttgcagagacaatactagcaattgaatctattcacaaacgcatttatattcatagggatatcaagcctgataatttgtcgctagatcgaagtggccacttgaagctttcagattttggcttatgtaaacctctagatagcaggggcttcccaaatctgagtgaccttgactatgcagaaggtaagagcagcaatccatcatcagatggtgataagcaatccagtaactctactgcccccaggcggacacaacaggaacaactactacattggcagaagaatcggaggatggtggcttactctactgttggtacacctgattacattgcacccgaggtactcctgaagaaaggatatggaatggaatgtgac

SEQ ID NO: 280789 - DNA, 834 bp, Zea mays
tggaactgctggcgcatttgatgataccactaaaggaatacttcatgcggcgcttgatagatcagagtattggcgcctgtccgatgaaaaagggaaaccccctggagtattgggttggtggccttcaagagcagtcacatttatagagaatcatgatactggttctactcagggccattggaggttcccctatggtatggaactgcaaggatacgcctacatcctgacacaccctggcactcccgcagtcttctatgaccacatattttcacacttacaaccagagatcgctaaatttatttccattcgacaccgtcaaaagattcattgccgcagcaagatcaagatactaaaggcagagaggagtttatatgcggctgaaattgatgagaaggtaacaatgaaaatcggatcagaacattttgagccaagcggtccccagaactggattgttgctgctgagggtcaagattacaaaatctgggaagcgtcttcatagacttggcgggctgcgagtgccatataactgctcaaagactaaaaagctacaagaaagcataatgctaggagatggcgcctcagaatggtcagctggcgggagctgctgccgctgccgccatggagcagcaaaattcaacaacataagctatggaagcacttgccacggcgataggattatctaataggactactgttgaacattcgatatatccagaaccacccatcatttgcaggcacattggccattaaaatttagcttcgtcctctattttggagctatgtaaaagcatgcacaactctatttatgtgtgaaataaaatttgaatcttcatc

SEQ ID NO: 280790 - DNA, 619 bp, Zea mays
tccgtactcgtgggagatactaaaggcagagaggagtttatatgcggctgaaattgatgagaaggtaacaatgaaaatcggatcagaacattttgagccaagcggtccccagaactggattgttgctgctgagggtcaagattacaaaatctgggaagcgtcttcatagacttggcgggctgcgagtgccatataactgctcaaagactaaaaaggtacccagtatagctcttaaagaaacgtgtttgtattgtgcaggttgagatccagatcccttcacatttgattaaatctgaaattccttgagcaaactgccttttccaaaggaagctacaagaaagcataatgctaggagatggcgcctcagaatggtcagctggcgggagctgctgccgctgccgccatggagcagcaaaattcaacaacataagctatggaagcacttgccacggcgataggattatctaataggactactgttgaacattcgatatatccagaaccacccatcatttgcaggcacattggccattaaaatttagcttcgtcctctattttggagctatgtaaaagcatgcacaactctatttatgtgtgaaataaaatttgaatcttcatc

SEQ ID NO: 280791 - DNA, 489 bp, Zea mays
ttcgcttggcgctagctgcggcacggaaccagcgccattagaggccacaagcccgcaccacgcctccctcgttctcgcgcgcgcgcacgcatgcacgaggagctgctgcagagaagaggaggcctgtcgatttgattgaactttccaaattcagattcagaagctggccaagatgactgccggtttccagctcggcgtgatcgggtctctcacgctctccgtcgcgtcgtcggttgccattgtcatctgcaacaaagccctcatcagcaccctaggctttccattcgctagctttgcagagtcacgtgcgttcagcccaatacttgccggagtatcgtatgtaaatgtaaatgtgtgcctatgatcaatgcagctacgactctgacaagctggcacctgatggtgaccttctgcaccctccacgtggcgcagcgcctgcgctttttcgagcccaaggcgatcgacgggcagacggtagttctgtttggc

SEQ ID NO: 280792 - DNA, 890 bp, Zea mays
  unsure (1)..(890): unsure at all n locations
ttcacgcgtccggtttctcctcgccctaaactaaaaaaaggtaaccgtccccgaagcccaaagccaaaaattcccccaccccaaggccgcatcctcctgcagcctgctcgaaaccctccttcctcctcctgaattcgtcaaccggtctcccaaatcgtagcggcaatcggattgtttggtctcgagactgagctgtgctccagtccgtgagctattcgttgatttttccagcgtgaaggcgccgatttttgggccgttggctgtggtggccggttcggcgtctctggatccggctggcttcccgcgatagatcgggccattggagcagcacaatacttcggattcttgatgtgtccgtagctgcactcgcggtgaccttttttgtaggaagccggttgaattcgtagacctgaagatttattagctggcccacgccattttcggcaataaaatattcggctgtttcatagcaatttcagggtccttctcaatcttctgaagaagcgagcagagacggcttttgaaccgggcgatgcaggccaaggctcggatccacgctgacccggtccatgagtttgaccaattcgactgcttgcacgattctcttgtgctgctgatcctgaacaagctcgaggacgtgcgttcactcggcaggtgctctgccgtgtccaagcgattcagtggcctggttctcctcgtccatgatgtgcgtgtcaagatcgaccacgttgtgaccgtggacggcggcgccgatgacgctctgaacctgtcgtcaccgaagccccacaacatcatctcgcatctattcaagatgatgctgttcgcgatcgccaagcccttccatgacatgcngagccccattagcgcagggcggctgctgttccctcagc

SEQ ID NO: 280793 - DNA, 787 bp, Zea mays
  unsure (1)..(787): unsure at all n locations
tgtctacgcgtccgccaagatggacgcgctccggggggagattgacgtcgacagctgctgcatctccgtatacaacaacggcgacgggatccccgtcgaggtccaccaggaggagggcgtctacgtgccagagatgatattgggccacctcctcaccagtagcaactacaacgacaacgagaagaagaccaccggcgggaggaacggatacggcgccaaactcactaacctcttctccactgagttcgtcatcgagaccgccgatgggcgtcgccagaagaagtacaagcaggttttctatgagaacatggggaagaagtcagagccccagattaccaagtgcaagcagggcgagaactggaccagggtcaccttcaagcctgatcttgccaagttcaacatgacccatctcgaagatgatgttgtagccctcatgaggaagagagtggttgatatggcaggcactcttggcaaaacagtgaaggttgagttggatgggcacagggtgcccataaagagcttctgtgattatgtcgacctgtatatgaagagtgctaactgtgacagacctgataatttcaaaaagatttatgagcaagtgctcctcctcctcctccaccaccaccaccaccatcaatgtcacgttctgctcatccgccacaccccccgccaccaccatcattgtattctaatgtcccattgcctcctctntcatgcacactttctagttcacctttcgccctcgcgtcgtcaccaccttcttctatggcacgttcagcagcaccac

SEQ ID NO: 280794 - DNA, 515 bp, Zea mays
gtttgagtcgggttgtgttcggaattctgagtggagctatatttatttggctttgtaagaagtttcttgagcaatatggagaagtaagcatgttagatagataaggggcagatgcaagtattagttattcttgattgttggtataatgactcttcattcgtttggagaaggctctggtgtgggtggttccgttgctggctcataaggggtcgctcagggtcttctagttactatagctatagcagtgcacaacataccagaaggcttagcagtaagcatggttctcgcgtctagaggggtgtccccccaaaaggcaatgatgtggagtatcattacatctttaccacagccaattgttgctgttcctgcattcctctgtgccgatgcattccagaaggtgcttcccttttgtactggtttcgcagcagggtgcatgatatggattgttatagcggaggttcttcctgacgcttttaaggaagcaactccatctcaagtagcttctgctggaacac

SEQ ID NO: 280795 - DNA, 574 bp, Zea mays
ttgatttggcgtccgcccacgcgtccggtaaaataaagtgacccaacaagccccaattcatgacctcctttttgtttcaaatatgctgtgccacatgttggcttgtttaggctacactgcatgaacaaggccatgttgggcctgggtcctgttgcatgttgatgtgctttgtagttttagtcaattcatggcaagtgcttgcttgtatttgttcttgtcaccatattggcaattgtttggattcttgcaatgctcataaaaaaaaaaagttccaaatttcaggttcgctttatcgattcacttccagaaatatatcctgttgttaacaaatgggtggaagatgttctcctggatgaagggaatgcaacaattttgactctctttgcttgccttgtaactgtcctctacttgcgagagcgtcaaaggcgtcaagtggcagcagccaacccccaacaacctgatgatgtggtcatgtaaatgtctgttttcatgacatgtgcagccctgttgcttgagggaattggagatgtaaaatggtagctccttcacatgactcatgtacactaaattgagt

SEQ ID NO: 280796 - DNA, 482 bp, Zea mays
cacgaaggagccaagggagggtacataggagctgttgcgccggacatcgaacaggagcctgcagcacctgtcgaacatacggcacctgaaggcgacgaatacgcagaaatgccattgaaacttgattactggtctaaactgggtaggcccagtccgaatgtcatcacataacaacagcgtggtggccaaatcacaagctcttacacgtatagtatagcgtgtttcatctttacaagatccttgcccttttccttttcacccctatcaccccaacccacctacgctgcattacatgtcctgctataccagtataccaccaatctgtatacaattgaaaaactacaggctactacaacccaatgctcctttcaggcacatatgtaacacatatataatcatctgaggtactctcttccgttccaaattataaaacgttttgggtatatctaaacacatatcttatatttagtatagcaaaggcc

SEQ ID NO: 280797 - DNA, 905 bp, Zea mays
  unsure (1)..(905): unsure at all n locations
tttctttcgcggccgtcctcgcgcaggttgtgagtggaaagaatcgatcaggcgagagattacagcctgcacttctttccaagatctgtacatcggcagtgaaggaatcattgagaaatatatatggtaacaagttagacagttttatgagaaactttgagaaatcattcagcagcacattgacaacgcttcatcttgttaatgagatgcctgtctatggacaaggtccagttcctcaatgttcttctaagcatgaagactctgaagcttcaagcaagttgagcactggtggtacacaaaatctaacgcgtgaaatcaagcaggagcgtttgaattcagtggaaagtcagcttgttctttatgctggcggctatcagcagatgactcgccgcgctcatagcttatcttctcctgaagctgatcagcgcatccttaatgcatttgagagatctttgaaagaacaaactcggtcaaatgagctcaaggaatttgagataagccttagcatgagaaagttgaagctaaaacagtctcaactagaacttaactcctattcacacatgttagacaagattaagttatccttgggatttcagaaagcttccttccaagtggaaaaattcaagactcagatgcaggacacgaggcatgcacaaataatgaggacactcatagattttcttgttagtgcagtgattattatgtcagtatgctttgggtatggaacttatacttattcataccaaaggataactgatattacagcagcatgttcagccacttcaaagggatctaaatcatggtggatgccaaattcagtgtcaaacttcaatactgggatgctcttcataagatgtcatgtaatagctgcaacacngatgttctttggtataagaatgattttg

SEQ ID NO: 280798 - DNA, 721 bp, Zea mays
ttgacgcgtgggcctgattataaatttgacagaatactaattgaatttgagaaatccatgacaatggagcttgattttacgcgggaggctaagaattctgagagaacagccagctgcttcaggaaaaatagtgttgttaaagtgccttatgtgttctggcaacttacaaccagggaggttttgacgatggagttttgttatggacacaaggttaacgacttggacttcctgcggaaaacagatattagccctacaaaggtagctaaggctttgattgaatctctttggtgaaatgatatttgtacatggttttgttcacggtgatccacatcctggaaatatattagtttctcctgaaggccatgggaaattttcactagttctgttggatcatggaatttatagagaattggaccaaaagttcagattggactattgtcggctatggaaagcactgatattgttggattcaaacaaaattctggaattaggcgaacagtttggcgttggcaaatatgcgaagtactttcctgtaatattcacagggagaactatagaaagcaagtcagctcttggcacacaaatgtctggtgaagagcagaggcgtctgaaggaggacttaaactctcttgggatggatgatatatcttcatttatggaatccttgccaccggacttctatgtcatactacgaacagacggactattgaggtccatttta

SEQ ID NO: 280799 - DNA, 378 bp, Zea mays
  unsure (1)..(378): unsure at all n locations
tgactcctttccactccactccactccacccacccaccaataccagcggcagtaaattccgagcagccgctgcccgctgccgaggctcgaggctctctcctcgctccccccacccgtctgctcctcctagggtttcctctcggctcgccggcgtgccgcatcgcctcgcctcgcccttgccgcgggttccgccgctcgggggcacccgaaccgatcctcgcgggagttgttcgtgctgattcctgctgggtcttgtggctcggactctggggcgtcgggtgggaaagattttgccgcccgtgggggtttggatcgagggctctaagccgtgtctccgcaatgccnggctggcctggcggcgattgctagggttttctg

SEQ ID NO: 280800 - DNA, 603 bp, Zea mays
tccacgcgtccgcccacgcgtccgcccacgcgtccgcccacgcgtacgcgtcttcctcttccccatcagccgccctaccgagtcttcgcacgcacgacgcttcgtcaggatcgattcgcgagacctctcctgtccggatcgaggttcatggtttacatatgcgcgtttgtttactgatgcataccacgaccacctgatccgtatgtcaggacagatctcctgctttaatcgagtccagttcatgtatgaactttcccttttcctggcacgttgctagatgtaaaagggtgttccgggatttaaaagaaccacccacgcatccatgtctgaccagcaaaggcactacggcagctacgagctcctcccggctcacccagatctgcggtgcctggtctgcacgcggccgttcactcttgacgccgaggtcaccgacagcttggaagctttagccatatgcagggagtgcaagacgacggtgcttagtgacagcaacagggacgacactccccgagccaaccgacagagaagatggcgaaggcggcaaagctccatcaggggggtctcgtgttctcgcagtgatcacctagctagacacaggtcatg

SEQ ID NO: 280801 - DNA, 833 bp, Zea mays
agaagatgtgggctacacatgtgaaactgctgcatatttttggctattacatgtttatgcccgttgggaacaattcttagctgcctgtgctcaaaatcaagacaaaccctcttttgtcaaagaccgcttccccttttcagagttcttttcagatactccgcagcctatttttaccggcgagtcatttgagatggatatgcatgcagcgaaaggttgtttcaaacatctttctacgatattccaagagttggaggagtgtagggcttttgagctacttaagtcaacagtggagcgagcaaactatctaatgactaaacaggccaagatagttgctatgacttgtactcatgcagcattgaagaggagggactttcttcaattaggtttcaaatttgacaatttgctgatggaagaaagtgcacaaatattggagatagaaacttttataccgatgctgctgcagcggcaggaagatggccatgctcgtcttaaacgttgcattttaattggtgaccaccatcagttaccccctgttgttaagaacatggcttttcagaagtatagccacatggaccagagtctctttacaaggtttgttcgacttggtgtcccttatattgagctcaatgcccagggtcgtgcaagacctagtattgctgaactttataaactggagatacagggagctgggagatctgccttatgtccgtgagcaagcaatcttccataaagctaacgccggattctctgttgagtatcagttagttgatgttcctgattataagggaaaaggtgagtcagcgccttctccttggttttaccagaatgaaggg

SEQ ID NO: 280802 - DNA, 710 bp, Zea mays
ttcttcccacgcgtccgcccacccggcccacggacgatgcgccgcagcccgccgtcctgccgaggcaccgacggttgccgcctaccccagcacggctgcacttcgatccggtcttgctcgtgcttcgtgctgtcttagcggtcgatcgtcgccatctcccctcggtgcttggccgtccagcgggaacggcgcagccgcgcaggcgcaacgggtgctcgcctttcgacaagggcgccccccgcgccagcccaagcgccagcaccagcgaggccggggcggagcacaggagcccgccgctggcctgctgctcaagccccaggggcggcggatctacagccggcgccgagggaggcgccaagcccttcctccagctgatgtagcaatatttactcacatttgatcctcacaacactgatactttaagatggaacaaatttcacttggcaacagatacaaggagtgcaggacacaaagaactaccagctgtcaaacaaaaatacttgttggaaaggatgtattaaacgaaatagagcaaaggcgttcatcaccaagtgtgattgcaaaactgatgggaattgaggtgttgccaccttctaaagtggtcaatagtcggcatcaagaatttaaggatgtttttgaagtgtcagaggaaccaccagaggctgtcgcaaaagagaagtcccaaggcttgccgagcttgaaacgaagag

SEQ ID NO: 280803 - DNA, 1446 bp, Zea mays
  unsure (1)..(1446): unsure at all n locations
aacttcgggacgccgtccgtgccggcggatggcggcggcgcggcggaggcggcgcccgtgatcgagttcagtgggagggaggatgtggagcgcctgctcgccgagaaaatgaagggcaaaagcaagaacgatttcaaggggagagtcgatcagatgagcgactacatcaagaagctcagggcgtgcatccggtggtacatggagctggaggatggctatttggccgagcaggagaagctcctaggtgctatggattctgagaacacccgtcataccgagttggaggcccagctcagcactgctattgaagagctcaaagccactaacttggacttgacaaggcgttgtgagtctctagaggagagcttcaacatggagatgtctgaataactgatcgctgtggagtcctacgagaaagataagcaggaaagggaatcagctgagagctcacgagatgtactaactgtggacctagaaagggtcactcatgatgctaagcggtttagcgagcagctaaaaatggtccatgacactaataaaaggctttaagaatacaacactagccgtgaacaatacaacagttaccttcaggctgatgcctcgaagagtggtgtgaccatctcaaaacttcagacagagaagagtgccatgatggaaactatggctactctgtgagagtgtaacagctcaatgggcaatcagcttgaatcttctagagtttctcaacaagaagctattagagtgaaggaagagctcaggaaagaagtggagtgccttagagttgagttgaagcaagttagagatgatcgtgatcattcagctattcaactgaacagtttgaacattgaacttggtaattacaaggaacagattggtagaacttcaaaagaatgtgaaagattccgcaccaaagtatctgaacttgaggaaacatgcagtacacaacaagaacagattcggacatttcaaaagcagcttgcagttgcgactgagaagttgaagcttgctgatgtaactgcgatagaggcgatgactggttatgaagaacagaaggagaaaataaaataccttgaggagcgtttagcacaggcagagtctcaaatgtgttgaaggcgacgagttacgggaaaaactgcacaacactatattggaactgaaaggaaacattagggttttttgtagagttcgaccacttcttcgattgagggtgattccaatggtccgaaggtgcctctatctcttttcaacatctgtagagtctactggacgtagcattgatttgataaaccaagggcataagctctccttctcatatgacaaggttttttgaccatggntgcgtcacaggaagaatgtgtttgtggaaaatatcgcatctaagtcaaaagtgccttgatgggtacanggtatgcatatntgcatatggtcaaaactgggatctgtaaa

SEQ ID NO: 280804 - DNA, 637 bp, Zea mays
ttgacgcgtgggtgactccaatacctagccaggaaccttcaagaactggaactccactagggtcaaggacaccaactcgaagccctaactgttcagtaccgtcaacacctgtaggggggaggtcaatagcatctcctcctggagaagactgcacagacgatggcccatttttccacaggaaatgcggcgtacatgcaaatgaattgtcagatactgagacgaggcttaaaacaaggcaagaaatcgctgcgcttggcatacagctaggaaagatgaacattgctacgtgggccagcaaagaggagctagagctagtctctgcggcaccgagcatcgctgatttggagcgcatcaggaaggaatatgctgctcgtgctgcatcgtatgaggaggcagaaaatactaaacatacagcaagattcaaaaaagaagaggtgaagattgaagcttgggagggtcgtcaaagagcaaaaattgaatatgaaatgagaagaatagaggaatttgctgagagaatgagaagtgaggccatggaaaagatggccgaaaagctagagatgacgcgccgcatagccgaagagaaacgagcttcggccaacgccaaaatgaaccagcaagcactatagcggttcagaag

SEQ ID NO: 280805 - DNA, 537 bp, Zea mays
ggtggtgcacgcgtcccacgccggcggcgtggtgcactgcctggaagggtgggagcaccacgaggtgggcgccctcgaggtggaccggatcgacgtcgtgtgggaggcggcgctcaagcacgggctcacgccggcgtgagcgggagggcgcccggagcgggagaccgagacggccggcgcgcgcggccccgcccggaaataacgcgtcgtctattcgttgtcgcatggctgttgcgacgggtgggtcggtgtgctaccgtgtactactactaccagctactagctaccatagtccaagactgctgcaagcgcaatgcaacagagttgataggctggttcgcatataccaatactcttatgtacgtaccgaatactgcaatattgcacgaggcatgggcttccgttacttatggccaggcctgcgacctagtagaaatcgtcatgtcggtctgtactgttcattgggctctaaactggattgacactctgggccggaccaccccggcccacccaagcatggtacaaaagcaatagccc

SEQ ID NO: 280806 - DNA, 511 bp, Zea mays
ttgacgcgtgggcggacgcgtgggtgctgaggcgctttgtcgagaagtgcctagtatcgtcatctcagagactgtcagcaagagaactgcttgaggatcccttcctacagggcgatgacgtggctgtttctttggatggtggagattatcatgtaccgaccaagtacgtacggcagccttcatatctagggcatacctatagcaatggctccatggtgagcaatggattctcagaaagcatggatgaggacgctctgagtgaagactgcgaggatgatgacatgaaaggccaagatggcattgacctgttcaacgagaatgaggatgagcctcttggcaatgtggacataacaatcaaagggagatagagtgaggatggaggcatattcctcagattgcggatttctgataatgatggacgggtacgcaacatctattttccttttgacgttgaggctgataccgcactaagccgtgcaactgaaatgatagccgagctggatataactga

SEQ ID NO: 280807 - DNA, 646 bp, Zea mays
atcatggaaaggactgtgatatccaaagcaatgctgctatttgtatagaactgagcagtgaagaacctggaacatcatcacttgtttcacctcaggcagttggttctggtccatctatatcagaagatctcgtctttcggttactaaacctctcactgtataagatactggagaacaacctacaggaagcacaaatggctgcgagtaaagcattgaaattggctcatggggagtggtacgagcactgtataagagaacacgctgcaattcatgcactggagctggagaaatcatcatcttcgacagatgctcaaactcgggctacattcagtttaatcattggctaccttgctgatcattgcaacttgcccacgagggagctgctgtcacgaaggttttgccagaatattaagaagcataggcttaggcagcttatagatgatactattggttctgttcctgcagattcttctctgataaactctgtccttgaagtgtgctttggcccatccctccttccaaaaagcattagcgatgtgaagtacctgcgttgattttgttgaaacagtcatggacgctcttcctgcaaactatcgcctgggcttggctcgtcgtggattcgtagctaagcactttacaggttatg

SEQ ID NO: 280808 - DNA, 462 bp, Zea mays
tttcgtcctttcctccgctcaacgctcgcccacgcccccagcccccaaccgatccaagagaaaccttctcgcctccgcgggacgattcgccagggagagcaaaggtagcagaggcgccatggacgctgccaagtcggtgacgccgggcgccgtgtcatacatcctggcgcacccgtctacgggctccgatggcgccgtgtcggatctcgtcgttcaggtcctcgatctcaagtccatcggcatgggcagccggttcagtttcacggcaaccgatgggaacgacaaaatcaaggcgatgctccccacttactttgcgtcggaggtccactccggcaatctgaagaatttcggtctcatccgcatcctcgactacacttgcaactccgtcaaaggcaacgctgacatagtcctgattgtcgtcaaatgcgagactgtgtgcgaagcgctcgatgccgagatcaa

SEQ ID NO: 280809 - DNA, 720 bp, Zea mays
tccacgcgtccgatttcttctaggtgtcgcttcttgggcacagatggcaaacttgatcagctgataataaattggagaaagaaccgtaaaaaatgggatacaaagaaaaaattccatgagaatttggcagccgtattggactttgcactgccttcaccccgttaggtcggtgataaagcgaaagatgacgagcaagctgattgtgggatatgttatgccaagcatctgccagttgatgacgaactcggtgcccacagcgggtgtgcgacggactacatgtgtgagaaccccagctgcagcagagccttccattccgtgtgcctgagagactggttgcgctccatcaccacgactaggcagtcgttcgatgtcctgttcgggaactgcccctactgcagcgatcccgtcgccgtcaagatcacccggccactaaccctgtatcttggtcagcgtttacaaagtcagccaggcgattttaggtgccccttaacttgcgtttcacgtcccccaagggagaaaacgagactattttggttcctgcttacatgtccaatagccaagtgtccccttcggttacgttatctaaatgagctcctgcttacatgtagtattatgtcagtttcctttcagaaaggtcaagatcgctctaggtggatacattcgtccgatttagcggagctgcaactgaaatatgtcaaaatttgccgccggcttctaccc

SEQ ID NO: 280810 - DNA, 324 bp, Zea mays
cccacgcgtccgcccacgcgtccgcccacgcgtccgcgcacgcggcgggtgaagaagcggtcgaagcaccgcaaagcggtcaagttctacgccacatgcttcggcttccgcgagccctataaagtcctcatcgacggcaccttcgtccaccacctcctcacccagcgcctcctcccggccgacgaggctctccgagacctcctctcggcctccaggacgccagccctcttcacctccaagtgcatcctcgcagagctcagacgtctcggcaagtcacatgccgaatcatttgacgccgcgcagttcttcacgacaaccagtgtg

SEQ ID NO: 280811 - DNA, 545 bp, Zea mays
ccattcgtccgattgatccatttgaccatttgattcaggacttgtttttctttacaaggttccaacaacattcatgaacaggacagttcgttattagccgcagtataacaaaacagtccgtcactcgtcattcaggacactgatagaaaaaaaaaacagttaatcataattctccaagaaaattcgatgcacttttgggcaacatcaacacgatgttttctgcatcttgttcacggagagtatgctaaaatctttttaaaaaaaccccacccagttaaaacagggcgattcaattagattgcacctgaaggaggcggtgctgtccctcctgactccagcatgaactgcgcgggcaaaatcttggccgcgcacccgaacttgtaggtactgtacttcctgtgcacgccagtgagcttgccggttccagccttctggtgaaagtctaccatcatcctcgagcactcccggagttggtcgccagtgtatctgctgtgtgactcgcaaacctttgtccattgctggcaacggttaatagcacattgtgc

SEQ ID NO: 280812 - DNA, 717 bp, Zea mays
cccatgcgtccgattttagagagagagaacaaaaaatcaaacaggcatccaaaaagaagggagaggaagagggagggattgaaaagctagggttttcgccatggccgttgcccacctcgagctcccctctctcgaatccacccttcccaagctctcctagctcccgcatctcgtatcttcacaaaaagcagacgcctttgattccccttcccgctgcgtcgcccccattcgagggttttccctccttccccaaatcgaatcgcagcattaccgaccgagcaagcaacccaccaacccacccgctttcaagggtccgagccgagcgacggcgctggcgatccagctgggcgtgagggcggcggaggcggccggataatcaatgtgtacgctgtgcgccgtgcagcggtggtcgcggcgcgtcgccaccatgctcccgtggctcgtcgtcccgctcatcgtcatctgggccgccactcagctgctcctcccggccgtctaccgcttcgaggtcacctccccgcgcctcgcctgcgtctccgtcctcctcctgaccctcttctggtacgagatcctcctcccgcgcctctccctgtggcgctaccgccgctccgcgcgcctacgagaggagcgcgggtcccacgctctcgagctacataagctccgtaagaccgtgacacggtgctgacgcaactgcagcgacccgtacagggaccagaa

SEQ ID NO: 280813 - DNA, 691 bp, Zea mays
tcctttcgtccgcggacgcgtgggcgacgggggagcgtcaccaggcctagcggcagcggaccgcgacgagacggcgcccggtgcgccgacgacgacggccgtgtcgcccgcggcgacgtgggacgccgccgagcgcgccaagcacatggccaggtatcggcgcgaggagatgaaaatacaggcctgggaaaaccggcgacggcaaaaggcggagctgcaaatgaaggtggccgaggccaaggcggagaggatgaagctacgggcgcaggagaagacggcgagcaagctggcctcggcgcaggcggctgcgagggagaagcgcgcgcaggcggaggccaagctgaaccggcgcgccgcgcgggtcgacagggcggacgcgctcaggcggaccggccacctgccgtcctcctcctccgtgttctcgctcaagctgccgctgatgtgcagatgagagccgaccgaggggggtgtggcacagcagttcacacggatgctgttcagagtttcagtcaactgtcctgttagaattggtcgggacgctgctcgcgtccttgtgtttcagccgagcgggtttccgatgcccacaggcacatggcacttagaattgtagacatttgttttttttatctgcccaaatcagtgaagaacaaaaatactctttatatttaaaaaaaaaaaaaaaaaaaaataa

SEQ ID NO: 280814 - DNA, 456 bp, Zea mays
atcgaaccatgaagaagtactctgataaccttttgcatgcactggaaggcgtaagctccaggccttcaacagatggagggcagaacacaccaactcgaaaactctgttgatgagttgaagttaacaattggtaactataatggttccgctgatggaaaactcaggctccttgagaacatgctcagagaggtccaagcaggtgtgcagattttacgagacaagcaggaaattgtcgaggcgcaactccaccttgcaaagctccagacaaccaaaactgatgcccactcatcagaaaatagtgggtctggacatgctggctctcagccggtgccttctccacaggcagccattcagccacagcaagtcttaacccctttgcaaccacctgcactttctgccctttcttgttcaaatgcaccactttcaacgcttcaaagacaaccaccatcacagatt

SEQ ID NO: 280815 - DNA, 504 bp, Zea mays
ttcattcgtccgcccacgcgtccgctcatcacaacattcgagaacagaccggggccttgcgcaaaagaacaaaaaaaatctcagaacacacacacacacctgtatcgccccgacctcgacgcgacccctctcgcttggatccggacggcccggtccctccgccctcccatgcgcacggcgccgccgccgccgccgcagccgacatgacgctcgcctccctcgcccgcgccctcggccggtccgcgcgctcctcccgcccgcgccagggtttccagctcgggggcctccggcagccgcccgcgccaccgctaccgccgtccgtccacggcggtgagggtggggcggcaggatttgttcgcagctacctgactgcggcctcgtcggcagctcttgggaagccatccgcgggcatgaccgtggattggagatatgtccttgccagcccacaatttcgacgcctcttctcggacgggttcaagaggaactacgagaactattacccca

SEQ ID NO: 280816 - DNA, 467 bp, Zea mays
tttcgtaagcaggcgatgttattctttttattgatgaggtccacaaccttattggatctggaactgttggaaagagtaagggttctggtcttgacattggcaacttgctgaagcccgcgcttgctagaggtgaattgcagtgcattgctgctacaactctagatgaacaccggatgcattttgagaaggataaggctttggcccgccgcttccagccagtactagtagatgagcctagtcaggaagatgctgtgaagatattactgggtcttcgtgaaaaatatgaagcttaccataaatgcaaattcacattggaagccatcaatgcagcagtttatttgtcagcaagatacattcctgacagacagcttcctgataaggctattgatctgattgatgaggctggaagtagagctcggatggaatcatttaataggaagaaggaagggcagtcttcgattctcttg

SEQ ID NO: 280817 - DNA, 617 bp, Zea mays
  unsure (1)..(617): unsure at all n locations
gggacctggcgttttgccgtcccacncgaagggaggggaggcagccgctggaacacatagggacaagtgcgtttccagcagcatacggatagagctatagatggatcacgcattcaggccctgatgcaagcgctccccccgccatttccttcaacttctgctaagtagcctaatactcccatcggccggtcggctcctctacctgcatttgcggattggcgtcttcctcgtcaccgacccgatccatcccctctctacccggggacggggggtctacaacgtcgtcaggtcgtccttatccgcgtgctggccttcggatgtcggctgccgcgttggtttaacacaaaccacgcgtccatgcctgccgcttccgcaggctccatgccactgccacctgggtggcgttttctttccgggggcacatcacacatggcgtccgtccgcgtaggcacagaaggcttctcctggagttcagtggctattccctactaactgctaactggcagcagcttctggatcgggccatcggtgtcggaggatctcactgttttcttttcctgctgcttgctgcatttttcgcagggtgtgggagctgagctgggaggaggactgctgct

SEQ ID NO: 280818 - DNA, 801 bp, Zea mays
gacacggacggcggcacggctgggacgagtgcgtgctggagttcttccgcccgccggactgcagggacggcgcggcgcagaaggcggcagcgggcgccgtcgcggctaccatcatggagcggtctggcggtggcggcctgaaggcggtcgtgataagcgggctgcaggatttggtgctcgacatcgccgcacatggcgagtgcgtgcttcggcctgatcctgtggccatggctgatgatgttcctcagcttgagctgaacggtcatggcggagacgagtgggactcggatgaggagggtctacatctggtggtagctgtagctatgggtaccaccactacagacattgaagcatccaagatgcaccatgacgaacaccatggtggcgaggatccgagatcacaagttggcaagaaggcggcgaaaaggaaaggcgagaaaactgtcagtttggaggaactgcagcgctacttctctggaagcctgaaagatgcggccaagagtctcggtgtttgtccgacaacgatgaagcgcatctgcaggcagcacggcatctccaggtggccgttccgcaagctcgccaaggcgaaccgctccctggacaagatcaagcgcgtcttcgagtcggtgcaaggctcatcacaggccatggccgccgctcctgctcctccacctgccgccgctgctgcttcctattctcagcaagctccagccgtggccgctgctccccgcgcacctgctttatcaccatgcctatcgagtgctccgagagtggcctcctcccaagcctcatgccaagcgc

SEQ ID NO: 280819 - DNA, 490 bp, Zea mays
tctgaacaaaaactatgggtgaaaaagtcttttttagaagaaaagatccctgtctattctatgactgacaagcacaaaaagctgactgcagtcagattagatcatttttgatgacaattggaaaaaaggtacttccattggagaagcctgagcatatggtgcaacactgcactgaatcctgtcaaacttccagtaaactacaaaaactaggcaactggaagtcaggtaatgacttttttgagctaacccgagatgatcagaaatgcaaaaatgatgaagccacagagggaggtgataaatgtgagcaaatgaatcctattactagtgtcatcaatgatcacaatgaaattgaattcaatgcagcaggctctgacttggacaggtatgaaaaactatgggaggttaatgatggcaggagtgtgggggtgaaacctgtaaatctgagagaggacaagacagcttccgtggcaaagattgtgcgtctgtgatt

SEQ ID NO: 280820 - DNA, 450 bp, Zea mays
gtgtggagtaccgcccccgcccccgccccctcaccccccgccgccgacgccctaggcggctacgccagctcccgagggacgggcccttcatcttcgtcagtctattcgccgggcgacgagcacccgccagtttggttggagcttggagtttagagggaagatttggtgatgagcagccgcagcctgccgccgaaggatcgcaggatgcgtactgaacgcacctcataccgtgatgcaccatatcggagggacagccgccatggtccaagcaggtttcgtaatgatttgtgcaacaattgtaagcgtcctgggcattttgctagagagtgtcctagcgtggctgtctgccatacctgcgggcttcctgggcacattgcagccgaatgttcttccaaaggtgtttgctggaactgcaaagagcctggccacatggctaacagcttgcccaat

SEQ ID NO: 280821 - DNA, 317 bp, Zea mays
cgttttaccccgtccggccgtccccctcgttctttctctcccccttctctctcgctgcgacgactgggtaggctgccgccgccgccctacgccaggtcccgagggaccaaggcattcgtattcgtcagtctcttcgccgggcgacgccagaaagaagaccagaggtttgtgggagtatcgaaggtggtggtgattttgtagcgtggtgttgcagtttggttggaacttggagtgtagagggaagatttggtgatgagcagccgcagcccgccgccgaaagaccgcacgatgcgtactgaacgcacctcataccgtgg

SEQ ID NO: 280822 - DNA, 338 bp, Zea mays
cggctcgagcgttttaccccgtccggccgtccccctcgttctttctctcccccttctctctcgctgcgacgactgggtaggctgccgccgccgccctacgccaggtcccgaggaccaaggcattcgtattcgtcagtctcttcgccgggcgacgccagtttggttggaacttggagtgtagagggaagatttggtgatgagcagccgcagcccgccgccgaaggaccgcaggatgcgtactgaacgcacctcataccgtggcgcaccatatcggagggacagccgccatggtccaagcaggtttcggaatgatttgtgcaacaattgtaagcgtctgg

SEQ ID NO: 280823 - DNA, 515 bp, Zea mays
  unsure (1)..(515): unsure at all n locations
agaggctgcatgtgccttgaataagtgcggactacctcttgaagcactagaatgcttgtctactaactcgagcatagatggcaaggatagcataatcgcacatggtgatggagaccacaagattttttatggaatactgagccctgtctctgcttctaagaattggctgtcttcatctgtcattagtggcattgagtccaaccttaaactaactatggcttcaaaatatctatctagccttctgagaaagcactcactctgttcacaattgaacgcaccattatctgaagaaaaggtccttaatgagtacaacaatcatcaaattgaaaaactgacgtgtgatattacaaacagtaatctcaatatttgataaaagggttctccctcaaatttgctgatatagctgagaagatcctaatcttttgtagccatgatggtttattgtttctagcgtatgttttgttatggngtactaggtcaccagatgttgcaactgataattatattcttgaatg

SEQ ID NO: 280824 - DNA, 478 bp, Zea mays
gactttgtttggccagaaggagaaggcgcgatgcccgacgcgataccggcctgcttccgccgcgtcgcggcagcacccggcgggcgggcgtcgccggggtcggggcccggctccggggtggggacgagcctggccacgtccgtctacaccacgcggctcggtctcgccgcgctgacctggtcgcgcgccgcgctcgggctcagcctccgcgcggtgctccgcgtgtccgcggggcccgcgccgtctccctcggcgtccgactacggcgacggcgaggtggagtacgggggcgcccagaagggcgacggcgagggggagcaggacgcgacggtggccgtgcgcttgcggccgtggctgctgtggcggcggcgcgggtccaagcgcttccgcgcgcggggccgccgcgtggacctggcctgggacctgtcgcgcgcgcgcttcgcggtctcgggctccccggagcccgtgtcggggtact

SEQ ID NO: 280825 - DNA, 530 bp, Zea mays
ttggtctcgtgggcggacgcgtgggcggcgcggagaaccagccagccagcccgtcgtcgctgtcgcccgccggtggagcactagccgcgcgtgcccccggatcccctccgcggccctcgccgcgcgcgcgggcatggacttcgacggcgccattggcgatcagggtgagctgtgggaatggcaaagtcaggagtatggtctgcagaaagattcgttagctgctccatgtagcagcttgtgggccgaagcacccaacaatgtgggtggtgattggagcatgtttgaggagcaaacaccaattaaacactgtacagacttcgaatttcagttctgtgatgtaggaggtgaagtcttgttctcatggcaaaacgcacacgcatgctgcagttctgtccagaaaatcttgagatgacatgttcagtgactgaagatgggctctcggaaagtcttcaggagatgatctttcaggtactgactgtttactgaactctgacgggactgatgaactggcagaagaatgggctagtagt

SEQ ID NO: 280826 - DNA, 507 bp, Zea mays
ctgttcttgttcagaggtttgatccgtcatcatcagtggataccattggtttcttcatcgcgaaatttgatgttggagagaaagatgaataaacaaacgtgactgaaattccaatgtttggcattcacaacttacgctagggatatcagcattgaattttctgcaatcagatggctcacgtatacccatggagtggaatgcagcgtgccccctgaaattttgtttgccagtgtttgatattttcttttgttcgaagaacattgttcattatggtgaaatgatggggcaaattagattcaagctcctgtagtcccgtttccaagaaaaaagttaccgggtacccgtatccgtccgggtgtaccgggtattttctgggtattggtcctcccattccgtcctgtatctagggagcatttaaccgggtagcaccagcaaaattgtcctgatttaatattcgatatttggtttggctaaaaaaaaaaatataaaagggcggccgtccacttt

SEQ ID NO: 280827 - DNA, 469 bp, Zea mays
cggacgcgtgggctgacgcgtgggcggacgcgtgggtgctcctaacatcccccgtgcttctgcaggggatactcaaagacaatctcaaatgcctgaaatgtctactgcacgggctccttcaaggccaggtgtttcacaagatcgtgatgaacgctctcgctaccaccagtccagggagcaaacaccactgaggcccccaaccctttcaaaaccaccttcattccatggtcggcattcgtacccaccaggggatactcaggccgagaacaatccacctcaaggattcgaccggccatacaactgggcttctcaatcacgtcaggagagcccaggtgcggcgactccacttcgccaagaatctgatcacagtactcaggacaggcagcaattgatggctaatgcaccttttatgttcccgccgattcctcctcaccagggaaactttatgatgcctatgaatatgaatcag

SEQ ID NO: 280828 - DNA, 622 bp, Zea mays
ggtgtttcttgagttggaagctcctcaggtgcaaaaatggactgccttgtaccaaaaccgttagaatttgccgtgcgacttgatgtgcagaacatatcttgtggaggaaggcatgctgcacttgttactaaacaaggcgagatatactcatggggtgaggaatcagggggacggcttggtcatggtgttgattgtgatgtgtctcagccaaaacttattgatgctctttctcatatgaacattgagcttgtagcatgtggtgaatatcacacttgtgctgttacactatctggagatctttacacatggggggatggcacatttaaatttgggcttttaggtcatggaaatgatatcagtcactgggtaccaaagcacgtgaatggaccattagagggcatacatgtttcatcaatttcacgtggaccttggcatacagcccgagtaacttccgctggacagcttttcacatttggtgatggatcttttggggttctgggccatggagatcgtgagagtatctcggtccccagggaagttgaatctctcaaagggctacgcacggtgcgggcagcttgtggtgtttggcacactgctgcagttgtagaagtcatggctggga

SEQ ID NO: 280829 - DNA, 616 bp, Zea mays
  unsure (1)..(616): unsure at all n locations
ggtcgacgcacgcgtccttcttctcgtctgcctgtatgtgcttgcacgcaacctgagatactttagtgattttgtggaatcactcgtttcctatatgccacccaaaaagccaggaatatgttactaaaaaaccctagggagctgttacttgcctctccatggaagatgtgggttactttcttctcagtgatgtgtgactgacatcctaaattaaagtaacaccagaaatggcctttttgcatccgacactagatataccaaacctcgctcctccctgccaacatttcactggattgcacattttgctttattcatctacccctgccatcgaacacactcagtttcacctgcctgcctcaatcttcagggcctgtttggttttagttcagacagcgcatggctctccatgcaatccgaggctttagattttgtgttcctggggtgtagattgctgcctggcaggctttgaaccaaacatggctctccaagagcacttgtgaactgacgttagctagctgaacacacatctgtacttgttcgattgcatgctgttgcaacacatgncaagtttatgtttaaacattgaactcatttttttttgaacgagaacattaag

SEQ ID NO: 280830 - DNA, 785 bp, Zea mays
cggacgcgtgggcggacgcgtgggctgatgcacaagggctcaacgatgtgctgtgtgtggcaatgtgaaacaatgctttctagaagctgcacgctatggcagcactgagctcgtgcggatcgggcttcaggttgctcaaagaaacagcttggacattgatgtggacctagcccttggctttgccgcacactatgggaagatcgaaaccatgggatgcttggttgaagaaggtaatgctattggctttcttggccctttgatgcgtgctgctgaacgtgggtgcctccaagttgtggaatggtttgtcaaccacgggtgtcgagaaatggagctttgcctagcccttactgctgccacctctaatagccagattgcagttgctgcttatcttcttcctcttgtcccgcaacatgttcttgcccccctcagcattgagattatcaaggctgctggtgagaggactacgggttccctgcagggtgtggattttcttctccgctcggatttcctcaatgacccagctgccacatatgccgtggcagacagtattgcaagatgcaccgatgaagctgtggacgcaaagcttaggtctttcatgaatgagcactggagcgaggcagctttttgtgcgggattcgaatctgcacagcagcactttgttaatttcatgaggataatggaaaggggtgaatcaccaatccgcttaggggacctcccacttgagctggtgattgccatggcctacctgccgctctataaggaatgcatgaattccaatgggcgac

SEQ ID NO: 280831 - DNA, 793 bp, Zea mays
gatcgtttccgggagcctcatcaatcgatcacacgcgacgcgagtacgagtacgagtttacagccacgagcagacgagctgcagcgccaccagagtcatcgtgcagcctcgcgctcgtccatggcgtacgcgtacacggcgccgcgcgccccgcttccgacggtggcgtcctcctcgtcatacgcgcggcaggtggatccgaaagtggagctgggagaggaggaagcggcattctgctctcattgaggagagcgagcgtctcgttgatgagctccagttgcaactccaggcgtctgttcatagagaagactacagacgcgctcataagctgaggctagctattgctactatagtgaaaaatgacactatggccatagatgaggagcgctacaaggatgcagcatatatcagagatcatgctggcgcaggactgctggggtggtggtctggaacttccggaaatttgtccgatccatatggtcttattattcgtataagtgctgaacatggtcgatatgtggcaagaagttatgatacaagacagctggcttctgacagccctggtctccctatatttgaaatatactttgcagaggcaaatggtggatacaacctgcaggcagtgcatctgaaaccagatgatagtgattctgaccaagtgccaaacatgttaagggagatacttggcatggacagtataaatatatctagcagttcagtagggtctaagcatgaagaattccatggaagtgaaacatggatgataaagaagtgatgatagcaacaatgatgc

SEQ ID NO: 280832 - DNA, 528 bp, Zea mays
attgcctacgcgtccgcccacgcgtccgcaactggctgcgccagcgcccccctcgattgaaatctcgccgccagctcggtcgcagtcgcaccgcagccgtcttctccttcccttccctcctcgctaaaaagccaacgcaaccgcttctcctcctcctccgccgcctccggcacctcccctacttccccccagcacgcctcagcccgcattccgccacccacgcgactgatcgaccgacgacttccccattcccgccccgcaacccgcagggctctgggctcggaggaaccgagggcgggggacctccgaccgggaccgggccgggcgacatgttgggcgacctcctctccaggatcctcctgctcctgttcggctacgccatgccggcgttcgagtgcttcaagacggtcgaggcgcgccccaacgacgcccgcatgctgcgcttctggtgccagtactggattatcgcggccatggtgatagctgatgagagcgtgatctcttggatgccaatgtattcagaaatga

SEQ ID NO: 280833 - DNA, 2032 bp, Zea mays
gttatggaaatacttggatgatgatattagtttagatgataatccaagctcgggcatactccccactgaacaggtgactggcgaaataccctttcagatcactgagatatcctcagaatgggcttattgtactgaggacacaaaggtccttgtggttggatgtttccatgagaactacagacatctggctgggaccaatctcttctgtgtcattggtgaccagtgtgttgatgcaaatattgttcaaactggcgtttaccgtttcattgctagaccacatgctcctggacgagtcaatctttatttgactttggatgggaaaacaccaatcagtgaggttttgagttttcactatcgtatggtgcctgacagtcaaaacttggctgaggatgagccccaaaagtcaaagcttcagatgcagatgagactagctcgattgttgttcaccacaaacaagaaaaagatagcacccaagttacttgtagaaggaagcaaggtttccaatctcttatcagcatcgacagagaaggaatggatggatctgtcaaaatttgttactgattctaaaggcacttatgttccggccactgagggattgcttgaactagtactgcgtaatagattgcaagagtggcttgttgaaaaattaattgaaggccacaagtcgactggccgcgatgatctaggacaagggcctatccatctgtgttcttgcttgggctatacttgggccattcacttattttctttgtcaggattctccttggatttccgtgattcttctggttggacagctttgcattgggccgcatactgtggaagggaaaaaatggttgctgctcttttgtctgctggagcaaatccaagcttggttacagatcctactcatgatgtccctggtggacaaactgctggtgatctggctgctggacaaggttatcatggcttagctgcatatctttctgagaaagggctgactgctcattctgaggctatgtcactgtccaagggtaagcgatcaacatcaaggacagagtcactaaaacggaataccaaggaatttgaaaaccttagtgaacaagaattgtgcttacgagaatctttagcagcctaccgcaatgctgctgatgctgctagcaacatacaagccgcactcagggagcgaactcttaagcttcaaacaaaagcaattcagttggccaatcccgagaatgatgcatctgcaatagttgctgctatgaggattcagcacgcataccggaactacaacagaaagaaaatgatgagagctgctgcaagaatacagagtcatttccgaacatggcagattaggaggaacttcatgaacatgcgaagacaagctatcaaaatacaagctgcatacagaggtcaccaagtgagaaggcagtaccgcaaggtattatggtccgttggagtagtggaaaaagctatcttgcggtggaggaagaagagaaaaggcctgcgtggcattgcaactggaatgccagtagcaatggccacagacgcagaagcagcaagcactgcagaggaggactactaccaggttggtcggcaacaagccgaggacaggttcaatagatcagtggtacgtgtccaagctttgttccgttctcatcgggcgcacaggagtaccggaggatgaaggttgctcatgaggaggccaaggtggagttcggtcgaaagtagttaagacgggcatagattcaagatctgaagtgacttgttgttccttgtagggggttggctagttcttctagttctttgtatatccgaaggaacaggcgtagcttgcggatgacgtacattctaggaacatctgacgctcgtagtcagtctgccaactgccgttaggcttcttctgtggtgtgtatttggctgggttttagttgggcgaaaacggcattgtgctttattaggtttgatttgtatggacggacgcgagtacgaataaggttgtaaatgctgataataatttcacctgactataaatccaggtggattgcgggccccg

SEQ ID NO: 280834 - DNA, 523 bp, Zea mays
tcagcgactacttttttaacagttgttcatcgcattgaggaagggaggccggctggtgctactgcttttctagggcctgcccacctgcacttgcatctcctgcttccctgagcggcctcccggctgcgaatccaccagcatttcccgaggcccagcgccgcgtgtgcctgtggggcggagtcaggaaatgctcggagctccattccacggctgaaacttctgggaaggtttaagccaaaccttgttgcagtttagggagaccggcagcactaaagaaactagcctgagcctctctttcagcctctcacccactatcgtgagggcattttgtaccttccaagaaagagagtaaggagaacttgacctcagcgctagagaagaatatggcagccactgaagctgccacggacacaggcagttcaaggaggtcacaagatgacactacaacattagtcccacacagtgggaatttgggagaaccaatccagaagggcgtgaagaccaccagattcaaagatgatga

SEQ ID NO: 280835 - DNA, 537 bp, Zea mays
  unsure (1)..(537): unsure at all n locations
cctcacctctccgcgccgcgccgngcagagagggagagggggggactttaggaggaagttgcttcctgcaaacagcagcagaaggcagaagccccgtcccatccccggcagccccctccatccaagtgatttcaagtagccaccgagaagcggagaaggtgaccgcacctcacgcaatttgcccctgcccgtcgattccatcgcctcccgccgtcccttccctcctctagggttgtcttgtgggtgcccgtgcttcccaccctaggggcaggtccagggccgggccttctcttcgccccgcctccgctgctcttttctttgctgctagggttaggttagggttcgacgctgtggggaggggcatacttctccctcgccgccgccgccgccgccaatgcctcccggcggtaggcgcggcgccaagcagcgctccaactggaccagggaaccccagctaggcgaccctgtcctcgccaagatcaagggatacccgtcctggccagctaagatcagcaagcccgaggactggaaacgtag

SEQ ID NO: 280836 - DNA, 436 bp, Zea mays
gagaggggacgaagagggagagggatctggtacttgccgtcttcgtctccgaatcccccactcctccaccaccgccaccactcaccccttgctccgctcggcctcctgaatccggcgtcgtcaagcaaccccactccttctgccgttatcagaaccctaaccgatcaatccgtccgatttcccagctgccggtttcgcgttgggagcgccggagcaggggaggggcggagggtcggatcggcagccgcaggagcatcgagcgatggctgccgtgtaggatgcagctggactccgccggccgccgcctagctgctgctgctgttgctgaagatccgatgcttcagcaaccgcgatcttaataggagcggaaggtggagtaccggtggagtgggccggacggctggttgatctccgagagctccagcgcctacgcact

SEQ ID NO: 280837 - DNA, 562 bp, Zea mays
aggtttttaaccttcttggaaggcacctgattagcttggctcatgctgcttctggttatcacaaagttcttgaagaaaatagaaaactatacaaccaggtgcaggatcttaaaggaagtattagtggtatattgttgggtgcgtccctccctgccgggacaagcaagtccgtccactgtggcttccattgacgagggcaacataacccttgtcatcccttccaagtctggaaaggaagtacggaaaacttttagcttcaataaggtttttggctcatcagcgacacaagatgaggtgttcttggatactcaaccccttattcgctcgggtcttgatggatacaatgtatgtatctttgcatatggccaaactggatcagggaagacatacacgatgagtgggcccaaaaacatgactgagcaaacccaaggtgtcaactatcgggcacttggtgatctatttaagcttgctgaacaaaggaagagaaccttcatttatgatattgctgtgcacatgattgagatttacaatgaacaagtcagggacctccttgtcactgacg

SEQ ID NO: 280838 - DNA, 718 bp, Zea mays
tcgaatgttttggccaaagagaatgaagaattgaggctgcagcttaaggttttgattgaggataacaagagattggttgagctctatgaacacactgttgtcaatgttgaggcaaatcaagatggaaaccctgtagatgatctgttgaatgcccaaccagcagccacatcagatttccatgcacataactcatctagtgtggcacaggagtctaagatagtagacgaaaaatgcaccaatgaggacaatttctcaagagttacatctgttgaattgcgtcttcagctggaggagatgcatgaggaaaatgatagacttatggggttgtatgagaaagctatgcaggaaagagatgaattcaaacggaaaattttagagcaaagcgactctgaagctgtaaaacatattcagttggacgagaaagatggccggacgcgtggggcagctgagaatcctgaagtgaaacatattcatgactccacaattgcagctttgaaagaagtgctgctgattgttcggagtaagttggagcttgtccaagataaggttgtgtctgctcaggatgcagtaaaatattttagggcactcgaaatagctagtggtaaggccgaagaactttctgcaagaattgagcttcagcgtctaggtgcgcagcgtggtcaggaagaaatcactttcctgaagtctgtgctatcagaatcacagaagaagaaaaatg

SEQ ID NO: 280839 - DNA, 845 bp, Zea mays
tggacgcgtgggcggacgcgtgggcggacgcgtgggcggacgcgtgggtggtgggcgcggtcgcgcgggtgctgaattggaaagattacaacaagcgttgaggattctttctgatgctgaaaaacagataagactttcaagcgagcgttcgacatggttcactgctgctttactccagcttggttccggtcacaattcagaaataactcaatcaagaagcagcagtaagcaaagcgctaaggcaaccagcgaaaccatgatggaagcaatgagagaatcttctgcaagcaggagtacagctcatcatttatccacttttcctgattcaaagaaaatagtggatctgaaaacaaccagtgggcactccagtcctcatgcttcactgtcctccaggatgagacacaatgaaaacatgatttatgccgagcatatgtctgttgatagagcattattggattctgctcaaacaagtatttcttctgagcaaaagggtatgcatagtggaatctcagataaccttacccgaatttggatgaagtgcatagagaattgccactccaagacattgcggcaacttctctatgatcatgggaaattaacatctgtcaaagaatgtgaaggtaccattgttgcttttatagcatttgaggacaatgatataaagtttcgagcccaaagatttattagcagcatcagaaattcaatggaaactgtactgaaatgcaatgtggaagtcaggatttgtttgatgcaagaatttcttgctgggggactaaagcatgagacatacccagatgagacagctgaatctgatgtcttgagttgttcaacgaacagtgaacgtc

SEQ ID NO: 280840 - DNA, 311 bp, Zea mays
tccacgcgtccgcccacgcgtccgcttggtcatgcccttccctcccatcaattcttcaatgctgcgtaatccctactgaaagaggcaccaatcagccattctgcaacttgccttcccgtgcttgcctcactgacatgaactcatcgtctttcttcctctgatccataagatctggccaacaagatcggtggcgcacaggtatcgggtcatcacttggtctctgaattctcaggattggagttgaagaagagcatcatgcttggtgggcagagcgagaccgtcaagtacaggggtcttgctggaacatggaa

SEQ ID NO: 280841 - DNA, 321 bp, Zea mays
atcagaacaaggagaaaaaaaggttccggtcttcatcccttccatttccaaaggacgacgctctcaccattcacgaacggcgactgcggatcgatcgtgcgtcgtctcctgcgccggcctctcttcaagtcaggttacacacaagcttcaaattatcgcaaaattcctcttacatatctacatctcataccggaccaggtctcataccggaccagaaaaatggaatacactttattacctgatttagcaccgcataagatacatgcaaagattcaagtacatgtatctagaaagtggcttttccgaggtgctactgatagt

SEQ ID NO: 280842 - DNA, 615 bp, Zea mays
  unsure (1)..(615): unsure at all n locations
tccatgcgtccggaacgaccgcatgatgcatttctggcaaggggagtttcgcggacggacgctgtggcatccgtcgggtgcagcgcgatcgcatcaaagaaactttacatgataccagctgcggactctgactggagaatgccggcttctttttttatccatatcgtccatcagggtccagtgctaacttctgactgctgtaaagagcgaatgcgtcgtcacacccagcgtagccaatncatcagggatctggaggaggccagaaaggacgaagcggcggcggtgccgtgtcctacggtcctacctgtcagttgccgcggtgtcctcctgtcctgatccacgtcgccgccactgacagactcctctctcaccgtggcacgaattgatgagccacgaattgaggattgatcaaggtcttggcatcaacaaagctgccagcggtttttcagcttcattttagtttgtttatatagatctgtgccttgatcgaggtaggacgattcctagttaggctttgttcgtttacaccaatcacgctctggattagcagggattggaattcaatccatacctcaatccgtgccccaacataatccatgcctacttcattttgtt

SEQ ID NO: 280843 - DNA, 811 bp, Zea mays
  unsure (1)..(811): unsure at all n locations
cccctgcgggccctggcgcaattcccgtttcgccccccacgcgcgcgatatatacctgcagatgcacgcctccttgagggggatcctttgaagatcgatcagtctgctctgaccggagagtcactgccggtcactaaaggtcccggtgatggtgtctattctggttcgacggtcaagcaaggtgaaatcgaagctgttgtgattgccacaggtgtccacactttcttcggaaaggctgctcaccttgttgactccacaaaccaagttggccatttccagaaggtcctgacggctatcgggaacttctgtatttgctcaattgctgtggggatgtttgttgagatcattgtcatgtatcctatccagcacagggcttaccgccctgggatcgacaacctcctcgtccttctcattggaggcatccccatagccatgccgaccgtcttatctgtaactatggctattgggtcccatcgtttgtctcaacagggggctatcacaaaaagaatgactgcaatcgaggagatggctggcatggatgttctttgcagcgataaaacaggaaccttgaccctgaataagcttactgtggataggaaccttgttgaggtttttgaaaggggcactactcaggaccaagtgattctcatggctgccagagcgtctcgcacagaaaaccaagatgctattgatactgctatagttgggatgctagctgatcctaaagagcacgcgctggatccaggagttcactttcgccattcatcctactgacanaagacagcactgacatacattgagggatgggaaa

SEQ ID NO: 280844 - DNA, 497 bp, Zea mays
ttcctgcgtccgcccacgcgtccgctcggcgcctccgccctccgtcggcggcgcacggggagcatagaaggtgtcgtactcgtacctctcgcacacgcccccatcgccacgcgtgcaacgaagctggctccgtcgccatggccctgctgccgttgcccccctgttccccgtgccaccgccgggccgcgcctttgccggcgcccacggtcgcctcggcgcgccaccgcagggggagcctgcgcctcgctgcagccggtgcctgctccggacctaccgccgcgcggaagccccgtcccaccgccgccgacaggaggaggtgcgaatgctttgacctccatcggcggttagttccttacgcggaggcttactgctggcagaagtccattgtcgagaggaggaaaagggttgatagacagcggcgaagaccactccgacaccttgattgctttgcaacatccaccggtctacacattgggcaccgacagcaaggaggaata

SEQ ID NO: 280845 - DNA, 459 bp, Zea mays
ttcctttcgtccgatgtgtgcaggcttgatacattttatgcatattatatccagcactgaccaacagcaataacagcaaccaaaccatagcaaaaacagtgactaatttctttctttttcctcgagaaacatcatatcatttcacccttatgtacctgacaatattacactggaggtaaacctaggcagtcaaggtacagggaaaaaaagaacaagaaaccgtttgcttctttttctttcccgttgcggttctagggcacaacttcgcaagtgtcgcagatatccagccgacggaggaggttaggctatcggtgcctcgccgggagcccaccgctgccgctcttgcggatgaaagcgtttctgctcttcggctttggtatgtcattgatgtccatcacttggattgtcctctgctttttggcattttgtgcttcttggtaattctcctggagccttttc

SEQ ID NO: 280846 - DNA, 605 bp, Zea mays
ttgctgtcaccatgtcgctgatgggatcggacgaccactgcagtgtaacataactttctgattctgtggtggctatggtcttgaacattggtcgggagggccccaaagttgttccggtcgaagaagcggtgaagaccaaagaggagacggagaaggctgctctaaaggtggtgtatgctcttatgacatcgcttttcggtgacgttaaagtcgcagaggaagggaaatttgtcatatctgtagatgggaatgtggcgcacttggatgggaggagtggcgatgtcgaatgtgaaaatgctacgctgaaggaacggatcaagaccgccttccgtcgcatacagggcgccgtgagaccaatcccactttcagcctcttgataacttgtttgacatttcccatttgaacaaagtagcattctctgtttacaccagagtaccgggttttttttccctctctatcgaaaggaaccccagatgccttgtacggcatgctactcaagaggatttgattgttgatctgggattgcctctgtaaaatcacctgtaacattgtcatcctaacttgaaccacctccatcgttttcagtaaatttctacttaattttc

SEQ ID NO: 280847 - DNA, 639 bp, Zea mays
ttcatgcttacgcggacgcgtgggttcggccaccaaatattattctcgtgcatggagaagcatatgaaatgtccaggcttaaacaaaaacttattactcagtttgatggtacaaatacaaaaattgtgtctcccaagaactgccaatcagtggagatgtacttcacttgtgagaagatggccaagactattggcaggttggcagaacaagtaccagaaggtggagagtctttcagtggcctacttgtcaagaagggattcacatatcagattatggctcctgaagatctccgtgtgttcactgcactcatctacagcttacatcattcagcgtatcgcggtcccttactctggatcttttgaagtcataaggtacagactgaaacaaatatacgagagcgtggagtcagcaacagaggaatctgatgttccgacgttaatcgtgcatgatagagtgacggttcgcctggattcagaaagttatgttacactgcagtggtcgtccgatcccatcagcgacatggtgtctgattctgtggtggctatggtcttgaacatcggtcgggaaggccccaaagttgttccggtcgaagaagcggtgaagaccaaagatgagacggagaaggctgccctaaaggtg

SEQ ID NO: 280848 - DNA, 454 bp, Zea mays
atgcaagatattctatttgttggaattgggaactgtgtcttaagaatagatacaactaaagtgggtagaggaaaagacttcactgttgaagaccctgttaaatgtcatcttgaaaagcttgttgatggtgtccgcttagttggtaagcacgatggtggtgtgactgatttgtccatatctcaatggatgagcacccgcctggcctccggatccaaggatggctcggttaagatctgggatgatcgcaagcaagtgccattatccatttttaagccccatgatggtcaagcggtttattcagttgcttttcttacagcgcctgaacgaccaaatcaatattatctaataactgcgggtcctgttaaccgagaagttaaaatttgtgcttctactaatgaagatggctgggttgttgccagtgattctgagacttggaagtgcactcagacttttg

SEQ ID NO: 280849 - DNA, 366 bp, Zea mays
ttgtggactaaacatttcaagatctttcaatcctgtatttggatcttcaaagaagtttttctcagcatcagttcctggatcaagaattgtttctagggcaacatcacctatttcaagaagaacaagccctccacgatctacaacaccaacacctactctgggtggcctaacgtctcccagagttcccactgacggcaagccaacaaatgatgcattaagccaagaggttctgaatttgagatctcaggtggagagtcttaccaggaagtctcaactcctggagttggagctggaaagaactaccaaacaattgaaggaagctatttccattgccggcgaggaaacctgcaagtgcaaggcggcaaa

SEQ ID NO: 280850 - DNA, 718 bp, Zea mays
caatctagagggttaactaccagtagcgtgatgaagtcatgtaggctatccgagctcagcaatgctgaggttagcagcctcaaggctcgtcctcgcatcgattcctcgtccatgtccatatttggcacggtgaatccaattgttgagggtgtctgtgtcagcggtgatgcagcagataagcagtaccaggtgaaaaactgcagatggaggccaacttttgccttggagactgatgggccatctaacactgatggccaagactttgatgaggacagtggttttcttggtaggactagactgggaagactcatccaagctgctgcaagggagctacttgacatgctgaactctgcgagaaccaattcgccaacaaagatattccttgtcctccttggtttttacacagccaatgccttggcaacaatactagggcagaccggtgactgggatgttcttgttgctggtgttgtagtggctgccattgagggaattggcatgctcatgtacagaaaaccaattgccaggcctcctggtaggttccaatctttgatttcaatggtgaactactggaaagccggtgtatgcctgggcctttttgtggatgccttcaagctgggtagctgagtttatacaatcatctgctgctatctgcctatggtaattttttgggtatattgggatcacaaaaaaaaaaaaaaaaaaaagggcggccgctcta

SEQ ID NO: 280851 - DNA, 437 bp, Zea mays
ctatccttcattcagcgattcgctttctgaaaagaacattgcacaaaaacagcaagatggctctgggtgcggatgaatgctagctccatgttccgtcacttttggtttgtgcgggtcttcactgactttgagtctagtcttggcgttctaactaaagaccgtcatgttgcgagtatacatgcaggtgttagagtagccgttcctcgtgcatgccttgcatattgctcatcatattaataatgatctgtcgtcacccatcttcatctcaactgcagaagatgccagctgagatcggccttggatcctgcatattattcatccagggccaaattctcttgttctctgtgtgggtttcgtctgtttttcatgtgcatgaaaccccttatttgatgaagcaagtattgtagtcatctctgcatgtagaaagttgtccgctc

SEQ ID NO: 280852 - DNA, 546 bp, Zea mays
ttatgatctcagacaacagacggcatgttgctattgtcaccacagctagccttccatggatgacaggaacagcaatcaatccattgtttcgtgctgcatatctggcaagaagtgcaaagcaaaaggtgacattggtggtcccatggctctctaagtcagatcaagaattggtttacccaaataacatcaccttcagttcgccagaagagcaagaaacttatataaggaactggctgcaggaaagaataggctttgaagcaaactttaagatatccttttatcctggcaagctctcaaaagagcgccgcagcattattcctgctggggatacttcacagctcatctcctcaaaagaagctgatatagcgattttagaagaaccggagcatctcaactggtatcatcatgggaagcgttggactgataagttcaatcatgtcatcggtgtagttcatacaaattacttggaatatatcaagagagagaaaaatggtgctattcagtcttttcttgtaaacatatcaataactgggtgactagagcata

SEQ ID NO: 280853 - DNA, 639 bp, Zea mays
attttgttcgaaatccagcgctccaaatccgttcgtgcccaaggcgctcccccgaacccgtcccgaatcccgcaaatccccgctgaaattccccaatcctccgtgctcgccgccgccctgcgaccggtcccgcccgcctcgtgtcggagccgctgccgcggatttccgcccgagggtttcgtctcgctctcgctctctccgccctactgccgccacagattggcgcgaccgacccttcatcgagggccttcttccgcccgcgaggccggggctcctcccgcggaaattcactctcgtccagaagcggcggcgctctcctcttcatcgccgcccccgcgctcttctggtactcgagtggcgtggggtggagatccaccagggcgtggatccattcctcttcgttcggtggtttttatccttcaggcgcggaatatcaatctatagaggtgcacgaggactttatatatccccatattttcaggggttcaactgaacccccatgccccacgctaagtcagcccctggtggtggtggactggattggtggacagtgctgattttgtcgcgggcatggagcgaagtgagccctcgctgaagccagaatggctgctgcggcccacagtacctgccacaacctat

SEQ ID NO: 280854 - DNA, 421 bp, Zea mays
ggatttctacccgagggtttcgtctcgctctcgctctctccgctctactgcctccacagattggcgcgaccgacccgtcatcgaggaccttcttccgcccgagaggccggggctcctcccgcggaaattcactctcgttcagaggcggcgctgtcctcttcatcgccgcccccgcgctctgcttgtactggagtggcgcggggtggagatccacccgggcgtggatcgattcctcttcgtttcttcgttcggtggcgcggaataccaatctatagaagtgcacgaggagtttttatatccccgatttttagggggttcaactgaactcccatgccccacgctaagtccgcccctggtggtggtggactgaattggtggacactgttgattttgtcgtgggcatggagcgaagtgagccctc

SEQ ID NO: 280855 - DNA, 545 bp, Zea mays
agttctttttcacgcaaggcccaagcgcccaactatggggggggcctgtcttccacctttccctctccaccaccacctacctacctgtttattcgccgtcgcctaccacctccccctcctctccgtgcagacctccgctccgcaccaccaatccgtcgtaaccctagcccagcctggtctcggctggccccgctccgttcatgtgcggcaccaccgcctccccgtgttcgtagtagccgccgcggggaatttccctcccatgggttccgcatacgcccctgagaggacgccgatcgagggagaatgaggtgctgcatctgccgcgtatcctccgccgggtgccgggccatgggcgtcgcgggacgggcgaacccgacgccgtcgctgcgcagccgacgctgcctccgcatgcggccgtcggtacgccccgttctccgtgcccttcactgaacgcccggcacccgccgtcccgtccttcccttcatcccccgctgctgcgcctagggcgtaggagccgcgggcggaccgccgatatctccggcgat

SEQ ID NO: 280856 - DNA, 570 bp, Zea mays
agcttatgttgcagatttatatgtcaccgcgcaaactttgttttaaagaaaaatggtcttatgctgctgaaaacttgtcgcttaagttatatgtcgtagaaagaaattggtacactcaaataccatccaaagtctgctcggttatactctattactcacggtaaggtcccatacttggaggagatgagaaagaagaaagttgaaagatgggaccaatttgttgatgtcatagagcaaactaagaaggttgcatctgaaatcaggcctgcagattttgtaccctttagaattcatgtggatcagtctgatcagtctttaagaaagctggaggagctaacgaaagagctgcaatcccttcagaaggagaagagtgatcggctgaagcaagtcatggaacatcttaacactttgcattcgttatgcgaggtgcttggtgtagacttcaaacaaacagtcaatgaggtgcaccctagcctgggtgaggctgatgaatcaaagaacctaagcaactgtacaattgaaagccctgcatcagctacaagcagactgcgtgaattgaaagtccagagg

SEQ ID NO: 280857 - DNA, 732 bp, Zea mays
gggcatgaacccatctcgaatgacaactttgggctcaactgccggaacattgttgcgtgggcccgatcgcacatcgagagcgggaacatccacgccatcattgatgagtcgttggacagaggctgctatgacctgcagtcggtgtggaagatcgcggaggtggccataatgtgtgtgaagcccaagggcgcccagaggcctcccatctcggaagtgctcaaggagatccaggacgccattgccatggagcgggtgctcgtgtccaattgcagcaacaggatgggttcaggtagcgtggagcagaatggaggagcatctttcgacgagctgctcatgcagccgggtctcagatgagatgagaacaacctactcgtaccttgagtccattgtatgtagtaattaatgtgtttactacattttttttgagaaacaaattaagtaatgctagcaaaggaaccagtatattattattattattattattattattattattattgaaaataataatatgctggttcctttgctagcattacttaatttgtttctcaaaaaaaatgtagtaaacacattaattactacatacaatggactcaaggtacgagtaggttgttctcatctcatctgagacccggctgcatgagcagctcgtcgaaagatgctcctccattctgctccacgctacctgaacccatcctgttgctgcaattggacacgagagagtgacacgtg

SEQ ID NO: 280858 - DNA, 535 bp, Zea mays
cggatgcgttggcggacgcgtgggcagagcggacgacaacgcacgcgcgcctcttcctcctcctccccgccgccgccgccgccgccgcgcgcgcctttgcgtgccccataccgtctcctccaacacgctcccctcgttggcatcaatttcccatcccacctgtccaccgtcgcccgccgctatctcgcacccgaacccagcgcctccctcgtcgccgccggcgcgccgccatggtgtcgcagcacggcatcctcctcgcagttaacatcatctccgaccatttcggtcctatcgtatccaaagtgtgtggctgccttctgcgccacggcgcgctgtcgttgcaggatatcgtccgccgcctcgaactctcgcccgggcaggtgaagaactccctcctcattctcattcagcacaactgcgttcaggcctacacaagccccagagggcgctggcgataggacagtgacgctctacctggccatcttcgacaatgttctgcaccggctgcgcttctcaaagttcctttccgtcgtcc

SEQ ID NO: 280859 - DNA, 943 bp, Zea mays
agctggtatgatactatatgcttttaattgttcatgctttatgtgattttactctgatggttgctgatgatgtcatcacatttcatgattcattgttcatgatatggttacttttgtgatcgtagataccgaattcaatgttgtcttcatggtattttttgaccaaggcaaattcaacctatcgagaacattgccttattacaatgctatgatggaccaattgattttttagctttgggtttcataatatgcctgtttttatcattgcatacattttgtacaattttcctgatcaagccaaacttgagaatccatgataagctttgtagcttgcatatatttgggttccataatatgcctgttttatcattgcacgcaattcatagtttcatactgtctttctgttcaaactaagcttgagaattccctgatgagctctgtagcttatataggtgtcccaagtgtactgatattgttgttatgaacacaacatgatttgattctgtacttcattcatactgtgaatatattactatttctcttgtatcggacccttgaattttaagtgttgttttaaactaatcaatcttctctacacttggccttgtatgaagtatccatgatatatagcagagcctaattgggctggaaggtaagtcccttttaatgttcgagtcctcatcttcagatgaaagacaaatgggacaccgctgcgttttcaagattataaggatgtaaaactcttaaatccgatttactagctcaatgaatatttcactttctttcccttgtcaaaatctcttatgctgagtgctaagcactgcgaactttggcttattttgccttcttgtttttactggatcatacacgcttccattttgggcctgtacgttggagcatagttcttgatttatgcattaatgacatatgggatatgaatcat

SEQ ID NO: 280860 - DNA, 908 bp, Zea mays
cggacgcgtgggcccctgtgtgctgagtgctgactcgctcccgtgcttctgctagccatcgttggccgcccccgccgcgccaatggcgacgaggcgcgagctgtccctcgcgctgctgtgcgtgtgcctcgcggcctgcgcgctggcccccggccccgcggacgccagcaagatggtcggggtgtacgagctcaggaagggggatttctccgtcaggctcaccaactggggcgccagggtgatgtccgtcgtcctcccagatcgcaaagggaatttggctgatgtcgtccttggcagagacaccgtcgctgaatacgtcaacgatacctcttacttcgggccgataacggggcgcatagcacagcgagttgcccggggccggttcgtcctcgacggcaaggtctaccacatgcacaggaacgacggcaggaacacgatccacggcggcgacagagggttcagccggagcatctggacggtgaaggagtacgtcgccggcggcgaatcgccgcacatgaccttctactaccgcagcttcgacggagagcaaggcctgccggggaacgtggacgcgtacgtgacgtaccgcgtgtcgggcgcctacacgctgggcgtgcacatgaacgcgacggcgctggacagggcgacgccggtgggcctgctgctgcacgtgtactggaacctgggcggggagggcagcggcgacgtgctgggccacacgctccggatccgcgcgtcgcggcacgccgtgctggacgacgagctcctgccgtcgtcggggcgcgtggtgcccgtggccggcacgcccctggacttccgcgcgcccgcggcgatcggctcgcgcatccgtcgggtcgtcgtcatggggggccgcgccgtcgggtacgacaccaactacgtcgtcgacg

SEQ ID NO: 280861 - DNA, 701 bp, Zea mays
gttgtgtactatcctgactgcattaatacgcaactagaagatcttgatggagtttcttacgaaggtccatcagttcatgcttgtgaccaagatcaggacctggtcagcattggccatgctgttgtgaaccacaattgtcacaatagtccagatatttcttcggaaatgagtcatccgacgacgaacgctgtaattgaccaggaaactgagaatgttatggaaccatcttgcagttcttcacaactacctaagtcgtctggagaacaaatgcatgtggaagattttctgtatctaaatgaccaagcagcaaaatttgagaaagtcagtgggcagttggcaggccctcttggccctccagagaatatgatgtataatgactcagagcaatcgtcagcccgagacagaaaaggacattggagcagtcttctatccctttcgacacgcaactaacatcaaacagtcagcgagtttgcattgtttagtgaataaaggcttggctcaatctgcttcatttcccaggttgttgcaagagcggcatcagttaatcgatcagagtgacagtgacctctatgcacaacctcatgaggattactgcacagatgtgagttgtccaactaaagtgaaccttcatatctccgaacagcattcttatactgcttttgcttcgatggatcataggtataactggttccccgagggct

SEQ ID NO: 280862 - DNA, 249 bp, Zea mays
gagaaaataaagtgtgtagccagccacagccagcgagcgccccctccggctccggccctcctcttcctcttcccccaagtcccattcccaattcgccctcctcaaatccggcgccgcattcccgacattccgcagatctgggatccgccgccgacggatcccctgccgcccgcaacgacccgggacgcgcgtgatcccgccgcctagccgccaagttggcgcctcagcggaggtcgcagcgcctcgccg

SEQ ID NO: 280863 - DNA, 516 bp, Zea mays
ctgttgtttgtgttcaggtacgcgcttgtgctgatcgcgatgtacaacttgtgggacctgatcgggaggtacgtgccgctgatcccgtgcttgaaactgacctcccggaagggcacgctggcggctgtcttggcgcggttcctgttcatcccggccttctacttcacggccaaatacggcgaccaggggtacatgatcttcctaacctccttcctggggctcaccaacgggtacctcaccgtgtgtgtgctcatggaggcgcccaaggggtacaagggccccgagcagaacgctctgggcaacgtgctcgtcgtctgcctcctcggcggcctcttctccggcgtcgtgctcgactggctctggctcattggcaagggctggtgagtacggtcttctgcgcgtgggtctttgagggggatcgattagattttagatctctgtttcgacctcttgtttttgcttaaaaaaactagacaacttctgtctttaggtagctagtcagagaacacggatact

SEQ ID NO: 280864 - DNA, 846 bp, Zea mays
cccacgcgtccgggataggagggaggggcagataaagaacactgcaccatttgatttgtgtgctcctgcagtctacaccctcacttgctttcaaacgtgcacctcccctcttcttcttcttcctcctcccctcatctccttccaacaacgccataaccacagcttccctctcctcctctctcttgttgcacgaatatgacgccataaccacagcttccccgtgaacgacaaggagaagcagagagtgctacataggtacatgtagggtactataggataagaactatacagctaggaggtagcggagggaggagcacgccgccagcagtagggatgtacaagaaccagctccaagaactggcgcagaggagctgcttcagcctgccgtcgtacgtgtgcacgcgcgagggccccgaccacgcgccgcgcttccgggcggccgtcaccttcaacggcgagaccttcgagggccccagcggctgcaccacgctccgccaggccgagcacgccgctgccgaagtcgccctcgcccgcctctccctccgcggcccgtccactaccctcgccggccgggtcatcgatgagaccggggtgtacaagaacctgctgcaggagacggcccacccggcggggctgaagctgacggcgtacaccacggtgcgatcgggcccgggccactcgccggtgttctcctacaccgaagagctcgccggcttgagcttcgcgggcgaccccgccaggaccaagaagcaggcggagaagaacgccgccatggccgcctggtcgtcgctcaaacagatgccggaggctcgcaaggaggccggcgccggcgacgagcaggagcac

SEQ ID NO: 280865 - DNA, 559 bp, Zea mays
ttccgaatcaggccttactgagccgaggggcgggggagtttactgacgttttcctgccattcacccccatccagacgaccagaggccagagggcgttgctgcgcctgggttccgcttctcccttatttgctgcgacgacggctggtcgagcgccgccacactttgcagcttccttggctcttcgcaggtgacgagcgcccaccagtcagacatgggacaaggtggacaagagaagtcgttcaatttccttcaagttttgctagagggcaacatagctggaggaactgctgggggtggggtggaaacagcactttacccgattgatactataaaaaccaggcttcaggccgctcgaggtggaagccggattgaatggaaaggcttgtattctggattagctggaaatctcactggcgtccttccggcctctgcgatatttgtcggggtgtatgagccaactaaaagaaaattactggaaacacttcctgaaaatctgagtgcagttgcccattttactgcaggggccattggaggtattgctgcttccctcgtccgtgtc

SEQ ID NO: 280866 - DNA, 685 bp, Zea mays
tggcgtctgccgcaacaggctcaacgctcacgcgcacacacaatccatagccgcctcccacatctcactctcgttccgagcttccggccatgacggtgacctccggcgcccccaacgacaacggccggtgatgcttctcctcctcctcctcctccttgtccataactgttttttttgcagttgcgcatcagtgcacttaggtctaactcccagaagtattggtactgagtactgacccatcgagccgtcccgaagggacgctggcgccgctgcgactgacgatgagcaccgcgtggatctggaagttaggcacaaggacgccggcactagggactcgccagcaccgatagcggcagctgcgcctgcgtcccaatcccgagtggctggaaagcttggcccctcagatccaaagcacctcatctatgcgggatccaaattaaagcatattaaagctgcacctgctgcaccagacaagaatcgccgaccacctttgtctccaccagcacctgccgtcaatcgtggtcgtggatctgtgcgcacacctttgggattaaaaaaatgtctaccgaaagtggcagtcaatccccattatctcaagcatcacaagcaccgatgtctccatctcatgaacctgaatcgtctcgtcctgagtcagataatgactcgatgccaatttaaatagatg

SEQ ID NO: 280867 - DNA, 270 bp, Zea mays
ggcgtgttgccgcaacaggctcaacgctcacgcgcacacacaatccatagccgcctcccacatctcactctcgttccgagcttccggccatgacggtgacctccggcgcccccaacgacaacggccgtactgacccatcgagccgtcccgaagggacgctggcgccgctgcgactgacgatgagcaccgcgtggatctggaagtcaagcacaaggacaccggcactagggactcgccagcaccgatagcggcagctgcgcctgcgtccca

SEQ ID NO: 280868 - DNA, 736 bp, Zea mays
cacctccctcatacaacgccgcgcgtgccctagtggtagcaccagctgcgggcctgtggcaacagtgatggccaatgccactgtccccgagttgcagccgcaggtgcaagcggcgggtggccgcaaggtggtggacgaggtgtccggctggctgcgcgttctggacgacggcagcgtcgaccgcacgtggaccggcccacccgaggtcctcccgatgatgcagcccgtggcgccgtacgacgtgccccgcgacgggcacacgctgcacgacctcccaggggagcccaatttccggatctacctccccgaggtcgacgacgaccgcaagggcgggcgccctggcccgtcatcgtgcacttccacggcggcggcttctgcttctcccacccgtcctggctcatgtaccaccagttctactcgcgtctcgcgtgcgccgaccctgccgtggtcgtctctgtcgagctcccgctcgcgcccgagcgacgcctgccagcgcacatcgacacggccgacgccgcggaccgccggctccgctgcatcgcgctgtcggaggacggagctcttggtgacaaggcaggtaagctcctccgtgaggccgccgacgtctcccgggtgttcctcgtcggcgacagctctggcgcgaacgtcagccacttcaccgacgtgcgtgtgggccaagacggagctggcgtctgggcgcccctgcgcgacgccgctgcgttctgatccaaccggg

SEQ ID NO: 280869 - DNA, 908 bp, Zea mays
tcgttcggtcttcgggttctactggatccgcgagacccgcaggaggtccactaatgctaagggtttaaatcaggaccaatttgaagaatcacaaaggccaggggcaattgtatctaatcatgtctcttatgtggatattctttatcacatgtcagcatcctttccaagttttgttgctaaggagtcagtgtccaggttgccacttattggtctcataagcaattgtcttggatgcatttttgttcaacgagaatcaaagtcttcagaagctaaaggtgtctcaggcgctgtagctgaaaggatccaagaggtttgtcaagataagaataccccaatgatgttgttgtttcccgagggaactactacaaatggggattaccttcttccatttaagactggagcctttcttgcaggtgcaccagtgcagccagtcattttgaaatacccttacaggagatttagtccagcatgggattcaatggatggagcacgtcatgtgttattgctgctctgtcaatttataaatcacatggaggtggtccggttgcctgtatactatccttctcaactagaaaaggaagatccgaagctctacgcaaataatgtcagaaaactaatagcaatggagggcaatttagttctttctaatattgggctggcagagaagcgcgtgtaccatgcagcactgactggtagtagtctacctggcgctagacatgagaaagatgattgaaagacgttgcgtcgctttttctgtaacagacagccgaggagcacttaaaaatgtaactgtgtgcgtgttttttatacctgtaatgtggcacttcatttgtttgaggaggctgttgagtacccttctcatactacattgtacaaaaacaatgtccaatgtccattatagtttgatg

SEQ ID NO: 280870 - DNA, 630 bp, Zea mays
  unsure (1)..(630): unsure at all n locations
gattcctttccttcctccacaccccaccctcccttcgcctccacatccaccaccatccaatccgcgcgggtgcttcgccaccctatcccgattgctacctcctcgtggtgggcgccgctccgatccgcccgatccgcgctgctcctgaggctccggcgcgcggcggcgagcggcggaggcggcgcaggaatggaatccgaggacgatatgcacgacgcaaacgactccgccgaagatgacttctacagcggcggggaggctggtctcgccgccagcgacgacggagacgcagactacgacttcgcggaccacgactccgacgactccgcggagctcctctcccacagacagcagcaaaattacagtatattgagtgaagttgatatcaagcggcgccaagaggatgacataaatagggtttcaactgttctttcaatttccaaaccagaggcatgtgttcttctccgcaactataactggagtgttagtaaggtgcatgacgaatggtttgctgatgaagagcgtgttcggaaggtggttggtttaccagagaagcatatngaaatgccaaatgacagagaagtaacatgtggaatatgtttcgaaagttgccctctcggatcgatgagt

SEQ ID NO: 280871 - DNA, 464 bp, Zea mays
cccacgcgttcgcccacgcgtccgatccaacccaacccgtccatttctccacatccccaccctccctccgtctccgcctccgcctgcgccaccctccaatccgcgccggcgcgtcgccaccctacccgattgctacctcctcgtggtgggcgccgctccgatccgcccgatccgcgccggcgcctcgccaccctacccgattgctacctcctcgtggtgggcgcctgctcctggagttccggcgcgcggcgggggcggcgtagtaatggaatccgaggacgacatgcacgacgcgaacgactccgctgaagacgatttctacagcggcggggaggccggtctcgccgccagcgacgacggagacgccgactacgactttgcggaccacgactccgacgactccgcggagctcatctcccacagacagcagcaaaattatagtatattgagtgaagttgatatac

SEQ ID NO: 280872 - DNA, 598 bp, Zea mays
gcacagagtatttttgacagataaataccgcccagaatcttgctgcataattgcaaattactacagtctgaagggtcagcatgagaaatcagttttatactttcaaagggcactaaagcttaatcgaaagtacctctcagcttggaccctgatggggcatgagtatgttgaattgaaaaatagtcctgctgcaattgatgcctacagaagagctgttgatattaatcctagagatttccgtgctttgtatggtcttggtcaaatctatgagatgatggggatgccgttttatgcactttattacttccggaaatcgtcatacttgcaacccaatgatgctcgtctctggattgccatggctcagtgttacgaaagtgatccacttcaaatgattgaagaagccataaagtgctatgagagagctgcaaacagcaatgacactgaaggaatagcacttcaccaactagcaaaactgcatggcatgctggggcaatccgaggaagctgcattctactacaagatggatttagagagaatggaggttgaggaaaggcaaggtcagaattttgttgagctctgctgtttttgctaagcatac

SEQ ID NO: 280873 - DNA, 823 bp, Zea mays
ttgctgacgcgtgggtgcccacagaaattgcgcccgggcgccctccattcaccttctaaaaaggagccaggcttcccatcaacgagggtgtcggccatctgagcagctcccctgcccctcgcagcggctactctacaggtctagcgactctttcgccatccatagagggaggaggcgcggcggagatggtgggcggtggcggcggcgggccgctgcggcgggtgggcaagtacgaggtgggacgcaccatcggggaaggcaccttcgccaaggtcaagttcgcgcagaacaccgagaccggggagagcgtcgccatgaaggtgctcgaccgctcctccatcctcaagaacaagatggccgaacagattaagagagaaatatccataatgaagcttgtcaggcatcccaatgtcgttaggctacacgaggttttggcaagccggaagaagatatttataattctggagttcatcactggcggcgagctattcgataaaattattcgtcatgggagactcagtgaagcagatgcccgcagatactttcagcagcttattgatggtgttgatttttgtcacaagaaaggagtctaccatcgagacttaaagcctgaaaatctcctccttgattcccaaggcaatcttaaaatttcagactttggactgagtgcatggcctgctcagggatctttccttctacgtacaacctgtgggactgcgaactatgttgccccagaggttctcagtcataagggatataatggcgcacttgctgatacatggtcatgtggagtaattttatatgtattgttagcaggttatct

SEQ ID NO: 280874 - DNA, 562 bp, Zea mays
ccggccctcctgggtcgtcccacgcgttcgctttgttttactgaagcccaactccgccgctaagcctcaagcgaccgcgacgcagagccatggccgccacgaggagcacgacggcggtgccggagctggccctgccctccgggaacgcgaggccagtgccggtgattggcctggggacagcggtaatgttccagccgccggagactaccaaggacgcggtgcttgcggccatcgagctgggctaccgccacttcgacaccgcctccttgtacgggacggagaagccgctcggcgagggcgtcgcggaggcggtgcggcgcggcctcatcgagtctcgggaggaggtgttcgtcacgtccaagctgtggtgcacgcagtgccacccggacctcgtcgtcccctccctccggcagaccttggaaaacctgcagatggattacctggacctgtacctaatccacatgcccgtctgccagaagcccgggccgcctgtgtttctcggcaggagagaggacgcccgcccgttcgacttcaagggcgtgtggcaggcgatggaggagtg

SEQ ID NO: 280875 - DNA, 472 bp, Zea mays
cccggtgaaacgcagggaggcctcacactgccactctcctccgcactttcccgggcttcgccgctggcgtgacagcattcgattggtcaccggactctgcgttcctcctcgcgtcctgcaaggacctaacagctcggctcttgcctgtcaagaagggactaggaggcaagcctttcctcttccttggccatcgcgcggctgtcgtgggtgccttctttgccacggacaagaagacaaggagagtcaagggggtttatacagtctccaaggatggagctatctttacatgggatttggtggaaggaaatgaggaaaatgatacttcacctgcgccattaccagtgacgccagagcaggggtcaaaacaaaatgtcgtcgatgccatggaacttgatggtgggagcaggaaaaggaagattttgtgaagattagagggactagacactatgctgcattttggcaaaatgggagc

SEQ ID NO: 280876 - DNA, 510 bp, Zea mays
tgctggccgcctccccggcccggtccggcccggcatttccggcccagcccacgcgttcggtgtcgcgtgggggactcgtccttcgtgcttcttcgccagctcgtccttcgcgcttcgtagccagccgtcggcgagagagggtgagaggatcctacgtgccttgtacgctcgctcgggagccggccgggatcgcgccgcgccatcgtaccccgcccggacatgtgcgtggaggggctggacgacgcagcagggaggctcggcttcggagaccaggacaccgacaggcgcgccggtgatgcgatggagagagtttgtgagaacacagtggctgttgacttcaagcagactaagctgaacaactttgtgccattcatccggtcaggggaatggtctgatattggaggtcgcgattacatggaagatgcccatgtgtgcatctctgatctggcaaagaattttggctatgactcagtcgaagatgaagtaatttctttctatggggtgtttgat

SEQ ID NO: 280877 - DNA, 502 bp, Zea mays
ttttatttctgcttcgatatggccttcggctattggtttgtggactgtagcatttgggatgggtattgatagacaagatgttcgtattgtttgccacttcaacttgcctaagtcaatggaatccttctaccaggagtcaggtcgagctggtcgtgatcaacgaccttcaaggagtgttttgtattacggattagatgaccggaggagaatggaattcattttgagaaaccccaaaactaagaaatcacagccgtcttcctcttcaaatgagctttctgagaaggctctagctgacttcagtcacattactgactactgcgaaatttctacgctgccggcggataaagatcatcgagagctttggagagaaagtacaaccaactttatgccaacgctcatgcgacgcttgcaaacacccacatttagcgttgtttcgtctggaggaactccgtcgtgtgcccaactgtcgctctaataagatctctccagtcgttcaaagctc

SEQ ID NO: 280878 - DNA, 450 bp, Zea mays
  unsure (1)..(450): unsure at all n locations
tcgcctacgcgtccgcccacgcgtccgcccacgcgtccgcacgagagtcgcgattcttccaccacttccacgggaccggtcggatccaatctgctgccgcccagccaccgccaccgccgccaccgccggctcctctataggggtcttccctcctcttcgcccttcgcaacccgcaagttccgagcgattgatgagtatttttctccccgtcccttggagcgactcggtggatgcgagggacctgtccgcgctcgacccgccttcgcccctatctcgccgcccggcgggcaggctcctgctctcgccttccgttcccggagctagccgcaggcccatgggctagtgggtcgtcgttcgccctcctgcgatcgcgagcggagaggcggcctgcgggatccgcccgtctccaatccaaataactcctctccttgacgatntccgagttactgg

SEQ ID NO: 280879 - DNA, 521 bp, Zea mays
gcacctccgctcaaaaccccagctctcctgccccggctggtctcagccacaagtaggcggccggcaagccaagaccaaggagcccgcgagcgcgagggctcgccgacgcggatggcgctactcctccggccgattcctccccctccccgcctccgcgcgctcctcggccgcctcctctccactggcgccagtctatttccctcccgcatgctccccgcgccccgctccaccgccgccgtccctcggctcctgtttgggcccagtgctgtggccgcggcagccacgcggcgcaatggggtccgggtgcgtgcgttcatggcgtcaacgacggcgtctgaggcgatgcacgagaagcaggtgtccgcggagtacactgctgccaatgtccaggtcctagaagcattagatggagttcgcacaaggcctggtatgtacattgggagcacaggaccacgcggctggcatcatctggtttatgaaatcttggataatgctgtggatgaagctcaagcgggccatgc

SEQ ID NO: 280880 - DNA, 497 bp, Zea mays
gcggaagtatggtgaccatctgtatggaaaacaggaatatgatgaggctatgtcccagtatatccacactattggtcatcttgaaccatcgtatgttattcagaagttccttgatgcaaagcgcatctacaacttgacaaattatttagagaagttacatgatcgagggttagcatctaaagaccacactacccttctgttgaactgctataccaaattgaaagatgtggagaaacttaaccattttatcaaggatgaagatggggttggtgagatcaagtttgatgtggaaactgccataagagtatgccgcgcagctcggatatcatgaacatgctatgtttgtggcaaaaaaggctgggaggcatgagttgtacttgaagattttgcttgaggatcttggtagatatgacgaggcactgcaatatatatctggcctcgaggcaaaccaggcaggtcttactgtaaaagaatatgggaaaattcttgtggaacat

SEQ ID NO: 280881 - DNA, 455 bp, Zea mays
  unsure (1)..(455): unsure at all n locations
cctctttagcctcgccttggctgcgcctgtcggcgcgccgtgtcctggagtgtctcccgcgtcaccgctgccgtcctggatcctcgctggcttccgctccctccccgagtcgccctcggcacgcagggacgacggcggcgcaatcccagactccacgtctgcctcgcgacaccccccactcccgcgtctctccaatcgcctcgcaacctcgcctcctgtcatctgcacatcggccactgactctgcagcttcgacgccgttggcagtggtagcggcagtgtctattgtgagtgaaggttacttgactataccaaatttccgtgcactacatcattgctatagcgctatgctacatgtgctaccaacacaggtcagtaaatccttttcatatattgggtgtgctgattccatgaattctagtngctccttcagaacaggctatgtttgagctcgtg

SEQ ID NO: 280882 - DNA, 501 bp, Zea mays
ctttttcttcttgaccttgaaaagaaattcgaggagtgcgcagctaatgaagaaaagcagcttctagagaaggtggcggagatgctggcaagttccaacgcacggaagaagaagctggtccaaacagcagtgggcagcctccgggagagcgccgtgaacagaacgagccacctgcagaaagaaatctcgacggcccaggacttgacctcgtccgtgcgcgagaagtggggcttttacatggaagagaccgagaagaattacgctgaggataccaaagcagtcgacagcggaaggtcttgcctggccgaagtgcttgtagaatgcaaggcgaaggccaccgtgggtgcacagcaatggaagaacgcggaggattctctgttcagcctcggcaaaggaaacgtggagtcagtggattctatagtcaggaccgggacagaggccaacgaattgctgcgttccaaactgtcgtctgcggcatcggcaactcttgaagatatcgac

SEQ ID NO: 280883 - DNA, 438 bp, Zea mays
tcggtcatcctccattccccatccgcaccatcgccgtccacgcatgtcgcctccgttccccatccgcaccatcgccatccacgctggtcgcctccgttccccatccacaccagcgattctgcaccagcgcccaccacccccgtatcgcccccactcccgtctgctgccccgccagtcatcgtgggctcggtcaagcacctcacgcctgcgtgggtcagccgtcgttcccgctaatctccttcgctcaggcaccagagtcacaccatcctcgctgtcaatctcgtcgcaaaccctccgcccctctccggtctggcactaccacgagcttccagaccccccgcccgagaaatgttgtagcgtctcatgctgggatgggcggcgtcagcgccgtctctcgccctgctgtggtccttcttctctgggtggagtcctgcactt

SEQ ID NO: 280884 - DNA, 672 bp, Zea mays
tccatgcgtccgccggaatcgttccagctaatttatgtaagttttgataagttggaatgaattctggtctaatcctggacaaacgaacgggcccttagccgtacaataccagacgtagatagcataacgatagcacaatgcgcgattgtgccgaagtcatcagagaagagagaatcatagctgttagatgatatcaccaagtcttttgcacctacgtcttgtcagcgagaacattttgggtttcgaacaagacagacttcctctgtgtgtaaaaactttgggcatacccccctcttctcatctccattggtgagattggtgtgtacatgctattgtagttcagagttcagacagagtgacacggatatcagagcagatcataagaacgtacttgcagcgatggaactgagattattttctatattctttggccactgaatgtgcttcaaatgacagcagcagcaacattttgtatgtatcaggagaaggacgcactcctggtagctcatgtgtaccattttacaactcagctcaagatgtatgagcctgtttctttgcctgaactaagctgtcctacggcctggtagggttgagtagagccggaatattctcaaacaggtttggtgtgaaaaaaattgttgtaatctgcgagttgtgggaaaagctgttgtg

SEQ ID NO: 280885 - DNA, 761 bp, Zea mays
tacaggttgaaggggcgtttgttcaaggaataggctatttcatgagtgaggaatatgtcaccaactcagatggattgcttatctctgacgggacttggacatacaagatcccaactgtggacaccatcccaaagcagttcaatgtgaagttacttaacagtggattccacaagaaacgcgtgctctcttcaaaagcatctggagagccaccattgctccttgcagcttcagtgcactgcgcaacaagagaggcaattagagctgcaaggaacgaaccgcactgctctgggtccaaaccttcaccatcccattttgatctggaagttcctgccatcatgcccgtggtgaaggagctgtgcggcctggacaacgtagagaggtacttggagagcctgctgagctccgaatgaaaagcctactctcaccgtcagcacctgttacccttactcccttagccgtgcaataccagacgtagatagcataacgatagcccaatacgcgattgtgccgaagtcgacagagaagagagaatcatagctgtcagatgatatcaccaggtcttttgcacttacgtcttgtcagcgagaacattttgggtttcgaacaagacagacttcctctgtgtgtaaaaactttgggcatacccccctctcatctccattggtgagattggtgtgtacatgctactgtagttcagagttcagacagagtgacacggatatcatagcagtacttgcagcgatggaactgagattatttct

SEQ ID NO: 280886 - DNA, 519 bp, Zea mays
aaatgcggatagggaatttcttgcccagaagactgccccacatcgtgatttttacaatgtcaggaaggttgacactcatgttcatcattcagcatgcatgaatcaaaaacatctgttgaggttcataaaatccaaactaagaaaagaacctgatgaggtggtcattttcagagatggtacttatatgactttaaaagaggtttttgagagcttggacttaactgggtatgatctgaatgttgatttgctagatgtccatgcagacaaaagcacatttcatcgttttgacaaattcaatctaaaatacaatccatgtggccaaagtaggctcagagaaattttcctcaaacaagataatcttattcaaggcccgtttcttgctgagttgacaaagcaagttttctctgacctttctgctagcaaatatcagatggcagaatataggatttcaatctacggaaggaaacagagtgaatgggaccaacttgcaagttggatagtggacaatgaattgcacag

SEQ ID NO: 280887 - DNA, 537 bp, Zea mays
  unsure (1)..(537): unsure at all n locations
accggttttgaantcccgggttgcctttgcgaccggtaatacgatgcaatgtgcttttggctgcatggacatctagcttatcaacattcatatcatacttagcctagtccaaagtaggctcagagaaattttcctcaaacaagataatcttattcaaggccgttttcttgctgagttgacaaagcaagttttctctgacctttctgctagcaaatatcagatggcagaatataggatttcaatctacggaaggaaacagagtgaatgggaccaacttgcaagttggatagtgaacaatgaattgcacagtggaaatgttgtctggctggttcagattccacgcttatataatgtgtacaaggaaatgggtatcgttacatcattccaaaatcttcttgacaacattttcgttcctctttttgaggttactattgatccagcttcacacccacagctccatgtcttcctgaagcaggttgtagggttggacctggttgatgatgaaagtagaccagaaaggcgtcaacaaagcacatg

SEQ ID NO: 280888 - DNA, 711 bp, Zea mays
caggaccgttttcggaatttccttttctttctacgcgcccgcgatgagagcggcgccgcgggactcttcgcctcgccgctcgcctgctgggtgcgccatccctcgacggtgacaccgtgatattgctgtgaagttttgtggcacttcctgcatcccttatatggtattaacaaaaattttaattgtctgggtgatccatttgagcaaatggaaggcaacgatgtaccccttggaaacatgttgcaaggggttccctatgaaagtttagacttacgtggcagctctatgcaaaattatgctccaaactcaggaaaacatatcttcagcagctcccagatgccaggtactttcacaatgtctatgaccagggctacagagcctgatgactttcctgggtttcagttcaaagaacagggaaagagtgatgaccaccaccaccaccaataccatagtcatcacccaaagaactgcatgagtgatggtgaggaacatgttgtggctgaagatgctactgataccccaagtggcaaaggcaagaagggctctgcatggcatcggatgaagtggacagattcaatggtaaaacttttgattacagcagtgtcttacaccggagatgatcatggtgctgattccggcggtggcaggaggaacctcacaataatgcagaagaagggcaaatggaaggcgatatcgaaagttatgggagag

SEQ ID NO: 280889 - DNA, 282 bp, Zea mays
ccaaggagaggtgcgcggctggtggcatgcgagtggcagcggtgccgcgggactcttctcctcgctggccgtgcgcgccgtgccccgacggaatccaggtgacaccctgatattgatgtgaagttttgtggaacctcctgcatccttatatggtattaacaataatttaattgtctcggtgacccatttgagcaaatggaaggcaacgacctaccccctggaagcatgttgcatggggctccctatgatagtttagacttacatggcgactctatggcaaac

SEQ ID NO: 280890 - DNA, 547 bp, Zea mays
gcccattcggttcagtttcggcggtaacaagatcaactgcggtcgccagtcgattctgtgagcctgccagccatggagttgtccagttccgtctcgtccacggcggcggcggcggcgcaggcgcggctgctccggccgccgtcgtttcgccagccggggccggcgggattcgtgtcctgtaggagttacgctataaggagcaaactggtgagggcgatgcctccgatccttgctagcttccagcctgcatctcctcggtacccaagctttcaagacgcaaatggcaaaagacgaaatgttccttgttatcagagacaacaaaccccgcaggtagaagccaggtcgatggaggaggtatatgacgctttggctgaacaccttctttcggtcttgaagaatattgaacatcttgattcaaaatacattgttggtctagctggcccacctggtgctggcaagttcacagttgcctctgaaagttgtcgacgtgttatacattttggcccagaagcacacaaaggtagtggagcaccgtttctaacaagga

SEQ ID NO: 280891 - DNA, 695 bp, Zea mays
gccaagatgggatggatggggaagattcatggagccgattacatcgaagattccgctgatggtgatagaggggaaccatgagattgaaccgcagggtcacggtggagaggtgaccttcgcgtcttacttggcacggttcgctgttccatccaaggagtctggatccaacaccaaattctactactccttcaacgccggtggcatccattttatcatgctcggtgcctacatcgactacaaccgcacaggagttcagtactcgtggttggaaaaggatttgcagagggttgatcgacgagccaccccttgggtcgtggctgcttggcacccaccttggtataacagctattcctcgcactaccaagaattcgagtgcatgaggcaagaaatggaagaacttttatatgaatatcaggttgacattgttttctcaggacatgtacatgcatacgaaaggatggaccgagtatttaactacacattggacccctgtggcccgatttacatcggcattggagacggcgggaacattgaaaaaattgacatggatcatgctgatgaccctggaaagtgtccctcaccaagtgataaccaccctgaatttggtgggctctgccatctgaacttcacttctggccctgccaagggcaaattctgctgggaccgacagccagaatggagtgtatacagagaga

SEQ ID NO: 280892 - DNA, 499 bp, Zea mays
  unsure (1)..(499): unsure at all n locations
attcatgtgagatgccttatgcaagatataccttgcccacagaatataagaaggccttttgtgattttttgcgggaggtgaagtttccagatggatttgcatccaacatatcaagatgtttaaatgctgagggaaccaaattacaagggcttaaaacacatgatcgtcacattcttttgcaaagaatattaccagttgccatgagaggatttttggacaaggatatttatgaagcactagcggatctggggaaattttttagggaattgtgcagcagaactcttaaaaaggatgtgttggctgaaatgaggaaagaaattccaataattttggtgaagctcgagaaaatatttcccccagctttctttgatgtgatggtgcatctagctgtgcatctacctgatgaggcattatngcgaggtcctgtgcattatggttggatgtacccaattgaaaggcgattgtatactttgaagcgctatgtgaggaacagggcacg

SEQ ID NO: 280893 - DNA, 582 bp, Zea mays
atttgagcgacatgatgatggaaacacccgctagcttagccccattgcagcacgaggccaggagtgactaccaacccagtgctgtgacgtctatcatgaacctcaaccttacttcatcaccggagagtagcttggagtcacctgatctccaccccttccgtatctccatgtcaggagcagatgaactccgaagcttcatgtcacttgcagcctcagagtcaactgctcagaagactattgcactttcgaggtcgacaagcggtgggtatgaagcctcgggaggcgacgacagcgaccaaataccctctagaattgtgcacaggtcgtccaattggacaaatgtcattctcaattcaggtaggcaggcaactatgtccgatctgaacttgcctaggctacacctgtagggttcataactaacaccaggctgacatagctcaaaattgtgagttgctgacttcttaattagctatgtgttgttagcctgtgagcatgcattggtcagaaccagtgttgggaacctggtttttgggtttaagagtcgggttatgttttgcgatcaatcaatacatgtgcctttcc

SEQ ID NO: 280894 - DNA, 313 bp, Zea mays
tgcttaaaggatgtaaagagaatggaacctattgatggactgagcagaatcaacaaggaccgttggaaacttgtatgcagcatttgcggagtttcatatggagtttgtatacagtgttctcatcctacctgtcgtgttgcgtatcaccctctttgtgcacgtgctgctgacctttgcattgagcttgaaaatgatgacaaaatccatcacatgtatcttgatgaagacgaggatccttgtattcgtttactctcgtactgcaaaaagcatagacagccttctgctgctgaacgtccatctttagaaagtgatc

SEQ ID NO: 280895 - DNA, 463 bp, Zea mays
gttcaaaaggcttccaccacccaccagaccggcgaccactctcacaagcggcagtgcagtgcacccaaataaatcagctgggaggaggagcaccagcaccccaagagcagagctgagcagagcagcgtgcgtccaggatgtacccgtaccgcatgagcaacgtggcgatcggctacctgaacctggcgacgctgctggcctcgatcccggtcatcggcgcgggcctctggctggccaagggctcggcaacgcccacgtgctcctccatccttcaagcaccgctcctcgccgtcggcttcgccgtgctgctcgtgtccctcgcgggcttcgtcggcgcctgcttccacgtggcctgggcgctgtggctgtatctcgccgccgtgatgctcctcatcgccttcctcctcggcctcaccgtgttcgggttcggcgtcaccgcaagcggcggcggcgagcaagtgta

SEQ ID NO: 280896 - DNA, 509 bp, Zea mays
ccgccatcgggccgggctgctcaaaacggaggagatcttggaaggcgtggcgcgcctccgcatctccaacgacatcgagttcgaggaggagacgttcatcgacatgatgagggcggcaaaggagaaaagggcgaagctgaaggctcctgctccgcagataccgatggagacgcgggcggagaaggccctcgaagccatctacgtgtgctgcttcggtcaggacatggtggaggacgaggacgagaagcttctccgggcgatactgaacgccgtgttccccctaccctcgggccgggccgcggtcgagaggatggtggcgtccatggccaagcaggtggcctccggcgagaggaagcgggacgggaggaccgtgtccaaggaagtgcagcagcggcagctcaaggacctggagtttctgaagcagaacaagctggagtcgtcgtgaagcagcagcggcggcgagcagaaacttggcagcaaatcacgcggcgtggttcgccggcggctgc

SEQ ID NO: 280897 - DNA, 464 bp, Zea mays
atgactctgcacaagaaggcgtgaggaaggacgagccggagccactcagccgccacctcaccccccccatcggccgcctgcgtcccaccacccgctcctgctgccgggcctgccgcccgttgctctcgccactgaagccctcgccgccgcctccgcctccgcccgcttgcttgccctcctgccggctgcctcccggatgagaagcggcgcaacctgggcagcggaagcgtggtcggcctgagccttcgccggggtttctgccgagaaggatcctggagattaagcgcatgggttccttggaggcccggtacaggccggccggggcagctgaggacacagctaagagaaggacccaaaaaagcaaaagtttcaaagaggttgaaaaatttgatgtttttgtgctggagaaaagtactggatgcaagttccgatcgatgcaactgttgctcttcgctatcatgtct

SEQ ID NO: 280898 - DNA, 910 bp, Zea mays
gcatcaaacttatgtagtacttctgtaccacctgttgtctccttcaatctcggatctcttgggttcttaacttcacataatttcgaaggtttcagacaagatttgagagatttaatccatgggaacaacacacttggaatttatataactcttagaatgcgtctaagatgtgagatctttcgcaaaggaaaatcaatgcctgataaagtgtttgatgtgctgaatgaagttgttgttgatcgaggttccaatccatacctatcaaaaattgagtgttatgagcataaccaccttatcactaaggtgcaaggtgatggggtgatagttgcaacaccaacaggcagcacggcatattctactgcagctgggggatcaatggttcatccaaatgtcccatgcatgctgtttactccaatctgccctcactcactgtcatttagacctgtcatccttccggattccgcacggcttgaattaaagataccagatgaggcaagaagcaatgcatgggtttcgtttgatggcaaaaggaggcagcaactgtcaagaggagattctgttcgtatatccatgagtcagcacccgctcccaactgttaataaatctgaccaaacgggtgattggttccgcagcctgatcaggtgtctcaactggaacgagagattggaccagaaggcattataggcactagaaaattttttattgtttctgtacatatgtaaatttatacacatatagttttgtttttctgccaacatgtacaacgtgtaacatcaaagaatcttgcacgtaaggagctccgtagcttactttatccatgtattcacgtgcttcacaaatcaacttatatattatatgcccgtacgttgctacgagagcttaaaattaaaaaaaaaaaaaaaaataaaaa

SEQ ID NO: 280899 - DNA, 590 bp, Zea mays
tatgtctacaatgtcagcatttttctagaaagttcccggttcttcctcgggaaggtcaggattgctggcacctcatttgtgccctttcctgacgcggtggtcatgcattatccattagagaagcgtgggatgttttctcgcgtcaaaggagaactgggtatgaaagtatacatcaccaatgaccccgccatcaaagcttcaaaccctcttcctgcaatggatcctgtctccaataatcctcttccagccccaagtccagcagagcagattgcagctgatataactggtactaatctgcacacatctcaggagcataggtctgaggcaaagaccttacataccatcgctaaggaggtacatcatcatcataaccatggccatcttccagctacgtttggtgagcagccttccaagtactccattgaccagatgaaacctcaatctcaaccaccgaggattgtgagaatgttttcagctgcgtcccagcagcccatggactatgcacttaaagaaactagtccatttcttggtggtgggcaggttgttggtggccgggtcatacgcggcgaaaagaatgctagcacttatga

SEQ ID NO: 280900 - DNA, 622 bp, Zea mays
aggggatggtatgttcatttgctgcagatgatagccccactgctaatgaatcctcagttctggtcactagtcctggagatgctttggtgaggataacgcccgacacgactgttaatatactgcgccgacgagagaacatccaatcaaatttatgatgcgcttagcagtgtttgtaaagggatctgactgcatcatgtgtaattgttgttcgttatggggtgtttggtttttagggactaatttttagtactccattttaatctataaattgctaaatgcggaaaataaaacttttatttttcgtacttggtaatttatgaactaaaataaaataggggactaaaaattagcctctagaaaccaaacattcccgaagttgtgcgtgtgcgttaaattgtgaattgccatgtggtggtttagtggttgaaaaaaggttaagttttttcttccagaacggagaaagtgagttatttcagtttgtgagaagcatgtttcgttctcgtttggcccaactgctgcttgttgaaaaagcagcttatctgagaagccggtgaaaaacaatttctactttgttggttgcttttagttcaatatgagaaacatcttgactgattagctgttg

SEQ ID NO: 280901 - DNA, 510 bp, Zea mays
cccacgcgtccgcccacgcgtcccgatctatcagaagttcagaatctatctctctgctcctggttcaccattgcgcaaattggagcaagatgggaaggctagccctggctgtgccggtgatgcttctgctgctttgcacgacgtgcagactgacgctcggaattacagacggtctgctcccgaacggcaacttcgagcggagcccgctgccgtcgcagctgcgggggacccgggtggtgggcgcgtcggcgatcccgtcgtggcagacgtcggggttcgtggagtacatctcgtcggggcagaagcagggtgacatggtgctggtggtgcccgagggcgcctacgccgtgcggctcgggaacgaggcgtccatccggcagcggctccggggcgccgcccgcggcgcgcgctactcgctcacgttcagcgcggcgcggacgtgcgcccaggcggagcaactgaacgtttctgcgttcgttcagtcgggccttgttggccatgcctaccatg

SEQ ID NO: 280902 - DNA, 1300 bp, Zea mays
cggacgcgtgggcggacgcgtgggctgacgcgtgggcggacgcgtgggtgagactcaaatatccccatattgctattggggctctcgcatcatcagctccgatactgcagtttgaggacattgttccttctactatattctatgatctcgtgtctgatgattttaggagggaaagtttaagttgttttcttacaataaaagactcctggaaagaattagatgaccaagcaaacgagcaagatggtcttctgaaactaagtaaaaccttccacctttgccagaccctgaaaacaagtggagacctttcagattggttgagctcagcgtacagttatctggccatggtggattacccacttccatcagaatttctcatgcctttgccagccaatcctattaaagaagtatgcagaaatatcgatagtcaacctaagggtactagtactctggaacgtatatatgcaggagtaaatgtatactacaattatactggcactgttgactgctttgatctaaatgatgatccccatggaatgggtggatgggactggcaggcttgtaccgagatggtaatgccaatgtcttacagtgaacagaggagcatgtatccaccatataaatttgactacacttcctatgctgaggattgcatcaaaagctatggtgtcaggccaaggcctcagtggattacaacagaatttggtgggcataatatcactaaggtcctggaaaattttggtagtaacatcatattcttcaacggacttcttgacccatggagtggcggaggcgtcctgaagaatatatctgagagtgtcgttgctattgtggctccattaggagcacatcacatcgatctgcgcccggcaactcgagatgacccggattggctggtggccctgagagaatcagagctggagatcatatctggctggctatgggattactacggggctggaggagcactcttccagcctgtagctgtcaagggctcctcttcatactgaggaaccgccgttaatgctgctgcagtgctgcgtcatggagaaggaagatcttcatgttgatgatcgggcactgaattcgctcctgcatcatgtgccatatcagtagcatttggtctgtgtatcgaatgggacgacatgtacttggctgatgaggtgaggaaaacactggataacgtaacgactctttcgcagtggtggtggcggtcaggtgctctagaggcttgatatcacgtgcatgtgccgctgtccataacacaatgctctatgtacgtgtacatatgctgccagtgtgc

SEQ ID NO: 280903 - DNA, 536 bp, Zea mays
gagagaatcagagctggagatcataatctggctggctatgggattactacggggctggaggagcactcttccagcctgtagctgtgaagggctcctcttcatactgaggaaccgcaccctggctaataactcaaatgcttggtctcagaaatttgagggccctgctgcaagtgccaaccaccgttaatgctgctgcagtgctgcgtcatggagaaggaagatcttcatgttgatgatcgggtccgctcctgcatcatgtgccatatcagtagcatttggtctgtgtatcaaatgggacatgtacttggctgatcaggtgaggaaaacactggataacgttacgactctttcgcagtggtggtggcggtcagcaggtgctctagaggcttgatatcacgtgcatgtgccgctgtaaataacataatgctctattgtacgtgtacatctttacttataataacttcagataattgtcttctgttctctttgttctacatctttcttcttctatttaattacatatccttatttaatat

SEQ ID NO: 280904 - DNA, 526 bp, Zea mays
cccacgcgtccgcggacgcgtgggtgcccgcttgtttgcggtgaagcctccggcgaacagccgtagcggaaacgccgcccgagatgtctgctccctccgccccaccccgcacggtgatctgtgtgggcgacgtccacggctacatcacgaagctggagagcctctggtccaacctccaggccgcactccccgccgacgccttcgccaccgcgctggtcatcttcctcggcgactacaacgaccgcggcccgcacacccgcagggtcctcgacttcctcctcgcgctcccgacgcgctaccccgcgcagcgccacgtcttcctctgcggcaaccacgacctcgccttcgcggcgttcgttggggcgctgtcgtcgacgcccgacggctccccgttctcggtcacctgggacgagtacatccacaacgaggagcacgaggggtggttccgcgggccgggatttcgagggcatgcacgtgcaggtgaggctgtggggcggggtcattaaggagaggtggaaccccaaga

SEQ ID NO: 280905 - DNA, 594 bp, Zea mays
tcgtgttctccaagtcaatcgcaatcaccaagagtcatcacgccatacgacacggaggacaccgagccggaggcgaagtcggtgcgcagcgcgagagtagcggcgagtcggcaaccatcaagcaactgcatggccgcggtacccgccagcgcccccgccgccgccgaggcggcggagctcgtgccgacgctctcctcgctggagccggtctacggcgcgggcgcgcagctcgacgagtcgcgcctccgcttcgcccgcctcggggaccgcttccacgccgtctacggcgcccgccccgcgctcttcgcccgctccccagggagggtcaatctgatcggggagcacatcgactacgagggctactcggtgttgccgatggccatccgccaggacatgatcgtcgccatccgaagggccaacggcgcccaggtgagggtcgccaacggcgacgacaagtaccccctgtgagtctacccgggcgacccatacaaggaaattgacgtaaaaaatcacacatgggggcactatttcatgtgtggatacaagggagtccatgaatactgtacatcaaaagggatagatcctgggcaacct

SEQ ID NO: 280906 - DNA, 495 bp, Zea mays
tccgtgaagcagcaggccgcggaccaggcccgcatggcgtctgtcgagcgctgcctactcggagcgcgttcgggagcttggcgcggtggtagctggagcttgcggagcgggagttcgcgcgcgccagggccatctgggagcgcgcccgcgaggaggtggagcgcgtggagcgcatgaagcagatcgcggcgaggcgcctcgtcggctcggccgcttcgtccgccgcggtgctggagatcacctgccacgcctgcttgcagcgcttccacccctagctagctagctagcccctgctgctctactccgggccagatcctagctagtactagactactagctcctacacttcttgatgacgaagtgtaagggccgggtgcccgggtgccctctctctccgcgacgccggcagttcgaccgtggatatggccaccattgctgaaactctctttcttcgtcatagcttttgtgcacctcttgtgaattaatgccgtacgt

SEQ ID NO: 280907 - DNA, 391 bp, Zea mays
gagagagagagagagagagagagagagatagagagacgagcacttcaaggaggaagaagagaccaagattagttccacttggactgttcgctcctcgtcccccgtgcgaagcgaaccctgttccatgttcttgaatctctctgagcccagtccttgtagctagcagatcagatcgctcaggcggaaagatcgagagaaggtcgccccaggatcgagatctagagcgagaaaggtttaagagggaaaggcgcggcaaggagtcgagagaatagaatgttcccttcctccaagaagcaggccagcaccggtgccgcgaacccaaatgatcggcctatgtgcgggcaaggcggcgacttctgcggttttgttcttaccaccgaccccaagcccc

SEQ ID NO: 280908 - DNA, 474 bp, Zea mays
ttccgcgcagatgcacgtgagccgcccgcgtcggccggccggccggtcccagcagggccattgcccttcttctttcactagctcggcctcgctgcatgggaatgggaatgaagtggggagcgacgaaagccatgacacaagtgaagctactctcgtctcgtgtctcgttgccgttatttaaacaccccttatctttccctcctcaggctcaaaagccttgcccttccctgctctgctcctcctcgttctctgtgatgctgaggctaaaagctctcaccttcctgctcctgctcctcctcctcgctctctgctccggcgttcatccgtgcgacgcgaggagcggcacgcgctggagtcggacgactcgaggcggtggtagcggggcggcaccgtccgcctccgctgctgcgatcgggaggaaagggaaagcgagaagcagcggctcctcccacaggcaaagcggcgaacggagtc

SEQ ID NO: 280909 - DNA, 499 bp, Zea mays
tacaaattcgtttttgaattaatgtcaatttgaagaaaaggagttcaaggtgctcaacctggcctggcgcttgattggatgcagcgagtgcaaattgctgttgatgcggcaaaaggacttgaatatcttcatgagaaagttcagccttccattgtccatagggatattagatcaagtaatttcctcttgtttgaagatttcaaggcaaagatagcagactttaatctttcaaatcaggctccagatatggctgcccggttgcattcaactcgtgtcttgggaacctttggatatcatgctccagagtatgcaatgaccggtcaactaacccagaaaagtgatgtctatagcttcggagtagttcttttggagcttttgacaggtagaaagccagttgaccatacaatgcctagagggcagcagagcctagtaacttgggctaccccaaggttaactgaagacaaggtgaagcagtgtgtagatccacggttgatggggg

SEQ ID NO: 280910 - DNA, 178 bp, Zea mays
ggtggaaggcatgtgttacctactggatataaatatgatgatgtgaatgttcagttgaaaaacttgggtgacatgaactgatgaactatagctgatgcctccactttagaaatttagctgttttagtttgtctaaaatcaaacctttctttgacaagtaacttgcataaactcgggcg

SEQ ID NO: 280911 - DNA, 845 bp, Zea mays
  unsure (1)..(845): unsure at all n locations
agaagcaaggacgtgagggggaagtacgtgctgtgcaccggcggcccgagcaccgagatcgagcagcagatggacgaggtgcagagcaacggcggcctcggcgccatcatcgcgagcgacatgaaggagttcctccagccgacggagtacaccatgccgctggtgctggtcacccagccggacggcgcggccatcgccaagtacgcgacgacggcggcagggtcagccagagccggaggaggggcgcccagggcgagcatccggttcggcggcacggcgctcggcgtcaagccggcgccgaccgtgtcctacttctccgcccgcgggccgggcctgatcagcccgacgatcctgaagccggacatcgtcgcgccgggggtggacatcctcgcggcgtgggtgcccaacaaggagatcatggagcttcggaaggcagaagctctacaccaagtacgcgctcgtgtccgngacgtccatgtcgtcgccgcacgccgccggcgtggccgccctctgcggtcggagcaccctgactggagcccggcggccatcaggtcccccatgatgacgacggcgtacgtgaaggacagcgccagcaacgtcatcgtcagcatgccgagcgggtcaccgggaacgccgctggacttcggcagcggccacgtcagccccaacgaggccgtggaccctggcctcgtgtacgacgcggcggccgacgactacgtcgacttgctgtgcgccctacgctacagcggcagccagatatccaccatcaccgggcggccgaaccccagctgcgccggagcaaacctggacctgaactacccgtccttcacgatcatcctcaacag

SEQ ID NO: 280912 - DNA, 910 bp, Zea mays
catttgcaagggttggaccagagatgaggtgttgaacaccctaaaaagtattggaattcaagagtgtgaggtgagctttcccagttacgtgggaggaagccgagggtttgcttttcttgagttcacctcacattactatgctagagcagcacttcgtcgcttaatgaaacccgatgctatttttggtactgatagaagcgctaaagtatccttttatcgaacccccacaaaatcatccaagagacttatacaggcaaaaatagtatacctggaacatgtccctctttcttgggatgaaaataaagttaaggaatactgtgaagaatatggggagatcctgaaagctgatgttttccagatatcaaagaatatggaaaatgaaacaatttcttttgttgaattctcatccaggaagggtgcgttagcttgtgtgacaggaataaacaaagcaaatattgttgatggaagcttcaagttgtgtgcatatcttgcttggccaaaaagtgcttcaaaggtcaatagtgctgcaccttcaaatgctgccaccgcaaccgagaaggacaaaacccacacagagaagattcttgtagacatcgatttgcaacataaattccagaaaggcgacaagagcaaacttacatctcagacaaaggaggcaattatgaagaagaaaaaatcaagtaaattaccaaatgacaatgatacaaaactaacctcacaaggtgctgccgaagtaccacaaacctccaaatcttctgaaggcaagaggaaagttggaaaaaacaaacatgcctctgtataccaaaaaccattgaagaaagcaataaataatcgtaacgttgatgagagccagctaactcatcggagtgctgcagtactgcaaacgtctaacacttccaaagggaaaagg

SEQ ID NO: 280913 - DNA, 553 bp, Zea mays
tctacacgaaaaaaagattgtatacatatccaaaataacaattgaacgagctaaactgggattcagagttgttgacaatccttatatggtaaagctcaacaagagaaccattgtgcttgaagataaggatcaaattcaaggttttcctaaatatacattctcactaacacccttagataagttggaccaatacaaaaacaagaccgatcgttttatagatgtcattgctaagatcagtggagtatcaaatgtagcaaaggttcctacaacctcaggagatcagcaaatgaggagagttgtattattagaagaccttaagggaaacatgattgagctatcactatcaggaaaaagagctttggaatttgacggagatcaagttttagatgtgggtcagcaacatcatgttattgcaatatttgtaggaaccttagtcaaactttacaaaggtgaatatacattcttgagtggaacatcagcatgccggtggtacatcaacgaaaatgacattgctgaaatcaaggcttttcagataagtttgcaagtgaacctg

SEQ ID NO: 280914 - DNA, 537 bp, Zea mays
gtccggcggcgccggccagtggtgcggcgactgcggctgccaatgtcggggactcctgctccacgaggcgcggactgcggctcccacatgcgtccgctccgccgctcaccaaccccatgtccagcatcattagacaacatcgtcgccggctcgacaagtgcgcctacctcacgacgcacagacgctgtacgccatcgccggggagccctcgcacaccgggatcccgcgcgtcaccttcggcacccaggaggactcggtcaccgaccagctgaatcacggagtccgggcgctgatgctcgacacgtgcgactccaagggagacgtgtggctgtgccattcgagcggagggaaatgcaacgactgcaccgcgttcgaacctgcactggacactctcaaggagatcgaggcggtccttgcggcaaacccgtaccgaaatcgtcacgctgatcctagaggactacgttcacgcgccgaacgggctgacgaacgtgttcaacgcgtctggcctgctaagtactggttcccggtgtcgaggat

SEQ ID NO: 280915 - DNA, 728 bp, Zea mays
tcggggatgtttggcattactggactgatgatggtcttggatactatgaatttcttcagcttgcggaggacctgggtactgaaccaatctgggtattcaacaatggagtcagccacaatgatgaagttgatactgttgctattgctccttttgtaaaggatgtattggacagtatagaatttgcaagggggagtgcaaattcaacatggggctctgttagggctgcaatgggccaccctgaaccattcccagtgaaatatgttgcaataggaaatgaagattgtgggaaaaaaattttaccgcggtaactacctcaagttctacaatgctataagacaggcctatccagacattcaaatgatttcaaactgcgatggttcatctacaccacttgatcatcctgctgatttatacgacttccatgtctataatgattctaagactttgttcaacatgaagagcacatttgacagaacatctcgtagtggacccaaggcttttgtaagtgagtacgctgtttggagaggtgatgcaggtagaggaagtcttcttgcttcgttggcagaagctgctttccttactggactggagaagaatagtgacattgtttccatggcaagttacgcgccactattcgtaaacgacaatgaccagacgtggaacccagagcaatcgtcttgaactcctggcagcattacggcactcccagttactggatgcagacgctt

SEQ ID NO: 280916 - DNA, 490 bp, Zea mays
cagcaatccgacctgagaccaagaccgcgcaccacgcggctcgccgccgatggcgaacgccgacgccgacgaagcgccgctgctctctgtggaacacctccgtccaggatcctgcagccgcgagctcgagctgcgggagttccgcgaccgctacgtgatccgttcgctcgacggcgccgccgctttcgccgtccttcgctccggcggctccatccgccctctctccccagaggaagccgtagctgagagcgactgcaaggtttccagaatatacggcgtggtcggcaccataagattgctcgctggagagctgcatttcattccattaagaagaaaaacagtgataatacaaaacagccacctcgcgggggccaagtacaagcatattgatactcattcatgaataaaacacccaaaggaagctttgtacttgtatcacttttagaaagaagctggctcttatctgggctcccttgtgaccaagtgaact

SEQ ID NO: 280917 - DNA, 592 bp, Zea mays
ggtggactcttatgccatacgctcaagattcagcggatctaccaacgttgccaggagagaggcatgttctgatgcaagagcctcgcagctattatgacaacctgggctatgtccatgaaagggtgaatgccaatccttgcagtacttaagacgtggacatggtcaaagtgcatgttgacgcggatatcggcaaagtgcacggagattgccttgatgcaatagcccttcagctactgctgaaattgaagagacatttgaaagtcgtctatagcttagatgatgcccgctgtcaggcattttctctaaaggagcctccgaaatctggagaaacattctccaggcagaatattccttttaatgttagcagcactaacatcagtctgccgagctgcctgcaggacgtagcttctgtttaccaggatttcaagacagtgctccacgaagattccatggactttgctgtgttcatcccttcagtccagattaggaagcgcccaaccccgagaaatacgacaaacccaagcccaagaagtacgacgagggtcaggagcacggctgcctcgagtgttacaaaagcccgtggtggcgcacg

SEQ ID NO: 280918 - DNA, 508 bp, Zea mays
ctgcatcaaatcccctcatcaccctgcagcctgcactcatcagacatggtgctcaccatggccagcgcccaagaggactcgctcctcctgctcctcctgccgaccacctccccactgccgaccctcatggctgtgttcatcctagccgccgtcctcctgtggctctcccctggcggtcctgcgtgggcgcgctcccgctgccgccgcccgccgcccgggccaacgggcgtggtcaccgcgctctccagccccgtggcgcaccgcaccctggcggcgctgtcccacgccgtagacggcggcaaggcactgatggccttctcggtcgggctgacccgtctcgtcgtgtcgagccagcccgataccgcgcgcgagatcctcgccagccccgcgttcggcgaccgccccatcaaggacgcggcgcgccacctgtttttcaactaaaccttgggtttttcgccttccgaaaacctaattgcagcgggctcgtacgttttgccgcaaacccact

SEQ ID NO: 280919 - DNA, 571 bp, Zea mays
gtctggataacaacaggaagctggaagcagcgaacggaggctccaggagcggtaccaggaagcggagaatgcgaaaaggcaacgcacgattcaggtaatggagctgggtgacataccgaagcccaagaatcaaaacagacaaccggtggtgaagtccaggaatagccttaggaattgggcgaacgggcggcgctaactcctctgtgacctttttttttttttgtttacctcacctgatgaattgttgccatgcctggccttgtcggatcatgcgtttattatgctcatcgaggagcagatgaacaatctttttttttctttttgcacagaaccttgaatggagggttcttttgaagtggcaagagttgcccttgatgccatgagtggagacgagagtttagccatgtctggataatggacatgtagctggatttgtatcggctggttctttccttctttctttcttcttgttcttcttctccaaaggaagctcctgtagatcccagatagcatactcaccaacgtttggttcaggcccaaaaaaaaaaaaaaaaaaaaaaaaaaaaaaaaa

SEQ ID NO: 280920 - DNA, 442 bp, Zea mays
cccacgcgtccgctcccggatctgatttggttctcgctttcccttcgcctttctcggccggtcccagctgctgctttttcttcgtcgtaatccccgtccagcgagctgcagcgcaccacagtccacaaactgctgatcgatcctagctgctaggctggctggagcaggaattgaagcaggcagctagctagctagcattgcgtgatgaagaagaacaactccagcattgagagcacgggcggcggcggcggcacggtgtcgggatccggctccggctccggctccttcaacctccggaacctgtccaaggtcatcctcccgccgctcggcgggccgtccggcggccaaagccagtcgcatggcgggtcggacaagtgggtcgtctcgccgcttgacttcagatacaggtggtgggatacgttcattgggtggtcctggtggc

SEQ ID NO: 280921 - DNA, 394 bp, Zea mays
ttctttttttttttttggcatcaaagataggtctggtacattattgatttcttattacacagttcagggcctttgaaatgtatcacacttcggaaatgccacagaattgttcttttccagagaaataatgactccggtttattgaagattgcagcgcctgtttggtttctccttatgacaaagtgattgattacaaacttatttcgggcctaaacaaagaaagtaaatgaacaggcggcatatcccaacttgctctaagaccttgagtaagcattcttcatcaggatggatctgaggtttcttgtcttagccgcgacacgttcccggtcaaacagagcagagaccacagccacacctttcagatttgggagcccaagcttcatcaccgagcctg

SEQ ID NO: 280922 - DNA, 419 bp, Zea mays
gcttgttttgtttttgtttttttttttgtttttttaatggaaaaaaagttagtacttgcatcaaatagagttctgatacactattaatttcttattacaattcagcgcctttaaaatgtcttaaacttacttattctggggaaacgtcgcaaaattattcttttccagggaaatgtcccccgaattattgaacattgcagggaatttttatcccccttttgacaaagtgaagctgaaaacttgattagaaacttattttggcctaaccgaaaaaaattaaatgagcaggtgccaagtcccaacttgctctaagatctggagtgagcaatctccaggatggatctgaggtttcttgtctccgtcgcgacacattcccggtcaaacaaagcagagaccacagccacacctttcagatttgg

SEQ ID NO: 280923 - DNA, 874 bp, Zea mays
gtggaccccatactgaaaattgggcttctgaacatctccgagatccgatttagagtgtcaatggcaatgtccccaagccaaaggccaaggggagtatttgggttctggtcgtcgttgatgactgcattgggaaacatggagcatatgccggtccgtatagctcaaagataccgggaggaattgtgcatgcggcaaagtgcacttatgaactctgctatatctaacattcaaaaggatcttcttagccaacctcttcagctactttccggtgttgatattcttggtaatgcgagtagcgctctgagtaacatgagcaaggggatagctgcattgtctatggacaagaaattcattcagggccggatgagacaggatagcaaaggtgtggaagactttggggatgtcataagagatggaggtggtgctcttgcaaaaggcatcttcagaggtgtcacaggcatattgacaaagcccatcgagggtgcaaaatcttctggtgttgaaggttttgtgcaaggagttggaaagggtataattggcgcagctgcacaaccagttagcggagttcttgatcttttatcaaaaactactgaaggtgccaatgcggtaaaaatgaaaatatcatcagcgataatggctgaggagcagttgctgcgtaggcgtcttcctcgagctattggtgggaatagtttgctctatccttatgacggacacaaagctactggccaggctatcttgcatctagctgaatgtgctacattccttggtcaaattgatatttttaaaatccgaggaaagtttgcttataccgatgcttatgaggatcatttttttcttgctaaggggaagaattttttattcactcacagaagag

SEQ ID NO: 280924 - DNA, 541 bp, Zea mays
ctttgctagggcggacgcgtgggcggacgcgtgggcaatttttgggagaacaattaccatcacttatttagttgcggtgagacggatgatggatttgagctgaatgcggccacttcttcacacgtatttcctagatctactccggaaggcaatgttactcagatatcactagtacggaacgtctgtcctgatcaaatcattgactcatattgtgtgcccgaatttcatcaatcattatcaactctatgtgatgaagagcataaatgtacgtctggtgacaattctcatagaaccctggaaagtgaggatgctggatggtataacaatgttcccttaacaatagttgagaattatgttttgaaaaagaaaaacgagcaagtacttcaacacaaagtgtcttctgtttgcagtttgaatcctgatgaatattgtaatctgaaaggaaaggttcatattcatgatatagatgtaaagtggcggatgtatgctggagatgactggttattacctcagaagatttgactagttaacatgcacagat

SEQ ID NO: 280925 - DNA, 466 bp, Zea mays
ggcaaaatatggctgctgatgaatcagacacgtttgagagcagtttggagattttggcggattctgggaattatcagtcggatggactgcttgatgatattattgagaatgctttttacacagaggactgcatggacaaccatttttgggagagaaattgccatcacctatttaataacagtgaaatggctgatggatttgagctgaatgcagccacttctttcacacgaatttcttagatctattccggaaggcaatgttactcagatattcactagaacggaatgcctggcctgatcaaatcgactcatattatatgcccgactttcatcaatcattattaacttctatgtgatgaagagcataaatgttcgtttggtgacaattcttatagaaccctggaatgtgaagatgttggatggtataaaaatgttctcttaacaatatttgagatttatgttttgaa

SEQ ID NO: 280926 - DNA, 851 bp, Zea mays
ggaagtggggttcgttccgtccctgcctccctggtggtggggatggggtggtccgcggggcagtggtggctcgtggccgcgctgtgggtggtggcggcggcggcggcggcggcggagggtgaagtcgtggtcgggtcagcgccgaggcggcaccgtacggtcgatgatgtacatgggcacgccacgggactacgagttctacgtggccacgcgcgtcatgatgctgtccctgcgccggctcagccccgacgccgaccgcgtcgtcatcgcctccctcgacgtcccgccgctctgggtccaggcgctgaaagatgacggggtaaaggtggtctttgtgaagaatttgaaaaatccttacgagaaacaagaaaatttcaacagacgattcaaattgactttaaacaagctgtatgcatggagcttggcttcatatgagcgagttgttatgcttgactctgacaacattttcctccaaaatactgatgagttatttcagtgtggtcagttctgtgctgtcttcatcaatccctgtatcttccatacaggtctctttgtgcttcagccctcaatggacgtttttaagaatatgctacatgagctatcggttggacgtgaaaacccagatggtgcagaccaaggctttcttgctagttatttcccggacttgcttgatcagccaatgttccatccaccagctaatggtacaaaactttggggtacttatcgcctccccctaggctaccagatggatgcatcctactattatctgaagcttcgctggagtattccatgtggaccgaacagtgtgattacattcccaagcgctccatggtttaagccatggtactggt

SEQ ID NO: 280927 - DNA, 651 bp, Zea mays
ggttatagggttaaggggagcaggcaccgtcgtctccgctcagctgcgacatcgttgacgtcggctacagcgaccatggtggcagccattcctctgtgtccgcacctcccccgtttgctttgtcgtcgtctctccgattgccataggtacgaacaatctttttcaccgtaacttcacagatctgcgtcccctcagtgttagggttgtcttccagcctgccgcaatgtgcgctcccataccattactacacatcgagtagcaatcgccttcctcgcatttttccatcgctcgctccccctgtaatgtagagtttgcttaggtattgcccaacccgcaggacggacaggccacaccatcatactatgaatcttctcctcgccaaaaaagctaagtcacatcagagcagatagcagccacatatacgttgtggatcggtcgcctgctccatgtcctcccccttgcttttacggaattgaggataagttcttggttttgctgcgcaggagtattactacagtctaagccaggaatgcaggtcctgatgaatctgtggaacctgtggttcctattttagtgtggggtagcagagtctcgattactgggttccaagctaaattacctgtgtcgaagcttgattactgtgttcgatgc

SEQ ID NO: 280928 - DNA, 562 bp, Zea mays
  unsure (1)..(562): unsure at all n locations
ccatttcacacgccaagtcccagtacaaagcctacggaatttcccccacctccaattcgagttgtccgcttccagtcagtcgccgccgccgccgtcgccgctgaaaccgaaacttgcaaaaccagctcgccgggggtccggccgatttcccccaaattccgctgctgctgttgctgataggaggccgcggcgaccaccatgggcaactgctgcgccacgccgtccacgacggaggagagcggcaagagccgccagaagaagccgaagcagaaggcgaacccctacaacgtggcgtacaaccgcggggcggcgccggcgccggcgcgcccgggcctggtggtgctgcgggacccgacggggcgggacctcggcgcgcagtacgagctgggcggcgagctgggccgcggcgagttcggcgtcacgtacctgtgcacggagtccgccacgggggcgcgctacgcgtgcaagtccatctacaagcgcaagctgcccacgcccgtggacgtggaggacgtgcgcacggaggtggacatgatgcgccacatgccgncggaccccaaca

SEQ ID NO: 280929 - DNA, 214 bp, Zea mays
tcgctcttacgacccgtgtaagatgttaaagatacgatgcgccccagactgtatggcctcggcctcggtttttctggaatgaattgatcagtgttcactgtgtgcgttatttctatttgcattggcttcaattggagcaatgaactagatttacaggccggacaaagaacatcgacctgaacagcctgcctgtggattatactctttcttggtg

SEQ ID NO: 280930 - DNA, 514 bp, Zea mays
gattggtggtatgtagaagttacattacctgaaaggcattggtgttggattgggtttttgctgatgggccacctgggaatgcaaggaattatgataacaatggaaggcaggatttccatgccatcgttccgaataacatatcggatgatatcctttgggtggaagaagaacataggatctttacaaggcttcaacaagagagaagagaaagggagggcgccgaaagaataaaggctgagagatctgcaaaaatgaaggctgagatgaaggaaaagactatgagagcgtttctgctttcacaaaaacatattgtgtatactgagccgctcgaagtacatgcaggaaccactgtggacattctttataacccttctaacacagtgctgaatggaaagacggaggattgggtcaaaggattctttaaccggtggactcatccaagtggtcccttaccaccacagaagatggtaaaggcttgaaaaggttcacacttaccaacaacagggttcccttg

SEQ ID NO: 280931 - DNA, 572 bp, Zea mays
aagcgcgtcgccggcatcactgtcactggcgccgtatagtgcatgacacgacacgattccagttgccacaggccacgcccaagctcgtttgtatatatacgcgcgcgcacatcaaactgccgtggcgagcgatcgaccccattccgtgccgtcccgagtctcttctcttgacacgacctgcagccctgtgccggcgcagctgcagctgcccgctcgctccagctccccgcacatcacccaggccaccaggcgctccggacagcgcccgccgtgccgccgcggcgcggcaagagcgccaagaagcacgcgacggcggcggcggcgcggcactcgccgtcgccgtcgtcgtcgcgccgctcctcgaccaccgtggtcgcgaccgacgtggccaacttccgggccatggtgcaggagctcaccggcttgccgcccgccgccatcttccgcccgctgccgcgcagggtgcacgcggccagccccttcgtcgccgtcgccgcggggcagggatgtggacacggaggttcggaggccacgaacaagtacactgtcggcgccggcagcggcagcggcag

SEQ ID NO: 280932 - DNA, 502 bp, Zea mays
gacagaactaacgagttaaaggatcaaatgaaggcaggattactgctcaatccatacgagaatctgtatatcaagttgacaaattcgcaaggttcaacgattctcccgccaacaatcgttgagacctccatcgtcctcgaagttggaaaccaccagccatctgtaccaaggatgaaacagttggcgcggacgatcaccaattcatcttcatcctcaggaaacctgggcctgaatcacactgtatttggcagggtgaagcagattagcctttcatcctatcttaggcattccttacacagtggacgtggttctgatgcaccgagtcctgcacccatgcaccatcatggtcaccacagccaccaccaccgtcaccaccaccacagtcacgatgacaacaggcattctgcagctcccgctcctgctccagtacattttcctgcgccacagcccaaataccgtgctccacctccatccggtgggtgtccgtacagcaaaaacaagc

SEQ ID NO: 280933 - DNA, 630 bp, Zea mays
tcgttcacgcgtccgggtgtcgccagccagccgcctcccgcatcgcctccaaggctctccaaccggggcgcctgcctaaccggccgatttccttccttgcgtactccattccactgcacaaacagcgcgccactttcccaattcccgtcgcgtggcctccttccgatcctggccactttgtgcgtcctgtagcgagggggtgatcggtgatggactgggggaacaggaccaaggccgccgccgccgctgcggcgccggacgagagggccgggggaggggaagggctcggaggatacgtcaaggtcatgaccgacgaacagatggaggtgctccgcaagcagatctccatctacgccaccatctgcgagcagcttgtcgagatgcatcgcgtcctcaccgagcaccaggacaccattgcaggattgaggtttagcaatctgtactgtgaccctctaatcatccccggcggccacaagatcacggcaaggcagcggtggcaaccaacaccgatgcagctgcagatcctggagagcatcttcgaccaaggcaatggaacaccgagcaagcagaggataaaggagataacggcagagctctcgcaccatggccaaatctcggagacaaatgtgt

SEQ ID NO: 280934 - DNA, 427 bp, Zea mays
ttcctcgcgtccgcccacgcgtcccccccccccggccgtgctgctgcagatcttggagaacatctttgaccaaggcaatggaacaccgagcaagcagaggataaaggagataacggcagagctctcgcaccatggccaaatctcggagacaaatgtgtacaactggttccagaacagacgggcacggtcaaagcggaagcaggccgcttctttaccgaacaatgctgaatctgaagctgaggtggacgaggagtctctcaccgataagaagccaaagtcagatcggtcgctccaggacaacaaggctatgggcgctcacaacgctgacaggatatctgggatgcatcacttcgacactgatcatgaccaaatcggcggcatgatgtatggatgcaatgacaacggcttgagatcgactggcagttct

SEQ ID NO: 280935 - DNA, 441 bp, Zea mays
gttgactctgaactcgcattgcaagccccttcctgacgaaaatggcagcacttgttcctctgctgctcgcccacctactcctctgcgtccatggcgccaccgttacctcggtcgccacgcctccgcctctcccggtcctgcccgtcccgtcctacgcgcagctccggtggcagctctccgagatggcgctcttccttcacttcgggcccaataccttcacggactccgagtggggcaccggccacgctgacccctccgtgttcgctccctccgcactcgacgcgggccagtgggcgcgcatcgcggcgcagggcgggttcggccgcgtcgtgctcacggccaagcaccacgatgggttctgcctggggccgtcggcactgaccgagtactcggtggccgcttcgccgtggcagggcggggctggggaccgtgtcgcaaagc

SEQ ID NO: 280936 - DNA, 531 bp, Zea mays
tttatgataatacagagacatttccgaccatcaaagctgatgttgaagccgatgaggtgggtaaatctgaagtttctgctgcagttggcaattcagacatcaatagcaatgttgatactgggcaaacatctgataagagtgaccgacatctagacacagttgagaggctcaagagacgaagtgagcgtttcaaacttcccatgcctggcgagaaggatacgcctcaaagcaaaaaggtggataccgaaatgcagcctccccaaaatgaatctactgctgctgatacggaagtgaggcctgagcggccagctcggaagcggagatggactgggagttagttgaactagcacaacgtttccacttttcagcagatttcatggcagatgcttgcgctttgcccacgtttttcctcgtacagctgaaagttgaattgatgtatggttttactgtctggcatacacatgtacgtgtaaacttagttttttttttgtggctgggaactggatactgtactaaaaccccatccatttt

SEQ ID NO: 280937 - DNA, 484 bp, Zea mays
  unsure (1)..(484): unsure at all n locations
ttcttttgctggcaactcggacatcaatagcaatgttgatactgggcagacatctgataagatgactgaagaatgtgagcgtgaccgacatctagacacagttgagaggctcaagagacgaagtgagcgtttcaaacttcccatgcccggcgagaaggatgcacctcaaagcaaaaaggtagataccgaagtgcagcctccccaaaatgaatcgtcagctgttgatatggaagtgaagcctgagcggccagctcgcaagaggagatggactgggagttagttgaactggaacatttccacttcatcaagaaatttcagcagattccatggcagttgcttgcacttcggcatgtttcttccttacagttgaaagatgagttgatgtatggttatactgtttaacttgtaccaacaaagtgtaaacttagttgctttgtggttggaactggatactgtactaaaatcacatncatttcccaccatg

SEQ ID NO: 280938 - DNA, 365 bp, Zea mays
ctcattctttcgatgtgatgcaaaggttgcttatgacttccacaccactagggaggaaaaaccagataaagtttgcagtcagtttgtcaacaagcttatatatgctagagagggtgcaaaggatatgatggataggtcatgttctgatttaccgtggcatgttagcctcgaggttgatgggaaaaacattgaaattccggaggatgcagaaggtgtgattgtaatgaatatccctagctacatgggtggtgtggatctgcggcataacgacaatgaccataatgatgatttcagattgcaatcaatccatgacaaaatacttgaggtggtttgtatatcacggacatggcatctaggcaaactgc

SEQ ID NO: 280939 - DNA, 501 bp, Zea mays
tcccacgcgtccgcccacgcgtccgcccacgcgtccggttcgcgctcatggcccccactgctgtggatcccggtcccagcgaccaccttctagcgccggcgccggctgccatggctggaggaggggatggcggtgatggacagatggaggtggtgttcaatgtgagcagcagcgacaccgactccgatgacctcggcgccggtggtggaaagaggtcgcggcccgtggcggggcaaggtggtggcagggatcgagaggacaagaaggccagaatcttggccgctgccgccacggtcccagccggattcctagagccgctttcgccggtgaggttactccccccgccggcgccgggaaggagcgtgacgaagcagctctggaaggccggagactacgtcggcaagccggatcacctgctcgccgtagtggcggatcaacattctggttgtgcatggagcgacatatgtgaacattgacatgatagaaagtaagaaggatggg

SEQ ID NO: 280940 - DNA, 513 bp, Zea mays
tttccgcacccactcttccaccgcacgcacgggcgagtgcgcagatcgctggcggatccaatgctgtgccctggtagctgctagcctgctgcgccgcgcggctgctggtttggtgcccttcggctgcggcgccgggtcactttcgatgtgactatctgaggaggaaaggatggcggcttcggcggcggcggcgcctgggtcggctgagaggcaggcgcccggcggcgcggcgtcggcgatcggcaacgcggtatttaagagtggccctctcttcatatcatccaaaggaattggatggaaatcatggaaaaaacgttggttcatcctcacacgaacgtcactggttttcttcgagagcgatcctcaggacattacctcagagaagcggtggaagtgaaccttacattgggggggatcgaccttaataatatctgggatggctagtgtgcagggaagacaaaaggctggtgaccggagcttttagcagactgacagcatggtcgggcctatacc

SEQ ID NO: 280941 - DNA, 507 bp, Zea mays
aaacaagggccaacgttgtttgctttgcattttctttttactttgatattatgtgatttggtttattcatattactgtccatagcatatttgttgtggacacagtcataaattcattttctcgacactgctcaggcaagggggaaatgttgtcatatatatgtttcgtcactgtgacaatcatttgggagagaaacaagtaaacaacccttttttccataaaactccatctggagatgcacgacagccactacagctgactaacgatgtaaccaagatgatgcaaaagcatcagctggaaaccccacagttccatcagacccgattttccgttttactgaatgtaccgaggagcacagagaagtgtgtgacataactaatacatgccttccttattcctctgcttctccctttccctttcttaacagtttttttcacgttgttgctggaatccatctaagagatgtctcctttttaattcctcattcttggctgcctgctatgttgg

SEQ ID NO: 280942 - DNA, 581 bp, Zea mays
gtccgggccatttcagccaaagcggtgggccgcgcttccttcctcagtcctcactactcactcgtccccttccagttccgcttccgatctgcgcttcgatctccctcttcgcagaggtgcttgtgagcatgtatctgctaggcaacaaaagtggaaagaagaaagtgtatgtcgattatatgaatgtccctctaccgtatgccatcgaagagaattacggtgggcgcttctttgacgacgacgacgatcttgcccaagttcttcaagatcaggaaatattgtatcatttaattcaaggaagtaatggtggtggttcatctagaactcattcgattccaagttctagctatggccatgatcggacatcaaatgcacaaaaattgtcaggagatgtaaactgtgagtgtgagttgcaactagcagttgatgaagctttagctagagagttgcatgaaatggagagcaaactagccaacacttcacttaatgacaataatggaagaaagacaacatcatcttcagcatttgatagaggcaataattctgcaagtagacctcctcagtattggcagaggatgtga

SEQ ID NO: 280943 - DNA, 508 bp, Zea mays
  unsure (1)..(508): unsure at all n locations
tcctagcccataaaaggaagncagagaatgaaggaggagcgcctgctcctgatgctaacaccctggatggtggctttctcagtaagctaggccttaaaacagccggcgaaggggcacttcaagacaatccaacagaaagtggagacgatggagaaggggcacttcatggcaatccaacagaaagtggagacgatggagagggggcacttcaaggcaatccaacggaaagaaatggaggcaatgtgcagcagggatatctgtgatgaccacaaaaaattatgtccacaatttgctcatcacattcaagtcataagctaccgtttgtcagtttatatatcaatataatgagcacgattagtgatttccgcaatgccaaaaattagcttgcttctggctcagcattgtgttactgcagtggatgcatacaaacataattttgatgtgtaaccattgcaaccccttttccatttgttcaagttcagaatcaaacaactgtctgtttgctacc

SEQ ID NO: 280944 - DNA, 608 bp, Zea mays
tgttcattcggtcaactggaatggaactagaagcagttgattcgaggaatgcagcttcaacatatattatcctgaacgaggagggcaggccggtggcagctgcagttcttccctatggagtcccttgttaatgttttatcttctataccagttgggcaggcgttctctctttataatcgataaccaactgagctttgtttcgttcgtgctgtttcttggaagttctatatctgtcatgcatgtccaaagtagagttgtctatcttcctgcttttctacttcctctagcaagcccagatgcacagactgttggtatgttttggttgccgagggtacaatcatacatacaggcgaaacacttgccactctgctacgaactgggacgtgcgcccgcctggcgactggcgaggaccacggagtcacggacccggctgttttgccttctgttgatcgtcctaatttcagggctcaggcaggcagacgcgatgggatcctacgtggtaggagtactcgccagttcagatctcgcgggttaatatttactgtcacgtcatgttgtatcactatcgaccatatactataaattatgtaattgatttttgtcagtgt

SEQ ID NO: 280945 - DNA, 481 bp, Zea mays
cgtacgcccacgcgtgcgatctttgagatggccgtggacgaggctgacaaaagggagaagtatgtgaagccactcttcgagctcactgagcaaagagaaggcatcaaggacctgcagatggagactgctgtggttggaaattccacaagatactatgtgatggccgtcactccgacacgactttactcttttactggcattggttcactagaaactggttttgctagttattctgatcgggccatacactttatggagctcccaggagagatacctaatagtgaactacatttctttatcaaacaaagaagggctaaacactttggatggctttctggatctggaatctatcatggtgaactgtattctggagcacaacacagctctaccagtggagatgagaactttgcggagaacaagggtttttttgactattcaaaattgggggattccggaattaaaccaaggtcatttgcattgt

SEQ ID NO: 280946 - DNA, 538 bp, Zea mays
cttcaacgttggtggcgcgggtgatgttaggtctgtgaagatcaaaggaacggagctaggatggctccctatgggccgcaactggggccaggtgtggcacatcaactgtgacatgaggggacagcctctatcgtttgagctcagctcaagcgatagcaagacgctgaccagtttcaacgtcgtgcccaaggattgggagttcggcaagacatacacggggaagcagtttcttctgtagagaatggagtgccgcaagatcagcttacagttcctcatttttcttctgatcccacgagttgggctgtggggtatgtatattccccggcagaagaaccaatatcgttattaggagaaaatcccttagtgcagggctcagatagttactatggctcataaccccttttcatgtacccttcatagttgtctaaagaggcttgatgtatcattcaaaataggaggccggattcgggtatgtccggtgtattccaatatattttttttcctggcaagcaatgataaaatgtctctccatttctgt

SEQ ID NO: 280947 - DNA, 519 bp, Zea mays
gtacttagttgggatggctccccatgggccgcagctggggcctggtgtggcacatcaactgtgacatgaggggacaacctctgtcgtttgagctcagctcgagcgatggcaaggcgctgaccagtttcaacgtcgtccctaaggattgggagtatggcaagacatacacggggaagcaatttcttctgtagagaatgagcgccacaagatcagcttacagtttctcattttttgttctgatcctacgagttgggctgtggtgtacattctctgcacttctgcagaacaagtaatatcattattaggagaaaattacttagtgcaaggcctcagatagttgctcttggtcataaatggttttccatgtccccttcatagttgtactaaagaggcttgatgtatcattcaaaatagaagcctccgttgtattacaatattttacctagcaagcaatgataatgtatttctgcatttctgtattagtaccaagggcagcatctagaaccctgatttccaacc

SEQ ID NO: 280948 - DNA, 703 bp, Zea mays
tgcttataactgtaggattagtgtttttccttatgtggcctttgttcagctcagatgatgtgtttgctccatctctcgctccgcttatcatcatcatcaacatcatgaaagtgacagtgattggacttggtttcgtgaaagctgaaggtgtggttaactccatgactaggcatggagaccgcagagaacttctcaagggcccgctgtattatgcctgtgctataactctgacaacaatagttttctggaggacatctcccatctcaatcgcggtgatctgcaatttgtgtgccggagacggtgttgctgacatagctgggagacgattcgggcatgttaagctccctcacaaccctgaaaaatcatatgccgggagcatcgcaatgttcttggcaggtttcatcgcatcagtactgttcatgtgctacttcaacattttcgggtttgttgagaagagctggagcatggttgctgcctttggtgtgatatccctggctgcagcagttgtggagtcactcccgatcagcacacgccttgacgacaatctgacggtttctgtcgcatcagtgctagttggcgcccttgttttctattccattggagccagaaacctgtgctgcatgagcagcgaagtcaggagaagtatcccagcaaccgttggaatggtgtttgcaggcagcagctgaaacatgtagccacagtc

SEQ ID NO: 280949 - DNA, 538 bp, Zea mays
ctcagggaagcactgtcgagagacgccaatcggctgtagccgaaccgtcgtcaaattctccccgtggcagcccgatcatggcgtcgccgccggcggatccgcacccgaagaaacgtagggtcgccgacgcccaggacccaagctcctcctccaatcctgcacccacgcggcgtccttcccctgctccgcctcctcccgaaaccctaggtgctgtggcgtcttcaacctcctccccacctccgacagaaaccgcatcgctgccgccggagggggtgaggcttcaaaagcttcgcaaccaagaggagttgagaaatgtcttccagcgctacagccgtatccgcaagtacatacaggagcataaagacggcggcctcacgcccgagctggagcaggactatctctacctcatctccgcctcccgaggttgtgaaagtgtacagtgttttctatctttgccaatccctcgatttgcctcacgctgtcctactgcactcgaggcggcgactaagttaccatcaacatgtacaattgcaacatg

SEQ ID NO: 280950 - DNA, 1043 bp, Zea mays
gagttgcccattttcctggaggcggcgacggcagcggcccagcccacctctgccgctgtgctttgcgtgggccgtgcaactcgcctgagacggaagcgacgtctgcgagaaccgcgctgccgttgccgtcgaggcgatatggccctaccctcgtcgacggagacacggagtccgcatccgcctccgcctccggggcgctcgtcgtggtcggcgccgcgtgatcccacgggggtctagaatccgggcctcgtcttcatcacccgccacccaccggcgtccgcaagatgcgcgagatggcaccgccgccacaagcctcttatccggattggattggttccggctgttgcttgctccaagaagaacactggacatggacttcttcacggaatatgggggggcgagtcagtatcaaatccaagaggtcattggtaaggggagttatggagtagctgctgctgcaattgatagtcacaactggggagcgggttgcgatccagaagataaatgatatttttggtaatgtctcggatgctgctcgcattttgcgggaaatcaagcttcttcgtctgcttcgtcacccaaacatagtccagattaagcacattatgttgccccctacccgaagggagttcaaagatatctatgttgtttttgagctcatggagtctgacctgcatcaagtgatcaaagcaaatgataacctgactccagagcatcaccgctttttcctgtatcaacttattcgtgctctcaagtacatgcattcagcccatgtatttcatcgtgatttaaagcccaggaacatactggccaattcagacagcaaactaaagatctgcgactttggacttgcacgtgcatcatttaacgactctctttcagctatctattggacagattatgtcgcaacaaggtggtaccgggctcctgaattatgtggctcctttttctccagttacacccctgcaattgatatttggagtatagggtgcatttttgctgaagttctcaccggaacgccattgtttcctgggaggaatgtt

SEQ ID NO: 280951 - DNA, 310 bp, Zea mays
ggctcagctgtaatactacaaatttgagcaagttgcagagcagaactgaggttggttaactaggaacgcagccatggcaagcagtgccgtcatcgtccctgcctctccaagaaagttggagggaaaggtggccgtgatcactggcggggcgagcgggataggggagcgcacggcccggctgttcgtggagcacggcgcccacgtcgtggtggccgacatccaggacgaggccggcgcgcgcgtctgcgccgatctcggcgcgggtgccgccagctacgtccactgcgacgtcaccagcgaggacgacgtc

SEQ ID NO: 280952 - DNA, 504 bp, Zea mays
ttttcagggcagccagggctcctagaaaagagaaagtagacgaccaaaagaaactggagaaaaagagaggagctcaaaagcaaggcgaggcctcctccgcccctttgtctcccctcccaattcacacaggattctccactcgcccgcccagttgtttcttttagtgccgcccccattccgctctgatccgagcctttcgctcaaagcctccagcttttgcaattgtttggtcacttcgggaatcaaggaataagttctcgcgctgtgcgcgatagagagcctgatccatctttccccatcctcttcccgtggcatttcggtgtgcttgcgctctgtgcgtggccactgcaaggggaggatttttggcctggtttctgtcttcttggggttctaaaatttcgggcgagatcttagcctcaaggaggttccttgcttttctggtattggcgactcttggtgctccctacaagtccaagaaaagaatttggaggccatggtgggggt

SEQ ID NO: 280953 - DNA, 608 bp, Zea mays
cttggttctgtcgatgcagctcatcaattccattcccagctccggaaaatcgagaaatttcgattggttatttgatttgatttgattctggccgtgccgaaccctagcttccatctcggtccaatctcagttcaacatattgttactcctcggcagcagaggaggccgtcgtggaatgagttgaggatgacggcatactactcgtgctcctaggaaaggtcagggaaaggaagaattcgagccatggaggacgaggcggacggcggcggcgaatccttcgtgctgcgctccggcgtccgcgcgggcctcaagcgcgaattcgccttcgccatcgcctcgcaggccgtcctttcgtcctcatacgcacccctgggccgcacccgccgctcatcccgcatcctcaacccatcggccgcttcggccccctccgtcgccggcgccgccgtctcgacatcctcctcctcaacccccgacacaaagccaaaagccaagcgcccgcgcccaccagatcctccccctccccctcccttccccccttcaccagactatgcccctgcccccggagaagaccatgactgggcccctgtcggccccgtgctcgccttgat

SEQ ID NO: 280954 - DNA, 741 bp, Zea mays
tgccgcccggtccccggggctggccggtgctgggcaacctgccgcaggtcggcgccaagccgcaccacaccatgtgtgctatggcgcgggagtacggcccgctgttccggctccggttcggcagcgccgaggtggtggtggccgcgtcggcgcgggtggcggcccagttcctgcgcgcccacgacgccaacttcagcaaccgcccgcccaactccggggccgagcacgtggcgtacaactaccaggacctggtgttcgccccgtacggctcccggtggcgcgcgctacggaagctgtgcgcgctccacctcttctccgccaaggccctggacgacctgcgcggcgtcagagagggcgaggtagcgctcatggtgagggagctcgcccggcagggagagcgaggacgggccgccgtggcgctgggccaggtggccaacgtctgcgcgaccaacacgctggcccgggcgaccgtgggccggcgcgtgttcgccgtcgacggaggggagggcgccagggagttcaaggagatggtggtggagctgatgcagctcgccggggtcttcaacgtcggggacttcgtgccggcgctcgcgtggctcgacccgcagggcgtggtcggcaggatgaagcggctgcaccgcaggtacgacgacatgatgaacgggatcatcagggagaggaaggccgccgaggaaggcaaggacctgctcagcgtgctgctggccaggatgcgggagcagc

SEQ ID NO: 280955 - DNA, 515 bp, Zea mays
acgaattccacccggcagagcggctgcggaagctctccttcttcaactggtggatgttcaccgtgttcacgggcattctcttctccaccaccgtgctggtgtacctccaggacaacgtgagctggtcgtgggggtacggcgtgcccacgctggcgctcgcggcctcggtcgccgtcttcctcgccggcacgccgctgtaccggcacaagctaccgcagggcagcccggtcacgaaaatgggcagggtggtctgcgcggctcttcggaagtgccgcgtcgcggttcctggggacctgagcgagctgcacgagctggagcccgatcactacgccagcaggaagaggtttcgcgtgaacccgacgagctccatggggttcctgaacagggcagcggtgaaggtggcgggggaggaggaggtctccggcgggtggacgctgtgcacggtgactgaggtggaggagacggcgccggtcgcgagccgggggctgagcttcgcgagcaggagccacggcgcc

SEQ ID NO: 280956 - DNA, 526 bp, Zea mays
cttacgcgtgggcggacgcgtgggcggacgcgtggcccgtcgagcacttggcactgccaatggcggctgccgcccacaccccttcgatgcgcgcaagccgcctcctttcctcctgagatcgacgcacctcctcctctcgtactccattcccgctccaagttcgtttcttcggcaccgagccatcgcacggccgcccccgcatctcgtcctgctctcaggtccttggcctccgccgttcttcgacaggggcgcgccccggtgcccactccgcgaaatccgagtccctcgtgcagctccgtagggtggaagagatccatcaggcggtgagcggtaggaggcgcccgtacaactgagggggcgggcaatggcggccgtggcaggcccactctgcacgtggctcgtcgccgcgtgcttgtctgcggcttgcgacgcagaagagtacaagcataagcatttctgcccaggcggaagccgcgctgggggcggcgtcatggtcggccagcgccgccgcctcagcgcgcggcgt

SEQ ID NO: 280957 - DNA, 534 bp, Zea mays
  unsure (1)..(534): unsure at all n locations
cccacgcgtccgggacgcttcccctccacctccgcacacatctccaagtccaactaaccttgccagtctaccgcagtactgccgacttctagcagttgttttataggttagtttcgttgccttgtggctttgttagtgtatcaaaaccaattcgcgacatcactcaggaaggggaaagcaggggccggaaaaagaagaagagacgggaatggcaagctccgactcaaatcccaccgatgcattcgagtacatgctgcttgagaaggatcctgatctctaccggacggttttctctggtccgagccagacaagcccatggattaacccgagtgtgttaaagctgaagcaccggatagggagaggtccatttggggatgtatggatagcaactcaccaccaaaggacagaggatttcgatcagtaccatgaggttgcggtgaagatgctgcatncaattaaagaggaccagctgcagatcttctcagcgaggttccatgagatcttcagcaaatgtcagggtcttgggcaacgttg

SEQ ID NO: 280958 - DNA, 446 bp, Zea mays
cttcccgtattttctgctccccccttctcccccgtcgccggcgagagctcgggcggaggcgccacagcacccgcaggagagcgtttctccccgggaaaaagggggccctccggagcggagggctctttcttcctctattccccaagggctgctgccgctggattgggctgaaagatctcggttctatttccgaaagaaggatttctcgtcgcgaatccggatctgtcggtggtgggaagttgcctcttttatgtggcgaggctgtgagaaacccgcgtgcctcccatggacgtgctgagccctgattggcgcaccaggcgagaaaggggcagcaggcagtacgtggtgacagagcaggaagacgagggagaggagacagactgtcggtatagaagacatcaagacaagcaggctacaataggaaggacaaatgataaggagaggag

SEQ ID NO: 280959 - DNA, 382 bp, Zea mays
gccgagtctagagttggtttagctgataggtctgtccgtgccctggacttgatgtccgactccgtcagaaaccttgccttgtggtcccaagagataaaagcgacgacattcgaagaaggcgagaaagggccggaggcgataagggagatgtggctcaggctgctgcatgcactgaagaaactgagcctggatcagagggaggaggtgcgaaaccatgcgctggcttctctccagcgatgcctaacatccacgggagaactctgcctccagcccgcgacgaggtcccatgcctttgacctcatcatattcttcttgctcgacgatttgctggagatcattcagaaccactcccagaaggactacctaacatggaagggtcact

SEQ ID NO: 280960 - DNA, 577 bp, Zea mays
atgtttatactcaatccagggtatgattataggcaggttgagcttgtgttgcctccagaaggttctgaccgtgattatctatggcaaaattgcaggatggatattagcaggtgtagctcaaaacagcttgaagttcttcaaggtttcaggaaagcgctgcttgatgctataaatgaattcaagaagagaagggactggggtatgttcattgactcctgctttatacactgtcagtcaatgaaagctttggcttggcattcgccatcagctgctagagtgaacaacaagacggccgcagaagcggtgggagattggttctttgagcggagggaggtgaaggaaatagattgtgaatatccctgcaacccgacatgctacaatgtggttctcgatcagccctacaaggaagattaactgacttgcagtgttagttgtggtagatttaattcgtaattgactctccatgagttgatatttgtcgagctaaatgtgatcattagcagagttcggactgagacttgtacttgaggcctattaaaatacgaggagaacaatacttacaaagagaattctatcc

SEQ ID NO: 280961 - DNA, 735 bp, Zea mays
ctgagttcgtcgtggctacatgataccatcctaaaggaatccttggatagcaaggggagagtaatggtggaaaaggatttaagagtgaaaggttttaataacatttttgcgattggtgacatcacagatattcctgaaatcaaacaagggtacctcgcccagaagcacgcgctgctagtggcgaagaacctgaagctactgaccaagggtctgcctaacagcaaactggcgacttacagcaccggctacccgctggcgctcgtctctcttggaaggaaggaagggctggctcagtttccattgctgacgctcagcgggtgcttgccaggcatgatcaaatccggggatctattcgtcagcaagacgaggaagcagatgggcctgaatggttgactccagtccgaggaagcttgaaaaaatagctcgggtcctgggttatatacagacgatggattcctttacacacagcttgtgttttgctcgtatggccatatgtgttcgttctgtatctgtacgtgtgatggtgtcgtcgtgtggatgcttggaatggtgactagcagagtgtatgctacgtacatgtatacatggacctttttggtccaacaaaatgttgcttctgtagtatgtatgggcgcattttgtttgctggcaagtaaacaatgaaatcatctttgcttgctggcaacacgatgtcagcagtggcaatttgatgcctatgggccggcctatggatgg

SEQ ID NO: 280962 - DNA, 495 bp, Zea mays
ctggacagaaggagggggatcctgaacgaagattgatttttatttacccgctagcatttataagcaaaggaagtgtgaagactggcaatgcctctaaatggaactcatcgtttttctgccctgctgccatcaaagaggaagtagcgcttaatgagaaaccaccactcattagtagcaagtatgggtggttcagatttgcagcaagttgtactttgtcaactgcaggtgtttcagggtctcccagcgcagctctatcagtggtgagacgggacaagacttcacgagattctgattctataaggcagactcgttttactgagatattagctgctcagatatacaggattgcttttcttatcatgaagtttctctgtagtcaagcaaaagaagcagtaaaaagggcagaagaactggagtttcttgacctcgcccattttcctgagcttcccatgccagatattcttcatggtttacaggatcaagtggtttgtattg

SEQ ID NO: 280963 - DNA, 493 bp, Zea mays
  unsure (1)..(493): unsure at all n locations
gtcatattcctggaaggcctcgggtggatgaaggaccagcagttcaaccagctcttgcaggttttcctgctaatcaagcagctgggctgcaagtacaatcttcactcaagcctgactttatggctgcttttgcatttcttctgcctagcgtgcaatcggcaccgctggttagtggtcaggtgagtgccatagacagaacatcgcaggtgcaggatccatccatgctttcaaaagtgtgggatcctgaaaaccaaggtactgcttcaaattcatcctttgggcaaatggctgatgctcaccatccaggacagcagttttgtggccaagcttcagctgctcatttgacaaactatgggaacatggtgagtgctcaggagcgctcaatacaacatactgcttacaacctctgagttactttgaacttgccaccaccacctncacttncaacaataccacacagttctgctacattacagtctcaaggtggccacag

SEQ ID NO: 280964 - DNA, 552 bp, Zea mays
ttttcgcgtccggcgagtagctaacacagccgccgagtagcttcaagtcattcaccggtggaaggaaccgcccgggggggcagtgggtgcgcctccacgccagcgcgggagggggaggcgagggaggtgaaggtcgaggccaccatgttcgacggcgctgcggagcgtgtcccggacgacgcgcccctcttccgccgcgtcgagtcgctcgagcgcgggccccgcctccacctcagcctcatcgtcgaggtcgcccggggcgaccgcgtcctcggcttcgtctgctccgcctggcccgacgacctcgccgtccgccacgtgctcacgctcgcagctggcggcggcagcagtggtggtggtcgtcgtggtgggcgcgatttcgagaaactggggggcgaggagagggaagccgtgacgaagttcttgaaggagaggcattgaatcaattcttggctgtgtaatgctgctttagaaaaaaaaatgggtttcttaccagttccacatgatcgtgaaataataatttaactgtctactacatggtgaaccacaatc

SEQ ID NO: 280965 - DNA, 768 bp, Zea mays
  unsure (1)..(768): unsure at all n locations
ttgtgtcgctcctcaggttccccggcggggaggcgctgtcggtggccgccatcctcgaggcgcccggggaggtcgtcgccaagtccgcgcacagcacgctgtaccgcgccgccgtgcgctccggggaggccgccgtgctgctgaggttcgtgcgccccgcgtgcgccgacgaggccttcgccgccgccgcgcggcggatcggcgccgtccgccaccccaacctcgtgccgctccgcgcggtgtacgtcggccccaggggcgagaagctgctcgtctaccccttctacgccgccggctcgctccaacgcttcttgcaagaggggatcgcggagtcgcagagatggagcatagtgtgcaagctctccgtcggcatcgccagggggctagaccacctgcacacgggcctggacaagccgatggtccacggcaacctcaagacgagcaacgtgctcctggacgccagctacgacgagtgcagggtgtcggactacgggctgcacctgctgctgagccccgccgcggcgcaggaggcgctggaggccgccgcggcgcaggggtacggggcgcccgagctggccaaggcgcgggacgccacgcgggagagcgacgtgtacagcctcggggtggtcctgctggagctgctggcaaccgcgcccgcgggcggcgacggcgtcagcgacagaatactactccttcctgacttctnctcctactgcttcaagaacctggtcctcgagcgcatgatctccgacgcgttcggctcgtctg

SEQ ID NO: 280966 - DNA, 406 bp, Zea mays
tttgttaaggcgctctacttactgttcgtcaagtcggagaccacgacgcccggcggcctcgcggcgcggcccgtcctcacgagctactacaagagcgaccacttcaggaaccgcccgttcgacccgtaccacgactacacgagccccacggcggccatcctctgcgccgacgcgttccagagcatgtacgcgcagatggtgtgcgggctgtgccagcgccacgacgtgctccgcagtgggcgccgtcttcgcgtcgggcctgctgcgcgccatccgcttcctgcagctgcactgggagcagctcgccgacgacatcgagtccgggtcgctgaccccgcgcgtggtcgacccgtccgttcgggacgccgtcgcgcgcgtgctccgcggagacccggagctggcgcgc

SEQ ID NO: 280967 - DNA, 395 bp, Zea mays
  unsure (1)..(395): unsure at all n locations
gtnttctccaagttggaaatggcacatattgagtgctcaagtaaatattactagtcaaattacaaagaaactgaattgttcgaatgccatgtttacagccacatagacatcttcaccgaacacagcaatagaatagtagatacaataccagcatgtcgtagcctacctagaaaccttcatgtggaaatccaactgccttacctagagttgagatcaaactccccagatctgcgccagtcctcctgcccatctgagttcccattctcaggttcgttctcatcgttgaggaaatcctccgatggatcttcatcatccctctgagaatttccccacccatcttcgccatgttcttgcaccatgtcatgactcggaccatccttcccttgcgaagcaac

SEQ ID NO: 280968 - DNA, 531 bp, Zea mays
cccacgcgtccgcggacgcgtgggatccaacctacaagacctacaaggccaagcgacatcccaatccgagcgtttcatctcgccctctgctctgccccctcacaccttctcgccaggctcagtggtgacatcagctgaggtccggtagtttgcctctgcagccatgcctcaaatccagaacaccatgcggcaaaactgcacactcctagctgttctttgtggggagtttgctgagaagcggcagacaccagcttccctggcgccagacacaaagcggctgcggctgtcataccctttccctgagctcgcttcgtctgggagactggaggtgcacacgctaatcaatcccactttggagcaatttagagaggcacagcaggcggtgcatcctgtcttcttgtatcttcaggggcagcagcaagagaatgaggaggagattggcacgcttgtctggggtgatacagatttatctgacccgcagatgtttgtctcactcatcaccccaccatttccgaccatggtttatttaga

SEQ ID NO: 280969 - DNA, 493 bp, Zea mays
cccacgcgtccgacaagacccccgcaccggccaccgcccaccgccgcgagaagaaccgaccgacaaccgagcatgaaggccgggcctccgcacgtggccatgctggccacgccggggatgggccacctgatcccgctggcggagctggccaagcgcctggcggcgcggcgcggggccacggccacgctcatcaccttcgcgtccgccgcgtcggccacgcagcgcgcgttcctggcgtctctcccgccctccgtcgccgcgcgcgcgctcccgcccgtcgacctctccgacctgccccgcgacgccgccatcgagacgctgatgaccgcggagtgcgcgcgctcgctccccgcgatcgcggccgtgctcgcggagctcggcgagaccgcccgcctcgtcgcgttcgtcgtcgaccagttcgggatggaggccttcaacgccgacggcgtcagggcggcgcggtgcctcttcatgcccatgaaccttcacgcgc

SEQ ID NO: 280970 - DNA, 782 bp, Zea mays
tttagcttttaggcacacttctgtgtttcctcctgaacctcatccactggcatacggaaggaattctcagaggctaccgaaattcgcaacaacttgcataagatctttagaagttatgattcagctagagggatctggtaactggcctttggatcccgtggccatggagaagacaaagactgcatttcttttaaaaattggtgaaagcttggaggatcgaggaatgtttgtttcagccagtgaaaatgaggtgaatgtccttacatctggatattcattcttactcaaaatatttcatgaaagaggtttagtgatgcaaaagccagttggagatgacaagacacaaagtgttctatcagaagataagatgctttttcagcggagccagcactctagtatgatcaatggtttgcatggtcgttaccaggtgtatggaccagtagttaggctagcaaaaagatggatttctgcacatctattttcttcatttatctcagaggaggcagttgagctggtagttgcacatatatttttgaagccattcccattccatgccccatcttctcgggttgctgggtttctcaggtttttgcggttgttatccagttttgactggatcttttcacccatggttattgacataaataatgacttcaacctgatggatgagaaggagatcaatgataactttatgctgagcagaaaatcttatgagcgaaacccccatgatatagagcctgcaatgtttcttgctacgtcatatgataaaacatctgaagcat

SEQ ID NO: 280971 - DNA, 526 bp, Zea mays
tgttcgcgtgggcggacgcgtgggacagccagccatggacctggtcctggttgccagccctaacggaccacatctgaggctcttgaagcaggcaatggcgcttgctgtcttctccatgagggcaattgaccggttagccatcgtcacgaatgccaccactgcaacccgtgctttccccttgcgccggatgacgtcccatgcaaaaagaatggcgctgcaggttatcgaacacctttgctgtgttggtgggactgatccagtaggggctctgcacaagggcctcaagatattggaggaccgggcgcatcggaacccgagcaactgcatccttcacttgtctgatcatccagtccgcaactgtgttggtgggtgtggacatgaaccactccagcatcccagtccaccagttccatgtcgggctcgggttcggtgtgcggagtggatttatcatgcatgagtttgaggagcttctcgcgcggttgcttggcggcgtgataggcgacacccagctgaggataggggagca

SEQ ID NO: 280972 - DNA, 468 bp, Zea mays
cgcacacatggcgacacccaagtgcgcgctgagggcgatggccgtgccggggctcacgctgtaccacctaaagaggcacctgcagaagtaccggctggtggcggcgagccgaggcgtcgcttccccgctgggcgacagcggagatggcacctacgagcgttcgtcctcgttctctgagaaccagccggctgacgagagcgacgactgtactcgcgccgagccgcatggagatttcttccaggagcgtggcgtgtatgcagaggacgctgatgagcagatcgaggtgcagtggaacctacagttgaggatcgaggctcaggggaggtacctgcagttcgtgctgagcctggtgcatgaggtcctcgtcgtccacggtctgtgctcggcagccggcgcggaggcttgtgctggcctcctcggtggacaccggttccttgttcttctcctgctggtgttccccgactcgcc

SEQ ID NO: 280973 - DNA, 621 bp, Zea mays
ccatgcgtccggatcgatcccaacggcaacaggtaggggacggagtcggagaccgtaccgacgacgtcggctttcccgttccttgccattggctgcagaggcgacacccaagtccgtgctgagggcgatggccgtgccggggctcacgctgtaccacctcaagaggcacctgcaggtccgtccggccaccgccgaattatttctctcttggttggttgatgacgatcgcgcgctcaactctgccttgcctcctccttcctgatccatcgaccgtgtgcatgcggtgcacgcgcaccacactgccgctgcagaagtaccggctggtggcggtgagccgaggcgtcgcttccccgctgggcgacagcggagatggcaccgacgagcgttcgtcctcgtcctcggagaaccagcccgcggacgagtgcgacgacggtaccgtcgccgagccgcatggcgattcttccaggagcgtggcgcggatgcagaggaagctgcaggagcagatcgaggtaaacgaaacgatagagtccggtcggtcgatcaccattgtcccgaccttgtggttgtggcagtgaaatccattaggtttcaggctttcagccgattgtgtgccgccggttc

SEQ ID NO: 280974 - DNA, 655 bp, Zea mays
  unsure (1)..(655): unsure at all n locations
tgtgtagtgtactgtaaaaccttgtttatctgccatgccatgttttacaaagtggttagcnnnncttatatgagttatcctctctgtgcaggcatacttgtatgagtctactaagcaggtctatgatgggaacagtctcacgtataaagcgtcttgggagcggccaacaaatgaatgaagatctataaccttggtgtgcggtcaaccgaacgatacaagttgatttgttaatgtagttgatgctgttgaatgggcagcccaattttgtttggcagccaaccccatcctttagagaagaacaaaccacacctcaccaggagatggctgattgtttcattgtcttggtcacaaggcacaaaatttttgatgggataggttttgcttggctaacctatctgcagtacaacatctctttttaatccctaactagatgaaggcacatttcggtcataggcctcaagaatgacgatccatgcaacaaaacctcacgccgatttggctgaatacttgccaatgggtgaaaacatctaggtatgcttatccagctacccctgctgcagggagacaatggaaaggagcttccagacttcaaaaaatccctgtaatatttcctatgatactgacccatcattccatcaatatcatgcacctagga

SEQ ID NO: 280975 - DNA, 733 bp, Zea mays
cggacgcgtgggtgccaaattcccacgcccctgcccaccctgcccgaatcctctcgccctttacccccgcccgcgaccccattcacactctcgctgctccactccgctccgctcagctcgtcgggacgcgcccccgcctcccatcccatgcccgcccccgcgctcgtcggaggccgctcgcggcggcctcccatcccgccgcgctgacgagagggcctctcggtgggggcgcttcgggtgttcattttgtccgttcggggaaggggagtgcggcgatggggaagcagcaggaggggaagcggcggcgcggggagaaggacgggaagcggaaggggaggggggaagacagctgcagcggcggtgccggaggacgcggcgccagtggccgggtgctggatccgcttcccgcgccttcgcggctgcatgccgtcgcgcgccaaggtcgactcctccaccagcgcgcgtggcggcggccgggaaaccaaaccatctactgatgatgcttgccaggaccaatcagtaccaccagcctctggttccgcaacaaccagtaacactggaagtatctcaccttcttccatagttggagaggagctaaaactagctttccaactgcgtagatttacttttagtgaactgaaatgtgccacgagaaacttccgacctgagagtcttcttggcgagggaggttttggctgtgtctttaaaggatggattgaggagaatggaactg

SEQ ID NO: 280976 - DNA, 527 bp, Zea mays
cggtccggaccttcctggtttacctacgcgaccgtgacttgttctcgttaagcaagaggacataggcggtggtattgcatgcttcatggctgcatactcgctgccgctgaaacaaactaaggacctgacacccaaccaacttcaacaagctcttagcaagacattttcagctaaaaagaggaaaagcaaactgcagaaggcatgggatggaacgaaagttgtttataatatagcatcatggagcgcgacggctattggtatctaccagaatcctgcgattgtgcaagttcgttgaccgatttaacagcgacatcagttactggtgatgagcaatatggggctgttcgacagtatctcacccatataatctaaaggtatgaatggacacaccaccatctatttgccaataccagctgtatccgacaatcaagaaccgatgtacataagccctcccgcgcaacattggtatatcagtgtgattgtaaatatttcgattcatttcaataaattcgctcgcatgtgtttcc

SEQ ID NO: 280977 - DNA, 457 bp, Zea mays
ggcttcgccatgtggaacccccgttgggtgcattttttgagctggagagggggaacttacaaggctacaatgaagtaaaatacactccatcacgtgatcgtcagtggcatatttatccgcttatcaagaacaagaaagatcagagattaaatgaccagaggatgttccttcgtaccatagtcagacaaccaagtgcaacaaatagtttcctgacaggtaatattgacaatgaagcagggcacacacaagcttcgtcatcgttcacatcaaacagcattctcagatcattgatgggagcactagaagaaatagagctacatgctcatagtgagactgtgagatcaggccactcacacatgtatctgtgcttactgagagaacaacacctgcatgaactaatcccgttttcaaggatgactggtaaaattgataaggatgaatgaacttggtgcacact

SEQ ID NO: 280978 - DNA, 431 bp, Zea mays
ctgggagttgtgatccttatgttgaggtgaaactaggaaattataagggccagactgggcatttcgagaagaagaacaacccggagtggaatcaggtctttgcctttgcaaaggagcgcatccagtcatcagttgtggagattctggtcaaggacaaggatcttgtcaaggatgacttcattggacgtgttatatttgatttgaatgaggtcccaaagagagtgccacctgatagcccattggctccacaatggtatcggttggaagaccgcaatgggcacaaggtgaagggggagttgatgctggctgtttggatgggtactcaagctgatgaagcattccctgaagcatggcattctgatgcagcctccgtccctggtgatgggcttgcaagcattaggtccaaagtgtatctaactccaaagctttgg

SEQ ID NO: 280979 - DNA, 326 bp, Zea mays
cccacgcgttcgagcaataatcaaacgcacatgatttggtcgtcgttttcggctggccctcaccgggtgatccggacctgcacccttccctctcctcaaacaacagcggcacagcgctcgattcggcttcgcctcagactcgcgggctcccctcgcaaagctctaaacccctctgagagaacctatccgggccacgcacaaccgccacccatggacggcggcgacgctccggcggcgggaggcgggaaggtggcgtgcgcggcgtggatccggcgccgggaggacaagtcggcggcggcgccggcgcgggtgttcgcggcgtacgg

SEQ ID NO: 280980 - DNA, 580 bp, Zea mays
  unsure (1)..(580): unsure at all n locations
gatgacaagaaacctgatgagatgaagtatgaatgggatgatgatatgtcgctccaacgaaaagacaggcacaagctggagtttgcctttttgcgttcgttgaggatgatgctgccggtttactcaacattggctgtttgtttctagngctgcatattgcccgtgaagccatcttgccaagtgacatttccaggtgggcaatggaggggaatatcccatatgtggctgcttttactgaagtagacaggttccttgggagctctttccaagactgccctttggatgcaaggcagctgttcaggccggtgcgagttatcggagcatggcaactggaagctgcagctggatccatagcacaaagagtagccttgaggcttccttcagttaacttctatgcaattgctcaacgttgtttgaaggacttgttactgcctatagatagaatcctcccccacgcatgccaaatttatgagtgggcaatgcctgcagaattatggtctgtctagtaatcctgctagagtcccaacacgggtttgggtgatggctatcctaattgggccctacgacctttttataacat

SEQ ID NO: 280981 - DNA, 463 bp, Zea mays
ttgtacgccttccacacttgaagcagccaagctgggtgaggtgagcttagccatgccgacggcttcctctgcccaccgctcactcctcctctgcctctgcctggctctgctctccaacccggtcgccgcctcgccctcgccccgcggcctccgcttctccgccaaggacatcgcggcggtggaggccgcgctgccgcgacacggcagcagggcgtcgtcgtcgtccaagaccaccttcttcgaggtcgaccgcccgctccgcccgcccaggggcagcttcggggccctgctccacgctgctgctctcgcactccttcgcgttcacgctcaccaagccgcccgtcaccgcggcctactcgccgccgccgtgcctgtccggctccgacgcgccgccggtcttgctcgccgtgctcgagtggcgcgccgagtgccgcggcgcagtacgaccgcaccttcggcgtgt

SEQ ID NO: 280982 - DNA, 293 bp, Zea mays
ggcggatggtggcagtggcacgccgcagctacctctcccctccccatcgccgccaacgccaaggccaacagcacaaccatcgcaccacccaagaaatggagctgagggggccccttctcctcctcgcggctccccaagctcctgctccgcgcgcgtagccgcgcggcacctcccagtcccaacacgcccgcaagctccgctcaccgcgaggtgctgtttgaaccgcgaagatggcggcgatgactgcttacaagtatcaagctcaggccttgatgagggactatctgctagct

SEQ ID NO: 280983 - DNA, 486 bp, Zea mays
ccgcccacgcgtccgcccacgcgtacggatttagcgatgcttctgtacagagtgacattaagcactggcccttcaaggtcattcctggacctgatggcaagcctatgatagttgttcaatacaggggtgtggagcagcagtttgcagctgaagaaatctcctcgatggtcctcgtcaaaatgcgggagattgctgaagcctatcttggcaccacagtcaaggatgctgttgtcactgttcctgcctgctctaccgacttgcagagacaggccacatggaatgcaggagtgcttgcaaatcttaatgttatacgcatcatccctgagcccactgctgctgccttggcttatggtcttaataggaaggctgcccagattatgggtgaatatgacgttctcgtgtttgatcttggaggtggtacctttgatgtctctgttctcgcaattgaacagggtatctttgaggtcagggccacagctggtgctg

SEQ ID NO: 280984 - DNA, 1209 bp, Zea mays
tcttggacgcgtggggaaaggaacatatagctagggcttcattctcccaggcccggccatctgccataaattgcaggaatgaagaactatctatgtcagccgtgaacttgggttacattaggagctcagaaatagcacagaactctagaaaatcatttcagcatggcgatcaaagtttgaccgctccagatgatagctgcaggctggcccttggacttgggccaacaccaaatctatattctgctgatagtcactcatttggtggaaacaaagcttatcaatcagcaactttgctcagtcaacattgtgccacaaccgatcctggtttaatgttgggtctttcaagatgtagctcaagaaatttgcaatctacaagggcgagtggcagcaagaattattcacctgcacagaagactggtatcatcttaccacttattgatgagggatcaacttcagcaaaaaggaaaaaaggtggctatttgctgccacttctgtttgtgccaagatcagaagatctttgtcttaatggaacatctacagacaccgatgcccaacaacatattggaactgaatgtgatactgaaagcggtcatcatagatctctgaatcttcacgagattcagcctagcgctgatctatccattacagctggttgttcttttgctgcaacttctgatgtagtagccgatacaagtgatgagcagaggagtcatcagcgccatccaaagaaatgcaggttcaatggttgctcgaaaggtgcaagggatgcatcaggactttgcatttctcatggcggtggccagaggtgccagaagcctggttgcaacaaaggtgctgagagtcgaacggctttctgcaaagctcatggaggaagggagacgctgccaggagctaggctgcaccaaaagcgccgaagggaagacagagttctgtattgctcatggtggtgggcgccggtgtgggattgaggaatgcccaagagcggcaagggggaagtctggattctgcataaaacatggtggagggaaaaggtgcaggatagagggctgcactcgtagtgctgaaggccatcctgggttgtgcatctcacatggaggtggtcgccggtgccagtacccaaactgtgataagggggcccaaggaagcaccatcttttgcaagtcccatggtggaggcaagaggtgcatgtttgatggctgtaccagagga

SEQ ID NO: 280985 - DNA, 638 bp, Zea mays
tcgtctcacgcgtccgcccacacgaccaccgagcgggtgcgccacactagtgggggcacgataaaatgcggctcgcgacaaggacaactgaaggcaagacccatcggagtcgaattcactgatgaggatgggagacaccaccaggcattcttgaacaggttcagagtcagtgaagtgattgtatctgcccctgcgaccggcaccccccagctgctgctgctcagtgggatcgggcccaagaacgacctcaagaatcataacattccggtggttctccataacagatatgtgggtaaagggatggctgacaaccccatgaactccatattcataccaacaagaagccctcctcggcagtctctcattgaaactgttggaataactggagaaggcgtgttcattgaggccagcagcgggtttggtcagtcgtcggagagtgtccactgccaccatgggatcatgtctgctgagattggacagctgtctaccattcctccgaagcaaagaaccctggaagcagcccagaaatacgcccataacaaacttaatctgcccaaagaggtatttcaggcggttttatacttgacaagattgatggtccgatgtccacaggccatctggtccttacagacactgat

SEQ ID NO: 280986 - DNA, 395 bp, Zea mays
aatgattccccgacccgaatgatggccgccggggggtttgtttggacggtcgaggggacacacacgcacatcccacacttggttctgcccggcggtgcattcagcagcaccgtcttcttctccgtgtcggagcacctcgggccataggggcggacccgtgaacgacgttctttcggcgtgtcacgacctcctgccgcaagctcgatgctctccccatcgacacgcgagccccttggagggagccccgacctagattttactgagagtttctcctcatcaacctagatctcagtttctctggactctactgagcactcaacattgtgtttcttggttgctggtaaattgctcacttactgctatagttgattagtaaatataccgggacatgaacc

SEQ ID NO: 280987 - DNA, 493 bp, Zea mays
atacgcgtccggctcgataagatctccgagggccgtgtctactacaacatgggggacacgcccgcgccggcctgggccgcttgctcctgctccgccaccaccctcgctgcctgggacgatctagaggagtacacggtcggcctggacaagtacagcgacatgcttaaggagcagctcctcgacgactccgtccccgcgcgcgcgctcgtggccatcgccggcgagagcagcattggcaagacgacgctcgcgcggaaggtgtaccagagcctcgaggtccgcaaccacttcgagatccgcacgtggacggtgctcccgcacaagtgccgcgccgccgacgttctccgcgacatccacgagcagatgacctcccagctgcggcggaccccgtccgcgtccaactccaagcaggccgtggaagacgcctgcgatgacaaagccttcgggccgggaaaggacatcagcaaccagctgtacaggagcatgacgggga

SEQ ID NO: 280988 - DNA, 538 bp, Zea mays
tcatgcgtccgggctccgtctcgcggaggggcggcaccgaattggcctccaggctccacgccgccgcggtgctgctccgggagttcgacggctggagctggttcatcaatcttagcgcctccgattacccgctcatgccccaagatgacatccttcatatcttctcatacatgccaagagacctcaatttcattgagcacacaagcaatattggttggaaagagtatcaaagagcccgaccaatcattgtagacccagcattgcaggtcccaaataaaactgaggttgtaacaacaaaggagaaaaggagtatgccctcagctttcaaaatttttgtaggttcgtcttgggtgatgcttagtagatcattcctggagttttgcttactgggatgggataaccttcctcgcacactactcatgtatttcaccaacttcctctctgtcctcagaaggctacttccacacagtgatctgcaactcagagtactaccagaacaccacttgtgaacagtgatccgcgcttatggcatgggata

SEQ ID NO: 280989 - DNA, 488 bp, Zea mays
ggctgagagagggctgcggacaaggagccaaggacgagccgccgagaggactagggtttagccatggcggccgaggaccagactccttgtaccaagctccgccccggcaaggcaaagacgcggaagaagacgaagagggacaagtggggccagcctatctccgccgccgccgccgatgaggagccgtcggtggagccggagcaagagcacccggcgggggtagttgaggcggcagtacaggtggagaaggaggaggaggaagaggcgactgcggcggcggaaggctatgagcccgggaaggtggtggcgagcggcttgccctacacgaccaccgaggcggacatccggaagctgttcgagttctacgggcccatccagtcgatgcaggtctctcgcttcccggacttcggcaacttccgcggacttgcctttctctgcttcgagtcagaagaagatgcaataaagtctcttgagcttgatggattcaa

SEQ ID NO: 280990 - DNA, 480 bp, Zea mays
ttatttagatgtgcttagtggggttgaatagtcagagcatggcagggatagattacatgtctgccaagttcggtaatgaggaggaccctgtagctattagtgttgtgtcagctggtgtatatgataacactggagatgatccagatgttctagtttatactggacatggcatgtcgggtaaggatgaccaaaaacttgagaggggtaatcttgtactagagaggagtttgcatagaggtaatccaatcagagtcattcgtagcgtaaaagacttgacttgtccaactggcaagatttacatatatgatggtctttacaagatcaaagaagcctgggtagagaaagggaaatctggtttcaatgtgtttaaacacaagttgcttagggaacctggccaacctgatggcattgcagtgtggaagaagactgaaaaatggagggaaaatccatcatctagagaccatgttatattacttgaca

SEQ ID NO: 280991 - DNA, 887 bp, Zea mays
tttagttttcctgcaaccaagctatgatgtggttgtttttctgactgtgattctgttcgtcctccttatttcaccaatcgcaatccctgtgagtgtgtcgttcatgccggaaaaagctcaacatctcatggaagatgctctcctatctgaaccattgacaggagaggcaagcagttcacgacaaaaggaggatcaaccagaggtcattttaagtgaggcagaagaggagaagtctaaggaaactgattcattgccgccatctgaaaggagaaagaggattgcggaattgcaggccaagctagtggaagcagcggcaagaggtggggttagaatcaaaagaaggccacaccgaggggataacttcaccctgatgcaggcattggtgaaggctgatttttggcttatttggctatcacttttgcttgggtcgggatcagggctgacagtgattgataacctgggtcagatgagccaggctattggttataaaaatgcacatatctttgtgtcactggtgagcatatggaactttcttggtcgtgttggaggtggctacttctctgagatcattgtcagggaacgtacatacccaaggcacatagcattggcagttgctcagatcgtgatggctgctgggcatttcctctttgctatggcttggcctggaactatgtacattgcgagcttgctggttggacttggatatggagctcactgggctattgtgccagctgctgtcttccgagcttttgggggtaaaacactttggtgcgatgtacaattttctcatactagcgaaccccgcaggatccctcatcttctcagagctaattgtcagcaacctctatgaacatgaagctgagaaacaagctagccaacaccatatg

SEQ ID NO: 280992 - DNA, 468 bp, Zea mays
ttattgtaccatacatctgcggcttccaatcaaggtgggacaggattggtaggtagctgttcgccgcatgataacagctcggaggctgtgaaaacggattctacttacaacatgaagtcaaattcagatgctgccgcaataaaacaaggctccaacggcagtagcaataacaatgacatgggttccactacaaaggatgttgtgacaaaacccagcacaaataacgagagggtgatgttgccctctgctattaaggctaatggatacacgtcaacattccatcctgtgcagcagtggatggttccagataatgcgacagcagggaaggcgaaggctgatgaagtggccaacaatgcaggcagaaatagtcatcctggtgacgtgcagagcaacctgacgcaacatcatcgttcaacccttcattacgtccattttgagaatagtggatcaggtgccctgcaatgtggt

SEQ ID NO: 280993 - DNA, 455 bp, Zea mays
  unsure (1)..(455): unsure at all n locations
cctantattctagccaccgatggggtatgggatgttctctcaaataaggaggctgtcgacatagtagcatcagccccatctcgtgcgacggcagccagggcccttgttgactgtgctgtcaggtcatggaggttgaagttcccaacatccaagagcgatgactgtgctgttgtctgcttattcttgggtcacgagaagtcggccgactcggttcaagggagtgaacccaatgtggagacagcagaacccaccgtggaggtttccagttccacacaggattccagtgcaggggttgacgaagacattgcagatgctggcatgcatgtatctagtgcagtgcacatttccgaggccacgctgcagcactccaccacgttaagggaggtcgacgagattgtaccggtcgacgaacctacagcctcgaaggagcctggaaggtgcgggtctgctcgcag

SEQ ID NO: 280994 - DNA, 561 bp, Zea mays
ttgttatgagtgggatatgttgacagctgatttggagttggtggaaagaattgatggatactacgatgtggtttatggaacctatgaacccaaatatttaaattggtggaaatccaagaaggattttgttttctctcgacaatggtttcgtggacaagatggagcatataccattttgcagactcctgctggtcataacaaaagacctccaaagcatggctacgagcgaacaaagatcaacccatcaacatgggaaataaggactttgtatacatcaggatcatcgagtccaaaatgtgttgttactcttatgttggagattgctccaagtttttggggcagatggaagagaaggcactcaaattttgacaaaagcatcccttttgctttgctcagccaagtagcaggtataagagagtacttcgcagccaatccagccttgacatctgagctgccttcaacagtagtgaagtcataagcatctgaaactttgatcatccagagtgaacatgaagattctgaacttggtgatgaattttatgatgcacttactagaggtga

SEQ ID NO: 280995 - DNA, 428 bp, Zea mays
tcttgaagctctcctctgatacttcgtcggtttcttctttggaggatgacctggatcagacagcgcaaaagatggaaacgctgaaggatctgcagaggagacgcaaagacccctcagatatttttgtagagatcaagaaaatgaccaccgaggtgcagcagctcaggagcatggcagacgattcgaaatctgaggcaatggtgttggctgcagaaatcgagcaggtaaaggccagcatttgcacggctgaggtcaggtgcattgcagccaggaagatggaagacgccgctagagcagcagaggccctcgcgctggccgagatcaaagcgctagtgagcaccggaagttctttcgaaggagacaccgcttccgatggaggaggggtaactctctcgatggaggagtatttcaagctgtgcttccgagct

SEQ ID NO: 280996 - DNA, 623 bp, Zea mays
cggcctttctgtcggttgagcgcctccggggctccggctcccgctagccgacgtcgcggagaagcccaagcgccggtcgtccagggtcgcacaggcgccgcctcagcccgaggccgggatccccggcacgcagacgatttacgtcaagacattcgggtgctcacataaccagagtgacagtgaatacatgtcaggtcagctctctgcatttggatatgcgatcactgaagatcctgaaggagccgatttgtggctaattaacacatgcacagtgaaaaatccaagtcaatctgcaatgacaaccctcatatctaaatgcaagaatgcgaacaagccacttgtagtggctggatgtgtaccccaaggaagccagggcctcaaggagcttgaaggtattagtataattggagttcaacagatagaccgggttggtgaagtggttgaggaaactttaaagggacacgaggttcgcttgttgagtcggaaaacattgccgtcacttgatttacctaaggtaagaaagaacaagtttattgagattcttcctattaatgtgggatgtttaggcgcctgcacatactgtaagacaaagcatgctcgtggccatttgggaagctatacta

SEQ ID NO: 280997 - DNA, 492 bp, Zea mays
gtaaattgctcatagtgccttcttttaacattcatggtaaagcgcatggttgcttcagcgatcaacatgaagccactggagcattcatcgtcaattagcagtacgacaccgtctgcaatgcctatcaagccgattagtgacaacgagttcgagaacaaactaaactattcgaggcggagcacagatccagtcaaccttgttgcttattcatcatcagacctccaagcagccactggaagcttccatagtagcaggttactaggtcaggggacaatcggtggtgtttacaaggcaaaatatgctgatggaacggcgctggccgctaagaagtttgatccattgggcttctggggaagcagcgacttcatggatcttgtgaacagcatttccaagctgcatcatccaaacatctccgtgcttgttggttactgctcagagcctgggcactacatgttggtctatgactacaacatgaatggatccctctatgac

SEQ ID NO: 280998 - DNA, 337 bp, Zea mays
atccgggaaggtcccggcagaagaacttggcgggcgaaaggcgaaaccgacgtgctcccgggcgggcggcgacagcggcatggagcgagagcggcaggcagtggcgaggaacaggaaggtggtgctgcgcgggtacatcgaccgcgcgcccagggaggaagacatggagctcgtcgacggcggcgccgtggagctgcgcgtccccgagggcggcggcggccccgcggtgctggtgaagaacctctacctatcctgcgacccttacatgcgcggcaggatgcgggacttccgcaactgctacatgccgtcctataaacctggatcacctattgaaggg

SEQ ID NO: 280999 - DNA, 464 bp, Zea mays
gggtacaccagtggcgacgaccttgacgacctggattctcccctcgcatccctaatcgacaggagcgccccaccttctccgtcgaacggtttcgcacacttcagtgctcggagaggagtttccatggagaatacaagatacacgctcctaagagaagtatgggggctggagcaacggtgatggatgatgacgagcctgtaaaacctaaaatctcttctacagccacccaaatgagagcacaagaaggcctatttgtgtggggtcttcagcaatctctacagtaaaaaatgcaacacttccttgtactgtacattcccacgatcctatgtatcttagctcttttgtagtatatagcagcaaaagagggtgtcggcaaagatacagatacagtactgagttaaattctcttctataatgatatgacattctcttcacctaccaatttgatgggcccctgagacgct

SEQ ID NO: 281000 - DNA, 305 bp, Zea mays
cgcaaatcagtcactggatcatctgctcaattgtttcgacaaacttctaaatggaactgttagcaatccaccatcgaaattgaacaagaatggaaaagctttacgatcaaaagaccagcagaaaggagcatctgaagcgaaaggcacatttaatgtgattatgctgggtgcttcaattctgaagtttatcattgacacaaatatgaaggcactcaatgatgacaaaataaggtgcctcaaatttgcatcatcctacataaaatatgcagtatcatccataaaaaagcatcaggaacagagttcat

SEQ ID NO: 281001 - DNA, 541 bp, Zea mays
gtttttaattaatgcgcccgtcctcgccagtcgccacgaccgcagcaatccgccgcccttggccgtgccccgtgctgccgtactcgtaatccgtgagggaaagcgtccgcgctccgggccccgccgccgatagttccttcaagggagcgacgagcgcgcggtcgatggagacggtggaggaggacgtggaggagtacagctggcgggaggtggtgctgccgcacctcgtccccgtggttcccggcgcgcaaccggagctcgagcgggagaccggggagcggcgccgcggcagggacctcctcgtcgccgtcgacttcggcccgaactccaagcacgcctttgactgggcgctcgggcacatcgcgcgcatggccgacacggtccacctcgtccatgccgtctccagtgtgcaaaatgagattgtgtatgataaaagtcgggagctatggaggattaacagtcgaggcattaagacgttactggttcggaccaggccgaattgttgaggagacctggaaaagtttgccgagaagcaatcgac

SEQ ID NO: 281002 - DNA, 896 bp, Zea mays
cggacgctggcgaggtggtcccgtgccccccgcggtatcgcccaggcctgtgacggccagcgcatctcgggaagatggagggagacgacttgtcatccttgtcgccatcaccggtcccgtacattttcggtggtgggttgaggggaaggaagccaccggctatggagaaggtggttgagaggaggcagcgccggatgatcaagaaccgggagtcggccgcgaggtcgcgccaaaggaaacaggcatatatgatggagctggaagctgaagtggcaaaacttaaagagctgaatgatgaattgcagaaaaagcaggttgaaatgttggagaagcaaaagaatgaggtcctggagaggatgagacggcaagttgggccaacggcaaagagaatttgtctgcggaggacattgacaggtccatggtgagctgtagacccgtacggctgtaccttagcagtatatatgtggtaggtgaaggtgaacacacaatggccagagttgccctggttgacacagccattaatccggagcttcggtctcgtaggcggatagattgcctgtgatttccacttcataggttttgcccatttgcaacaacaaaaaaagaaaagaaaaggaaaggaaagaaagaaagttcgggcgaatagaggagtttgtatgtagaaagaaagtttagattgtttgacttataatgcgagatgaagacttattttgggacagagggagtatattgcttctttaggctttctggtttggtgatatagggtgtaactgtatcatcactttcctgtgctttggaaaacggaaaaccaatttgtgatgtaaactttagaactgcagatgtccgctgtgcccaaacttgtagagattgcttaagaaaggaatacgttgttgtac

SEQ ID NO: 281003 - DNA, 188 bp, Zea mays
agcctaaagaagcaatatactccctccatctcaaaataagtcttcatctcgcgaatagaggagtttgtatgtagaaagaaagtttagattgtttgactcttataatgcgagatgaagacttattttgggatggagggagtatattgtttctttaggctaaaataagtcttcatctcgcattataagag

SEQ ID NO: 281004 - DNA, 544 bp, Zea mays
aacgaaggcggctacaatggactgacgacacagaccgaaggcctctcgctgaacccgcggagcagcgagaacgagaggagcgcggcacggccggcagcgtcccgccctgccaaacctgaggactcgctcttcaaggacctggtcgacttcgcaaagaccaagccttcgtccccgtcgaaaccggccaacagccgcaggacccgctagaacgactcgtgcgatgcatggatggacattgggtcgttcggatattcatttcacaggttagcggcttttagatggtaccatgaaataaggccgtctggagactggttttcattgcatatttgcattgcatgggaaattgttttggttgcgtttagagtggcagatgtcagaaacgttgcttgctcataatcctgggtgtgtgatgtctagttagctgctcctaaatttctgtgtcgttggcttccgattctcattttctttttctttcacttagctgtgtatatatatgttacccgattcgacagcaaatattcatagttgagtttgtgacctgagg

SEQ ID NO: 281005 - DNA, 754 bp, Zea mays
gaatcattatgcattgggatgttgaaactgggaaatgtgagaagtatatatggccaagtgaagatgtgttggtttcacatcacgctaaaccgccagtatcagctaaaagaagcaagcaagtgctggctttagctgccagttctgatggtcgttacttggcgagcggtggcttggaccgtcacattcatttatgggatattaggtcacaggagcacatacaggcatttagcggccatcggggaccaatatcatgtcttgcttttgcgccagactcttcagagctattctctggttcttttgatcgttcaataatgcagtggaatgcagaggatagaacatacatgaactgtttatatgggcatcagaatgaaatcttgacaatggatgcatttagtaaagagaggattcttactgtagcacgggaccgtacaatgcacctttggaagattccagaagagtcacagttagtgttccgtgctcctgttgccacatctttagagtgctgctgctttattgatgacaaggagtttttgtctggatctgatgatggaagcattgagctttggagcataatgaggaaaaagcctatcctcatagtaaaaaatgctcatccagtatcatgtactgaccttaattcagttgacaacgatgatgagtcacctaaagaaaatggaatacataaacctgaaagcgtgtcgtccgcagcccagtcatgggttggtactgttgctgctagaagaggttctgaccttgt

SEQ ID NO: 281006 - DNA, 523 bp, Zea mays
ctctgggtgactcttgtcttccacacatcgccacgccactgattggctggcgattatgtgattcacgaaccatcttgccatggcgatgtccgcagcgtctcatggctctgcttcttccttgagagctttaaccgtgttgtttgtgttggcagcttttgtttcagatgtagaggggcgacatcgtcgtcatgtctgtcctcatttctcctgcggtggtttaagcaatatatcgtatccatttcgtcggcaaggtgatccatctgggtgcggtgtccaatcgtatgagctggtttgcacggatacagacgcgacaattcgcatcggcagtggaacatacaaggtgcttagcatcaacttcacatattcttacttctgggttgttgatgccaacctggacatccagagcagttgcccccttccccggtgggattaccatgctaggaggaccagtcgtaatcgtaacttacattggaggattgagttcagccatgatttttccaattctaatccgacgatgtgggtt

SEQ ID NO: 281007 - DNA, 648 bp, Zea mays
gtcgtagtccacgacaatcctgcatgctctagacctacttctctgaaaggtgcagctggcaaaatttattatcggagcaaagaaggcgagaccatccgtgtccctcccttttgtgctgatcaaaccatacagcatccatggcgacatcaccctgaacgacatcaacgagaagatccacgccccttcgccgcataagatcaggcacaggagcgacgaggagcccgacccgctccaggcctcagcagcgatctcagggaaacctgtggcccacaagacgaagatccacacggaggggggagggggaaaagggtgagcatcacgatcaccagaaccaaaggctaggctgatgcccatctgtgtgacgctggcgaagtggctaacagttgattcgcctttgcatttctggcgctctgggctcgttcccaattgggtttgtggcccaggtgatgcatggccttagcagcgtgcctgtaccgctttctgttcttgctgtttactagtatcttacgcacgcgccttagcgcacgtcataggcagcgctgaatcgtgtcaatgagttaatataaaaatttaataaaataatccaaagaaaataagaatggttcatatgtagtggtactactaataatgaatcgcccaatatactgt

SEQ ID NO: 281008 - DNA, 326 bp, Zea mays
cgctggagccagcagcggcagaaccacgctaaaatctcgcccaaatcatccccgccccagcaatggcgacctccttcggtttcggcagctccgcgaccgcgggctccacggcctcctcccccttctcctccaccccatcagccttctccttctcccagccggcgtctgcctcctcccctgcccccgcctttgagctcctccctcttctcctcatcctccgccgccgcttcttctgctccaacttttgggtcctccctgttcagggcctcgtccgccgccgccgcacccgccttctctcccgctttcggattcggatccaccttctc

SEQ ID NO: 281009 - DNA, 1001 bp, Zea mays
agattttactcgtgatggttgatagcttagctaaattaagtatggatgttggggataaggatctggggtccagttggttcctggccttctctggaaggttgatggatgaaaaaggcaaagagtgcattctggacaacatccaaatcacaatcagcgttcttactgaacttgtttcctatcctcacatgatggttgtgcgggagacagcattacaatgtttagtagccttttcgacgtttcctcactcaaagatttatcctgtgcggcgaaaggttgtgcaggcagcagtcagggctctcgacgataagaaacgggctgttcgtcgagtggctgtccgatgccggcacacatggcagtccttcacttaaggggagtctctttcggtggtgtcaggtagtcgggggaggcaagcacaaaaaactggtcttactgggcgatcctgttgggagtcgatgagtgtacatggtcggtttgcatgctccactgttgtggctgtttcaacttgaggcttgagcatttcataggctattcacctttctgtgccgacaggatctagagctgtcattgtaaggtgagagatactgggagcggggtctgctgacgagtttatgtccgagacctggtctttggatcagctgctgccaagttccagatgttcgaagttctccgaagagccatggggccatggggaggaatgtccctggaaattggccctcagtctgggttgccagctcttgtgcccttttcttttccttgatcctggacattgccttgtgtgtctgatacagatcagaaaactgatgcaggatcgcttgggagttgggaatgtaacctaaagtcccagtattcttggcctcccgatgttggagaattcaagcatgccacatgctagcatgcgtgcgtttgtgccaccagtttttagtttgctttcatgtttcaaccaccctctgccgctaaaaacccccccagtaaaaaaaaaaaaaaaaaaaaaaaaaaagaaa

SEQ ID NO: 281010 - DNA, 723 bp, Zea mays
  unsure (1)..(723): unsure at all n locations
ggcagaggtgcgcttccccgtgagccgggcaactggtgggtgtcgtcctcctctttgcgcagagagtaatggattaatgctttaagcaaggtaatgaaatgtaccagaagtgacttatggaaaggaaggagcttgttcactgttctgaatgaggaagtttaatctgatgcagcaagtctcaaaagagcagagttttgggagcaatgtcatcctctttgcctattctgccaaatcctttgaaagggagcttcccaaggcctcataacccccagcatattcctatgttgaggcagctgcctgatgactctatgcccttgtgtattgacacacatcagtctgttagtttgcacccaagagctggtgttatcggggtaccatattcaggctacactgctagtccacttgattctgtgtctaaccttgatagccagacaatggctgcaccctttattcctcagtcatccaattttgaagctctccagtctctatctgataataccccagaaacacacactaaggcagcctggttcacatcttctatggatgtttcaccactcaacacagataatattgctgcttctgatgttaatcaaatccatagtatacgtcctgctatgacatctgatgagagtgctacacataatgattggtgggcagatataatgaatgatgatgggaangatattcttgacgcaacagctactgattcccactcaaaagcca

SEQ ID NO: 281011 - DNA, 516 bp, Zea mays
ggaatttgaagagagatatgatcaaatctttaatgtgaacaataaggttgattccaaagagttatctgttggtagagctgccttatcaagtcttctgggtggtgttggctacttctatgggcagtccaaaattgcactcccgaaaggttttacacaaaaaaatggggataagtacatttcatattggcctgctgcattatatacagctgtccccagccgctctttcttcccaaggggatttctgtgggatgagggcttccatcagttagtcatttggcgttgggatgtgcatatatctatggatatcattggacattggttagatctgcttaattcagatggatggattcctagggagcaaatcttaggagctgaagctttaagtaaagttcccgaggagtttgttctgcagtatccttccaatggaaatcctcctactttatttcttgcgatacgtgatttagcaagtggaatacatgcacagcagttttcagatgaggaagcggaaaagatttc

SEQ ID NO: 281012 - DNA, 545 bp, Zea mays
tcctcccgtcccccgcatccctccctgaattcctccctggccagcggcgccgccaccgccatgaaccgcgttcacagcgaggctgccgctgctgcgaaggagcagcgcaagaacgacaagagggagaagaggaagaagcacaaggatgccaaggaggatgactgcggcgcctcgatggccgaggaagaagcacccaaagagaagaagcagaagcagaagcagaggaaggataaggacgagcgggaggagaagaaaaagctgaagccgacggttagcatagccgttgccggctccatcattgacaacgcccagtccctcgagctcgccaccctcctggctggtcagatcgctcgcgccgccaccgtctttcgaatagacgaggtcgtcgtctttgacagtactcccgcggcggagaacggcagcgccggtgatggtgaagagagccgcgcgcggttccttgttcggattttggagtatctggaaactccacagtacctccgccggcgtcttttttcgatgcacaagaacctgaagtttgtgggact

SEQ ID NO: 281013 - DNA, 408 bp, Zea mays
tccttcttttctcccccaattcccaccctgcggaggaggcagggaggaaggtcggatcgagcagcccgcccgctgcgggattggggacagggcctggcgcctggggccggccgccattaggttgcttgaccgcgccgccgcggcgaggggccagcgtcgtcggccgggacgggatggacgacctctagcagatcctggcgcgcccgatcctgctcgccgagcaggtaataaagttggtccgacgaggccttcacgttcccgcaggagtgcatggagctcaaggccaaggtggagcgcctcgccggcctcctccgccaggccgcgcgcgccgacctctacgagcgcccggcgcgccgcatcttcgacgacaccgagaaagcgctcgacaagtcgctggccctcgtcgac

SEQ ID NO: 281014 - DNA, 570 bp, Zea mays
ccctctcttccgcccacgcgtccgataaagctcatataaagaaattggagtcaatcttgagacttttggataatgatgagttgagtcctgagcaagtcaatgatgttaaagattttctggatgactatgttgaacgtaatcaggaagacttcgatgaattcagtgatgttgaggacctctatagcacattgcccatggagaaggttgaagcacttgaagacatggtttcacttgctccttctagtcttgtcaagggtgttgcttctgttccgactactgcagtttcgagtacaaagagttcgattgcaacttcacttactcagcctacagtatcaacagctccttcacaaagtacatcacaagatcaaacagaggacacagcttcccaagaaagcaatagtgaatctgtgccacaaacaccacctccaaaaggtggaaattctggaccttcaataccagctgtgccaattgctgtcagtactggtagtgcagctatttctgtacttgcagaaacaattagttcccctgtgcgaccaattgttccaccacagtggctacaatactttcttc

SEQ ID NO: 281015 - DNA, 500 bp, Zea mays
ccgcccactgggggttcacaagctgctgcaaaaaccctcttgagctctcgtgtccagtcaccaagttgtcgaacatgaatgcttagataatcatccccaggcgctgaagtaattgagaacggatgccattcaaagggtgacactgctggacattgaacaaacatatattgcccactcttgtatcggaaagccggaggcttggacatttgcagtgtcaacacgttaccaggatatatggccaccttcaatagcctgacagaataactgccagacctgaagaacctcagcaccctctcccctacatacaggcaaacaggcactgccagatatacatccatgtcgtttttcggtaccagacatgaatgaggtaaaggaactggccatgaacaatgagagccaaatacacaattatgaataaatgatgagagtaccagaaggcattgaagccagtcagtttgtcaaatggttttggaagcttcaccaggctacgacggaaccac

SEQ ID NO: 281016 - DNA, 493 bp, Zea mays
aggatatatggccaccttcaatagcctgacagaataactgccagacctgaagaacctcagcaccctctcccctacatacaggcaaacaggcactgccaatgtccaagcctccggctttccgatacaagagtgggcaatatatgtttgttcaatgtccagcagtgtcaccctttgaatggcatccgttctcaattacttcagcgcctggggatgattatctaagcattcatgttcgacaacttggtgactggacacgagagctcaagagggtttttgcagcagcttgtgaacccccagtgggcggtaaaagtggccttcttagagcagacgagacaaccaagaaagccttaccaaaacttctgattgatggaccttatggttctcctgctcaggattacagcaaggatgatgttcttctacttgctggattagggattggtgcaactccttttatcagcatactgaaagatcttcttaacaatattataaggat

SEQ ID NO: 281017 - DNA, 668 bp, Zea mays
ccctctcttccgcccacgcgtccgcttcgccgcctttcgctccgccgtcctcaccacggccgtcgccctctcctcgcgcgcgggcgtccggcgcggcgacgtcgtcctcttcttcgcccccaactgcttcctctaccccgtctgcttcttcgccgtcaccgccctcggcgccgtcgctaccacggccaaccccctctacacccctcgggaggtcgctaaacaggccaccgactcgcgggccaagctcgcaatcacggtctctgaactccttcccaaaatcgtggacctcggcttccccaccatcctgctcgacggcggcggcgacggcgacgcggccagtgccgccgcctccaagcctcagggagccagcgtgacgctttactcagaccttgtttccggtgcgcgggagacggagtaccgccgcccgccgacgaagcagagcgacacgaccgcgctgatgtactcgtccggcacgacgggggcgagcaagggcgtaatcctgacacaccgcaacttcatctcggcggcggccatgatgacagcggaccaggacgcgctcggagaggggcccaacgtcttcctctgcttcctgcccatgttccacatcttcggcttgtacgtcatcacgttcgcgcagatgcagcgtggcaattccgtcgtcgtgatgt

SEQ ID NO: 281018 - DNA, 291 bp, Zea mays
cccagatgttgatccagtgcctcccgatgttctcgttgaattcaacttgcctaatctctttgatgcttacatgggaattcacaaacctaaggatcgatctgaagctgattttgctcgaagaaggcttatctttgatgatttctttcacctccagttaggaagactaattcaaatgcttgaagcagttggtacgcggggtgagacagaggaattgttatacaagtgcagaagtcatgagctgaatactgttggtgtagatgattggtctcctcttacaaagaaatttgttga

SEQ ID NO: 281019 - DNA, 362 bp, Zea mays
gtcgtataaatctaaccaatcgccatccgcccaccccccaaatcccaccacccttttccccttccaaccctcgggatctctccggcccgccatggaagtgttctactacctcgtgttcggcgcgctcgccgccatcgtggcggcgctggagctcgccaagtccggcaaggaccgcgtcgccacctccccggccttcaactcatttaagaacaactacatcctcgtttactccctcatgatgtctggggactggctgcaggggccctacgtgtactacctctacagccagtacggcttcgacaagggcgacattggccgcctcttcatcgccggcttcggttccttcatgctcttcggcacca

SEQ ID NO: 281020 - DNA, 320 bp, Zea mays
accgcaacgcgccaccgatccaccccgcgtcctcggcctccctccctccggcgagcggcggcgcgggcggccatggaggtgttctactacgtcgtgttcggcgcgctggccgccatcgtggcggggctcgagctcggcaagagcggcaaggaccgcgtcgccactacctccgccttcaactccttcaagaacaactacgtcctcgtctactccctcatgatgtccggggactggctgcagggcccctacgtctactacctctacagccagtacggcttcgacaagggcgacatcggccgcctcttcatcgccggcttcgg

SEQ ID NO: 281021 - DNA, 523 bp, Zea mays
cagtaaacaacttgattcccatccccaccagcaccagcacacggacccggcggcggtgggcgatggcgcacccacaccccagcaccagcaagcaggtgcagtcagtgtgaggtgcggcccggccgaagatttggcgcatgcacactcactcactcactccagtgcccactgcccgacgaggaagtttcacgatctcaacccctatgtatcgacgccgcgagggggagcgacgagcgatccccgtaattaacctgtcccagccgcaccgatccacccccctcggcctcggcctcggcctccctccggccatggaggtgttctactacgtcgtgttcggcgcgctggcccccgtcgtggcggggctcgagctcggcaagagcggcaaggaccgcgtcgccaccacctccgccttcaactccttcaagaacaactacgtcctcgtctagtccctcatgatgtccggggactggctgcagggcccctacgtctagtacctctacagccagtatggcttcgacaaggg

SEQ ID NO: 281022 - DNA, 271 bp, Zea mays
cccacgcgtccgcccacgcgtccgtgcgctttctgccccctcctccactcctcgagatcccatccatggtggcggccttcgcacctcgcccccggatctgagcccctccagctactgcgggatattttctccagcgcctccgcttcgctggtccgaccgccgcacggttctctgccgtgcaagattcgccgctcagttttcgtggagtcggtagttgtccgtggctcggccatgtgttcctgaaacgggcctttgatgccagtggtgggcg

SEQ ID NO: 281023 - DNA, 431 bp, Zea mays
  unsure (1)..(431): unsure at all n locations
cggacgcgtggggattaatttggtttntgttttttagactgcaattatatctgggttctnagccttcctatggttgntcaacccctctatgattttatcagttgattcaggtggttgattatatggtggctcagagagctcgaggtgaatcacagagtacatatagatctctccactccagtcactatgttgggaatcctcagcctctggaggaatcatgagtgcatacttcagtggttctccagtcacttatggcgtaaaatttgtctttggtgttacagcacttttgccactgttccgagtagcatagaaggacaactctggccaactgtgaagaaaataaaagatttttacaagcggaatcttcagaatctgaataaaggagttcgtgggaatcagttgtaccaaaaactgcttcagttttcgttttc

SEQ ID NO: 281024 - DNA, 483 bp, Zea mays
ctctcactatcaccagtacaccctgcacgcgctgcgggcgtttccgccggctttgtgcctcctctgccctccccggccgctcgccctccgtccacgctcaagctcgccccgtcccggcgcctcgaactcgtcgtcctcgcttccgctgtcgccaccgcgaagcatgaggaggcgtcctgggatcactggcttgcagaatgtggcggctactctcgaactttcagaaccagttgggactggtcggggagaatatggccaaggtcgggaccgatgtcatgaagaagcagcgacttgggatggtccgatcacagctcgagaaatttgcttgcaagcataagaaaacatccttctctaccgtggggttcgacctggcccgactggttcaggaacccaaaggatggctatccttgctccaggttgggatggcagtggcgaatgatgaccttgtgctcccggccaaatcagacttctcagaacaacaag

SEQ ID NO: 281025 - DNA, 592 bp, Zea mays
cactattgttagaccgtttccctgtgccaaaactcataaagtgtgatcatcatggtagtcaggccaggttcctgctcgctcgattgaatccatctgtgacacagaaaacacagttttcaaagggatctgaagtcattttcaccgacgatgttagtctgcaagtgtttattgaacacttgcaggagttggctgttcagggctagaaagtcatgaagcttgaccttgtctgctattccactttggtccattagatactgaagatatggctttgagagggaccagacttcatattcacagatgaagcttgcaagttttttattgaacacttgcagtaattggtgtgcaggattaacttgttcatgtggaattatttaaatgcaattttctgctcacttgcaaatactggggagctctactgcctggaggagtgagatccccctgagttgtacattgctcaagctccagtttgatgtaagacaattacattttacccgttttgtatagcatgtggtattatccactgggaacgtttgatttctacagaaaccccttttgtcattcctccaaaaaaaaaaaaaaaaaaaagggcgaa

SEQ ID NO: 281026 - DNA, 347 bp, Zea mays
ttctctttttgggaaggcaatagcgtagacatcaaattagctagagtcaaaaaatatcttttgtgacaacaaatacaaaaccacacacagcccccatagtgaagggggcactgctcacgcattgagtaaagcaagttcaagcaaccatctgaatatcccaggatattagtatcttttattcgatgcatacatatagcgccttctatggcttccttgctctatggcaccttagcgacgcaacagccagcgcagcagctctttggtggcagaagcagaatgggtgggttggtggcgcaacagcggcggcggcggcggcggctgcagcagcagcagcacagcagtagcgg

SEQ ID NO: 281027 - DNA, 1093 bp, Zea mays
cccacgcgtccgcagtctaccttttaatcctgctacggcttttagggctgcttatgaatccttgtctattgatgccattggcacaaagtcagtgagtatgcagaaagtgtggcatctaattcaggcattggttggggaagggttgactcatcgaaatgtttcaagaaaaatgtcactagtggtaggtgcaaggcaccatcttgagtggggtcatgaaaagtacatacttgagaccatcaacagccatccagctcttgctgcccttggtggatctgttggcaatcttcagaagatccgagcatttcttcgggtaaggctgcgggatcaaggtgtgctagactttgacgcaaccgatctacgcagacagcctccagtggatacaacctggcagcagatttacttctgcttgagaaccggatactatgatgaagcaagacaagttgcccaatcatctcgtactgcatataacttcgctcccctgcttgcagattggatttctactaatggtgctgtatcaccagagactgctctggcagcttctgaggaatgtgataaaatgctcagaacgggtgatcggcccgggcgtcctggctacgacaggcagaagttactgctttatgccataatttgtggttgtcggcggcaaattgaaagaatgctaaaagacctaccaacactttttaacactatagaggatttcttgtggtttaagctgtcagctctgcgggaatacaccaatgcatcttcttctaatcttatgaatgaaggcttggtgccttatacgctggatgacctgcaaagttacttgaataaatttgagccatcatattatacaaagaatggaaaagatcccctagtctatccctacattctgttcttaagcatccaattactcccagcaattctttatttgtctaaagaagttggagaggatggataccatgttgatgctgtgcatatttcaattgctttagctgaccatagtgttctccctgacggtattgggtcaggccagaaaattggcgtcatggatgcctgtgcagaggctgcaagcataatacgacagtatggctctatatacttgcgtaatggt

SEQ ID NO: 281028 - DNA, 717 bp, Zea mays
cggacgcgtgggctgctccctccacccggattccgccaggattgagttaatcgcatcgcatcctctctcttcctccccccgattgttccatctgggtcgcgttgcttctttcttcccgatttgccgccgccatccacgtcttgcaggagtaggactccgccctgtccgtcctatccacctgtcctcgcttccgtccacgccatcgccgcgctctctctccctgctgctgctttcttgggccggtccggggcttcgtccctgccgggcgtaaatgcgcgtccgtgcagcggatcccagccttcgccgctccaagtcctgtcctcgtctgattccaactaggagcaggaggaggagaatcttctgcgcatgctaatcctagcagcggtggccagagatgacgaaatcgttctgacttcacctgcgctggcggctgctcagctccgagccccgagtactgagcccctccactgctatggacatcttcttgatccgcgcctgtctcctccggctgctgctggtgctcttcgccgccgccgtcacctctccggcggcggcgcagtcgcagccgccgtcgtccgccaggatactcgacgcggcgctgcaggactacgcgtaccgggccttcgcgcgcccccgcaccggcattgtctacaacgccacgctcccgggcaacctcaccggcattgtcctcttcgcggtccgcctgcgcagcggcag

SEQ ID NO: 281029 - DNA, 418 bp, Zea mays
  unsure (1)..(418): unsure at all n locations
aattttcttacggactcatatacacagaggggctcgcgtgctcgagagaataatattacacagccaccgcatgtgtctatggaggagtacgtgctcacgtcgccaccgctgtttatggcggggacatggctcttatatggcggattgctgcacacgtagacatggcttatactggtgggcgatggactgcactagaccacaggaatataccaaagactgatgggccgtcgacacgccaagaaggaccaacactccatgagaaagcggcaggcgctgaagcatatattccctataggatagcgttagatgcgggcacatcatagcccctcaaatatgcagtattattagagaacttaattccnataaaatacatacaattacatgcggccaatcatattatctatctaagccaatttaa

SEQ ID NO: 281030 - DNA, 520 bp, Zea mays
  unsure (1)..(520): unsure at all n locations
gttttgaaagaagcccggccgggtcggaaggggagcagttctcgccttctcggggaggtcgccagcgggttgggcagaggctttgcagcttttgggtcagacgcagtgttctccaaggctcactaaatggagtcccacaatggccaggctgatgatttgcctccaccaccccctttggctgctggtgttgagccacttaaagcccgatcaaacaaagatgccattgaaacctaggagtctggtccagaggaatggctgtggcagaaaggcgcagcagatacagctgatctcaaaccacttcaaagtgtctctcatgaaggctgaacattttttctatcattactatgtcaatttgaagtatgaagatgatacaccngttgatcggaaagggtcgggaagaaaagtgatcgaaaaactgcagcaaacttatgctgctgaacttgcaaataaagattttgcatatgatggtgagaagagcctgtttacactnggtgcccttcctcaagtaaaatggaattca

SEQ ID NO: 281031 - DNA, 566 bp, Zea mays
agcatgtcttatcccaagaaaatgacaaaaatgttaatgaggaagaatctctctctgatcaagagtgtgaatttgatccagttgattggaatgatgatgagaagtcaattttcattgaggcaatgaataactacggaaaggatttttctcggatctcgtcttgtgtgaagagcaagtcatatgaacaatgcaaagtgttctttagtaaggctcggaaatcacttggtttggatttgatccatcaaggggcagccgatgttagtatgccagctagtgataccaatggagggaggagcgatactgacgaggcctgcgctgtggaaatggattcagctatctgtagcacgcagtcatgttcaaagattgcgatggatgtttgtcctactgaaggagccattggagggcctaactctgttataatctctaagcaggcagaagcatatatatcaaatgggtgcaatgctgatgttaaaattgaggaagatgagaaggtagctgataaaaattgcagcattgttgatgctaagaggtcctgtgatgctactcacgattctggttctattgac

SEQ ID NO: 281032 - DNA, 494 bp, Zea mays
ggcagttcctcttctcagtcatgctcttcgaccggttgtcgccggtccccacgccatcgcatcccttttttctctctctcaggggaggggcggcgcgtagaggcacgccgccgagcttcgggcatcccatctgacgcgaccggtcttcgggcacgccgccgatcgagctatggacgcgtcgagctccctgtccctcctagcactggtgaccatactcagcctcctccactccgccacgaccgacgcagccgcgggtctgccggcggcgcggccgagccaccggaggctactgctgctacaccagccggacaccaacctcgccgcgctgcctccacctgcacgcgtgcacgtcgtcccagtcgacgtccacgtcccttctcatggaaccggctcttttccggcagcgtctcccggtccacacgggggcaagaacgggcccagtgaggcagcgccagcgacgccggcgacggcggcctatctgtcgagatccatga

SEQ ID NO: 281033 - DNA, 432 bp, Zea mays
caatagtctccgcccgtcggccgtcgcccgccaaaggtctcttcgatccggcctctccgggccacccagtcggccagtcccacactgggcgggcgcgcgggcgccgatgagctatactctttgctcactgtactagtcacacgattggctacacgacacgagctcagagctctcaggtttcccaacgccggctgctggccaatggcgcagcaccacggcagccactccctggaggtcggcggcgtcggcgccggcggcgtcgagctcgacgacgacggccacgccgcgcgcaccggcaacctatggacctgcttcgcgcacatcatcaccgccgtgatcggctgcggcgtgctggcgctctcgtggagcgtcgcgcagctgggctgggtgggcggccctgtcgccatgctctgcttcgccttcgtcacctac

SEQ ID NO: 281034 - DNA, 919 bp, Zea mays
gagcatgttgactatcttcttaaacaagcaacaagcattgacaacttatgcaatatgtacgagggatggacaccttggatatgattcaaagatgtgactttccttcattgtgcatggacaaatagtccagctgcacaaaaaaacgaaggaaccgtagcacgaccaacacatgatatggctgctatggatgctagtgaaacaggagggtttgaattcgatccagcccctcaaatgctggcaaagaagaggctccatggtacgcatgaatgttgaatggctatggattggtccaagtgaattagccaaataacaatcgagcatacacgtgcagcccatggcctggtcatatacaatatcttttctgccgaaccccatatattccgaatatcaacaatgtggaacgctaagctagtgtactgtttttgtaatcgggcttgcacatggtatgcgtcaaatgtgcaattgaacgacccagcatttgcaatttgatggggacacggtacacggcccctctggattaagagttgaagaccttgtagcgacggttgacctggccaaagaggcagagaacattgaagataagatgagaaggcaagttactttaggctgacccttgattgttggtctattttggacccctcttcttaagataatgatgtgcagaaaaaaaaactatcctcttttctccataggaaccttatcaactgatgtagactttatctggttcaaatataatgtacatgctgtacctatggttttggtagttcccttttgtaacatataaaggtagacccactgccagtcttccacctttgtggggtgtagtggagtaaactgaggcaggagaggctattttgaacccatgccttggttgactgagacggcgtccctcgtacatagatgttggaaatacaatttt

SEQ ID NO: 281035 - DNA, 564 bp, Zea mays
  unsure (1)..(564): unsure at all n locations
gttggagtatatagttcgtggtgtgcagaggaatctatttgagcttatgcatgctattgcaacaacacaagggttgaaaggcttttggaaagggaactttgtcaacatcctccgcactgctccattcaaggcagtcaacttctacgcatatgacagttacagaaagcaactgctcaaatggtctggtaacgaagaatctgcaaactttgagagatttattgctggtgcttttgctggtgttacagcaacgattatgtgcatacctatggatacaatcaggacaaagatggtagctcctggtggtgaagctttaggcggggtcattggtgttgcccgccacatgatccaaactgaaggattcttctcgctgtataagggattggtgccttctcttatcagcatggcaccctctggcgctgtattctatggagtgtatgacatactgaagatggcttatctgcattctcctgaaggaaggaaagggtatcgatgatgaaacaacaaaacatgagacatatgcattggatcaacttgacctgngtactgtgaggactctactctatg

SEQ ID NO: 281036 - DNA, 417 bp, Zea mays
tccggtccggtccggtcgtggcagtcctcgtgcaaatagcccgcggcaacgtgggcctcgccgtcgtggataagataagcggcctgcgactgccagcgtggtggcgttaggtacctcgaaccgcgcgaagtggtcgccagctggctcccgcctcgctcggtccctctgcactgccggtgggccatctgcagctttgttgctccgtgggacccatatgtctgttgagtctgaatggagatgggtcatgttcatgcctgtggggttcataccccacgtaatggtagctcacatgggtggggccgtcagacgcggttgcgtgggccttcgtctctgagctgccatagaggatagtacgaactgcaattcttttatatatcaaactggatgcgaatgtgcattgtgcttgatcaggattct

SEQ ID NO: 281037 - DNA, 1196 bp, Zea mays
cccacgcgtccgcccacgcgtccgcccactcggtcaggaacatggaggggagacggctttcacggcggcagttacgctcgctaccggacgccgcgtccttctcgccggaagtcgcggccagcccggggctcgtcggctccggccagttgggtctcggtctctcggcggcgttcgagactctgccgccgattttggtagaagtgaatggctttacaaggacactgattttgaataggccaaagcagttaaatgcactctcctcgaccatgattatgggactcttgaggtgtttcactgcttatgagaaagacgatggaagtagattgctgattatgaagggtaaaggaagagcattttgtgctggaggtgatgttgctgcagttgttcgatctatacataaagacagctggaaatatggtgctgatttcttccgaaatgaatttttgttgaattacataattgcaacttataccaaacctcaggtttctcttcttagtggaatcgtcatgggtggaggtgctggcgtttctttacatggaaggtttagagttgccactgataacacggtttttgcaatgccagaaacagctctgggtctttttccagatataggggcctcatattttctgtctcggcttcctggattctatggagagtatgctggtcgggctggtgcccgattggatggtggggaaatgcttgcatgtggtctggcaactcattttgtccagtcaaatagtctgctatcgcaggaagaatcacttaaaaaggtggatacttccaatggctttgcagggcggggcaacatcgatcaaattgcgcaacaacccacacggtaagaaagcagctctttgaataggttggaaatcatcaacaaatgcttttccaaaaggacagtcgaagaaattatatccgctcttgaagtagaggcctcaaattcggcagatgaatgggctgctacaacaatccagtccttgaagaaggcttctcctaccagtctgaaaatctctctgagatcgataagagaagggaggaacaaactgttggggagtgcttgcagcgggaatatagaatggtctgccatgtcatgcgtggtgacttcagcagagacttctttgagggatgcagggctatattgctggataaagaccgaaacccacagtggatgcctccaaggttggaacaagtgcatgacg

SEQ ID NO: 281038 - DNA, 566 bp, Zea mays
cttaatcataacctgttgtgcccaaattgccataatgcattcttggcagtggagactgggttcccttgcaatggaagcagctcatcattctcatggtcaaccaagcagcagccgcagcagaaccacaattcaaccaagcattcatatggctcaacaagcaggacttctagcatccctggtacagggaatggggggtaccagcaagataatacttatgattcttacaacaatcaaggcttccagtggaatcagtactccaagacaacaactgcagctgttactaatgcttatagtacacaggccttggagaaacagagaaggaagcatgacgagagctacagctacaactattctgaaagcggcaacacatatgttcatgagaaagctgcttcaaggcgcggtcgcttctcaaagcggagaaggcataactatgatgcttataccactgtggattatggtggcgataacaaagaaacagttgctgcaactgcaagcacagaaccaactgctgtttttactgatgtgggacgggtcaatggtacttcagtggacagggctaaatctgc

SEQ ID NO: 281039 - DNA, 348 bp, Zea mays
gcccgacctgcgctatgtgagcacatcccagggggggcttcttcgagtatctggccatactattgattcacataccagctaaatttaggaccatcccgattgaaggctcttcccacttaagtgatccttccttctgaatccattttttagcttattcattcggattatgacccataattatgtttttctgtctgcctgaattcggtcaaacatactgagaaaagcgtggatcctctgaagagtgtctgtaaaaaatgactgacatgcccctagaatttaccccaatttcacttgctctattgatttcctagtgcctatattatgtgcttcctaatcaatctttgctac

SEQ ID NO: 281040 - DNA, 286 bp, Zea mays
cgcccacgggtccgcaaggggagtctccatctcgggggcctgtttgatctgcccaacagcattgggatgtggagacctgtccagtaaaagtcaaagcccttggggtggacccctatgttatgccccctagcaatagcgacgatgtacagtgttgtctgctgattgcatttctgactcaaaaaactggcgctgtacgtcagttttgtattactaacattggtaatgcataagcgcttgagcatatgttttcaaaaaaaggcctaccaaaatgctagatttacccaaa

SEQ ID NO: 281041 - DNA, 568 bp, Zea mays
cacttctacttctctcaagggaagcgatgatgtgtgaggtatggattacgacatatgtttcaagttatctcttggcaatgaagatacttccaagctgcataaacaggcttgtggttctaaaaggactatggagaagcctcggttggatcttaagttatctttggctccatctcaatccgatgtaactcacgcggatctaatcagaagcagtgcacctcaggacatgtttgtgcagccgtacttgatgtcctcagtgccaacagtcgatgaaggatctacatctgctcgacatccatctggaggcatggtggtttccttccttaaccaggctgggatttctccgaaccagttgcccccacttaactctcatctggtccagggtccagcttgttcagcaccaacagtgctccaactgccaaaaagttcagctgccacttcttctgggtttgtccgcccacagcaacgcaacggtagcacaaagatcttgtcagagccaggttgtgcataatgagccaggggttcatctgggcggtgcattgcccacggtgggggcagaaggtgcagaaag

SEQ ID NO: 281042 - DNA, 490 bp, Zea mays
gtgtaccaggcctccagtgagcaaatgggcatggtgccggatgcatctgcggccggtggcaggaaggtcgagctggatggggacatgcgatggacatcacagaagacgaaatgaatcgcaaggggaaactaacatgcgagagaggaggagctagccacaaccaaagagcttggttcaatacttcaatggctagaataatgaacgatatgaagatcaggtagcgggagatatgtcaataagaagcagaggagagaagcagcccacatcgcaggagacaaggacttcacttgtttggccagttcaggacttcaggatgttgtcgatgatgtccatgctatattccctcgcttcatgcttaacaatgagggagagactaagtgagcaggggctgaaggccgttggtgctgtcagaatgtttttttggagttctggtggatgatgctcagtgactgcaacgcaatggatccttctgttttgtatatcgaatgag

SEQ ID NO: 281043 - DNA, 456 bp, Zea mays
cctatctttccgcccacgcgtccggcgtgtcttggtggccttcctgctttccctctccagctctcatacacaaacacacggagctagcagcacggatcgagagaacaatggaggaaacaagcaggatccctgggtacttcaagaacaagggcatcctgatcacgggcgcaacaggcttccttggaaagatcctcgtggagaagatactgagggtccagccggacgtaaagaggatctacctccccgtgcgtgcgccggatgctgcatcagccaagaaacgggtggagactgaggtgatcgggaaggagctgtttgggcttctccgagagacgcacggcaagaggttccactccttcatcgaggagaaggtggtcccgttggccggcgacattatccacgagaacctgggcgtggaggggccccagctgaggcggatgactcgggagctcaacgtca

SEQ ID NO: 281044 - DNA, 541 bp, Zea mays
gttgtgctgtgtgcctagtgcctggcctattaacgggggtgttctttgcggctttaatccgactgcgactgcggcttctacagtattttgtctctaggaattgcagctgcaatagtattttgcagctgcaacagtgctcccgcatgggcagccgaacaagctaaacatgtacatatatacttattataccagtgaggtgtgtgtagagtagtgtactctgtactcttccagaaaactttacatggtaccggaaccgggaccagcggcgacggtgtagtggtgaggaggcagaggagtgccttcggcctcgacggaagaaggccgccgatggagaagaagaccagctgggagcgtggcgcggcgtcgcggtcgtgcacgaggaggaggagccctgcacttgccggagggagaagaagcatgttgcacggtgcggtgctgcagtcgtgcgtgagtaggttcttattattgctctctatcctgctggatatgtagtcatgacagttaaattatgtacaactatgattacaaacgggaatacaag

SEQ ID NO: 281045 - DNA, 576 bp, Zea mays
ggctatgggcggatctcatcgcacttgattcacagagacttttgaagagtgttattagggttcagcagcaagaagaagccgacattttctatgtgccattcttcacgacaatcagttatttcttgctggagaaacaagaatgcaaggcactttatagggaagctttgaaatgggtcacagatcagcctgcttggcaacgttcagaaggcagggatcatgtcattcctgttcatcatccatggtcatttaagtcagtccggagatctgtcaagaaagcaatatggcttctacctgatatggactccaccgggaactggtataaacctggacaagtatatctagaaaaggatgtcatccttccatatgttccaaacgttgatctttgtgatcacaagtgtgtattagaaactcaatccaaaaggagtatattgctgttctttcgaggaagactgaagagaaatgctggaggaaagatccgcaagtacacttgtagaggaacttaatagtgcaaaagacatagttatagaagaaggttctactggagctcagggataagcagcagctcaggatggcatg

SEQ ID NO: 281046 - DNA, 415 bp, Zea mays
cccactcgttcgtaggattcatacttagatttatctgatgcgatctttcaactgaacgtgaacttggcaggggtgagtacagagtagtgtacaagcgagctctgcattgagctgtcgtcgagagctttaacagacactctagcctacgatggtggctgagattggaacacaggagcgagacacgggatgagaagcacaggaggagccaggtgaggtcaggtggctacacacaggtgacgggcaagcttatcttattttatttcatgctatactaaaatggattaggccatgtgaagagaaaagagtaacatttttggtggaggcctaaatccgggtctagaccaaggtcatggtggcgaccaaagtggaggccgatgtgtacggtgatgctttcactctgagtcttggggtgggg

SEQ ID NO: 281047 - DNA, 595 bp, Zea mays
cggactcgtgggcggacgcgtgggaaaaatttgtcttcttcctcgcttccttctccttttctgcctctcctcaccctctgaattccttgttcggttgttcctcttcccacttcccctctctctctctcgtgcgtgtgtactacttctgaggccgaaaggtcagaagagagtgtccacctttcagttcgattttcgatgatttgagtccttccgccgcggggaatttgagcgttttccttgagaaatttgagtttcttcgagagtaatttgtgtgttttctcttgagagattcgtgcaaggatgtcgccttcgatccatttattgggtagtcaaattgttcctatatagcgtcaaagcatccaactttgacttctccgtggtggcttcttctatcgtgtgtcatccagacaatttgatctttatttaattgggttggatgcttgttcaggttaggtagttggaaagggtagcataagacaccatcaattctggtgattttggtttttctctgaatattgcgggtccaattagtcatcttcagttatcactctcgttttattggagatattgttgattttagtggcgggcagagctt

SEQ ID NO: 281048 - DNA, 665 bp, Zea mays
cccacgcgtccggcttatttactttttcgaagaaaccacaaccaaacctcggctgctcggtggtcggtgcccaggtgcgccgattatctccatcaaagccgcgcatcccgctgcccccttactcatcctccccgctgctcgaaggagagccaaatccagagcgccgccgcgatggcctcccctgacgcggaacagccggcgccgacggaactcgagcggtggcgtgacctcgacatgctcttgtcccgccctggaaacctcgtggaggccactttcgatcccagccccggcctgcgagacctactggggagcctcgtggaggttttggttgtgggcgcgggcgggcttggctgcgagctcctcaaggacctggctctctccgggtttaagaaactgcacgtcattgatatggacaccatagacgtctccaacctcaatcgccagtttctcttcagagttcaagatgttgggaagtccaaggctgaagtagcagcgaagagggttatggagcgagttaatggggtgaacatagttcctcatttttgcaggattgaagataaagagatagagttctacagtcagttccacataattggcctaggtctggattcaattgaagctcgaagctacatcaattctgtggcttgtgtttcttagatatgact

SEQ ID NO: 281049 - DNA, 477 bp, Zea mays
tcggaaaaagagctgcacactggtcactggaaaacgaaggcaaaccctagtcgctactccaccgcagcgcccaccaccccgatcgggctccgattccgatggacttcgcggagctggaggccgtggagggcctccggtggccgtggcactcgtggccgccgactgcccccgccgccgcgtccctcgtcgtgcccaccgccgtcctctgctcgccgctgcagcaccccacggcgcccgacctcctcccgctgctcccctacccgccgctccgctgcgcctccccggcgtttgcggcgccgcgctcaacccgttctcgcgcgtgcaccaccgctccccgcgctggccctgccccttctgtggcgccgccgccacccgttcccccgcctactggcccccgacgcgctccccgccgaactcttccccacccactccagcgtcgagtacttgctgcccccggaccccgctgagcccggggga

SEQ ID NO: 281050 - DNA, 650 bp, Zea mays
tcctctcgtccgcaaaaatcgtggtgcctcccatccttaccctttcccctctcatcgcggcacaggcgcaggccagcggccgtccgtccaggcgtccgtccaagcgaactggctcaatcgtccaggcgagcggccgtccgtccatgcgttggattccaagaaccggtacttttctatgctccttttcattgtgctactagatcaggagaaaatacgatgcttccgtttgatggagattggttcgctcgcttttgctgcgctcggcggcttggctcgcttttgcgatgcttgagagaacatatgcgcgcgaggaagaagaaatctatgaacctcgcagtggcctgcgccgtgtcgaatccacctagaaaaagagcaattcggacacctgattaaatgccataaaatgatgctcatgtagtacgtaattcgagcctcagttcttttcgattggacaggaactcacccaagtacacctgtttcccacagtccctgccaatgagagacacagagagagagatgagcatgaaatggacatcgcttgcacaagccaacatagtaaaaaaaaaggcaacaaagcaagtagtagttcgatgcccacagtccctggctagctagctgcaggcgacagaccagatgtgggactcccagcg

SEQ ID NO: 281051 - DNA, 324 bp, Zea mays
cgcagaacgtgaaagacttatagccgagctttccttacttcttataaagcagatgaggctattagacaaaatgaagaagaatctcgtactgctttataagaagtaaggaaagctgaagaagccgcagaacgtgaaagacttatagccgagctttctccttctccggagccgtacgaccctgaggccggtccagccctgaagggcgctcttgatgtgattaggataacaaatgaggctgttgacgaagctgtgaatagactcttgaacgaagctgctgaaaaaattctgaagggaggatgaacatactttatatatgaaaacact

SEQ ID NO: 281052 - DNA, 499 bp, Zea mays
  unsure (1)..(499): unsure at all n locations
ctagggcattagagcagaacagagcagggcaaaagctcccaaaagaaccagtaaaagccaagaagcaccgagggccggagaagcgtacgtagtacgtacaggagcagcagaaacaatgaggccaggagccgggttcaacgcggcggcggcggcggcgaaggccgccgcagtcgcaccggcggtggccggcagcgccgcggcgcactccgcgtggcactcgccggtgccgtaccttttcggcgggctggccgcgatgctgggcctcatagccctggcgcttctcatcctagcgtgctcctactggaagctctccgggtacctggagggcggcgccgccgggcggggaggcgaggacggctccggcgccggcgccggcgccggcggcggaacgaaacggcgggcgggcctgccgccgccggtatggggagagaagatactggtgatcatggccggngacgcgaagccgacgtacctcgccacgcncatgtcgagcagggcg

SEQ ID NO: 281053 - DNA, 398 bp, Zea mays
caggggaagcaagagccgcagcagcagcagcagaaacaatgaggccaggaggagcagggttcaacgcggcggtgaaggtcgcagccgcaccagcggtcgccggcgccggcagcgccgccgcgcattccgcgtggcactcgccggtgccgaaccttttcggcgggctggccgcgatgctgggcctcatagccttcgcgctcctcatcctcgcgtgctcctactggaagctctcagggtacctggagggtggcgccggcgagggaggttccggcgccggcgccggcgccgcggcgacaagccagcggcctcggacctgccgccgccggtctgggaggagacgatactggtgatcatggcccgggacgtgaagccgacgtacctggccacgcccatgtcca

SEQ ID NO: 281054 - DNA, 652 bp, Zea mays
tcggtcgcgtgggcggacgcgtgggcggacgcgtgggcggacgcgtgggcggacgcgtgggggatagaaggtctggagacccttgattatcttgacaaccttagccagcgggaacgttttaccgaacagggagatgccataacatttgaatcagaggttgatcgagtctatgttggctgcccaggcgtaatagctgttcttgaccatggaaagaaacgcacattcatcgtgcggaaagaagggcttcctgatattgttgtgtggaacccctgggagaagaagtccaagacgatggcagacttcggcgacgacgagtacaagcagatgctgtgcgtggatgcagccgcggtcgagagggccatcacgctgaagcccggggaggagtggacggggaagctggagctctccgccgtggcgtcgaccaactgcagcgaccacctggatcgcccgggcaggctgtagagcgctgggtgggtgggttcgttcgcccctgacgaaaggcatgtactagttttttttcatgtacatgggggcgctaggtccggcccttgcaggctgcagtatcatctacctgtcaggtgtgtcatgtgtgagtttaaacttatgtcagatcccagtattgctgtgaaagaccccttcgatgttcctggac

SEQ ID NO: 281055 - DNA, 606 bp, Zea mays
  unsure (1)..(606): unsure at all n locations
catctgaagatgacctgangtgctggccacactggtttagttacgtctcagagtctctctttcaatggatggagacctttcactgatatcacgggtcagaaatgttaatgggaagccattcagtttcgcatttgcttaccatacatacctttctgtttctgacatcagtgaagtgaggatagaaggtctggagacccttgattatcttgacaaccttagccagcgggaacgttttaccgaacagggagatgccataacatttgaatcagaggttgatcgagtctatgttggctgcccaggcgtaatagctgttcttgaccatggaaagaaacgcacattcatcgtgcggaaagaagggcttcctgatattgttgtgtggaacccatgggagaagaagtccaagacgatggcagacttcggcgtccacgcgtacaagcagctgcttgtactcggccgcggtcgagagggccattacgctgaagcccggggaggagtggacggggaagctggagctctccgccgtggcgtcgaccaactgcagcgaccacctggatcgcccgggcaggctgtagagcgctgggtgggtgggttcgttcgcccctgacg

SEQ ID NO: 281056 - DNA, 449 bp, Zea mays
ttggtcgcgtgggcggacgcgtgggcggccgatctgcatttccctcgttccacaccgtcgttggccggcccatagctctccccctcctggttagtgtagtgagcgcagcgacgagtgcaacggtgagagataccgagatggctgagggaagaggcagtgcaagggccatcggcgccatggcgttcgccgttgcctgctgctgctgctgcgtcgccatcgccgacgcagccaccacctactacgtcggggacagcaacggctggtccttcagcagccccagctggcccaacggcaagcacttccgcgccggagacactctcgtgttcaggtacatcccctggatcccaacgtggtggccgtggacgaggacgggtacaacggctgcacgaccgttcgggttcggcgacctacacgtccggcgccgacagcgtgacgctcgcaggggggac

SEQ ID NO: 281057 - DNA, 1077 bp, Zea mays
cggcagagaccaaagtgcccatcgcaccatgtcggccgccgaaaccgctgtttctccgacgacgacgccgcagccgcagctgcaatcggatccgaacgccgccgccgacgcggccagttccaattctctctgggtggccgacgagacgcaaaccctaaccgaggtcctgctccaaccccaaccaaaccacctgtcgcctcctccttctggtgaaggggacgacgggatcactgcctccggtgctcctgttggtggggacgccgcggcatctgcttctgctgcggcggcggctaacgcgacgatagaagagcgggtgatggggccgtggtccccagaggaggacgcggtgctgagcaacctcgtggagaagttcggggcgcggaactggacgctgatcgcgcgtggcatcccgggccgctccggcaagtcctgccgcctgcgctggtgcaatcagctcgacccccaagtcaagcgcaagcctttcactgaagaggaggaccgcattataatggcagctcatgctgtccatgggaacaagtgggcatctatcgcaaagcttttggatgggagaaccgacaatgccatcaagaatcactggaatgccaccctgaggcgtcgctactgcaatgatggccaatgcaagcatggtggttctgtggagcgaagtatctcaaaggtgtccagggaagtttcagaagaaccttggcctttaaacgatcttaattccttcaccgctatggatgtaaaggatgatcctgtgcaaacggctccagatacttctcctcgggcaaggcacatcacagatcattgttctattactcaagtagttgatccaccatacctgtcccgaccagcggcaaagattggtgctttcagaccatattatctaggacacacggaacctacccaacaagaaatgccaggtgctgtcgtcaagtttgactcaactcataaagtctcgactcctgaaagcgaggtattcaagtttggttgatcctatatgctttgctgctgaggtgccagacaaatgtgggtttgggctgctgcggtgcttatgagcagcatccgaagaactca

SEQ ID NO: 281058 - DNA, 617 bp, Zea mays
cccacgcgtccggtcggggcccgtcttcttctgggcgcacgtgttctacctctccaaggtgtacgagctcggcgacacgctgctcatcctgctcgcccgccgcccgctcacgctgctccacgtgtaccaccacgcgctcgtcgtggccatgtgctacctctggctcgccacccggcagtcgctgatgcccgtcgcgctcgtcaccaacgccggcgtgcacgtcgtgatgtactcctactacctctcctgcagcgtcggcctgcgctggcccgggcggtggaagcgcgccgtcacggagctgcagatcgcgcagttcctcttcagcttcgcggcctccgtggtgatgctgtggctccacttcgccgctggcggctgcgaggggatggccggctgggtgttcaacgccgtcttcaacgcgtcgctgctcgcgctcttcctcaacttccacggcgccgcctacaaaggcgccgccaaggccaacaagggtaaagcggaatgacccgtccgaccagctttaatttgccggcaaccaaaatcctcgtgagatttacttgggaccaattgcttaatgttgcttaatcgccccattattactgataaaaaaaaaaataatttaa

SEQ ID NO: 281059 - DNA, 563 bp, Zea mays
tcgctttgatatgcacaagtgtcaaatatctatcggaggatgaatggatacttgatccagtaatcattgcagatctttatgagccactggggcttgattttattgttgatggcggacctagaattgctgacccttctaccgtagtagatatgatgggagcaaaccctactgtaattcgtcagggaaagggtctaaagttggattggatggtagcaaaagatgaagaggaggaccaggcacagtcgatgttttctttcaaatcagctggaaatttgcttcgcctgacctgtatgggctggcactttgctatgggcccccaaccgaagcgtcttctttcaactgcatataggatggcacgtgttagctgtcagcatagatgtcgaacacgagctgcgtgctgtaaatatgcaaggcgatgtaagcgaactggcagaatttgctcagtagcaacctttgctggaggtgatggaaagtttcctgctggttttcttgaactttgccgtgtacgcctaccagaatttcagtcctccaaggttccatattattccaaaaaaattataaaa

SEQ ID NO: 281060 - DNA, 616 bp, Zea mays
ttcaaaccgtgtgatggattcatctcttattgattcagagaactctatgcctgggtgtgcatgttctcatcctgaatgttctcctgagaactgtggtcacgtgagtctctttgatggtgtctacaatagcctggtggatatcaatggaacaccaatgcatggcagatttgcatatgatgaaaatagtaaaattattttacaggaagggtatccaatatatgagtgcaattcatcatgtacttgggacccatcctgccggaataaagtattgcagaaaggactgctggttaagttggaactctttcagaactgagaataagggttgggctattagagctgccgaacctattccacagggtacctttgtctgcgagtatattggtgaagttgtgaaggccgacaagaccatgaaaaatgcagaaaggttatgacattctgtcatatgtactttgaatctgaacttgaaaaaacatattgtaagttaagttgtgtacaaaatgatcttgaccaaacttgtccacattatcttgttcatgcatagttcaatgctaaagctttcatcctacaactactttattcacatttgtggagatttgcgcttaaccatcgatgcaat

SEQ ID NO: 281061 - DNA, 476 bp, Zea mays
ggaaatcacatccacgttctagaaagtctatttttacttcaaaagtactccttctgttccaaataaattagtgttagcatctctgcactctattgcccacttcccccctcatcggtgttttttattgttgcatatcaattttgtggctcaaatgcccctttgaaacatatagcaccaaaattatcctaattaattaattggtttctaactggctactctatttgcaacaatggggatatataaccttaccatgtctgtttatcacagtgcatcttagattgcatcgtattgcaattgttttagttccttgacatactgtttgtgcaacaggaactgcttgatgtacttaccgttgggtatctgtgtagctgtagctgccaagttgcctaaagaaaagttcccgacctttcacatgctgccacattgccacaataccttaagagcttttctatacttctatgatttgtgttttcgag

SEQ ID NO: 281062 - DNA, 541 bp, Zea mays
cccattcgttcggtcgagtcggcaagaaaggaatagataccagagaaattcctggcgtgaaccacgggtgttgttcacatttggtaccagagccaatactggatcctccacacgggtactggacgagatcgcaatcgaagttgggcggcatggcgccagcgaagacggacgatcctttgtcccagcttctggcgaagatcgaggagggaaacaaggagactcaccgacgcatggaggcgattcagggggcggtgggaaatatggaggcggcggtcaaggtggtgatgacggagcagggagatcttcagaagtggaaaccggaggtggaagcgaaagtgacggagatttctgatgctctaaaggcgatccagatccagatgggaaagatggagaagaagccgcttggtttcgggtcgagacaggaagaagaaggagaagacggatttctgaagccgccaccatctgattcttcgaatttggagtttcgtcgtgaagaagggcggacccaattctcgatggagggatgaacttcccctggaac

SEQ ID NO: 281063 - DNA, 418 bp, Zea mays
aaagctccgatctgaaattgctgtggaggaaaagaagtatcacgaattgccgggagagctcacatcattggacgtgaagaaagagaaacaacgagctctccacttcatgcgcctgtggtacaattaatcgctcttgtttctttcctgacctgtgaagatgatgactggattacttcccagagacgtgcagggaactggccccttggacaaatgttatctaccgattaccattcgcttggtaatttcgttggatagctggagacgtgcaatttcgcttcactaaccttcctagggtcctgtgatcgcggaagtaagtgagcatgtaggctgatgtacaattatgcaacttgtgtctgaatgtacagcagccattgcatggtaatgggacctccgattacggcattcatgttacacttga

SEQ ID NO: 281064 - DNA, 367 bp, Zea mays
ttccactcgttcggcacagcccagcccggccggcaccaacacctgctcctgctgcttctgctcgccctcgccccctgctgcgttttgtgccatcgccatttgcgatttctttcgaggaaaaagggaagcaagcgcggaaatactccacagatactactcacctaccgctccgatccggccaccaagcgcaaccaatatctcgctccctttctctttctccgtctccctcctccgcacagcgcacgcgcaggaggccgctgccgggaggcccatctctatctctctccgctggatcctccggcctctcgcggtccggtggagcggagatccggccgctcgggcgtcggctgcttcctcgttctgccgg

SEQ ID NO: 281065 - DNA, 718 bp, Zea mays
tccctctcgtccgataaaaggttcaaaaaagggcatcacagtgaagatgctgggacaaatatccaatcttacaatgggacttcaaagtacgttatccttgatgatgatactgaagatcaggatgattcaggctgacctgaatatggtaggtaagaatgcagactactatatgcactggcgtttccagagaagcaagatcttctggtgcctgcatagacttacttccacaggctaactgatttcatactattttttgagttgatcaaccgctgtggccactggccagccatgcacgagcgtgacgcttgcagccgtgtgacaagttgagaagactacacgctcgtacatggaacatacaaggtacagcctggtatcagtacagatgttttctcctttcgttcaaaacaaagaacggtgcatatatctgaacgaggcattctgcagtatgtccacgaagaaaatgttgcatcaattacaattagaaacacaggtaacacacttaactttatggatgaggatagggttcggttttgtagtgcattctgattgttgaagggagattcagcatcggaacatagctttcttttctttagttctttctttttttgagatgaaaaataaatagtactaacaatcttatatgtaataatgttgtatttacgggaatgtgtaccgtttcccgtaaaaaaaaaaaaaaaaaaaaaaaataaaataaaaa

SEQ ID NO: 281066 - DNA, 545 bp, Zea mays
ctagctgtctatcagctgcagaacgtgacacaagaataagagtggccagactgttcattgcatgaataacactacagaagttgcgaatgaaaacacagaatgcaagagcaaaatctggacgaccaaaacaaagagaagcccaagcagtaacacctgatgtcttactgcttgaaccatgccacaagttgcctttactacatcaagctgtattacatttctgacagtgcgcttgtgcacatctaatcttttttttcacctgatgcaatgagtcagattagcccatgcttttgatgaacatgacaactggcataagtgttcctttgttggtcagattgtacttatggtgtttagcatcgggtgctgtcttcgttctgtccagaattcaggtctggaattgctcaccatctatcggtatgcagactgtttgtaaaggcaatccagataaggcaatttaatgtgcgctaggattgttcaaactttggtccgctcaacgttcccttgacttggtagatatacaagaatggacaacgttttcttgacttggt

SEQ ID NO: 281067 - DNA, 443 bp, Zea mays
  unsure (1)..(443): unsure at all n locations
gctcctctctctcccaagcggctctccctctatctcctcggttgtctcccctcctcttctacagccgctgccaggcaaccgaccgccgagcagcgcactcacccgagccccacgcccgccgcgccaggaaccagcgcccctgctctcgccaggacgccaggaatggctctttctatagcaagtggatgaggtcagtctatattccattgaatatttgctgcagtgaacagaaacgtgagaaagccttcggtcggagccttcactgtatattccattgacatattcgctgcatcccactcatctctggctcgatgccatcccgtttggctcattacttaatcgagtgcgctgtagtcttgaaccctaatgtgcggggagtgctanccgaggactgatagcatcactttactaccattagctccgccccggcaatcactgtggga

SEQ ID NO: 281068 - DNA, 653 bp, Zea mays
ttatttagacagaaaacaagcaagacgatcttaaccaaacagccgtccactgccttttctttctcccgttcaccccgccgtgcacgctctttttgtccctcgtgccgacgaccgaccgaccgccgccgccgccgccgtctcaaggtcttcgtaaagccactcgccggcaacgagcagccaccaggaagatgttgtgaggactgatgcaataactaagcttgctggatggacggatgcgattgcatcgagccactatggcctaccgatgatcttctcgtcaagtatcagtacatctcagacttcttcatagcccttgcgtacttctcgattccattggagctcatatattttgtgaagaagtcgtccttcttcccatacagatgggtcctgatccagtttggtgcgtttatagttctttgtggggcaacccatctgataaacctgtggacgttcacgacacatacaaagaccgttgcgatggtcatgaccatagcgaagatttctacagcagtcgcgtcctgtgcaactgctttgatgctcgttcatatcattcccgacttggtgagcgtgaaaacctagggaagttgttcttgaagaatacagctgaagagcttgatagagagatgggacttataaggacgcatgatgagact

SEQ ID NO: 281069 - DNA, 532 bp, Zea mays
  unsure (1)..(532): unsure at all n locations
gagcacaatgcaggttggcacattcattgccatcaaggatttggacagtatcagagtcctcatcaaccgggtggagctggagatcagctcaatggtagactgcgtagagtttgcagagcgggatgaggaggcggtgaaattcgccgtggccgtgatcaagaagaagctggagagcttcatgaagagtgtcgaggatctaggagagcaagcagaccggtgtacccggcatatccgtcgggcaaggacccttgttctgcgaaggatcatccgacatccaaactgaaaaaaaaaaacaaaagggaaatgcaagggatgacagtgacgtgcatgacagagtgtgtggctgagacgagcgagcaagcaagcaaagtgaccagtactgtgtcctaaagcaacaagtaatgctcgtgaacttatgtgaagaaggattcatataactgtcaactacccaaatctctactgtttatggctaaagccaccagagtggttcgtttctgattaccattctttttatagtcggntacttgctttt

SEQ ID NO: 281070 - DNA, 690 bp, Zea mays
ttcctttcatatctagggacctacaccctatcccagaggagagagttgctgagaacttcaacgtgcaagaaaatcatgaagcagcaatttttactgattcagttgttgccttgactgggttgcatgtaattgaggagcactttgatgatggaactgacagaactctacccacgcgtccggtttcctcatatcctcgagctaatggtgtcacccaatctccatcaagtgagcatgcagaaatcttgaatccatttgttttgatggctgctgaacataataaggtggatataagcgacatgcatggcgaagcaactgccggatatctacttgattctgatgatgaggctggtaaaatctgtgctgagcctatggaaggcagtggaattgatgaaagtttcctgtctgaattggatgtggtgggagactttggagttgaaccgatgagactggaccagcaggtgacagatcaggcttctcatggtgataaacactaccgatagtgttactgcagattctgttattagtcctcagacatctgacgatgtctccttgatcatgtcgaaagttggtgctgaagaatcccgggagcagtctccattggtggatgacctaaatggctccgaattatattaagaagaaaaaaatgtttggaatcataaacacacacaaaaacattcacaccaacaaact

SEQ ID NO: 281071 - DNA, 495 bp, Zea mays
ctcccgtccgccgttagatgcggatcccgccgcttccagcatccagccaagcccgtgagccgcacgccgctcctgctcccgctccgagcgccttaggtcaggcggcgttggcccgacggcggggggaggcatcacgctgccatccatgggcgcgcccccgccgccgctgcacccgacgcccacctctcccacggcgcgcccgcaccaccaccactacctcttctccatcaagcagctcaacacgctgggcgcggcggccgtgctcgccttctccaccacggtcccgctctcggagactgccttcgcggtgctcctcccccctacctcctcgtcctcgcctggctcgccttcccgcagcgcccaggccgctcgagaccccgatcccccctctacccctcggcaccatcgtcagtgtcttcgatggccacaacggccccgacgcccccaccccgacagacactgagccctcttccgctcgcgtgactggtgccccct

SEQ ID NO: 281072 - DNA, 418 bp, Zea mays
ttcctttcgtccgcactaaatcactcaggatcatgtatcaaggaacatacttaagaaacatggaagcatgcatccatttccttgccctgctgccagtggaggctgattccatactgtgtcagagtgatgatgatgtgctgaccttcccgaatggtgatgaagctccatctccacggtgctctcttctttctaaattataaggcatttcaactttttttgagagtcaaaacatctcaattataatgccagctatggtttgatagcttggtattagattctcagtaatgctcgcatgtaaggggcgatgtgatgtgttggagacttcagtcaagcagttacatatcaagaacatatttggatgaagcgtgtgatatcttgtcatgactcatatgtatatgtatacgatatcctttatggt

SEQ ID NO: 281073 - DNA, 502 bp, Zea mays
ggagaagcttccagtttccgtcaatggcactggccatggccacggtgctgatggcactgggcggggtagccgccacagcgcgcgccggcggcggcatcgccatctactggggccagaacggcaacgaggggacgctggcgcagacctgcgccacgggcaactacaggttcgtcaacgtggccctcctcccgacgttcggcaggggccagacgccggcgctgaacctggcgggccactgcgacccggcgagcggcgggtgcacgggcgtgggcgcggacgtcaaggcgtgccagcgcatgggcgtcaaggtcctgctctccatcgcggggggcgtcggcagctacggcctctcgtcccgggccgacgcccggagcgtcgcggcgtacctctgggacaactacctcggcggcggcgggtccgagtccaggccttggtggaacgccgttctcgacggcgttgactttgacatctagagcggcgggggcatgtactgggacgacct

SEQ ID NO: 281074 - DNA, 521 bp, Zea mays
gtttatcagtcaagtgactcgatgaaatcatcctcagatgaagacggggatttgatgcccaaacagttttggaagcggaaacaacattctgtgagggaaagtggtgcatcaagtcattccgacaagaagaccaacatgagaaatgataacaatctttgcttgacgcctctccagtcatcgccaatagcaaaaacccgagatgctaagcggcggcgacagtaccatgcttactcaaagcaggcttctcaggcaccattatcattttggcctcggtgggtatatgaaatgtatgattcatatacacttgctcgcagtgctgcagagttatggagacagataattgcaaacccaagcatggacgatcatgtaagaaagccagatattttgtcatttcacatcggaagcaaacttccagtctcagaatctgtgagacaaaaacttctggagattgatggagttttcatatcgcctacagaaagaaattcagcttctcaaggccttcaatcatataaaatgtagaa

SEQ ID NO: 281075 - DNA, 904 bp, Zea mays
agctcgttgtctttattgcctcggccagtgggaaattttctgaggcaagcatgcaagagatcacaaaaatggtttctgcaaacctgttcaggacgctgagtactcctcctagagacaacaaagtggatggctttgatgtggatgaggaggagcctgtcatggaccctgcatggccacacttgcagattgtctatgagttgttcttgagattcattcagtctcaagagacagacgccaagttggctaaacggtacattgatcattcgtttgttctgaggctacttgacctctttgattcagaagaccctagggagagagagtacctcaagatgatacttcaccgtgtctatggaaagttcatggttcatcggccctatattcggaaagccattaacaacattttctatcagttcatctatgaaactgaaaaacacaatggaatcgcagagttattggagattttgggaagtatcatcaatgggtttgcattgccacttaaggaagagcataaattgttccttgttcgagctttaattccacttcacaagccaaagtgcatcgcgatgtatcatcagcaattatcttactgtatcacccagtttgtcgaaaaagattgcaaacttgcagatacagttatcagaggcctgctaaaatattggccaatcactaatagctccaaggaggtgctgtttctgggggagttggaagagatattggaagctacgcaacctgcagagtttcagaaatgcatggtccctctcttccgccagatcgcgcgttgcctgaatagctcacactttcaggttgctgagcgggcgctatttttgtggaataacgaccacatcgagagtctgatcaaacaaaacagctgggttccagtgcccactggcatttctctccagtg

SEQ ID NO: 281076 - DNA, 578 bp, Zea mays
aaccataaatacagcaggggaaacccccactgtagggttttttttattaaagggaaatgtacttattcagcggcatatggatgattgcttctctaaagaaaacttagagctttgataatgattgccaagaacttacttgcatttatgtttcttatggttcacaggaactggagcgaaagtatcacaaaattgtgttttgcttcatactcctttggaatcccatgatatacaagcgtgcttgagcaaaaatggtttcaatgggaataggatcagcttgtgggtactgcagggattacctctgtccacaaccacaagtttggaacatctcttgcttctcataagcaatctaccaatgaaaggaagtatcgtcataggagagctgccccattttacagactgtacagcaccaatggacatgggcttggaacaggacaaactagaaaagcttttctttactcatggcttttgagtcagctttgtgcaatatgatactgttgcagaggatattggcttagatctagctattacattggaacaatgtggcacaatgctttttgttgcagaacagctgccggttt

SEQ ID NO: 281077 - DNA, 948 bp, Zea mays
gggctgtggtactagtactagtaccagcatctcttcaggtctccaccaagcgcagagaccgcagcagcggcagcagcacgatccggtgaccgcccgccgcgtccagcctgctcctccggtcgtcgccggactggcggggtacgaaccagcggagcgcagcccgcctccttccgctgtgtctgacagcagcagatcctcgatggagatggatggggttctgcaagccgcggacgccaaggactgggtttacaagggggaaggcgccgcgaatcttatcctcagctacaccggctcgtcgccctccatgcttggcaaggtactgcggctcaagaagcttctaaatgacaagtcgcagcggccaccaagttgtatggtcttctcaagtcatgagcaactcctgtggggccatatcccagaactggttgagtcggtcaaacaagattgcttggctcaagcctatgcagtgcatgttatgagccaacatctgggtgccaatcatgtcgatggtggggttcatgtacgtgtttctagggattttctagagcttgttgaaaagaatgttcttagcagccgtcctccttggagagtaaatgcaagttcaattgatatcactgctgatgccgctcttctaatagcagaccactctttattctctggtactccaaagggtagcagctgcatagctgtagagataaaggccaaatgtgggtttgtgccatcatcagaatatatatcaaaagataattctatcaagaaacaagtaacgagatataaaatgcatcagcacctcaaatttcatcagggtgagatatcgaagactagtgaatacaatcctcttgatctattttctgagtcgaaagaaagaataagcatggccatcaagtcatttttctcaactcctcagaacaacttcaggatttttgtcaatggatctttagcttttggtgg

SEQ ID NO: 281078 - DNA, 601 bp, Zea mays
cccacgcgtccgctctactcccccggtcccccccccccccctctccgccttctctctccccgcaggcggtatccttccttcctcggttcctctcctctcccccaccagccccaccccagcgccccaaatgccgctccaaccctagcctcccgccacgcctttcgatctcgggcggccatgggcaactgctgccgctcgccggccgccgtcgcgcgggaggacgtcggcccctcgcgcggccccgcatccaacgcgaagaagaagccgcaccaagcgcggaacggcggcgccggcggcgggcagaagcggctctcggttctgggcgacgaggggtgcgaggtcgtcgggatcgacgacaagtacgtcctggacagggagctcggccgcggggagttcggggtgacgtacctgtgtatggatcgggacaccaaggagctgctcgcctgcaagtccatctccaagcgcaagctgcggacggccatcgacgtggaggacgtgcgctggtgaggaggccatcatgcgccacctgcccaagagcccgagcgttatgtccctgcggtaggcgtgcgggtacgagggcaccgtccatctggtcatggag

SEQ ID NO: 281079 - DNA, 510 bp, Zea mays
gtcagtacaagactgcacctgatgccgttcgccttatccttgctcaagaaggaattaaaggtctttatgctggctatggttcctttctcctgcgagatctgccatttgatgccattcaattttgcatatatgagcaactccgaattggttatcgattaacggctaagagggagttgcacgacacagagactgcaattattggtgcttttgctggtgccattactggcgctttaaccacacccctcgatgtcatgaagacaagattgatgattcagggacaaacaaaccaatatagaggattcattgactgtgctcaaactatcatgcgagaggaaggtgctggcgcattttttaaggtaaaacttttgcattgcaatagacgcagtaacaagaacttgcacattgatgatcagaaacaacagtcatttacatcacgtcacatttcagactccgtgtgataccacattcgaagcatctttgcatgtttatgtcttctggtgctaatcttct

SEQ ID NO: 281080 - DNA, 558 bp, Zea mays
cggactcgtgggctcggtcgacgcgttcgccacggctgcgcagtcctcctcctcgcctccgatcccctcccttcgacgatgcgagcacacccgctcatcctcttcgtacctgcaccgccacctcatcctcttcctcgccgcgccgacacccaccgcgctctctccctcccgcggcgacgcccttcgccaacgagaaccgcacgccgtcgtctcccacgggcactgtcgcacgctgggccacgctgcagtcggtggcgccgccacaccttcttcctccatgtgccgtcgccgccctattcttcttcgagatgcagccgctagcgctgccctcctcccagctccccttcatggccgcgtgcagggactatgtgccagtgttagtttttggtaccagtctacaggtctttcatttctacattcaaaggtgagaatcaatcatgttcggctccctttaaaaagtaatgtttcccaatccttcatagtaaaactaaacacacattggtaagacatttgtcgacgagatctttatagaggggtgttttacccaagggcggctgg

SEQ ID NO: 281081 - DNA, 725 bp, Zea mays
gaactagccgctgctgataagcggcgtggatgacgcccgcgaaggggcgcgcagtgcgacccgcagcgcagatggaaatcaagaggaggtggtagccgctgagattcatcaagagagtaattctgtgtttagccgcggtgaattgcgcccggtgctgcagccggcgtatcatgtcgtgggagaaactctggattctgatgcagctacacgtacaggtgcctctgtccagggtgaggtatcggagagttcccttgtgcgattggatggaggaattggtactggtgtagaaagatcgtgccttgaagatgctgtgtcaagtgatgagatccatggtgaacaagaagagcacgaacaagggagcaaggttaatgctgccactggttgcgatgaaccagatggagaggtcaaggatggtgctctgcctctggctcacacggcaggtactgaagagggggagaagcaatttgttgtctggtggaagctgccgttcaagctgctgcactactgtgcttggaaggtgaagccggtatggtccttctccatcgccgcagcacttcttggcctggtcgtgctggggcggaggatgtacagaatgaagcgcaaggcaaggggcttgccccagattaagattgcgtttgatgataagagggcctcccagtttgctgatcgcgcggcatatctcaatgaagccttcctggtagcgagacgtgtacctatgctgagaa

SEQ ID NO: 281082 - DNA, 538 bp, Zea mays
cactttggaggacgccccaacccctttggtggcctgcccgatggcgccgcctctgtcctacccgacctggagttcattgagatccagaaggagcaggcgcaaacttctccatgcacgggagatccatggaggcatggcaagcccaaatcccgctggcggtaggagctaatggctggtgctcgtgtggcacggcaacgcgacgacggagcaaatcggagagcctcggtccgccctacaatatgagtacaaggttttcataaatccgagcattagtgatgtcctgtgcacaacaacaatagaggctcttgcaatggggaacttcatgatctgcgcaagacatccatgaaatgagtttttcatgtcattttccggaactgttcgacatacaagacttcagaggagtttgttgcgagagtgaaagaggcaatggatagagaaccccaaccgctaacccctgagcaaagatacaacctttcgtggaggcagcgactgagagattcatggagtactcagaccttgatctagttctgaaccatga

SEQ ID NO: 281083 - DNA, 543 bp, Zea mays
gtcagccgttatggagcaaaaaagctctgcaagcattaccgtccctacggcacgacgcctctaacgtcggcgaccgcgacgacgatgaccccgcgtatcccctcctcgtgtgctccgttcgcaatcgctgcctccatctcctacagagcggttgtgtcgtccgagcattgatctgaaccagcacagtttatcagggacgtagcagtgagttggttatagagaactcagatttgatggctaaacataaaagcgacttagaaggattcaagttagatgtatacggaagtggtgaggactcgcaagaagttcaatccactgccaggaggttagatttgagtctcaattttttcaagggaagggatcatgctgataattcactccatgggtacaaggttttcataaatccgagcattagtgatgtcctgtgcacagcaacggcagaggctcttgcaatggggaaattcgtgatctgcgcagaacatccatcaaatgagttttttcatgtcatttccgaactgtttgacatacaagacttcagaggag

SEQ ID NO: 281084 - DNA, 309 bp, Zea mays
cggggagcctccattttccaagggagcatattttcttgggaagatggtttgggccaaaggttatagggaactcatagatttgctggctaaacataaaagcgacttagaaggattcaagttagatgtatacggaagtggtgaggactcgcaagaagttcaatccactgccaggaggttagatttgagtctcaattttttcaagggaagggatcatgctgataattcactccatgggtacaaggttttcataaatccgagcattagtgatgtcctgtgcacagcaacggcagaggctcttgcaatggggaa

SEQ ID NO: 281085 - DNA, 685 bp, Zea mays
caactaggctgacctccagacgcccgtcggcttcgacgcctatgggtttgggtaccgtgacgtcgatggcgccaaggtgactaaggcttggagggacaagtatgctgatgaagggtacggggaaggagatgtcctggggatctacatttctctgcctgatggggagcggtatgaaccgaagcagcctgacctgattcagtacaagggaatgccttttcacgtccaagtccccaaggaggagcagaagacgccggatcctgtccctggaagtgagatatgctacttcaagaatggagtatgccaaggcagcgccttcaaggacattcctggagggaggtatttcccagccgcgtcactgtatacgatgcctaacgagccaaactgtgtagtcaagttcaacttcgggccagattttgagttcttcccccaagatttcggaagcctgccagttcctcaaccaatgagcgaggtaactcatcaggcacttgaagtgaagaacgaggggcctaccgagaatggcatcgctgaaaaaactagctagtgtagttagcatgcttttgtataacttatacctatgttaacactaagcaagttatgatgtataagttagccgtagcagttatatctgactggattaatgcttgtgctgttactaaatgggctctatcttctccttgcctgggtt

SEQ ID NO: 281086 - DNA, 756 bp, Zea mays
gcacaaagaagaaaaatggaagtaccaacactctgggtggtggtgaacaagaatctggagtggcttcaatgtcaaatgaggaatatttgcacactgatacccatggtttgcagatatcagaaactgttgttgaacctcaagtaggtagatctgagggagacttgttgcctacaagttctacagatgatctacatatatcaggggggagaacaaagcaatctgatgcaggtgaattacgcaaaggaaatagcatagatgatagcactccaacttatctagatatcacgataggacatttacctgaacgcagaactgcatccaggatcacaacagagggttctggtgagtttattactgggaaaggaatgttagctggcacatcttctgtgaccatcagtgcaacggaagctggtcgcagtgaagatggagctgattcgatatatgatccttcaggtgctataactacttatgatgattctcaaacgcaaacagtaatgccacatgagaatacctcaactggtatgcttggaccaccagcgttacctgtgggagtttctacacggtttgaagaaaagaatatcatgcaagaggccccagaaattattaaaacaggagggatggatacagatttgaaaaggagacattttgacgagataaagccagtctgaaggatacatttgatgaatgggaggaagcataccagcgggatgctgagcagagaaaagctgatgagttattcatgagagaagctttact

SEQ ID NO: 281087 - DNA, 697 bp, Zea mays
caccatgttattagtctctggtcttacacaatactacatacttttttgggttctcggcttccactgattcaaggaagctcctttgtatatttggctccagcgttggtaattgcgaactccgaggagttcagaaatcttagtgacaataaattcaagcacataatgagggaactacagggggctatacttgttggttcagtattccagataatattaggatacactggtcttatgtcactgtttctgaggttaataaatccagtagtggtggcaccaactattgctgcagtgggtttggcattttttagttatggtttccctcaggctggcagctgtgtagaaatcagcatgcccctcattctgttggttcttctgtgcactctgtacttgagaaaaatatccctgtttggcaaccatatcttccttgtctatgcggtgcccctcagtgttgcaattgtatgggcatattcattcttcctaactgcgggtggagcatataacttcaaaggttgcagctcaaatatacccagttcaaacatattactggattcatgcagaaggcatttagaaaccatgagacgctgccgtactgatgtttctagtgcatggagaactgctgcctgggtgaggattccctatccgttccaatggggcccaccaacatttcattctaagacgggtatcatcatgatatagt

SEQ ID NO: 281088 - DNA, 597 bp, Zea mays
ctttacaaagaggttattagttgttacaagcaagcacatgatcatcaaggtttaattgcatgttgcaagaagttgggggactcatctcaaggaggggatccttctctctggggggatctattgaagtattttggggagcttggggaagattgctctaaagaagttaaagaggtcttgacctacattgagaaagaggatgttgtacctcccatcgtcgtgctacagacactatcaaaaaacccatgcttgacactctcagtcgtcaaagattacattgctcgcaagcttgaacaagaatcaaagctaattgaagatgatagaaaatccattgataagtatcaggcagagacagagttgatgaaaagggaaatacaagatctcaagacgaacgcgaaggttttccaactgagcaagtgtagcgcgtgcactttcacccttgatctacctgctgtccatttcctgtgcatgcactcgttccaccttcgctgccttggtgacaacgaaaaagaatgcccagaatgcgcgcctgaatacagatccgtcatggaggcaaagcagaagctagagcaaaacgccagggaccatgatctctttttc

SEQ ID NO: 281089 - DNA, 535 bp, Zea mays
  unsure (1)..(535): unsure at all n locations
gggaaaaacaaccctgagcttgccaaagagatggagaagcaatttgtcgatcttcttaatgaggaactcaagctgcagcaggttgtagctgaggagcatagtcaccacatgaacgccactcttgtcgaagcaaaaagacaagctactcaataccagcgagaagccgaaaagtgtaatgcagctacagagacctgcgaggaagctcgggagcagtctgaagtagcaatttcaaaggagaagaaactcacagcaatgtgggaacagcgagctcggcaactgggttggcatgattctcgagccacgagcatgtgacggctttagttctgaattttcaggtgaaattatttctggtagctgcatgggttatgccttgcagccaaaccaaccggcgacgtttgtctatgtaatatcagtttccacgacaacattgttaattttgagtctcaacattatagttccagcttccttaangaaaaaagaaagggaataaataggtgcaagcccagatgaagaaagaccactgtggagctaaagg

SEQ ID NO: 281090 - DNA, 416 bp, Zea mays
gtacagatctgcccacccgctgcgttcctataccgccttcctcttgcttcgcctcctcgtcctcgtcctccaacaccaccagctgagaagacccgatcgagaggtaattaacgtcgtccatggtgatgatgggtcagctggggcgtctggtggacggcatcaagtccaggctgcgcgccggcgccggcaccggaggcaacaagaggggcggggcgaggaaggcggcggcgacgacgacgaccacggggtacgacaaggtggagaagacggagagcatgcgtgtggagatccgcagccgccaggcgcgcaagctcatcgccaagaacctcgacgccgccggctccgtcggacgcaccggccggaccaacaagcgcttcttcctcgccttctgatgcatcatcgatcgagcgtgggtc

SEQ ID NO: 281091 - DNA, 592 bp, Zea mays
atcaatcccattcctctcctccgctagtagccgccaaatcgacgagaaggagccgaggccaggcctccaccaagtatcagattccacgccctacgaatcatcgcaatgacgaagaagcagcggagggaggcgggggcgatgcgacggcgagaccgacaccaccatcaccggcggcagccgcgggacgagcgctgcgtttcctgcaccacgtttaacatcctggcgccgatctacaagcgcatggacaacgagaattgcagggagagccagtacagggcctactggttcagccgcaacgagaagattattgaccgccttctcgctgatcactcctccatcatctgccttcaggaggtatggttggggaacgacgagctggtcgacatgtaccagaagcgtctgggagacgccaattacatgctcttcaagcttgcacgcaccaacaatcgtggagacggtcttcttactgctgtacatagaaactacttcaacgttttgaattatagggaactgctgttcaatgacatcggtgatcgggtagctcagcttgtgcatgtggaatcagcgatgccattcttacaaaatcgaagca

SEQ ID NO: 281092 - DNA, 952 bp, Zea mays
ccagtgtggatgattatttatggctgatgggaagagctggttacaagccagtaatcgagtactgtggaggcacagagattggtggtggatttgttactggatcgatgctacaacctcaagcgttgtctgcattcagcacacctgccatgggttgtaacctgttcattcttgatagcagtgggaatcctttgccacaagactctgtcggcattggtgaacttgcacttgatccaactttatttggatcatcaacaacacttctaaacgctgatcatcaggaggtttacttcaacggaatgccagaatggcacgggaaaatcctccgcaggcatggagatgaatttgagcgtacttctgacgggtattatagagctcatgggcgtgcagatgatacaatgaaccttggtggaattaaggttagttccattgagatcgagaggatctgcaacagagtacatgacgccatccttgaaacagcagctatcggggttccacctgtagggggtggccccgaacaactaaccatagccgtcgtgttgaaggaccagagctctcaaatagaggacttgaaccagctgaaactagcatgcaacatggctctgaagaaactgaaccctctcttcaaggtttcctccgtcgtcatcgtcccgtccctccctaggaccgcctctaacaaggtcatgaggagagtccttcgcaaggagttcagccaggccgcccaggcaaagcattcaaaaatataggtagttattagaaataattagtgttttctgctgcaaatgcacctgcagaaagagtaaaacaccaaactgggcatatcgggaagtcctgttgtttgccaccaaaacggataaatgagatgtacttagatttcgggaaataagggagctgtattcctgccaacgttcagcactcacttgatgtgctgcactaataaaacactaatgcaatc

SEQ ID NO: 281093 - DNA, 1002 bp, Zea mays
cggacgcgtgggcggacgcgtgggttaaaaaacaccgcaattaaccagctcaccctggctaacccaccaccaccaccataccaggagagagaaaagagagaggcacctccactcgtgactcgtgagtcgtgagtagtgactcgtctggtctcccctctctcgtccgtctggtcctcccgtccagaggcgttctctctccctccccctttcctctggtcatcgcacccgtctccccgctctgactccgcccgcgccgccgactcccggcacggccccccaggcttcatctccgccgccgccgtcgccgccgcctcgctccgatcgacccccgaaacgccggaaaccgtgggcttcgcgaggttgcctctcttcgtccaagcggtagataacataacagtgcgacaggtgaattgcagagagaagggggggcatttggtcgctgcatgatggcggaaggccccaatttcgctggcatgattggtggccatgacaatggtggggatttctgcgacatggcatactaccggaagctcggtgagggctcaaacatgtcggtagacaaccttaatagcatgcagaccagcacacatggtggctccattgcaatgtctgtggacaacagcagcgtagggtcctgtgactcccatactaggatgctcaatcaccctggcctcaagggacctgtcgttggcaattactccgtcggcgggcacagcattttccgtcatggacgggtgtctcacgccttgagcgacgatgcgctggcacaggcgttgatggacccaaggtacccgactgagacactcaaggattatgaggagtggacgattgatttagctaagctccacatgggaatgccctttgcacagggcgcctttggaaagctctacaggggtacctacaacggggaggatgttgccattaagcttttggagaggccagaggctgatccagagagagctgggttaatggagcagcagtttgttcaagaagttatgatgc

SEQ ID NO: 281094 - DNA, 529 bp, Zea mays
cccacgcgtccgcccacgcgtccgcacgcgtctcgtctcgtctcgtctcgtctccctctctctcgtccggtcctccctccccttcctgaggcgttccctctctctccccccctttcctctgctggtctctactctcttgtcatcgcacccgtctccccgctctgactccgtcccgagcggccgactccgcccgcaccgccgccgccgccgccgcctcgtcccgatcgacccccgaatcgccggaaaccgtggacttcgcgaggttgtgtctttacctccgagcggtgtagggaatataacagggtgacagctgaattgcagaaaaaaggaggacatttggttgttgcatgatggtggaaggccccaatttcgctggcctgattggtggtcatgacaatggtgggaatttttgcgacatggcatactaccggaaactcggtgagggctcaaacatggcgatagatagccttaacagcatgcagaccagcacgcatggcggctccattgcaatgtctgtggaccttagcag

SEQ ID NO: 281095 - DNA, 515 bp, Zea mays
aaatagtttgtaatggtgctaacatacggacggccaaaggctcctgcaatgtgaaggcaccatgcaaacattcaggccctcaaacctatttttcctgtgaggcagctatagccagacaattgttggcgaggtcatcaaagataactctccctgacgacacagcctcacaatatgcagtggctggctcacttcagagccagccccaagcccttgatgtcacattcatgtattctttttttatagcatatgttgtttgattcctttaggatgtccttttcttatttattatacatcgatagtggtatatagatagaaagttgtgattgatacttgtaggtatcattgatgttttgattgggccttaaattatatagggagagaaacttgtagtctttgcttgtaagagatgagcagagttgattgcagagtgtttctgctgtaccgtgacttattgtagcactagcaccgaattgtaaccctatattttgtctttgaactcgttagtgacttatttg

SEQ ID NO: 281096 - DNA, 436 bp, Zea mays
gcatcaggggaagaaccaggcacccctagtattcaggttaccagaggtggcaggctgatgttcatatctctactggttatacttgcttctgttatatggacctttacttcaggctccgccctcaacttttgcaagggtttatggaaatcctcttctacgtgacagattaagtgggaacctggtgaccttgtcctctgtaaattttttggtcctcggtaccatttatggtttgaatatcctttccctttcaaaagggtgaagaggtagaaacattttgagggtggtaatatgattataggtttgtagagcctatttaaaacggtaaaatgcaaggtgggaaaagcatatctgatggtaatatttgaaactaatgggttactgttctcatttgtattttgacagatatatggactgaatgcaattaacctattaatat

SEQ ID NO: 281097 - DNA, 686 bp, Zea mays
cctcccctcacggctgcatgcccgttgcccgcatccggtccatccggcagccagacgctgccgccgtaaattccccttccgcgtctgtctggccggtggccgctgtggttttgtaggctagcgcgtgccgtcctcggacctctcccctcgtcctccaccaccatgactgaggcccagtctccactatccgccaccatggcgaaggaggcccagtcgtcgccgtccgccaccgtagcgcaggcgacggctctgccgcagctcgtactattcaactccttgacgaagagggaggagcccttccagccccgggtggaggggaaggtagggatgtacgtctgtggcgtcactccctacgactttagccacatcggccacgcgcgtgcctacgtcgccttcgacgtcctctacaggtacctgaaattcttggggtatgaagttgaatatgtccgtaatttcacggatatcgacgacaagattattaagcgtgcaaatgaacgcggtgaaacagttacaagtttgagtagccggtttatcaatgaatttcttcttgatatgactgagctccagtgtttacctcctacctgtgagccacgtgtaacagagcacattgagcatattatagagttgataaccaagataatggagaatgaccaagcctatgctatggaaggagatgtttactttca

SEQ ID NO: 281098 - DNA, 764 bp, Zea mays
ttttccacgcgtccgctgaggagtcttgcctttcagacaagtcatacaatgctatcagttatgaaaatggaaatgggcctgctaaatcttctgaggagcctgacaagtcatgcaatgctatcatttgtgaaaatgaaaatgagcctgctaaatcttctgatgtggttgaaaccagatgcgtggaagcattagcgccttcatctgttggcaccggttgtcacggcagaacagaaggacaatggacaccgtgcttctggtgagtggcatggagataatgtgcaagtcattggacaacaacagaagatctacataattaaagttccaaagtttgccggtgatgatctctggaataagatccaggctgcacaggctcacttagaccacctgacccaggaaagagatgcaattaaccgtcgtaggcaaaagcaaaaggctgtatgtgatcaatacagggagaagcttgaggcagcacgtacagaagagcgggaagctaggactgcacatggagataagaagaatgatttaaatagtgtgcgctcggtactagggaaattgcaccaagcaaattcagctgaagaacttgatgagctgattgcgaagaaagagaggactatgcaacatgagaccatttctttgaaagaagaaaagcttttaattaaagagattaatgaattaaaagcccaacggaagcagctgtccgccaccatgggctcaaaggctgaaatcaatgaggcatttgaccaaaaagatcacattcatgagcg

SEQ ID NO: 281099 - DNA, 544 bp, Zea mays
  unsure (1)..(544): unsure at all n locations
cggacgcgtgggcggacgcgtgggcagcaagtcaacaagagccagcgccgggcgcggacccggccggccctcgcgtcgtcgcttcggttcggtttcggctcagctgccgaggctcctcgccgtggaatcagcagcgccatgagcagggagcagccgtcgccggcgccggcgcagcggcggttcatcgccatcccctccttctcctcctccggctgccgctcccactccagcgtcgacgttgtcgacaccgcgcgccacgccggcaacggcaagaagccccacccgcaaggggctgaaacaggggcggtgccaggcggcgcgtcggcggggggcaagggggagtcgctggtggcgcggctctgcgcggtttaagaacctgtccagatcttcgcggtgtacgaggacaggaggaggaggaggagcggagatggtgatcgggctcccacggacgtaggcacgtggcccaatcggagggacggcagcaccagcaccaccagcagctcggtctggaccgcgcgngccgctcacgcctgcgttgtcgtcg

SEQ ID NO: 281100 - DNA, 617 bp, Zea mays
  unsure (1)..(617): unsure at all n locations
aatattcttggcatggtggctgacacggaaagctcagattcactgcctggcagttcaaatgctgcttctgagatgcctgctaatggatcttgatcgacaaaacactggaaaggctacagtgctaggtgatgctgcgcgagtactgcgagatctaatcactcaagtggaatctctcaggcaggaacaatctgctcttgtatcggagcgccaatatgtcagttccgagaagaatgagctgcaagaggagaacagttcgctcaagtcccaaatatcggaactacaaaccgagctctgcgcaaggatgaggagcagcagcctgagccaaaccagcatcgggatgtcggatccggcaactcaccagcagatgcagatgtggagcagcattccccacttaagctccgtggccatggcggcgcgcccagcaagtgcagcgtccccgttgcacggccaggagggctactctgctgacgccggtcaagcgggctacgcgccgcagccgcaacctcgggagctgcagctctntccggngtcatcggcatcgtcttcaccggagcgtgaacgttcttcccggctcggaagcgccaggccacgcngccgagctgacagattccttgcgg

SEQ ID NO: 281101 - DNA, 411 bp, Zea mays
gactagttctaggggtttctcggaaacttcggcgctgaagcatgtaaagtatttgacaggcttgggtcctcacccagtcggttcagatcccctcgatcatgctattcagtagcagaaaaaataaagaagacagctcattgggaggttgatgttcaattggagttgtttcacacagatataggcgcaaatcgtctatctggtggtcttttcaagggaaagactctcttgtattcagacttaaagcatgtgctattgagagttactcccaaatatttaccagatgctgaggaaaacttgattctggtttcttctcatattgacactgtttcgacaacggaaggagctggagattgcagttcatgtgtgggagtcatgttagagcttgcacggggagaggcccattgggcacat

SEQ ID NO: 281102 - DNA, 418 bp, Zea mays
agctcgccctcgtccagtcagggagtgcgctcgacggccgccgccattagtgatttagtgttgagagagggagagaatctaaagtgaccggacgctgtccttccttgctgatcggcgacacggtccatccctccctcgctcgctagggttccttttcgtccatggatcagagcttcgggaatctcggggccggagctgggagcagcagtactcggcgctcctcgccgtctacctcgactgccagaaagtgggcgcgccgccggacgtgctggagaggctgacggccatggcggcaaagctggacgcgcgcccgccgggccgccacgagccgcgcgacccggagctggaccagttcatggaggcgcactgttacatgctcgtcaagtaccgggaggagctcacccggccgatcgacgag

SEQ ID NO: 281103 - DNA, 483 bp, Zea mays
cccacgcgtccgcccacgcgtgcgccccacccaacccctgtgagctgtgacacaggtgtactcctctccccactccaggcgctcacactcacatccccttccctccacaggaatccgccgccacaatcccctccgctccgcattgcgggattgcgccgagcacgagcaccctcctccccgaaacctcttcttggccctgctttcggtggtatggtgcgatgatgaccagggcggctgtgctgctgtccctcctctgctgcctcgccgccgccggcgaggcggcgtcactggtgggccagggcgaggcggcggagctggccgtgtcggtggacccgtcgtggcgcttccccagccagcggctgcgggacgcgtacgtcgcgctgcagacctggaagcagcaggccatcttctccgaccccaggggtttcaccgccgactgggtgggcccgggggtatgcaactacaccggggtcttctgcgcgc

SEQ ID NO: 281104 - DNA, 810 bp, Zea mays
tgcaactccgacgtcatcgtccagatgctccagccctaaccgcgcataaaccccgcgccgccgctgccgcctcctgtcccggtcggatcctccgcgccgctcgcgccgccctcatcttcccagccccaacgcgacgcaccacaagggccctcgccatgtcgaagaaagtaggacgagcgaagaaagcagcgggcggcggcgagctgtcccgcttcctggagtcgcatctccagaccattagcgacaccttccagatgatggcggagtcggctccgggggccttggagcggacggagtggtctgaggtcgttaagctcggcgaccaggtctccaggcaggccaccgtcgctggaatgctctggagcggtgacttgcctgatgtagagaccctcaaagagaacatcgttgcttatttcaacatcctacagggatttcttttggtttgccacggaagcatggtcggtgctgggcctactctacacaagtccatctttgggtctgcaaaagacgtggttgactctagcttctcattgttcaagcatgctgtctctgcttatgaatctcgcagctctgaccgcaacacaactatacccccggtcacaggaactgtatgggaagcttgtgctgctctcaagaaggtgcctgcatcaaactgcattgccataggacgagccatgaccaggatacgtgtgtgtctgaaagatgttctcccagaaatgaatgagctccctatgggtggtgctggcgacagtactgctgagaagacttccaatggcgatgctcgcacaacgagttgttctgatagagatg

SEQ ID NO: 281105 - DNA, 443 bp, Zea mays
ctccggatcggatcatggcgacgacgcaagagcgagatgtggcgcagccctaacgacggaggaggcgacgtgaagtaactatgtggtggcggacgcaaagtcgacgaagactctctctgccgccttctcacggaagcttgattacgttgatggagtttgtcccaccaatgtcactgtaccacataatctatgagctctctccaccttcatcatcagaacctttctcaaacttcttcggtgtacacttgggagacttgagtgatcctaaaactttcgactaccttcaacatgctcaagctcgtcaaggaaaccagcaggcagcaacatcctgttcgactaccttatcccgccgatggggatggacaagtgcagcacgaatggacaagtgcagcgcgaacaatgtgggcagtggcaacgtacacaaggcggacatggtgatgaac

SEQ ID NO: 281106 - DNA, 502 bp, Zea mays
gctgcacgcctgcacgtaccggaactcggaattctccgagctcagagccacccgtccgttattttgtcatgtcaacaacgcaagagcgagatgtggcgcatccccagcgactgaggaggcgacctgcagcaactatgtggtggcggagcgcacaggccacgaagactctctctgccgccttctcacggtgaggccctgcactctcttccttcccctctcctatccccgcttgtggaggcggtcagggcggccaagcagagacgcggtcagggcatggtcacgacatgcatcagagacacggtcagggcgcagttaggcgatcagggcagccatacgtttttgtctgaaggctatcatcctcttttatcgaacctgcaagcttgctaccttacctaccccatccattccaaagctccactacaccagacggtcgtcacgaattcctatagagtgttggtcgataatttggacgtacaaatgatagtgttggctttttggctgg

SEQ ID NO: 281107 - DNA, 280 bp, Zea mays
ggaaggatggcggacggcaccgacgtgtcgccggagtcggaggcgacggcggcagccggcaagggcggggagatctggggaacgctggaggagctgctcctggcgtgcgccgtgacgcggcacggcacggcgagctgggactcggtggccatggaggtgcagacacggatccccgtggcggcgcggcccggcctcacgccgcacagctgccgcctccgcttccgccacctccaccgccgcttctccaccgtcggcagcggcggggacgaggaggccgagg

SEQ ID NO: 281108 - DNA, 687 bp, Zea mays
cccacgcgtccgatcagattgtattctcgatatattgacaaggtgcatatattgttccggttcacccatgaggaagcacgggatctaattcagcgttacttgacagaacatcctgatcctaacaatgagaacatggttggttacaataacaagaaatgtccgcccagagatgcaagaatgaggcttatgaaacatgatgtgaatcttggaagaagtgtgttctgggatatgaagaaccgccttccgaggagcattacaactttagaatgggagaataactttgtctctgtttacagcaaggacaatccaaacctgctttttagcatgtgtggctttgaagtccggatactgccaaagatacggatgactcaggaggcgttcagcaacacaaaggatggggtatggaatttgcagaatgaacagacaaaagaaaggacagcaattgccttcctgagggttgatgatgaacatatgaaagtgttcgagaaccgtgtcaggcagattctaatgtcatctgggtcaacaacgttcacgaagatagtcaataagtggaatacggctcttattggccttatgacatattttcgtgaagcaactgtccatacccaggagcttttggatttactagtcaaatgtgaaaacaagatccagacccgtataaagattggcctgaattcaaagatgcct

SEQ ID NO: 281109 - DNA, 456 bp, Zea mays
ggccgaggcctcgtgtggcccacgtgggcgccgcagaaggacatcctcgccaaccccgccgtcggcggcttcgtcacccactgcggctggaactccatcctcgagagcctgtggcacggcgtgccgatggtgccctggccgcagttcgcggagcagcacctgaacgcgttcgagctcgtggccgtcatgggcgtcgccgtcgccatgcacgtggacaggaagcgcggcaacttcgtcgaggcggcggagctggagcgcgcggtccggtgcctgatgggcggctcggagaagaaggggagggaaggcgcgggagaaggccacggaggcgaacgccctgagccggaacggcgcggccagcggcggatcgtcagacgggtcggtgcaaaaactggcgcgagagattttgcacaagcacgacgacaggtggtgtgccaccggacgcggtgagagcatggg

SEQ ID NO: 281110 - DNA, 482 bp, Zea mays
ctagatcatatcgatcgccatatatatagtagggagcggctcgcagggcaagaacgaagcagatggcggtgatgagccgccgccgcgtcatccagctcgtcctcgttggcgtcgtcgtcttcctggtggccccgcggctgtcgtggaaccttccgggcggcctcgagaagctggggctgcagcagagcccggcggcggtggcggtggcctgctgggcggctgcggtggcggcgtgggcgtacgcggtgtcccggccccggcccgtgtacctggtggacctgtccgggtacgtggccgggcgcgtcgcacgaggcgtcccgcgccaagacgatcgcccacttcgggcggtgcgggcggttcagcgacgagagcatggcgttccagaagcggatgctgaagcggtcggggctcggggagcagacccacttcccggcgtcgctgatcagcgtgcccgtggacatgtgcctccgcacggcgcggga

SEQ ID NO: 281111 - DNA, 502 bp, Zea mays
catgaagtgctttctccccggcagcttgcagcagatgctggaggcacagcagcgccagatgctcgccaccgagctgaacctcggctaccaactggcgccgcctggttctgacgctgccgacaataaccctcatcatcagttctaaactggatgcatgcacgagaagcttttcaagcgaactgtgaacgatggaagctggctgttgcctctagatgttcttggcttccatgacctagcttattatggtgtgtattgttgttgccttttgtgtgtgattctccttgctactctactgatggagaactaaacctaatcgattggacataatgatcaaatgctacagatcctgtgatcctgtgatcaggttaaggcaaaacatgtatgctgattgcttcaatgggtttacgagtgacgacaatgctatttgttgcttctattactgctcaaaaaaaaaaaaaaaaaaaaaaaaaaaaaaaaaaaaaaaaaaaaaggaaaaaagata

SEQ ID NO: 281112 - DNA, 1958 bp, Zea mays
catgcatctccctcttggaaaactgatgatctagtcaccgagaagagcatggatgtcaatgacaatgctaaagctgaaaatagtttgctagaacattctgtgccaacaaatagatcacccaaagatccagatgaacatcaagttgacaaagcagcaaaagtagctcgaaggaaacttagggagaaaaggcgtgagaagagagcaatggatttggttcataaagatgatgaagcacgtattaagctggaaaatgctgccattgagcgatcaaaagctgtcgattctgctgtgcttggaaaatacagcatatggcgaaaagagaatgagaatgagaattcagactctacagttaggctgatgagggaccaaattattatggctcgtgtctattctacgcttgctaaatcaaagaacaagaacgatctatatcaaaaactgcagactcgaatcagagaaagccagcgggctgttggagaggctaatgctgatgctgacctgcatcacagcgcaccagaaaaaatcagagcaatgggtcaagttttatcaaaggctagagaagaactttatgattgtacggcaatcactcagagaataagggctatgcttcagtcagctgatgaacaggtcaggagcttgaagaagcagagtacatttcttagccagttggctgcaaagacaattccaaacagcattcactgcttgtctatgcgtttaacaattgattactatatcctgccccttgaggaacggaaattcccaaggagtgaaaatttagaaaacccaaatctctatcactatgcacttttctctgataatgttttggcagcctctgttgttgtgaactcaaccataatgaatgctaaggaaccagagaaacatgttttccatcttgtgactgacaagttaaactttggagccatgaacatgtggtttctgctgaacccacctggcaaggccaccatccatgttgagaatgtggacgaatttaagtggttgaactcatcatactgtcctgtgttgcggcaacttgagtctgctgccatgaaagagtactatttcaaagctgatcgtcccaccactctctcagcaggttcttcgaacctaaagtatcggaaccccaagtacctctctatgctgaaccacttgaggttctatctcccagaggtctatccaaagttggataagatactcttcctcgacgatgacatagttgtgcagaaagatttaacagggctgtgggatgttgatcttaatggaaaggtcaatggtgctgtggaaacctgtggggagagttttcaccgttttgacaaatatcttaatttttcaaatccacacattgctcggaactttgatccaaatgcatgtggctgggcttatgggatgaacatctttgatctgagggagtggaagaagaaagatattactgggatctaccacaaatggcaaaatatgaatgaagacagggtcctttggaagcttgggacacttccgcctggcctcttgaccttctataagttgacgcacccactggacaagtcatggcatgttcttggattaggatacaacccaagcattgaccgttcagagatagacaatgctgctgtggttcattacaatgggaacatgaagccatggctggagctagcaatgaccaagtaccgaccatattggaccaagtatatcaagtatgatcacccttacatccgtggatgcaacttgagtgagtagatagtcgtgctgaaaaactgacagatgaggaagagcttattggacagaagtgttccacttgtccttgcggtgcgttgttttactgagcaaactggtactacctgaagctcttggttggacataacgacatagttgctcatgtgagagtagaccagacttagacacaatcacacaagaggattcactcacgtggaatacatttgccctacgttgaaattgatgctactttg

SEQ ID NO: 281113 - DNA, 533 bp, Zea mays
caatgaccaagtaccgaccatattggaccaagtatatcaagtatgatcacccttacatccgtggatgcaacttgagtgagtagatagtcgtgctgaaaaactgacagatgaggaagagcttattggacagaagtgttccactaccatgtccttgcggtgcgttattcgactcagcaaagtggtactacctcaagctcttgattgctttcctcccctcctctcccaagaaaaattcaccggtggctgttctgccgagtgatgtattatcctagcgatgcgttttttccttccattattagtaatatgcatttatattttccgtcaaaattagcaggagaaaaacttataaaatggatctgtggggctggtgtcgcgtgctgcttaaaggtatgcctagacaatcgagtgttgccggaattggatcctttttttgtatcagacgataaagtgggagtacaagccaaagcggaaggcatgaatcgaatggattacaggtttaaccctgagtcctgaccaatgtgaatctatttaac

SEQ ID NO: 281114 - DNA, 667 bp, Zea mays
aactttatcgagaacgaggtccctgccgccgccaaagccgatgcatcagctccagctgcgtatggtcacgcccagcgagagctccgaggttttttcatcagaaacaaaggattctggtgtgaaaagaaaggcacatgcgatttctgcaactactgaatcaacaaaaatacaaaatgctgcaagggactggagctgtgcactctgtcaagtgagcgcaaccagtgagtctggtctgaatcagcatcttcaagggaaaaagcataaggcgaagctggttcaatgtggagcgatcaaggtgatggatactaataaaagtggtttacatgtaaccactggaaataacaatggcgcaggcccaagtgacgcgcctaagaaaatccacatcctggtcgatggagaaatgcaccaggtcgtccaaaatagcaaccgtgtatggtgtgagcgttgcagggtcagctgtaccaatgccggtgccatggctgaccatctgcggggcaagaagcacagtttattgaataaagtctgggcgtcaataaaagccgtgagaaggaacaatggaattaaggaagattcagctactgctacatgtgagagaaaggtaaatgaaagcggccctgctggaattccagaggaagaggaacatgaggaggagggagacacatacatg

SEQ ID NO: 281115 - DNA, 731 bp, Zea mays
ggcgcctcgtcgcccgtcgacattccgttcgccttcctcgcccccatctctttctcgccgtgccactcccacctcttttcgctgataagcacgccgctactccccactccatccatccatccacccgccgcttttctctctgctttggagagggagccgcacgcagtggtttggtgccgctggtccgccagggtcctgggcgctgtgctcattccaccggtcggcggtgggcttttcaggcttcttcgacggtgtcgagagtggaggaaatgtcgacgacggagtgcgcggacctcggggaggagttctggctgccggaggactttttggacgacgacttcttctccgaggaggagaaggcggccgtggcagcccggagcgagagcgacgaggaggacagcctggcggggctctcgcgccgcctcgcgggcctcctcggcgacgggggagagcgcaaggctcccgcggccaacgcggaggtgacggttgggtcgccgcagtcgacgctgtgcgggctgcccaagtcggggcaggagagccccagcggcggggcgtccaagggcacgtcgccgccgtcgtcgcccctggaccagaggcccgccgacccgtgggatctgctctacgaggcggccggacaggttgcgcgcatgcgcgccgccaacagcgtgccggtgccggccgccaacggtttccacggccagagcgggttcgcgcagccgccacgcaagccc

SEQ ID NO: 281116 - DNA, 1433 bp, Zea mays
atcagtgtagtgaaactttatcgtttgctcgcttgcttgcttccctagtactgtcggcccttttctcccttcccaatccatccaccccctccctccccagcaagaaagcattgcatcccctctccccggagcggagagccggcgggccggcctcccatcgcatggccaccgcactgacgtgacgccgccgagggattgaggacccaagacctccagctggaggaatcgggagaggaaggagcggtcgcgcgcccttcgccacgtcttgcgtcgtcggggggcccggcccttcgccgacgacgacgagcacccaccacgtacgcccgccacctctccctccccttcatgccgcaccccaaaccctaatgttgctgaggaacagagatgtcgacgacaggcgaaatcctgaggtcggagctatcttccaggacgccgccgttcggcctgaggctatggattgtcattggcatctgcatctgggtggcgatcctcttcatcataggcttcatgtgcttctggtccatataccggaggaagcccaccaagtcgtccttcgacagtaccaatgacatcccggtgtcccagatcccggacgtctccaaggagattgcggtggacgaggtgcgtgagcacgctgccgtgcagaccttccatgtgcacgagagctgccgcgcgctggccgtgcaggagaagccctgcgagaaggattccgggagaatgctggggcacctggtcaggagcaagtcgagcgacgctgataatctcagccagtgcagctctgcggcgtaccagtgcgagagggctgcaagctcgtactctggcgacgagggcagctcgggcaacgccaggaggcagtatcccactgtctccgcgtctccgctggttggtctccccgagttttcgcatctcggatggggccattggtttactctcagggatttggagcatgcgaccaatcgcttctccaaggaggatgtcattggggaaggtggatatgggattgtttaccgaggtcgcctcgttagtgggaccgatgtcgcaattaaaaagctccttaataacatgggtcaggcagaaaaggagttcagggttgaggttgaggcaattgggcacgtcaggcataagaatcttgtacgccttctaggatactgtgtcgagggtatccacaggatgcttgtgtacgagtatgtgaataatgggaacttagaacagtggcttcatggtgcaatgcgtcacacggtgttcttacttgggaggcccggatgaaagtcgttcttggaattgccaaggcgcttgcttatttacatgaagccatagaaccaaaagttgtacaccgtgatatcaaatcgagcaatatcttaattgatgaagaattcaatggcaagctttctgattttggactggccaactcttgggtgctgggaagagccata

SEQ ID NO: 281117 - DNA, 588 bp, Zea mays
aaatttgcccttttcctcctgtagttccgctcatgtgcagcttcaggtccctgagttggctaacgtaccttttcttttttcctttcttgcgcaggtaaataaagcggttgggataagtttgtaaattgctttgtcaaaccaggacaaggttctgaatcaggggcaggcaacctctcgcgtagcctgttcatcttcatcagacaggcccaaggatatgtcgtcgtccaacaactctgtcagcgcggcgctgtcaggaacgacgcccgtgttccggctgagagtatggcagctgattgccatcgccgtcgggatagtcatggcgatcctgctcgtcattgcgttgtgcctttcgctgcggaggaaaaagaagacagtgaaagggttcgacaacacttcgctggccgagatcccgatcgtctccaaggagatcaacgtcgacagagtcgatgcgcagagcctacatgacggtgaagcgcccttcatgccggtgcaggataagtactcgcagaccaaaggcgcagggcagctgggagggcgtagatccgtcgacgtcgacgcgttcaggcagtgcagctcggtgtacaacat

SEQ ID NO: 281118 - DNA, 608 bp, Zea mays
ctgaaacaaactgagcaagctcttgatacaggtcgtgcataacaaacttcccttcgctgagagcatgagatggggaagggtggaagaagcaccttgacaccaagtcattgaagtaaccattggcgatcgcttcaaggctgcagtctccttcagcatccacaaagccctgcgcagtccacagctggactagcagatctttgtcgaacacgaagccctttggaaacaatgaacaaaacgcgaagctgcgcttcagcggcatggacaggtggtcgtagctcaccttcagcaccggcagtaccaggttcttcacctcattgtcagcccacaagtcgttattcaggacttcattccagtgctcccagacggctgaagtgctcaggacgctaccagctgcctctgccgccaatggcaagccgtggcatttcttggcgatcctctcaccgatctcaacgagttctttgtggacgttggcaccgctatttggcagtgcccgtcgctggcatacaagccagcagtcttcatctgacaagcatttgagatgatacaccttggtgctcaccatcctggcaaccttgttgcttctcgtcgtcacggcaaccgcacttcct

SEQ ID NO: 281119 - DNA, 460 bp, Zea mays
tttaggtgtaaggagacgttacaaggtagctggacaggattcagaagttacttattttcactcttccgcccacgcggccgattttgtattcgtagaagcccctcccttccggcaccggcacaatgatatttatgggggagaaagatcggatgttttgaagcgcatgattttgttctgcaaggccgctgttgaggttccatggtacgctccatgtggcggtaccgtctatggtgatggcaacttagttttcattgctaatgattggcataccgcacttctgccggtctacctaaaagcctactaccgggacaatggtttgatgcagtatgctcgctcagtgcttgtgatacacaacattgctcatcaggttttttgcaccttaaacttaagccgcctcttgttctctctctaaatacttaacccattagtatacttcattttgaaatcacatgtacttatc

SEQ ID NO: 281120 - DNA, 426 bp, Zea mays
cccgccgcccactatcttctacgacgaagatcgcgagctttaacaaggctcgccttgtgcggaaggtgtatttcagtgagatctccaagatgaagcattagggggtcaatcgccccagattttacgcgtagctaacttagtagggcacccataatccataatttattctctgtagttgtagcagcgacatagaggtgtcattctgtagcacattgtgtaacatgtaggagagagagaaacacatatccccattctttctactgaaacaccagaaatagttgctcttgctccataattcgttaatctgaacttctgaagccatgccaaggccttatattgatcctctgttgtcatattgataaaaatagggcatgtgaaaccttttcgcataccagtttaacacatattttatatataagttatcgt

SEQ ID NO: 281121 - DNA, 806 bp, Zea mays
atcggtttctccatgtcgcacgacgagctcgccgacaaggagccgtcgtcctccgaggagtttcagctcgcgccgacgggttccaagttccggagcctcagccctgcaccgattccgatcccagcttctccgggcatcagatcattggtcgactcggtctctgatgagacagtaaatgtagatgtcatggcctcacatcaaagtgaaaatggatcaatctctacagctagttctaccgttagtttactggaatcagagaaggcagcatatgaatttcttgctcaaactcctgtcagatcaaccgatgcacatcttgttgagttttcggaggccttgagaactgtcgcaaaagccttacgacgagtggctgaagggaaggctgctgctcaagcagaggcagcggagtggaaacgtaagtatgaattagagacagcgcacaagcagcggagtaaaatcagaggctacagcagttgtatcagtaatgacttggacaaactggccagcccactaaccctggagacacctacatctgatcaattaggatgttgcggaaagcatggtatatgtgcacatgagattctccaggacgaagttcctgggcctatcccaagatctaatcacaaggtggtggggagaaaggcatcatttaaactttcatggggatgtaatggggataaaaatggacaacataagcatgattttgtgtcctttgaaaaaggtgatataacaaccgcagaacgaagcaataagcagatcttactgaaatgggaatcgccaccacaaacagtgcttgtcataaccaaacc

SEQ ID NO: 281122 - DNA, 422 bp, Zea mays
gaactacactgccttccctgtcctcgtctagacctgaatctctctgatggtttggattcgtccatgattgatcctgtacgatgaaggatcagctcgtccaacgtttttcaaggaacgaactcaatctgaggaattaccttttcattggtcacctggggtactacgaggaatgacttcacgatagacgactcggttttgcgacgcaaaccaaacgccatggttaggctcagatgttggatcagatgattcctcgtggcttcgtgacgcaaaccaaacgacatggctaggctcagatgttggatcgtatgatttctcgtggcttcgtgacgcacaccaaacaggctggtaagtccgcacaccttatctatcatggtcattgttgagctgatcagtattggagttcgtgtgataagcttaatgga

SEQ ID NO: 281123 - DNA, 666 bp, Zea mays
cccacgcgtccgcccacgcgtccgggcttccgccagcgcccagctggaggtctcgctgttcccttcacgatacgcccccccaaagcggatcaaaccctagatctcgtcttgtcgccccgttcctccgatcccatcctatccgatcctcatggattcctcctcgtccagcctcagccagcagcccgagttcgactacctcttcaagctactccttatcggcgactccggcgtcggcaagagcagcctcctcctccgcttcaccgccgactccttcgatgacctctcccctaccataggtgttgacttcaaggtgaagatggttagcattggtggcaaaaaactcaagcttgccatctgggacacagctggacaagagaggtttaggaccttgaccagctcttactacagaggggcacaggggatcattatggtgtatgatgtcagtcgacgagagacgttcaccaatctttctgatatatgggccaaggacattgacctgtattcaaccaaccaggactgtgtaaagatgcttgttggaaataaagtagataaggtaatcaattctaaactctgtccgcaccttttatatcatgtgatgaagggtataactcgcggaaatatggacagaaggtggtaaagggcagtgattgtccaaggagctattac

SEQ ID NO: 281124 - DNA, 330 bp, Zea mays
ggtttgccttcgccttcacaattcgcaccacattattgtcttgtgttgcccgcaacccaaagcggatcaaaccctagatctcgtccccgttcctccgatcctcatggattcctcctcctcctcgtccagcctgagccagcagcccgagttcgattacctcttcaagctgctgcttatcggcgactccggcgtcggcaagagcagcctcctcctccgtttcaccgccgactcctttgaggacctttcccccaccataggtgttgacttcaaggtgaagatggttaccattggtggcaaaaaactcaagcttgccatctgggacacagccgg

SEQ ID NO: 281125 - DNA, 795 bp, Zea mays
gaaaagttggtttgcctgtggacagcccaaacaatcgggctggattcatacagagtcccaatcctcatggacatgctacaatgatgccaggcaactctggctccatccctatccagaactcactgccacctgttccatctatgcaacaattacatgccaatgtgccagtgtcaccaataggctcgctacctgcaaatccattcaatgtgccgaccagtgctcctgtactttgtaacagcacttcgcctatgctgcccagtcatgctttggtcaacccagctcattcttccatgccaatgagaccgttcattcctccacttcctgaaggtcctccaccctttcagcagcaaacatcaagtgctgtcacagtgcagcctttagatccttctagccagcaatctagccaacaactactggctcaggaccttgatggagatcctcaaaaacgccttcaagcaacactgcaactggcagcaaccctgcttaagcagatacaaaatcaatcaaatcctggtggccagaaataaatataaggtattggtaaatgtctagctgcaaggatcatcatatggtgccatcctgaggagctttaaacttactgttgtggttttataccatcacctcctgtgatttgaatgtttatgatgagtggtttccttgcaaactacaatctccattccgaattctaagacgttttggctttcttatgtacatggttttttgctatgcatccagatatacattggctagaaaacgttgaaaggtcttttaagttggaatggagggagttagctg

SEQ ID NO: 281126 - DNA, 337 bp, Zea mays
gagatcctcaaaagcgccttcaagcaacactgcaactggcagcaaccctgcttaagcagatacaaaatcaatcaaatcctggtggccagaaataaatataaggtattggtaaatgtctagctgcaaggatcatcatatggtgccatcctgaggagctttaaacttactgttgtggttttataccatcacctcctgtgatttgaatgtttatgatgagttctaagacgctttggctttcttatgtacatggttttttgctatgcatccagatatacattggctagaaaacgttgaaaggtcttttaagttggaatggagggagttagctgtcccctgc

SEQ ID NO: 281127 - DNA, 1052 bp, Zea mays
atgagcttgatggacaagagacaactagtatacgaagttgcaagatggccgcaaggtgccgtggagattcttaagtgctggactcgaagggaacttcttgagcttatctgtgttgagttgggcaaagagaggaagtataccaatgtcccaaaagtctaagatgatcgcttatctcttgaaattagtttcacgaaagagtggaaagaatgggcaactcaaggatgataatgcaaatgttatgttattagagcaggataacaaagatgaaacacaaatgaaggaatctgaggaacaagaacaatcacgaccactcaaaactgcaaactctgactcatcaatacgtagagaggctcatgcctgttgttcagtggtgtgcagcaatgttgcatgccaagccacacggaatgcaggagataattattgcaaacgttgctcttgctgcatttgcaataaatatgatgataacaaagaccctagcttgtggttggtttgcagctctgataatccatacagtggttgttcatgtggtgtctcttgtcacctaaactgtgctctaaagaataaaaaggctggcattgtcaataatggctgcagcaagttagactgtagtttctactgtgttagctgtgggaaaatcaactggctaatgaggagtttgcagaaacaacttgcaattgctagggaggcaagaagagttgatgtgctttgtgagaggctgtcattgagcccataaatgggtaaaaggatctgaacgttataaggaaataacgagcataatcagctcagctgcgaaaacacttgaaaaagaagttggtggtgcattagatcaggtttctgcgatcaccgggcgtggcattgttaaccggcttacttgtggtgctgaagttcagaagctttgttcaagtgcattagaaattgtagactctacagtggataacatcttggagttcgagtcaaataatagtccaaaactcttaggtccccagccccaaatcctttttgatgagatcactcgattttctgtggtaattgtgttgaactatcaggatagc

SEQ ID NO: 281128 - DNA, 601 bp, Zea mays
cccacgcgtccgccaaaatgactataagagaagtcctcgctactttgaggttggtgataatagatctggaaaaataactccaattcaagggtttgaagacaggaggttttcagagcccagaaagcgagatagtgggtctccagacttccagaaagaagctgatggttctagtcctgttgtacggccagtgagggatatattgggtgacaacgctcctcaacttcgggtcggtgaaccttcaaagccagctactgagcctgcaaagccaactgtagtcagaccaattgatcctccaaagccaagtgtagtcagaccaattgatcctccgaagccaaatggaaccagggcaattgatcctccaccactgacaaagacaatatctagtgccagcagcattggttctgcagaagggacatcggaacagacaaaggtggcaagtgcagtgagttttgattgatttcagtgcagatcctgaccctgagtccacagcaccaccacagccgacccctatgacacaacagcctccagttaatgcagtagcaccactgcctattcttgaccaaaggaaaagtgttccttctgtcagtggtggtgattgggc

SEQ ID NO: 281129 - DNA, 482 bp, Zea mays
  unsure (1)..(482): unsure at all n locations
cgggggctcagtgctggatggagagggtttgccgtccagcagaagctggtggatggagattgcctggtcttccagctgattgagcaaacaaagttcaaggtctacataactagagcaagttcctactacgaaagcgaggactgatgaaactagtagcttgtaatctggtgattggagctcagttatggaggtggctgcgttggacaagcttgcatctgggaatcgctggggtgtcttgaaactttttggtggcagaaagttagctgatgtatgaaacccagtatctcctaccaattgttgctgatttgtgtacttcttgggcttaccacttgcacggttcagaaacctgcactatgtaagggggttgttggtggcagctaacctcgttttgtaaatgattggtgcccgtccatgtttctcttagcgttcattaaggcccctccgttcagtttttaacaaaacgataaaantaaaaaaaagaa

SEQ ID NO: 281130 - DNA, 456 bp, Zea mays
tggtcttccagctgattgagcaaacaaagttcaaggtctacataactagagcaagttcctactacaaaagcgaggactgatgaaactagtagcttgtaatctggtgattggagctcagtgaacattacacaattttcagaatggctgccatgatgttaaccggtttccttcttcatccactcagttatggaggtggctgcgttggacaagcttgcatctgggaatcgctggggtgtcttgaaactttttggtggcagaaagttagctgatgtatgaaacccagtatctcctaccaattgttgctgatttgtgtacttcttgggcttaccacttgcacggttcagaaacctgcactatgtaagggggctgttggtggcagctaacctcgttttgtaaatgattggtgcccgtccatgtttctcttagcgttccctctggcctgttagttcaattttt

SEQ ID NO: 281131 - DNA, 412 bp, Zea mays
gtcggacatacacttcgctgtgtgtctgtgcgctcgatttcagacttccccgtgcacttcttacaagcaggcggtcaaacagatcttgaggtaatcataattagagcaagttcttactatgaaagtgaggactgatgaaactaatagcttgtaatgcggtgattggagcacagtttatggaggtgggctgcattggacaagctcgcatctggaaattgctgggtgtcttgaaccttttgggtgacagaaagttatctcatgtacaaaatgtttacacagcccagttgctaccaattgctgatttgtgtacttcttgggcttaccacttgcacggttcagaaacctgcactatgtaagaggatgttgatggcaattgacctcattttgtaaatgatcctcgtttatcttggat

SEQ ID NO: 281132 - DNA, 491 bp, Zea mays
cggacgcgtgggcggacgcctgggctcctctcccaccaccgcccccgccgtcgcctgctgttccatgaaggactaatccgtcggtccacttctcagctatggcgcagctcgcggtgcggtcgctgctgctgtccctgctcctggtctcgccagttgtggcttcacctggtattgtgaagctcaactcgtcgtcgaccctcttcggcatcgagttcccgccgttcaacaccgccgtcgccgcgaccggctgcgacagcaagctggttgcagccgacgaggcgggggatgagcagaagcagccggcgagctcgtccccgtcgctgcagctgcgcatgaagcaccggtccgcggaggggggcaggacacggaaagagtcgttcttagataaggccgagaaggatgccgtccgcatcgagacgatgcaccggagggcggcgcgctcccgcgtggcccggatgccggcgtcttcgtcttcgcgcgggcgctgtcgg

SEQ ID NO: 281133 - DNA, 647 bp, Zea mays
ctcttcattgttcaactagaagatctttcttctggatctgtattttctatcatgtgcagcccggtaaagtctatcgctttgagcagcaccattttagccttggtgctggtttcaagagctgcttttgttttcccactatcctttctatcaaatttgaccaaaaaactccaaatggaaagatatcttttaggcagcaggtaagtctttaacttagcaacatcttaacttcttatgttctcttgaaacagttgttatattccttacatgatattggtcatttaggttattgtttggtgggcgggtctcatgagaggtgttgtgtctattgtgttggcttacaataaggttaatcttgtgtttggtctatctggtttgagctttggtctggaattatgttactgcttttgtttcctctatccattccaaaacataggacattttttgttgtcgtaagtcaaaaattctctaactttgacagagtttatagaaaaacaaaccaacatcaacagccttcatttcttaatcttatatagaagttgcagtattttagtctaatagatggacatgttttaaattttgaggcattgagacaatttgcatcatgaaggcgttcgacttaatgtttccaaggttctgtggcagtgcga

SEQ ID NO: 281134 - DNA, 820 bp, Zea mays
cgtttgattccagcgagaaggaaaagaatgtgagagcatggctttgtcaatcagaagctgattaccaggacaagttactggcatgtggagctataattgttgcacagttacgagtccgagttctggaggaaacccaattcacatgctctgctgggattgctcacaataagatgttagctaaacttgtcagtggaatgcacaagcctgctcagcaaacagttgtcccttcttcatcagttcaagacttactagcatcactacctgtgaagaagatgaaacagcttggtggtaagcttggaagttccttgcaggatgatcttggggttgagaccattggtgatctcctaagttttacagaggaaaaattacaagagcagtatggagtaaatactggaacttggttatggaagactgccaggggcattagcggggaagaagttgaggaccgtcttctcccaaagagtcacgggtgtggaaagacatttcctggcccaagagcactgaagtacagtgcttctgtcaaaggctggctggatcaactatgtgaagaattaagtgaacgtatccagtctgacctgaaccagaacaagagaattgctcaaacgctaactcttcatgccagagcatttaagaaaaatgaacatgattcatatgaagaaattcccttccaaatcctgtcctttgcgctatggaactgggaaaattcaggaggatgcaaagagggctattgaatctggcctccatgagttttaagaatctcagaacactggatggagcataacatccctttgtggcactgcaagcaaaataattgatatac

SEQ ID NO: 281135 - DNA, 658 bp, Zea mays
cgtacgtgtggggtcgtgcgcttgtccctttccacggctccaaacaaatgcggaggtctccactcttctctcttcctccatcttatcatcgcccacgtacacacccaattcctcgcaactgggctcccccgcctccacgacactgccccccgcctcaagtccgccgcctccattcttcagctctcctatcctccgtagtctgcctgtacctattggctgaagaagagctgacccccactttatcaagagttgctcaacaatggacactggctgcctgtcatctatgaatattactggagctagccaggcaagatcttttgcggggcaacttcctcctcagagatgttttgcgagtagtcactatacaagctttgccgtgaaaaaacttgtctcgaggaataaaggaaggagatcacaccgtagacatcctgccttgcaggttgtctgcaaggattttccaagacctccactagaaagcacaataaactatttggaagctggacagctctcttcattttttagaaacagcgaacgccccagtaagcccgtgcaggtcgtggttgctggtgcaggattggctggtctatcaacagcgaagtatctggcagatgctggacataaacccatattgcttgaggcaagagatgttttgggtgga

SEQ ID NO: 281136 - DNA, 481 bp, Zea mays
cccacgcgttcggttttcatcaaacgttactgtacacttgtgtctttcaagagaaggggactgggagaaggattgggactggagtcagacgtgatggtttgtggttcatcggtcatgaagaatcagcattgagagcagttgctgaaagggatgtgaaggaaattctgctacttcattgtcggttaggacatatatcttttgagaccttaagacggctgcaccctgctatgtttaagggagtggacaaaagtaggcttgtatgtgatgcatgtgagcttggcaagcatactagatccatctatcccagtattggtcttcgcagttgtgaaccatttactatgatacactcagatgtttggggtccttgctctgttacttctgtgaatggtgctaaggtcgtttgtcacctttattgattgttgcactcgtatgacttggatctatattcttaagcataaaaatgaggtgttccagtgctttt

SEQ ID NO: 281137 - DNA, 571 bp, Zea mays
cgtgattctaaacttacaagattgcttaaagattcatttggaggtactgcaagaacatcattggttgtgacaattggtccatctccaagacatcgtggggaaactaccagtacaataatgtttggacaaagggcaatgaaagttgagaacatggtgaaattgaaggaagagtttgattacaagagcttatgtaggaaacttgatattgaattggataaattaattgcagaaaatgaaaggcaaaggaaacattttgacgatgaagttgagagaataagagctgaagctcaatgccgcattgctgaggccgaaagggaatgcaaaatcacattagagaatgagaaaacgaagtgccatcaagaatacttagactcaatcagaatactggaggagaagtggaaagtacatcagcaatcacccaagaaacaaaatgaagaggccgagtctacatccaatgataccggagaagtgcataacttactgcagaatgagaaaatgctacgtcaatcggctgaagatgaggccagtgacctcaagaatcaagtatcacactggaaaaaactggaggcta

SEQ ID NO: 281138 - DNA, 724 bp, Zea mays
gttatccatgtttctgaaatcgaagagtggaatatggtcaaaagcctacatatcaagacggtggatgaacttggacttccaagatctgtaatacaagacatgctagatgaactggagcaactattgaaaggtatcgctatgatgaaagagctgacgcctaggaccagtgactaccttgtttcatttggagaatgcatgtccaccaggattttttctgcttatttgaacaaaattcgtgtcaaggcacggcagtatgacgcatttgatattggtttcattacaactgatgaatttggtaatgcggatatcttagaagcaacctatcctgctgttgcgaagagacttcatggggactggatacaggatccagcgatacctgttgttactgggttccttgggaagggctggaaatctggtgctgtaactactttaggccgaggtggtagtgacttgactgctacaaccattggtatggaaagatgttgatggtgtacttacttgtgatccaaatatctacccacatgcaaagactgttccatacttaacatttgaagaggccacagaacttgcttattttggtgctcaggacttgaaccctgtatagtgtgaccaggctgcttctcagtgaataaacaaatctttcagttgcatacttctcaaaaacgaaagatcctgttcagtagataaacctctgttccctttttaccttttaaagctatattga

SEQ ID NO: 281139 - DNA, 480 bp, Zea mays
gtatcatccatggagtggagttgattgccagtttgacagcaccaaagggaactggatcattgatggattaggtcttgacaaccaaggtttaaaaggggtcatacctagtgacatatctaagttgcaacatctacaaaacataaacttgagtggcaatagcataaaggggaacattccaatctccctgggtaccatctctgtggtgcaagtactggatctgtcatacaatgagcttaatggatctattccagagagcctcggcgagctgacatcattacagatactgaacctgaatggcaatcgtctttctggtcgtgttccagccagtttgggaggaaggcctctgcacagagctagatttaacttcacggacaatgccggactatgtggaatacctgggttacgtgagtgtggccctcatctatccgtggctgcaaagatcggcatggctatcggcgtgcttttagctattctattcct

SEQ ID NO: 281140 - DNA, 555 bp, Zea mays
tgaatatttctccttttccttttaggataacacaatccgcacacgtcgacatgagcttgttagcacccttctgtcttcataccgtaatagtacctgtgcatcactaccaaaacggatcctaaaatggactggaacctgtataagaatttcgaagatggcagatgaacttctgtggcgtatccaggtatgaagatgcagtcaggattctaaagacactacttagcacagttgcttgtgatagacggcgaggatattgggcattgaggctatccattgatttggagcatatgggtcgttcaaatgagagcctatccacagctgaaggaggggcaattgatccatgggtccatgctggatcaaagttcgcgctgcaaaggagagttctgcgtttaagcaaacctgcacgacgctggaaagttcccagttacgctgattatgttaagagaaatataagagaggtaagcattgaaggaaggccattgaattgcgagacaggagcaaagaatgtattttactggtacgatggggaactttgtggggtagaacagttggctt

SEQ ID NO: 281141 - DNA, 573 bp, Zea mays
atctcggacccgcaaacggacctcacccacccgttcctccatctccgccccttgccggcgatggcaccggcgccggcagcggcctcggcggggcggaagtctcatgtcaccgttctcctcctctacgtagtgtgcggcttgatcctgctgcttctcctcgcctcctactcgccccgcctccagccccacgcccacggccgcagcctccaccgccgcctcaagctccacccaaagagctccttaccatccgacgcttcctccggtgggaacggggggcaacagaagacgcagcaccaaaaccaccatgcggcctccttcgacccgaccatcgccgagctggagcgtcggctggacgacaaggagtgggagcgcgagcactacagcctcctccacggcggcgagccggatgaccatatgaaggagtgggaggagttcctcaaggaggaggaggacttcatcaacgacgacgaccgattcaacatcgccgaccgtatccgcgcgctcttccccaagatcgacgtcgccccgcaggacggattcgtctccctcgacgagctcaccgcctggaacctc

SEQ ID NO: 281142 - DNA, 378 bp, Zea mays
tccacgcgtccgcccacgcgtccgaggacgcaggggctgtcagcctattgatattaagcatatgctagctggtgcacctttaacggctcagggaacccgcaacactgggcgtaaagaaaatacagctgcatcgattgcatgatgttggtattggacatcagaagggataggcaccaaggatctgctcgagcttccttacaaggatagttcgttgcttgtgcgctcatatttgcaacaccttgcgatgaaatctttcgcgaaagaatttgtgcttggaacgcaaccttcctaatgtaaggggtatctgtatatgcaaacataggctgcactcaccagcacgcttacattcagttgctgaaagaaggagtacacaacttc

SEQ ID NO: 281143 - DNA, 614 bp, Zea mays
  unsure (1)..(614): unsure at all n locations
tcgaaacgcagtgaagcgcatcgagtacgaggcgagcgcgggggcgtccgcgtcgtggtcgtcctcgtcctccgcggagcagcagcgctcgccggggctccggccctcgcgctccctggaccttgcccccggcgcggacctccgaatcagcgggagcgtggagggggaggtcgacgagctctgccgcagcctggggctctcggggcccgaggatttcgccgtccccgtcgcggcctgggaggcgcgcaagtcgcggtctaactccgacctcctcccgcgctcccgcctcgacccgtccacacccgccgacgaaacctcgccgattgcgcgggcggtctcggcgcccggtgctcagccgactcgctccttccctgcccccattcccgaggagtcactccactcttcgcctgcttccaccgccaccgagtcggcggaggagcctaccgttgcggcgcccgaggagtcacccaacgctgcccctgcctccgctgtcgtggctcccgtcgggggtttgcccctgccttcgncaaggaggggaggcggggaggtagggatacggggtgcacggccgcctttactctccccgcctccgccaattggtgcactagctcctc

SEQ ID NO: 281144 - DNA, 589 bp, Zea mays
tgcttccaccgcaacagccgcctggccgcgtacacgggcgtcattgacgactcgggcttcacgtcggacggggccaccgagggctacggctacatgaggacgacgacgcacgcgaccggcgccaccgcgggaaccaaggtcggccgtggcttcccgcagcacgtcaggagcccgagcgcgagctggataccgagcatcggggaggaggacgatgaggaggatgaagaggttgtcgtcgttgaagaggaccgcgtgccgcgggagtggacggcccaggtggagcccggcgtccagatcaccttcgtctccaccgccggcggcgctggcaacgacataaagcgaatccgcttcagccgcgacatgttcaacaagtgggaggcgcagcggtggtggggagagaactacgaccgcgtggtggagctctacaacgtgcagacgttcagccggcagcagggcgtctcgacgccgacgtcctccatcgacgatgccacgcagagagactcgtcgttctactcccgcgccggctcgacgagggacagcccggtgatcctgccgccgacagccgtgggcagggagcagccgatcgccc

SEQ ID NO: 281145 - DNA, 548 bp, Zea mays
ttgttgcatcactgcggcaatttgaggggctggaggacgccgacgacgtgctcgtcaactcattccacgagatcgaacccaaggaggcagattatatggccctaacatggcatgcaaagacaataggcccaaccttgccatcattttatcttgatgatgaccgtttgccgttgaacaagacttacggtttcaacctcttcaacagcagcgagtcatgtctggcttggctcgacaaacagcttccgtgttctgttgttcttgtatcctatggtactgtctctgattatgatgaagcacagttagaggagcttggcaatggattgtacaattctggcaaaccattcatttgggttgtgaggtcaaacgaaggacacaagttgtccgatgaactccgtgacaagtgcaaggaacgtggccttattgtttcttagtgcccccagctggaagttctagcacataaagctacaggttgtttcttcacacattgcggatggaactcaacattggacgcaattcgtaatggtgtgcaatggtggccataccacact

SEQ ID NO: 281146 - DNA, 519 bp, Zea mays
cggactcgtggggatgaggattgttcaatttgggacattaatgacaatggatgagcagatacaacaggctagaggtaagggagatgaatcagcaacacagatacgaagtgaatatgaggcaaagatagctgccaagaagatctttcgcaatgtagcaaagccaggttccaagtacatatacttgtcggacttgatgagattcatgaggcaggaagaggctgttaaagcaatggatctttttgaaggggcacaggagcacagcagggtcagcaagaggtctctcaagaactgggtggtgaatgcatttagagagcgcaaagctcttgcccttacactcaatgatacgaaaactgcagtaaacaagctgaaccagatggccaacgtcgttgtggggatcattgtgtttgttctctggcttcttattctgggaatagcaacaacacatttctttgtcttcctaagttcacagcttctctggcagtttttcgtatttgggaacacattgaagacagtttttga

SEQ ID NO: 281147 - DNA, 603 bp, Zea mays
  unsure (1)..(603): unsure at all n locations
gccacgcgtcctcggtcccgcatcgcgttggtccaccaccggctcccgggttgttgcggtcgccttagttttttgtcgttgtgtcgtcgtcggtcgggggtcctgttttgcccggacccgcacgcatgctggttgccaagaaagacagggcgagtgcgcggcgcccagctccgaccgtgcttcgtagctcatctggccggggacgggggtattcgcgttgctcgcttgcccggcgggtagctggtagcctgtaggcggggatcgggaacgggggtgtttacaggccatgaagtataacacgaggaaagacgcgagcggtggcggtggcggcgcgccgtttgccgtcccatgcgtcgacatcaagtcgttcgtggcctcgctcgccttcctcacgctgttcgtcgtgttctggcagctccagccctacggctccgtgctcaccgcggctcgcacctncgcctcgcccccttgcaccctcctccccacaaccgctgccatcgacctcgcctctcctgataccaccagcagcactgccgcaaagacggaccaaccgtcggggcagcggcggcggctgtttcagctactgccgccggcgcaaatgct

SEQ ID NO: 281148 - DNA, 616 bp, Zea mays
tcgcttacgcgtccgcccacgcgtccgcccacgcgtgcgagaaaaccctctacaagcccttttttttttgttatccggtccgcccaggctcttcccattctccggcgcttccctctgtcccttggctcgctctggcgtggttctcccgtcccctggtgcgtgcgcgcttctcgctctctcgtggcggcgactgggcgactatcgcctccgccctacaacagttgctcaggtcttctttgggcccttcgccggggacaagcacccaccggagaaaatcaataaatacatcggcctgaaagaatgggttatggcatgagtaggctagacgatgaatactatgaggctgaagggcagaatactggtggatctggctcagttcaagtgaacgatgagtttgcaacactacataatgatatttttcatatgacccgaatgagatcaggacttactgaaagctacaagtccatgggtaccaacagaggcataatatcaactgccaagttattatctcgaagggaaattgattgttctggaaaggggatgttcttttctggtgaccgtgcatttgtttaggtcgtcatgttccgatgaacaatccctgaatattggataggat

SEQ ID NO: 281149 - DNA, 525 bp, Zea mays
cccacgcgtccgaaaaattcaaggatgttgtcaactggctaaggcaaaatcaagcaggttcaatagttgtttcatccccaagctcactgaaggatgataagtccaatctgccagcagcagatgatagcaagctcttagtacagccaagttcagataacaaacagaaggctccaattatggcttctagttcttcatcttttcagaactcaagcttaccgaaccttttttcatcgccttctcagcaaaaaacaccagattacagtggtatgtttgctgacaagaagaacacgtccagtgatagcagtaaaccagctttccagtttggtggaaataatgtcatatttggtggcaagaaggatgcacctgttgacagcagtaaacctttccagttttggtccggaataatggcataatttggtgacaagaaggatactcccagtgacagcagcaaacctttccattttggtgcaaacaagggcatgtttggcgacaagaagacgacaagtggtgacagcagtaatcctt

SEQ ID NO: 281150 - DNA, 527 bp, Zea mays
gcggccatcgcggacgtcgtcgcctccggtgccgacgcgaacctggaggcggcgctatccgcgctctcgccaccgctctgcgaagcggtcgtgctcgctgtgctccaccgcttcaagcacgcacataggccgtcctaccgcttcttcaggtgggccacagtgtccggtggctttacccacaccaccattacctactgcaagatgttacacatcttaggcaagacgaggcagttcgagtcgatggttgcgatgatccaagagatggggaaggcgggggccctgtccatggacgccttcaaggttgccattaagtccttcgctgcggctggtgagatcaagaatgcggttggcgtgttcgagttgatgagaaagaacggtttcgatgatgggggtggaatcattcaattgcttgctcgttgctttagccaaagagggattaggtaggggagggccaggcaaggtgtttgacaaaatgcatggccagtactctccagacctgcgctcttatactgcactgatgctggcat

SEQ ID NO: 281151 - DNA, 514 bp, Zea mays
tttttgtcaatggatctttagcttttggtggcatgggaggtggtgcagatagtgttcatcctgctgacactcttaagtgtcttgaagatctcagcaagattagtggcctaaaactccctgacttcactgagctcctgccagtgacaatttttaggtctgaggtattaggcaacctgttggccactcaaaagttggatgatcatgacattgaaggggtaattcatctgcactacaacataatttctcagccttgtttagtctgcaaaaacctaactgatgtagagctattgcggaagtacactttcttgcattctcttccgttggacaaaagcctgaagatcgttagggacttcctcatttctgctaccgcaaaggactgtagcctgatgatcagctttcggccaagagagaatggtagcacagattctgagcatgattcagtgtttcttgaatcagtgaagcgaacctatgaataccaggcatatttccttgatctggatgggaaacctttgga

SEQ ID NO: 281152 - DNA, 574 bp, Zea mays
tccactcgtccgcccacgcgtccgtaactatccatcgcagctggcgcaaagaggtgttcaatgacaggatgcttgttgatgtggtgctaaacattgtcaaggcccttgaagctaattttgatgtttggtccaaggcatatgacaatgctacgctctcgtatctcttcatgatgaatactcattggcatttctttaggcatttgaaggctactaagttaggagagatcttgggtgatgtgtggctgcgagagcatgaacaatacaaggactactatttgtcaatgttcatcagggagagctggggagcactttcgccactactgaaccgggagggattaatactgttctccaagggccaggctacggcaagggacctggtgaagcagcgcctcaaaacattcaattcaagctttgatgagatgcattgcaggcaatcatcatgggttataccagacaaggatttgcgggagaggacatgtaatcttgtggtgcagactatcgtccctgcctaccggagctacttgcagaactatgggccacttgtggagcaagaggggaacgccagccagtatgt

SEQ ID NO: 281153 - DNA, 978 bp, Zea mays
ttccttacaaagcacgagccacgcacggcccccgctgcctcccttccgccgccgccgccgccgccggcgcgccaccgtcgctgctctcccgccttcaccgcgcccaactccaatccttgcctcccccgcgcgcttcagcctcttcactccccatcgttttcgcctggccagatccaggtttccttgaccgagacctcgcctgctttacgcctccggtcggattcttcgccgtccttgtccccactgggcaccgctggggtggagcggagatcggatccgccgggagctgattccttctctcgcagtctagtttgacgcggattcatttgctggtcggcatagcatgatcctgcggtgattgcggatagcttgtgcaagctggtggcttgggtgttgtctttttaatctggcctaaagatatcctgagacggtagcgtcacatggatgctagtacagaggttactgatgctattggtgcggtgggctttgacaatggggccgcggggaagttgccgcccagtgatagtgtagaggggcacgcagaagaacacgatgtgctggctgatggagcccattcgggcgagagcgaggtgatcaacccatctgaagaagtagaaatggaagccacctcgcagtcccaggacataaagcctcgagttcctgagggggttcaaggccattcaatgaaggttggtactaaatctcagcgacagagccctcgaggcggggataagagtccaactaggacaagctcttttagtccttcttatcctaaggcgcccattgcacgggtttctgatccagatctagttgattgctctttgagcaatggtgatgctggttccagtaagaaaaaggccgagaagagcagtttccgcccagttgccaaggagaccccatcacttgaggactcaaatgagaagaaaaaaactcagaaggcatcaaaccaacattctgtcaaaaaggatattgaagaag

SEQ ID NO: 281154 - DNA, 471 bp, Zea mays
gccaactagttcattacaaaggccaccctgaccccttaagaggggatgcccttaataacgctgttcgggaaactgcgaatgaggctattgctgcaattttctccacagaggaccctaaacctgctgtcgcaaccgaaagtcttggcaagcgcatacagggctttggaaatactaattacgagccatctagagatgacaagaagtctttccttagtgaacttagcgaagtagtgggtattggaagtgcatccatcaagcagggtttgagcaacttcgctgcagcgcatgcaataatgacaaatgacaacggcagcacatacaggagccctaatctccgtaggtctttgaccacggaatctgaaagatatggccggtatgatccaagtgaaattcaaagtgagagccgtgcctcatctgatgcttcaaagaacgtagcttctggttcttggggtccgacttccagttctgcac

SEQ ID NO: 281155 - DNA, 519 bp, Zea mays
ggaggaagagccctcctcgcctccttctgatgatgagctcggaagctcggccacatccaccaagaagcgatcggcgacagctgctcgcgtgccggtgccggggaagctcagtctactcgggaaggacgcaatggagcagagagagcaggcgcagaaggttgccctggaggcactgcgcaacgcatcagccacggacaacgtggctaggatctacaagttgttctcggaagtgagcaagacggcgaggccggaagcgccggccacctgttttgacagcttcctcagctttcaccaagaggccgtgcaggccgtcaccgacattgaggccgatccaggcggccacctcgatggccgcggccgtggcgagtgacgagcagcagctcgaagatgcgccgccggtcctgcaggagatagcacagaacaggacggtggtgcgtcggagaggcatcggcttggggagcgtgtccaagtcagtgtcgttcgcgcccggcacgttggacccgaagcaggacgatggag

SEQ ID NO: 281156 - DNA, 994 bp, Zea mays
  unsure (1)..(994): unsure at all n locations
gaaaatggcactgtaagtgatcagagtggaccctctggtctgattgatattcaactgtcaacagaaatatctgatggaagtcttccttcaaatcctcaaaaggcaatcatatatcatcctacagccgctcatcttttagcagttctagcagcaatttgtgaagagctctctcaagatagcattttactcatctatatatcagcgtcagggtctgctgagcagagttttgctagtcaaaagtttggctctagctcatctcgtgcgagggctgcctctgccttccccactgataagccaaactcgcataacagttctgataatcatctatggcttggcccccgtggaagtggaggtccaaacaatctttatccagatgatctaattccatttacaagatatccactgttccttgtaattgatagtgaaaatagccatgcattcaaggcaggtcatacataattcagagaagggagaaccagctgctttattactttctcccaggacatcatcagccatgcctggagtagaatccacggctcacggaagccagtttacatacttcctcactgctccaatgcaagccttctgccaactagcgggaataacttctgacatagacactgatacatacgcaaatgcagagaacatacttttctctgctttggaagaatatgaaggaatactctgcacttctgttggattaaacaatgtctgggggcaaattttaccagacccatttctcagacggctgattctcaggtttattttctgccgggcagtgctttttctatttccactcagatgagcacgaatatctaccgacctgcttacctaggcttccagagtcagtctccccgcatgcagaggccataagaactcctatccttttcgcttgcagaaaaccttgtcgtcagcgaccgggttgactttcgagacttcacacgcaacangaaatgatgaccagcagcaataaccataactatgccttctgtag

SEQ ID NO: 281157 - DNA, 407 bp, Zea mays
gccgccgccgggcatcccatccacctcccgtcctactccctgaaggcatgaacccccgttccaagcgccctataccgccgccatctcccgttcccctttcctttgttctctttcgtctgctgggcaaaccaacgccgccagccactggtcgatcacttccagccaaggagtggcggacgcgcagggcttggagtgtggcggacaggcggatcctgtagcggcagagacaggtacggacgagagaggtgagttctccgcacgatcggctgggacaggggaacgacgcgcgcaactgtgtggcctgggggggcattaaacgcttaaacggcgatcaatcgtcgcttaatcgattgctgtcgggtactcctggcactcagaagagggttgaactaagataggggatattc

SEQ ID NO: 281158 - DNA, 557 bp, Zea mays
cccacgcgtccggcaggagccagtagccaatggtgaacaaacgataggtcttgctgagaagccgaaggagctgcctgttgccagtaaggatgagaaagcaactgtgcccccgattttagttgattcaaatgctttcaatctaccaagtgaaggccaaacccaagctggcacatctaacatggatgggggccataatggtgcacacaacttttatgcttctcaggcacaaccattctattaccaaggctccggttctgaaaaccctacacaagcatgggatacatatcctccctacatgagtgttgaaggattggaagtgggtccaccagttgtatacaatgaggacccctcattgatgttccatgggtggctatggttacgacccatattattctcctattgcaacacctgtacccaatgctgttagtggagggtgatacaataatgccgattgacccaacacaaggagcttttatcgctgataccctgagtccaaacagcttcctgtttggcccaagacctgaatggttcagatcttcaaaaggaactgggtcatt

SEQ ID NO: 281159 - DNA, 794 bp, Zea mays
gttttagatcgcgagcggccgcccttttttttttttttttttcagctaatcatcgtgcagccttccatggctgctttttgtttccattggtagtatacaggttgatgagaagatttacatcggagcaaagccagaggatgacgaaccaactacatgagattccgaggagggactaaaaatttagctcagccctgatgctaccatttcagtgaggctaaatttttagtcaaaaaaaataaaataaaaaccgactagcttagctaactaagagaaagatcgacccgctccgtagcattgatctacactagctagtgccagctccacgagctgcttcttgatcgccgcctgcgggggcgaggccaagtccctggctctcttgcaccgggccatggcgtccgccggcgccgtcagcagatcgacgccgaagagacgcacggccttcgccaccggcgccggcggaggcgatgaccccacggggctcgtcgtcgacgcggtgtccacgctgttgggtcgcagcttgcagtcgatgaagagcttgctgtcggcgccggccgcggagcggtagaagccgacgacgtcgccggcctggaggcccttctccttgacgaagcggctccagcccttggtgagcacgtagctctggctgctgttccagtacgagtaccggaaccgccacactttccccgcgggcgtcctccaggttgaggagcacgcccgtgctctcgccggcgccggcgggggcgcccttttttttttttttgggttttttttttttttttttggctaaaaattag

SEQ ID NO: 281160 - DNA, 579 bp, Zea mays
cccacgcgtccgggaccagcaaaaatctgtgagatcctcaaagacagtaaccatcgagttagaaaagctatcgatgatgaggtttcacgtagtaaccagccttttgtctgggcattcaacctgcaactgcccaaggataacttcagcgcaatattctactttgtgtcgctggaggctatacctgaaggctcccttatggaccagttcttgaaaggagatgatgccttccgaaactccaggcttaagttaatagcgaacattgtcaaggggccctggattgtccggacggctgtgggtgaacaggccatctgtatactggggagagccctctcgtgcaagtatgttcaaggatcaaacttcatcgaagtcgatgtggatatcgggtcttctatagttgcaaatgcgatcgttcatttggcatttggctatatcacaacgctaactgtagatttggcctttctcattgagagtcaaaccgagtcggagctccctgagagacttcttggagcagtaaggttttctgagttaaatccaggatcagctggtttggttgaaagcgggctgagagcattaggaagc

SEQ ID NO: 281161 - DNA, 592 bp, Zea mays
  unsure (1)..(592): unsure at all n locations
ctcaaagtgcagtggaggtttctttgagttatggaataaccttgggggtgaatctataattggaacagaaagcattaaaagggtattacctgttggggatcgtttgttggattggtgtgagaggactctggtcatgggggtccttaatttgacaccagacagctttagtgatggaggtaagtttctagaagtgggagctgccatttctcaggctaagtcattaatctcagaaggtgcagatatcattgatattggtgctcaatctaccaggccctttgcaaaaagattatctccaaatgaggagcttgagaggttggttcctgttctggatgagattacaaaaatccctgagatggagggcaagttactctcagtggatacattctatgcagaagttgccagtgaagctgtgaaaagaggagctcacatgatcaacgatgtatccagtggacagcttgatccaagaattcttaaagtggcagctgaactgggagttccatatgttgcaatgcacatgnagggagatccgtcaactatgcaaagcgaacaaaatgtacactatgataatgtctgcaggaaggtgctttggagc

SEQ ID NO: 281162 - DNA, 442 bp, Zea mays
atggattctttgctgcttcgcgccactacgctgccaggtacaagtacaacaagcgcgcggtaatggcggagaaaggcagcggcggcggcgacgtggagccagcgacgagggcggccggcggcatgtgcgaccggttcctgacgttcctggccaagaacctgtcggtgagcaggatgaagagcatcgccgaggggccaaggagcaacggcgccggcggccaccctccgccgccgacggagggaggaggaggcgacggtggcatcgaagaagacgagttcgccatacccatcgagagggccgagttcgacttccagcagctcggcagggatggccttgggggcccccgcggcgtagcgacaaccgtcttggaagagagcgccgcgacgacggcgagggtcaatacagatactttgcggacacatgacagagcttctgctggcga

SEQ ID NO: 281163 - DNA, 550 bp, Zea mays
gcttaatgcaacaagtgatattgaagcttgtaaaattattggcatggattgtgagtggagacctaattccgagaaaaatactaaatctagtaaggtctcaatcatacaaattgcatcagataagatagccttcatttttgatctgattaaactgtatgaagatgacccaaaagcattggacagttgcttgaggcgtgttatgtgttcatctaagatactaaagctgggctatgacattcagtgtgatcttcatcaactaacgcgatcatacggagaattggaatgttttcagtcctatgaaatggtacttgatatgcagaagcttttcaaaggcgttactggtggcctctctggattgtcaaaggaaatattaggagctggtttgaacaagacccggcgaaatagcaactgggagcaacggccactaacccaaaatcagaaagagtacgctgctcttgatgccgtggtccttgtgcatatattccatgaacacatgcggaggcaagcacagttcggtgtctctgatggaagcagagtccagtggaggtct

SEQ ID NO: 281164 - DNA, 194 bp, Zea mays
gccactcgtccgacgtcgcttcagtctgctggccgggggtgctacttcctgcctacggggcattctcgccctattaacctgcacacgttaacccctacgtactacgggatcctgacctcggcctccagctgacatagtgcagatattttgacataagagtcagcaccatttgacagtctgccttttcacaaact

SEQ ID NO: 281165 - DNA, 536 bp, Zea mays
cccacttttccgcccacgcgtccgcccattctctcacaggcaacacccagctatcacaccctgatccccgaggccgcgcgtcggggtgagcacgaggggccatgatggagtcggcggcggcccagtcctgcgcggcgtgcggggacgacgcgcgcgctgcctgccgcgcgtgcagctacgcgctctgcagggcgtgcctcgacgaggacgccgccgagggccgcaccacatgcgcgcgctgcggaggggactacgccgctatcaacccagcgcgcgccagcgaggtgaaccgaggcggaggaggaggtggtggagaaccaccacaccgccggtggcctgcgtgagagggtcaccatgggcagccacctcaatgatcgccaggatgatgtaagccacgccaggaccatgagcagcttgtcgggaattggtagtgaattgaatgatgaatctggtaagcccatctggaagaacagggtggagagttggaaggaaaagaagaatgagaagaaagcctcggccaaaaagactgcagctaa

SEQ ID NO: 281166 - DNA, 546 bp, Zea mays
ccttcttccccaccttccacccttcgatcccacgtcttctcaacctttcttcttctctcctcgagaaccccaatccaaacccccaaccgccaaaattcctacgagatatatcacagaaatatcgtcttggctcagatcgtgcccgagtgaggaggcagtgagttttgaggggacgcaggatcatggcgtcgtcgctggccgaggaggaggaggccttcgagcacacgcttctggtggtgcgcgaggtgtcagtgtacaagatcccgccgcgcaccaccagcggcggctacaagtgcggcgagtggctgcagtcggacaagatctggtccgggcgcctccgcgtggtgtgtcctgcggtgaccgctgcgagatccggctcgaggacccggccacggtggagctcttcgccgcctgcttcgtgctgccggggcagcgggagagcgccgtcgagaccgtgctcgactcctcccgctacttcgtgctccgcatcgaggacggcagggggaagcatgccttcgtcgggctcggcttcaacgagcgcaacga

SEQ ID NO: 281167 - DNA, 420 bp, Zea mays
ccctcctgctcaacctcgcttcgtgtgtcctcgagggggccaatccaaacccccaaccgccaaaattcctacgagatatatcacagaaatatcgtcttggctcagatcgtgcccgaggtgatccagatctctactggttcattttcctctcgtcgtaacctggtcccgttaccattacctgtttttggattgcatcagtgaggaggcagtgagttttgaggggacgcaggatcatggcgtcgtcgctggccgacgaggaggaggccttcgagcacacgcttctggtggtgcgcgaggtgtcagtgtacaagatcccgcctggcaccaccagggggggctacaagtgcggcgagtggctgcagacggacaagatctggttcgggcgcctacgagaggagccctgcggtgaccgctgtgaga

SEQ ID NO: 281168 - DNA, 423 bp, Zea mays
aaaagatagagggagaggcaagagtcgcatcgcagacccagaccacgccgccgccacctccgccgccacctccgccggtgatcgagtcgcgtcggcgctaccttcaagctagaagacattaagcatcggcagacatgttcggctccaccaacccatttgggcagtcgtccacaagcccatttggccagacctcgtttggacctccacagggatttggccagtcttccactgctgccaacaatccttttgcacccaaaaccatttggcagcccgaccacagcttttggggcacagaccggaagctcgctctttgccactacatccactggtgcctttggccagcagcaatccactcccgcatttggcacaacatccactggtgcctttggccagcagcaatccgctcccacatttggcacaaca

SEQ ID NO: 281169 - DNA, 587 bp, Zea mays
catttccatggccctcgaagcccgtctcggaccaccaagcgttccagcagtcatcacaacgcagaggatccattggctacctcagtgagtgggcgcgccgacgacctcgcctggcgctgctcgtccgacactttcgatctcaatgggcgcgatttcgagagctccgagaactgggcggtcctgtccaccgagggtgacaagccagctcctcgtttcgatcatgcagcagccatggttgggagcaaaatggtggtgtttggtggcgactccggtcaatctttgctagatgatactaagatattgagcttagacaagcttacctgggattctgttgctccgaaagttcgaccaccattgaacgggcgttctctgaagctgaggccatgcagaggtcattgcctgggttcgtggggaaagaatgttattcttgtgggagggaaaagtgatcaaccttatgacaagatatcagtatggaccttcaatacagagagtgagctttggtctcatatggaagcgaagggtgacattccggtgtctcggagtgggcatacggtgattagagctggtcctgttttaattctctttgg

SEQ ID NO: 281170 - DNA, 509 bp, Zea mays
gttgtctccaatgctgtgaacaggatgattgaaagctccatgaagggtgtggaattctggattgtgaacactgattttcaggctatgcggatgtcacccattgaaccagaaaataggttacagattggccaggaattgacacgtggtcttggtgctggtgggaacccagaaattggcatgaatgcagccaaggaaagccagcagttggtagaacaggcagttgctggtgccgatatggtttttgtgacggctggaatgggaggtgggacaggcactggtggagcacctattattgcagggattgcaaagtccatgggtatattgactgttggaattgtcacaaccccattttcatttgagggaagaaggcgggctcttcaggcacaagaaggaattgcatcgttgagaagcaatgttggtacactgattgtattccaaatgacaagttactgactgctgtgtccccaaaacttctgtgcagaagcattcaattagcagatgatattttc

SEQ ID NO: 281171 - DNA, 521 bp, Zea mays
gaattactgaggaacaaagcagacggattcttcatcgcgtctgatattctaaaaagcctatgtgaatccaaggaaggccgtgaaaccgtccaagcgctgagtcacctcatcaaaaggctgcgcaatctggtgcatgacctggaaaagaaggtagagcttgataagaggaatgggcgcaccggagccgtgaaggcgaccaacctgcggcggcttcgggaggccgccacactctatcatatcctcaccagtggtacttaacgcgtcggcagcatagctagaaaggctaatctgacgttttgttgtacaataatttagtctaagaaggttttcatgtaactggaggtgactacggtgcaattgtcgaaaaccttcctaggtaaccaggatcttctaagttctgttgctgcagttggttttgtgtggtaggtgtgagaatcatcggcttgatgtattggattacctcttataaagagtgaagtcggtgagttaaccgtctatttaaaatgttgatattaatccta

SEQ ID NO: 281172 - DNA, 349 bp, Zea mays
cggacgcgtgggtcttagatcacatctgtgcttttagggattggcggtatgtaacaagaaaacacataaccagcatgatgaatcactggctaaagcaggcgatgctgttgatacagctacttcatgttcagccacagggcaaactgtttctgattttcgtaatgaaccatgcccgatatgccaggagaaggtttttgaccagaaaatggttttccagtgtggtcattttgtatgctgcaagtgtgagtatccatgcaagttttgtgttcaaaatttgttcaaagctacaccaactgaagaaaaacaatactcctagataagatagatactactgttgactggtgcagac

SEQ ID NO: 281173 - DNA, 657 bp, Zea mays
aaaaaagggctcctttgctatctcctccacgctagatcgatgatcaggaacgtacaaagggttcagttcagttttcagtgagtcggcatatgggcaactgcagcagcagcagcggcttcttctctcttccgaaacggggaagcaagctactcaaactcaacaatggcatggtctcggtcgacgatgagggcgggactcacgaagggataaagaccattccggtgcagagagcctgcgagttcaccacgaactccgtgctctgcgtctgcatcgtcacttggaacatgaacagcaagatgtccgcggaagatgtggcgaaactggtgagctcccacaggaagttcgatctgctggtcgtcgggctgcaggaggcgccgaagccagacgtttcgcgggtcctgcaggaggcgttggcggggacacacgtgctgttgggtcagaagagcatgcagtctctccggatgcttcttttcggttcaaggagctcggagaagtacatcagcactcgtccaggccgagggaagcggcagcacgcccatgacgtgacactttgacaatcgtcgctccttgaaatcctcaacctcgcagtgcgcactcatctcgcagcaactccccattccagtgcttatgccatggtcgtcgtccctgtacagcagc

SEQ ID NO: 281174 - DNA, 662 bp, Zea mays
  unsure (1)..(662): unsure at all n locations
caattcnttacactgcctgcaaacatcgngggttggggatgatttaggactaggacccaagatcaccatggaatgccatgagggcacttaaaaacaagccactcagacgtagaaaacttgacatacattactccattccgaaggacaatccttcggagaaggatattaaccaggggatgcttgttgtatttaatgttgacccctctataacaaacaatgatatccatcagatatttagcgaatatggtgacataaaagagattcgcgatgcaccgcaaaagggccatcacaaaattatagaattttatgatgtcagagcagccgaaggtgcagctcgtgctttaaacaggagtgatcttgctggcaagaaaataaaactggagactggccgtctgagtggtgctagacgttcaacacagcacatgtccaaggagttggggcaggaagaatttggtgtatgcaaactgggcagtccaagcacaaatagcccttcattgccttcattgggttcatctaatatagcagcaatgacatcctgtggacgtgaaaatgggagtatgcatggtttgcattctggacttctcacatcaatgagcccgttcagagaggcttcatttctggggctatcatctaccctaccacagagcctgtcctctcccatt

SEQ ID NO: 281175 - DNA, 643 bp, Zea mays
aaacttttcaaccaaagtagagattcaaaggttgagacagaagaaggaaaagaagaatactacaaattcaacaagattgcatttaggcaatgaaagaaaaaagagaggtggctgtgctctactcgttcgtggatcgaacaaggagtctggcagcaccactgatggttttgttccatatgaatggaaacgtacgatcttctcctggctgattgatctgaatgctctatcagtcaatactaagctgaactgtttggatgaaagccactcaaaggttttactagagggttttgtcactagggatgggattaactgcagctgctgtagcccggtcttttcagggcctgattttgtgactcatgctgcctctgaagcaaataagccatacagaaacatacttgtggatgggctagacattgaccttttgcactgtctcattaatgcatggaatatgcaggctgatgttgaaaggcaagattcctttccagttagcgattgagggcgatgaccccaatgatgacacgtgtggtatttgcggcgatggaggcaatttgatctgctgtgatggatgcccctcgacatttcacatgagttgtctaggactagaggcacctcccttgattatgggtgttgtaaaaactgctca

SEQ ID NO: 281176 - DNA, 451 bp, Zea mays
  unsure (1)..(451): unsure at all n locations
gcggctatgacgacaacggccgccgggcacggctgctgctgggcggggattccgcccttcgcgttgttgccgcggattctctcgacccgccgggagactcctcctcctcctcctcctcgcgcttcccttgtcgcctcctcctcgaagctcagggcgctggcaccacggctgagagtttcgaaccgtccacggaggctcattgtctccgcttcctcctccggcgaggccaattcggacgcggcgccgtcgccaacggtcagcgctctctatctttcttctctatgatgtttccagattgtcagggtgaattgatttgggattngggatgtgctcccgtgttgcctggaatcattcagtgaatgcgattatatagggatgatttggattggggtagccaccagcaacggggaaacagtaattgcttgggcttttggaccactgtttattatta

SEQ ID NO: 281177 - DNA, 444 bp, Zea mays
attctatacgctttgatgactgcacagggcctgaaaccgtcatcaagtacatgacagacggcctgctcctccgagagattttggtggatggagacctgtcttcttattcaggggtcatgctcgatgaggcacatgagagaaccatctacacagacattctcttcagcttgctaaagcagctaatcacgcggagaaacgatctcacgttaatagtcacttcagccactcttgatgcggagaagttctctggttatttttttgattgcaatatcttcacgattcctggaagaacgtttccagttgagatactacataccaaacaggcagagagtgactacatggatgctgcactgatcacggtattgcagatccatctgacccagccccgaagagatatcccattgttcctgactggccacggagagattgatcatgcttgcgagc

SEQ ID NO: 281178 - DNA, 696 bp, Zea mays
  unsure (1)..(696): unsure at all n locations
tattttccgtgcaaaagaagcaaggatatgagttgcaacaactgaagtacgtgaatgagcttggtggcagtttaagcgtacaaaatcttgagaatgtcatcggaaaggatgaagccttagagtcgaagctatatctgaaaagtcgccttaaagagttgacacttgtgtggagttctgataatggcatggatgcaatggatattctgcatttggatgttctagagggtctgcgaccgccaccccaactgagtaagctcacaatcgaaggttacagatctgatacatatcctgggtggttactagagcgatcctattttgagaatttggaaagttttgagcttagtaattgcagtttgctagaaggcctaccaccagatacagagctcgttcggaattgctctaggttgcgtataaacattgttccaaatttgaaggaactatctaatcttccagtaggccttacagatttatcaattgattattgcccactgcttatgtttatcaccaacaatgagctaggacagcatgacttgagggaaaatataataatgaaggcagacgacctggcatctaaacttgcattgacgtgngaggtggattcaggaaaagttaggagagtactgtcgaaagactattcatctctgaagcaattgatgacattgatgatggatgatgatatatcaaagcatcttcaaa

SEQ ID NO: 281179 - DNA, 572 bp, Zea mays
gaagaaggcgaccccaaaaccagaagatggcacaaaagccgacaagtctgctgataagccgagttcgtccacacaagcagatcttccggatgaactggaggctgagaaggccatccggaaatcaaccagaacgtcggtcatcgtgaggcaagctgaaagagaagcgatacgtgctgaaaaagaagcaacggccaagccgattaagagaaaaaaggagggagaagaaaagcggatgacacaagaggagatgcttttggaagcagctgaaacagagatcatgaacatgagaaatctagaacgtgtcctggcaagagaggaggaagtgaagaaaaaagctgttgttcataaggacacttatgagggtcctacaattcgttttttctcaagagatggggaatcacgtctggaattcataaatggagcatcatttgggtctgaactttgtacaacatcatctccttatccggagaaacctgtttgtgtggtgacaggacttccagccaaataccgtgatccgaagacagggctgccttatgcaactatggaagcatttaaaataatccggagagttt

SEQ ID NO: 281180 - DNA, 489 bp, Zea mays
tttacgcgttcgcacacacctggcaacctacctagacctggagcgcacgagagagagatagaagagagacggaccgacgaccgacggcgatctcgatcggtaggcagccgctgcttcttcttgcttggcgggcggggcggccaccatagccctctgtagctcttgccggctttccttgtgctccttggaatctcgccctgcatatcttgtactacagtagctagctcctctgctactgtagagctacaggcaagagggaagcaggcagcgtaccgagctctagctgccggctgtgcgactgccagctagagagagagagagagggtgcgggcgacggacggaacggaacagaggagcctagtacttgttgtccgctgtctttcgtccgtgcgactggaccttattccctcacacctgcagctttgaggctcggccgtcacgtagtagtacgtgtacgtttcagggagggagccttctgacctcttgttc

SEQ ID NO: 281181 - DNA, 684 bp, Zea mays
gtccaacgcaacagcaatgggtatcatatatcggttaactcagcatcatgttcagttgcctgaaaatcttggcagttatcagttgcttgagtggaatgtgcagcctttgccgagaaggtcatggtttcaagaacatgtagtctctatgctgcttgggattttactagtaattttggtcactttgtcagcctttttagtagtacttgtttggagaaagaaatttagtggtcaagcagcctacagacctgttgattcagtggtccccgagcaagaactccagccactataatccaaattaaagctgtttgacggaacaacatatagatgattctttggtagagatacccttgtgcgggggggttacgcatcacagcggcacgcatctgctgctggagtaagcccttctttgtatgtaacacaagctacaagtttacagaagaagcactgtatgattacatgacttctccattcaaaacttagaggtgttcataaactgtctagtgattcagatcaagagctcctctcttgtgcttacagtagaagaaggttttgttcatgtaatgtagattaagtagggggtagagaagaaactaggcacacccgcggaacgaaatggtgtaatatttattttagtgccgagggtatttgtctgcgaagcttttcaaaaaacaaaaaaaaaagaaa

SEQ ID NO: 281182 - DNA, 716 bp, Zea mays
acatgcgtcggccgacgcgtgcgctacatattaggattaatgaacaacgatagcagtgataagggcattgttgactatgaagttagtggggagggactgagagaagcaattaaaggcggggatgttaagggtgtaaagaaacttcttacacagggagtggattctaactactgcgacaaacaaggatttactttgctgcatttggctgctttgtttaaccaaactgaaattgctcttattctcatggaccatggggcaaatgttgaaagcaaaaatgggcaaggggaaactcctttggactgtgctccggcaatgctgcaatacaaaatgcgccaacgggtggaagaactcgcggcttcggcttcgaagggaccactagggtgaactgtgctcgtgctagtttctgctgagttcctcctattccagtttgtgtcaaatgtggtgtcaagaataaaatagttaagtcagctgaaagcttcttgctggtgggacagtgtttggtccgccagtgtataccatctagaaacgttgaatgccagtcacggctcacgcgtgtgaaataatatatattcagcttcatcctacattcctactcatgtactctgtagccggtgaatacttccaaacatttaccacgtacaatatgtgtttcttttactgaaaaaaaaaaaaacaaaaaaaaaaaaaaaataaaaaaatataaaaccacgcgtccg

SEQ ID NO: 281183 - DNA, 572 bp, Zea mays
ccctcgcgtccgtgtatccggcattgttactcttcccggcggtgaacaaaagtgcgggggcttatgaaggcggaatgtcagtgtctcacttaatcgaattttcggagtcatcatgtgagcaattctctgctatctattggcatatatgggccagtggatacacatcttgtgactgcattggttctacttaaagtatgtgcatttgcttatagtcctgcaatgtgtgttagctcacactttacaacactattgtttcttagaagttgtgttaatctgctcatacatgaaagtccttagttgcaaccttgctcatgtgctggtcacctgtttcgcataccagcctagtttaccatctcttatctagactggcagctgcttggctgtggattacgttgtttctagacgttcctagacgttccccaaacctgaagggccaccacactaaggatatgtcgctgtttggttcggcacatgtggttcggcctaatatataatctgtaacacggatcgggtacgggttgtgcaatgctgataccacattaccgcccaccttccagctttgtctgattatg

SEQ ID NO: 281184 - DNA, 250 bp, Zea mays
ttctttcagaagcagtacacatttgaaggccatgaagctcctgtgtattctgtatgccctcactacaaggagtccattcagtttatcttctctactgccattgatggaaaaatcaaggcatggttgtatgattgcttgggctcaagagttgactatgatgctcctggacattggtgtactaccatggcttacagtgctgatgggacaagattattctcttgcggtacttagtaagaaggcgatttacatt

SEQ ID NO: 281185 - DNA, 531 bp, Zea mays
aagacgacaacacatgccacagccacacgcgacacacctgtctcggctgtggcgagcgcgatggccgcaaacgtggcgctggtgctgctatcctcctgctcgccctccacttccgccgccgccgcctccctcctccctcgccgccgcttcctgccctcccgccgaagaagagcaagctcccgagccaccaccatcatgtcggcgttgggcgatgacccgatcagggaatggattcttacagaagggaaggccacgcagataaaagggatcaggtccattggtggtggctgcattaactccgctcagcgctatgataccgacgcgggccccttctttgtgacgaccaacagccgcattggtccagaaatgtttgaaggggaggctcttggtttgaaggcaatgtatgacacaaagtcgatccgtgttccgttgccatacaaggttggttctttacctacaggtggttcttttatcatcatggagtttattgaatttggtcgttcaaggggagaccagtcagatttgggaagg

SEQ ID NO: 281186 - DNA, 585 bp, Zea mays
gaaagctggtccgcctgcagggaccgggacgtactggctggaccgacgcgtgcccgtcgctcctcccccacccacgaaccctgccggaagggcaaaaaggggttcgaaattggtcctgatccaggagccaatcctacagacttcacctcccaaattcttttcccgatccgatctgcaagttctccttggatcctgcatcctccagccgattcctgggaagatctgaatcctcctctcgaccatggatccacgcgccaggtatccttcgggcatgggcaacggccgcggtgggaacctcaactactacggccgcggcccaccgccgcaacagccgcatcagcaccacaaccaccagcagacgtcgggggcgcaccaccaccagcagacgtcgggggcgcaccaccaccagcagtacgcgcagaggcagcaccagcaccagcaccacggccacaatcgccatcagcaacagcagcagcaccacatttaccagcagcaacagcagcagtggctgcggcggagccagattgcccgcgagacctcgggcgcagccgtgaccagcgagccgaagcccctggcgccatccac

SEQ ID NO: 281187 - DNA, 541 bp, Zea mays
cccacgcgtccggccggcggcggctcctccgcctctgccaaatccccttcggcgaccggcgcaatccctagcgacgccctcccccactgccactccttagcaaccatcgcggacgctcccgtctccgagccctgtgctgcccttgtctcttgcgggctctcccccgccgccgcggtcgcccacaggctcccaatccgctccaccgccaaggccgacgccgtccgcgcgctcctccgcagctacggcttcaccgacgcggaggtcgccgacctagtccgccgattatcgcagatcctcagcgtcgaccccgaccggatccgccccaagcttgacctcttcgcctccctcggcgtcaagccgcggcggctcgccagatatcctgccctcctcacgcgcagcctcgacaagcacctcgtcccctgcatccagttcctccgcaacattctcagcaccgatgaggacgtctgcctcgccatctcgcgcaccccgcgcgccctctcggctggcctggagaagatcatgcggcccgccttggacaccc

SEQ ID NO: 281188 - DNA, 526 bp, Zea mays
gtctgtaaccccccatccacccgcgaagtctcccgccgccgcgccgatccggggggcgggcggcgggcggcgggcggcggggggcctcttgctctctactccacccactcgcggcctcacccgtggatctacgcggtggccggcgggcgcgatggcggaggcggagcgggagcagcgcccgctgccggaggtggagcaatctgtcacgtccataccggaagatcatggagccacatgttggggctgtgggcttcggcttgtctttgcgagctactcacctatctacaagtgtgggtggcgtggagccgtcacgcagagcaacaaccagactgcaaggaaacctgatagtatatggttctcccactggaggcgcctacgggacaggctcttcgtggctgtgctcgtcctcttcatgctcttcgttatatgtggtggggtctgggcggtatatcctgttgttttctcagtcagcaagttctgtggcgtatttcactgcacggtagcagcttgggtggctgtatgtacc

SEQ ID NO: 281189 - DNA, 514 bp, Zea mays
ctcttccaaccgctgctccgtttagcgtgcagatcggacgatcgctccgatcccaagcacagcaactgctccaattccaatcaccagccgatcagatttatgcaggcttactgccgcgagcgccagtcatgccgcgcggcagcagcttggaccagagcttgagcgacgacgagggctcggccggtgttggggcggcttgggttcggcgtcgctggcaatgtccgggatgtccgcctccgctggggggtgcgcgcgcgggcgcggagctgatggtgcagcagttacacctgaaggtgctccacgccgtcctcgccgtgcgcacgccgcgcccgcacgccttcgcggagccagcggcggcgtcgttcaggcggagggacaggtggtgccatcttccggtccacgacccgccgccgccgcccgaggcggctgaccgactgcacgagctggtgcccggggagccgatggtggtggacgtccttctgagccccgacggtagtgtgggagcccgagggga

SEQ ID NO: 281190 - DNA, 776 bp, Zea mays
gcagcctgccatcacctaccaaatccggcgggcgtccagcggatctccatctggtcggcgtggatcggatcttcggtggtgtttctcgtcttcacggcgatctagtggcggcgagccgaccacgtgcccgtcagcagtcagccagcggcggctttgacgcggtcggacgggtacctctagttggcatcagcgagtgggcgcggtgcgccgcaagtctcaccgtccgctggtgtagaggccccgagtctcggcgctatggagtgtaggccgcgtgtctccgattagggagggccaggggtcaacaaagggacttgtcaagtgacaacatcgcggccttcgggtgttggaggtgtccggcctgttggtgccgtaccacaggattggttcattatttgtgggagatctatatttgtcttaccattctggtcccgcttctagtccccaaatcttcacgggctttgccagatcgctggccatctccttggcagccgcttccgctgtcgccagccattaccaacctgcgcctcatagtggagcccaggaaaggcggtgggactgagcgagggaagaggagatgactagcttgtcgatcacggtgatgacgctcaacctgcatgaaggcgaacagccgagcgagagccccaacagctgggagaagcgccgcgacatctgcgtcagcgtcatcaccagctactctcccaccatcctttgcacccagcaaggcttaagatggcaactggactacctacaacagtgcttgccggtttatgaacatt

SEQ ID NO: 281191 - DNA, 907 bp, Zea mays
gcgtccacgcgtgcgtcgggctgggactccgatcacccttgccgcctgcccgcccgcctttacctgctaacggcgtgtctcttggatgtccgctacgggaccgctcgccgctctcatggcctggctcgttgccatctccaaggccgcacggcttcgatcggagaatgccgattgcagccagctggtgggttcttctcctttcagggcacctagaagcgacaatgctgcaggtggcatgcttagaaatttgcaggtgagggaccgctcaagctacactggtagctttccacactggatacgggaactggactccccaggagaagcttctctgcttaaacagatctataaaagcgatccagaaagagctgtacacatctttgaaaggcacccttcattgcattccaactctgctgctctttcctgagtacataaaagctcttgccagtcttgacaggctggaggatagccccttgctcacaacattgcagagaggatttgctacttcagcagctgaggaagaaagaagtactggtcttgctgctttcgggagtgtgggtcggcggacgaaagatggagctcttggtacagcgaatgcacctattcacatggttactgctggaaccggtcaatttaaggagcaactttggaagaccttgcgaagcgttgcacttactttccttgtgatctccgacattggagctctccttgaagataggggaattagtaaagggcttggattgaatgaagaggttcgacccaacatggattcgaagacaaagttcagtgatgtcaagggagttgacaaagctaaagctgaacttgaggaaattgttcactacctaccagatcctaaggccgcacttcaagaaatcttatatcagtttgaggaaaaactccaagctgaaag

SEQ ID NO: 281192 - DNA, 652 bp, Zea mays
  unsure (1)..(652): unsure at all n locations
gctgcaggtgccgcgccggactggccgggccgacccagcgcgtcctttggtatgttcgccatggtggcgggtgccgatcggtttgcccatgttcgggggctggtcagtcttctgttagatccaacgggtcattggctttggcgcttggacatggatttggtggtttcaggctccatcgtctgtccctggtgtggtaccatcagaatcagatagtgcagtcgtcgcttgtgcaccaggtgagtttggagaccttcgttcttatgttagcgactgatctcgctcgtggcctttcgcttgttttgtcctccttatactccatcagatgcataagggtcctttctggttatggagagatcagttgaagggtggagatttgcttatggctcacttgtcgtttctcattctaatatcatcatattggtgcgaagattattagaaccagacttgctctaagcttgattggaaatgctgctggctcgatctgcaggggcaacagagttttgtaaagtagattgaggccttgactcgaatggagttcgtagtatcatcgatgagatcgtttggataaatttacctatcgttcttcacattcttaaatgtctatctgctgattggaaatggtgcctgttggatctgcangggcactgagttt

SEQ ID NO: 281193 - DNA, 832 bp, Zea mays
atttatttggtactgtatatcaaatgatcatagtatgtggttgtgtcctttagaggtgcaggttggaggtggattttcctcgctctccgtttattcatctcggcgcgtttgcgttttccatttcttccttctttgtacactccgtttcgacttcgagttgggtcagtttcttctctggctgatctcttctgctgctgttgcgcttttgtgctctcgcagatccctttggggcgttccgctttcctgcgacccggggagtgagcctgagttgtggcagggttggttgggtttgtagtttgttttttcctgcaacccgtctagtttttgtgtcgaatcttgtttcgtcttcgttttctctgtgcgtgggttgcaggattgggtccgatctggtgttgggggttcgtcgtggtgtcgtgtggcgatctgtttgcccaagttcggaggcaggtcagtattctgttagatccaacggttcattggttttgcacttggacatggatttggtggtttcaggcttaattgtctgtctcctggtgtggtaccatcagaaaccgatagtgcagttgtagcctgcataccagatgcaaggagggtccttgctggttatggaaagatcagttgaagggtggaggtttgcttatggttcattcgtcgtttctcattctgatatcatcatattggtgcaaagattagcaccagacttgctctaagcttgattggaaatgctgctggctagatctgcagaggcaacataattttggaggtagattgaggcgttgactggagtggagtttgtagcatcggcgaggatatcagttggatatatttacct

SEQ ID NO: 281194 - DNA, 1051 bp, Zea mays
cttgtttttcaggctaagcttgttcaccagatcctcaaagccgcaaaatccatccatgacagcggccggaataggcatatgggacaggacttgttcgttgatggattttccggccgctgtcatggatgcccttccgaagtctgggagggctagcttgggtgaagatttgtatcaggctataaccacagattatattcctgtagaggaaatatttgtttcgctcagtttgaaaaccgagcatagtgtgctcgagactattaaccggttggagggcgccgtgtttgcatggaaccaaagaattctggaggaaagaagcaagaggtccccaggacgccattcctggagcttcatgaaggatagctcgtcggaagttgacaagatgtccgcatgcatcgaaagggttgacgctctcgtgcagcttctgaaatccagatatcccaacctgcccccgacttttatagatgttttaaaggtccaatacaacgtggacgtgggccatgcaatcgtggaggcctacgctagggttcttgttggggtagcgttcagcatattgtcgcgcgtggcggagatactgctggaggatgacctgatcaagaagccgaacacccccatgaccacgctgaagttcgacctctcctctgacgtgtacttggccggcatcaccgagacgccaccgggacacatccggcggtccctgatggaccagatcagcatggtggacgggcgctacgatgccgttgttggcaagaagaaagaagtgaagcagctgaggtggtgagggcagtcagcagctgttgtgtgaatcttttgccgatgtacagggtgatgcggggcccagtgtccgctccacaaggttacctttagcaaatagcgcgatgtaatgtatttttgcgacgagtttatagcgtactgtactgtaagatcagcattaggcgagtcctgcctgtcgaagtctccgggtgctgctgttgcgtctgaacgatctggcgatgctcttggtcagcctatattgcttttcttgctggcaccttgatgatgactagcatgtcga

SEQ ID NO: 281195 - DNA, 522 bp, Zea mays
attgttcgtgttcttcgcgtgcgcggatcggatcggttcctctggattggcgcgcacgctcagcaagtagtagcaggtctttcgccgtcgcatgttactgcagcaggccaccggaagagcgcgccgtcatcagctagctgcctcctcctcctcgtcgtctcgaccaccggcggtggatgggcggcgtgctcggcgcgctgctgcaccggcggtccgggggcaggccgccaccggcgcgggccacgaggcgccgggcgctcacccgccagccgtcggcctatgacgccggcggcgggcaccggagggcgatgctgtccaagaagtactcgtacataccggacacctacacgtcgcttgacgaggtggccgcggcgctgcgcgagcaggggctggagtcgtcgaacctcatcctgggcatagacttcaccaagagcagcccgtggacagggaggcagtcgttcggcgggcaaagcctgcacagggtcggcgacacgcccaacccctacgagcaggccatcagca

SEQ ID NO: 281196 - DNA, 752 bp, Zea mays
accagccctgactccctgaggtttgacggaggttgggttggatgggtggcccttcctctccccgtcgggagaacgacggcgaggggagtggcgggagatctccggctccggcgacatggaaggagcgcccgaggtccttcgacgagaagaccaggacggcgtgttggcgtaaggcagcggtgctggcgggacggcacccggaacgctggcggcaggacgccgtgggcaacgtggtctgccgccgtttctggggctgccacggatgcctctgctacgagtacgaccactcgtccctttctccaaaggaggagaatccactgttgagaactgccagatcctccagactagggtgaaccgttccaaatctgataaaacatgggtagcgcaagcagagatgcagggtttttcctgcgatattatgtttactgataaggagctagatataattgagatggctgtgtacggggacgtcattcgtccagggaagcaatgtcgctgcagaacagtagccgaggtgctcgggcaggtgaagccaacgaatcgcatggctgcatgtgagttaccagacaaaggtgcctcttaaaatgtataattcgaataaattggtttcgaccctcacctgtcagaatacaaccttttgtagcgcagttgattccattcaacagaggaacttgagttctttctccccagtcataatcttgggaaatggatgcagttgttctgcataaaaaaaaaaaaaaaaaaaagagcaa

SEQ ID NO: 281197 - DNA, 502 bp, Zea mays
cccacgcgtccgcccacgcgtccgcacacagtgaccctgccccttttcccggccgtctcgctctccaccgatattccgctcctcctgtccagtcctcctcccccgagccggctcattatatcgtccgtcgcgcagcacaacgcaagtttgctagcggccggatcagcagccacaaaacgaggagagcaaccacgctgcacacagagacgcccgtgtgtgagatatagagcaagctcgatcgaaggaaggagggaagctagagatcgtacgtcgccatggggaggggacgagttgagctcaagcggatcgagaacaagatcaaccgccaggtcaccttctccaagcgccgcaacggcctgctcaagaaggcctacgagctctccgtgctctgcgacgccgaggtcgcgctcatcatcttttccagccgcggtaagctttacgagttcggcagcgccggcataacaaaaactttagaaaggtaccaacattgctgctacaatgc

SEQ ID NO: 281198 - DNA, 413 bp, Zea mays
cttacgcgtgggggaagatgccttagtgtcaatcttaaggcgggtaaatcacctcattttttctgaccgccttaccgcctaagggacgccttaatagtttgcattagagattttcccttcaatgtatttgacattttttgtaggcatctttagaagaggagaaagagtcacttaaagctaacatatcgttgctgcaaagcaacctaagaatgggccttgaaatcgaacaacatttgcaaagaaatgcacgaatattagagaaaagacaggcactgtatgatggattcctgagaaatggattgtccgaacttcaaaagttctacacatgtcaaaaggctgaaattatgaaaatattggaagaagaatcgttgcggttgatgaaagttgttgcagagattcaggataaactaact

SEQ ID NO: 281199 - DNA, 423 bp, Zea mays
tcgctcacgcgtccggttggctcgcaagcagagggggagcatgagctccttgctgggcatgagctcaaggcaatggcagccagtcaaggaagaaggcctccgaccagctatgtgccccaccggccacctctttctcctgtaggccgagcctagcttatcacgatttagtgtatgttctttctgtgtctgtcctctttcttcagctgcgtagtgccggtgggattgatataccatggtcctctggtccatatgtaatacgcatgtccaaagtgacaatctctgcgcaagtctttagagatagctccctgtacatgctgtgatgttgttgatggtgtatgactgtaccagtaccgtgatgtggctgcaaggtccatctcagtgcttagttacccttttatatgtccgcttatctgttgcttctgt

SEQ ID NO: 281200 - DNA, 515 bp, Zea mays
aaggaattgcagaccagatgtggatagaaccattagaactacaatggaaactagtatcttgtaatatttgtaagaactactttgtaaggatgttatgttattgcaaggatgtattggctactgtcttttatctgtaagaactatttgtaaggatgctatgttattgtaagggtatattggttgctaattttacccgttgctatgtcattgtaaggaagtattgtttgctaattttaatgttgttatgttattgtaagaaagtattgtttgctgatttttatgatcttgatacttgtaggaaagaaatggaagctcaaggcttcactaatgggcatgctacctggacatcagcaatgtcctctttcatgttgtcctacctgtccaatgtggtgtcaattggcgaaaggacatcgtctggttttaagaaagttcactacaatagttgtgcaaaagctatcaatgaaaagttccaaatcaccctcaatggcgagcagattaaaaatcatctgaaaact

SEQ ID NO: 281201 - DNA, 791 bp, Zea mays
cccacgcgttctgggttttccatcagtgtaactggggggacaaagacatgatagctggggatataacaacatggctcgagtggatcctgtcacagtcacttctccgaattgcagagtccaacccacaaggcatggatggtttttggctgcagaagggcaccacactgctgcttagactattgaagagtttgcaggaggatgtgcaggagcgggcggccactgcacttgctacgtttgtagttatggatgacgagactgcaaatgtggatcctgcaaggtcggaggcggtgatgcataatgggggcatccgaatgttgctggaccttgcaaggtgctcaagggagagcgcacagtctgaagcagcaaaagctattgccaacttgtcagtgaataccaaggttgccaaggcagttgcagatgaaggcggcattacaatactcactgatttagccaagtcgatgaataggcttgttgctgaagaggctgctggtggcctttggaatctctctgtaggcgaggaccacaaggcggctattgcagtatctggtggtatcaaggccctggtagatctaatatttcgttggcctgctggaaccgatggagttcttgaacgtgctgctggtgcgcttgcaaacctggctgccgacgacaagtgtagcttggaagttgcaaaggctggtggtgttcatgctttggttacacttgctcgatcatgtaaacttgatggcgccctagacaggttgccctatgcacaatgtttgatgcttcagaagccttcagagagagctgtg

SEQ ID NO: 281202 - DNA, 1284 bp, Zea mays
tttggctgctgcctcctcggtgccatcttcccggggtcagcgccagattcagacctcacagccatcctcacccaaccgcaaatcagcaaacagatgtcgtcaaccagcgggtgaggagtgcgaggacgaaggggattcggagctatatgagcagctgcgtgctgaggccttccaccgaacttggtccaagatccagtccaccatcgacgaggtcctgagggccatcaacctcaagctgatcgaccaggtgctgcagtgggcgaaggagtccttcgcttcggcccatgccatcacgaaaaagcaccacactgtagtccagcagccataccctctcctgactgatgtgatctgcagaaggatcccgacggtattcgtcctcaccaagaatgcagagttggtcgatgatatcacaacgcttcatgaccttgcagggcatatgaagtccaatggatgtcacatagtcaagctgtcagcggctgagttatcagcaaaacatggagttggtggttgcttcaggagcctgttgggacagctattatccgatgttccagatgttgctgatgtatctgcgctagcatcatggtattgtgaagctgagaactttgatcagcctatcattgtcataattgatgattgggagcaatgttctggcgatgtgcttggagagtttgtgatgatgctgagtgagtgggtgtttaaaattccagtcttctttgtaatggggatagcaactacccttgatgctccaaagaagcttctctcgtcagaggctcttcaacgattagagccctgcaaacttaccttggggtctccctcagatagattgaatgcacttgttgaggctgtccttgttaaaccatgcgctggattttgcatcagtcatgaagtcgcactgttcgtcagaaattacttttttaggcatgatgggacaataacttcttttattactgctctcaagcttgcatgcagtaagcacttctccatggaacctctaagctttttgtgcttaggaatggtggaggaagattctgaggaattttggcatgataagcttgaatcgctccctcaaacaatatggaaacatgctttcgatctaccctcaaacaaaaatgcaaggacttcttgcaacatggtagaaggattgtctaggctgctgaaatcgcaaaaggattggagttctgttctcttgtgcctgtatgaagctggaaggcatgacaaagtgcagcttttggatatcttctgtgaggcagcagcccagattggcaacttgaaatgcacagatag

SEQ ID NO: 281203 - DNA, 659 bp, Zea mays
cccggtctcgttcgcccaatttctgtgaacaggtcaaacccccccgcggcgccccacccccgcacgcagcgagtcagcgacgccccggccccgcgtcttcgtattcataacgccagagtccagactccagagtcctcagtcctcaccggcttctcctcccttcccgtcaccgatggggctgttcgcgcgcgcgaaggtggtgcggctcaggagccaccacgacaagttcctgtacgcggacgaggacgaggtgcgcgtgacgcaggaccgggacgggtcctcggcgaacgcgcggtggaccgtcgaggcggcgccgcacagcgcgggcgccgtccgtctgcgcagccgctacgggcgctacctcaccgcctccggggagccgttcctgctggggatgacggggcggaaggtgaggcagacggcgcccgccgcgccgagcccggccaacgcgtccgtggactgggagcccctgcgggacggcttccaggcgcgcctccgcaccaaggcgggccacttcctccgcgccaacggggggctcccgccctggaggaactcggtcacccacgacgtgccccaccgcaccgtcacgcaggactgggtgctctgggacgtcgaggtcgtgcagcttctcacgcccgcgccgtggtccgagcgcaccg

SEQ ID NO: 281204 - DNA, 951 bp, Zea mays
  unsure (1)..(951): unsure at all n locations
cattctgtcctctgccggcaccgacaccgccaggggganattactacctgcgccggggctcctataggacgcagttcgcctccgaccccgactccagattttacatgcttctctagtagtccattggagtaattaacatcgattacacgggcatgggagagcaccaagtcaagccatcggatctgccacccactagtttgcacaaccaggattcagccgcaactcctgttaccagtgctgaccctgctcgtcctgctgcttcaaatgattctcccagtcaggttgccagtgcagctcctgctgctgtttctgcacctaccgctgctcctgcagaagatgctgcagggcgtgaggcgtcagcatctgtgttctctgcgtctgggttatcctcctgggctaagaacctaaaaattcctcagccttcaccaggtcaagaatcacctacaggaaagaatacctttgcccgtttaacaagtggccttggactgcgtttgtctccaaaagcggcacagcaagatgagggtgctgaaggaagcacctccccaacaacaggacagcctggtgtttttggttctttaacgaaaggcattgtggattcctctaagaatgctgtaaaggcagtgcaagtcaaggctcgccacatggtctcgcagaataaaagacgataccaggaaggaggatttgatttagacatgacatatattactgagaacataattgctatggggttttcctgctggtgatttgagttcagggctttttggatattttgacggtttctaccgcaaccacatggaggaagtcatcaggttctttgaaatgcaccataaggggaagtataaggtgtacaatctttgttctgaaaggctatatgatgcatctctttttgaaggaaaggtggcctgctttccttttgatgatcataactgccccccgatacaacttgtcata

SEQ ID NO: 281205 - DNA, 536 bp, Zea mays
ttcactcgtccgctcttgtcttgctcagcaatcatatcgcacgagatactattgactccaagtacagaccagtccagtactgttgtacggcctggttccgtggaacagagatgggcaagcaaaagattgtgctcaagttgcccctggatgacgagaggaagaggaggaaggccttcaaggcagctgtgggaatgaacggtgtgacgtccgccacgatggagggcgacaagatcaccgtcgtcggcgatggagtcgaccccatcacgctcacaaccatccttcggcgcacatcggctacgcggactgctcagcgtcagctccggcgacgacaagaagaagggcgacgggtacggctactggagcgccggtggcatgatgtacggtggcggcggatacggtggtggcaaagagggcaaggagagcaaagagagcagcggcggcaagagcagtggcggcggtgggggctacggcggccattaccaggcgatgccggcggtctcgtaccctgccgcctaccagcagtacaacgccatgcc

SEQ ID NO: 281206 - DNA, 486 bp, Zea mays
gaagtagtggtgccagactggattactctgttgggagggtgacaggttgtatccacactggattgtgtgattttggaatccaatgctttgaaacaatgcaggaagcatataagattgaacctcagattgatcattactcatgtatggtggatcttctctgccgagctggtctgcttgaaagagctgtcaacatgatccattcaatgccctttgagccacatccttctgcctatggcaccttgctgactgcttgtagagtttataagaatttggagtttgctgagtttgctgctagaaagctgattgaacaggatccacagaatgcaggtgcctatgtacagctggcaaatatttatgcggtggcaaataagtgggctgatgtctctagagtaaggagatggatgaaggataatgcggtagtgaaaacacctgggtatagctggatggaaataaagggtgtaaggcatgagttcagatctaatgaca

SEQ ID NO: 281207 - DNA, 678 bp, Zea mays
ttaaatatttgactattttactaaagggatttgtggatgaaataagcgtggagagctaataaagtattcgcaggtgaagtgtagttttcatgatcagataagtgcattggacatacaagacaccaacaatttgtgtactgcatggcacacatgaccttgacctaccttctgcaatgtcatgcacaatagcaattttgatacacctttctcgatccacagcaggcagatcaccagcaatcagagccatcaaggccattcggtacatgtgatcagcaatggactcagggcccttgatgctatggtttatccatcctttccttttggtggtctaaagaataaacaaaaggaataggcaccagaatcatgtgatatgatggacctaagcatcaaagaaattaggggcatgaatgaattgatccaaatcattgcacatgcaccaggcggtgcagccacttttactttctgtgtgcactttagaatttcttacaaatattgtgagcttctccggtgtgaccctagcggccttggaacaacatatcaggggacgactgattagtacgagcatgattagtagtatcttgtaccttgaggcggtgacacagggtgaggaaatcgatggccgaggcggccgacgacggcactgaggtcggtgccacggtcgcggcgtccaccggcggt

SEQ ID NO: 281208 - DNA, 661 bp, Zea mays
ctgaacagccgtgtcaatcggtgaactgccatcagcccaccgctgaagttggctccagggccacttaaacttgccaggctctagttggccacaccgtccccatcacaacacgtttccgtggaagtttgatgaaggctcctgctttccgcatccctcctttctcctcgagtttacttcagcggcccagctcttaccgatctctgtctggaacttgccggcagtggagagaaagaactcatctagcactttgccatgttctttctcatattccaatgcctgaagaatcatttccacctgatcaaaatcttttacaagattggcttcaatagaagaattgttctcatattcttcccacagctctttaatctcatcagcagctggcccaccaccaagaacttggcacatttcatctagtgctgcttgttcgcgccggcttttttcagccttaggtataccatccgatggggtaatgtcaccaacaatagcttctgcgatgtcatgcacaatagcaattttgatacacctttctcgatccacagcaggcagatcaccagcaatcagagccatcaaggccattcggtacatgtgatcagcaatggactccgggcccttgatgctatggcctatccatcctttccttttggtggtcttgaaacggaaa

SEQ ID NO: 281209 - DNA, 453 bp, Zea mays
ccagtttccaaaattccctctccgtcgccgccgctcccaaaatcccctctccgtcgccgcctctcgccaggtcgtttccaagccccgttgggggcctcgccggcgccggcattggatataacctcgcccgctacctccgtccgaatgcagggccttgatatttaatgggctggaggtggtacatgcatgttcgcagtgacaagaacacattgaaacgttggtttttcattgacaagaggcttgttaaagcatttttggtgcactaaccttttgttgtctgtaattggtttcacaacaagtctcttggggggttgtgtcctggtgatggatttgaagacaggcctcaattcacctgttattgctgaccatctccctacgttagcattgcctgctgctgtcatgactttcacaacacctactagctttccctctccggggcttttgttgaacact

SEQ ID NO: 281210 - DNA, 604 bp, Zea mays
cccacgcgtccggagctcaacagaagagttcgatgtgtgaggggcaacctgctggtggagatggcaaggagggcaataccgacaggattttgcagttggaaggagagctgagagatatgaaggaacgattactcaacatgagcttgcagtacgcagaggtagaggctcagagggaacggttagtgatggagcttaaagctatcaagaaaggcaggtggttttagcaggatgcggagttgttgcctgacataaaacatgaggctgacaccacaggtgggcatcatcaagccgtgctatgctccagcaccagtgagactaagagcaagcaagtgcaagtgcagagtcagacagtgatatagcctggacgtgctaactggtgctggagcatgtgtctctcactgaagctccgtatgatgcggtacccagcccttgtttaactggacgtgctaacttgcgttgtcccctagagtcatgatcccgttcttattggtatttatttttaatggtatataattaatatataccccagtacgtattgagtttgactggaccctgatggtcagttgttgataccatccgatccctctgttttacatgatcgttt

SEQ ID NO: 281211 - DNA, 397 bp, Zea mays
ctcctcctaactacgcctgcctgtttcctcccccggaggattgatgagctcgtgggggccagggtgagggcccccttcacgccgccccagtggatcgagctggaacaccaggccctgatctacaagtacctggccgcgaacagccccatacctcacagcctcctcatccccatcaggaggagcctcgcagcgtctccctacccgccttcatacttcggcacgagcacattggggtggggctctttccagctgggctactccggcaatgcggatctggagcccgggcggtgccgccggacggacggcaagaaatggcggtgctccagggacgcggtcgccgaccagaagtactgcgagcgacacatgaaccggggacgccatcgttcaagaaagcatg

SEQ ID NO: 281212 - DNA, 470 bp, Zea mays
gcggcgttgcctttgagcacatcttgcctgacagccccttcgcatccaccaccaacaaggaggcctcagctccaacggctcagaacgggggcatcagcaatggcagccctcaccatgtggcttcttcgcccctcttcccacctgcacccgccattgagctgcccccgtacaactcctgcttctttcaggcgcccaggttttctcctgggcatgaagccattgggctgtgaatacagagcaaaaaggggtctccttttcctctaatctgggagggctatcgatgaccccatcaagtggaggaaaggagtagaaagctttgattaacaaatactaggtgtatcttcagagagggacaacaacagcagcaacaaaaaagagagagagagagagaaacaagtctaggttgttttagctctaggcctaagtatatgatagtagtcctataatataaataataatagtcttttagt

SEQ ID NO: 281213 - DNA, 533 bp, Zea mays
gttttaagctcagaaaagcgggaagcactacaacgagttggtctatgattccctcggggagaacaactccatttgggcaaagtacttcaatcaaatcttaaagggtgggcttgaaggattagatgactctgattcatccatgaagggagcttgtttatctttgattactgagatgctcaactaccagaaagatgcaattgaagactctatggagattggttttgaaaaactcctgcatgtgaccaaagatgctgtggccaagatttcaaatgaggcaaaccaatgcttaaatggtctattggcaaaatacaaccctttcacatgtcttgctattactgtacctttattggtcagtgatgatgagaagatgcttgttctgtgtatcaactgcttgacaaagcttgttggacgcctttctcaagaggaattgattgttcaattgcctacatttctgccagcattatttgatgcttttaacaaccaaagtccagatgtccgaaagactgttgtgttctgtctggtggatatctaca

SEQ ID NO: 281214 - DNA, 594 bp, Zea mays
  unsure (1)..(594): unsure at all n locations
gtttatttgacccatgcaaggagatggcttatattgctttggatgaagatatgaaggtaaaagggaaggcagccattgatgttgtttgcaacccactgggcaagtccggcggtgcacttatccaacaattcatgatcctgacgttcggatccctggcgaattcaactccataccttgggggcatactgctggtcatcgttctcgcgtggctaggcgcggcgagctcattggacaagcagttctcgagcttggctaaggaggacctgaagaaggataaggctgcccgagagaaagtagaaccctcgctgctcaaggcgcctgcagagggcagtgatgatgtactggcggagcagacaaatggttctgtgacgccccaagcaaccggaacggagagctcgccgtcgaactcatcccnccattcaataatagctccagcatcataagttgtactagctaggagagttattacagcgagcagaaataattggtactccctccggttttttttatatatttggcgttggttagtgtaagggggtgtttggtttctagggactaatgtttagtccctagattttattccattttagttcc

SEQ ID NO: 281215 - DNA, 468 bp, Zea mays
  unsure (1)..(468): unsure at all n locations
ngtctcgcgtccgccaagcctgacatgccgagcgccgcgctcatatctcctgtcgtctactccgtccagtcccaactctccaccggcggcaggaggcgccggcgctagcccgtggcgagatgagcggcgggagcgtaagcgccgtgttttatgcggacaagtaccacccgatccaggccggcagcatcgacggcacggacgtcgcgccccacgataacgccgtcctccgcgccctcatctgctcttaggccggcctctacgaccctttcggcgaccccaaggcctccggcgacccccaccgcacggctttcgtccgccgcctctcgcgccagaccgacgacgacacgcttcggaaggcgatgagcaagtacgggagggtgaagagcatgccgttggtgcctgacattgttacaggtgcttctcgtggttatgcatttgttgagtatgaaactgacagagagatgcatc

SEQ ID NO: 281216 - DNA, 443 bp, Zea mays
cccacgcgtccggggaggttgacccagaatacctggcggcgatctaccctgtctgtgccaacctcacgtcactaaacttcagctttgcaagcctaaccgctgcggaactgaagccagctattcgcaactgcacgaatcttcgcactttctgggtccttgatactgtgggtgatgaaggccttcgtgctgtggctgatgcatgctctgatctccgtgagctgagagtttttcctttggatgcctctgaagattccgagggttcggtctcagacgttggtcttcaggcaatctcagaaggctgccggaagctggaatcaatcctctacttttgccagcggatgacaaatgcagcagtaattgatatgtcgaagaactgtcccgagctcgtagtgttccgcctctgcattatgggccgccaccgacccgatcgtgacactggggag

SEQ ID NO: 281217 - DNA, 529 bp, Zea mays
ggggcggactcatttctctgagggctccttccttccttgttggcgatgaggaggcacgggtggcagctaccctaccatcctctccaggtggtggcgatagcggtcttcctggcgctcggattcgctttctacgtcttctttgttccctttgttggtggagataggctgcagtatttgctcatgggcctctataccccactgttcacctgcgttatcctattatatatatggtgtgctggaacagatcctggtgatccaggcattttcttaaattcaaaaaggccacctgaaaagcaaggaagttcaactcacgaatatccagaaggagtgtcattcagcaattggtgcaaggttggtcataacagtgagaatataagcaataattttgaaggaaaggattcattttcataccttgcatttaaccagggtctttgcttgatatacttcccggtttcttgcttatgccaaagaatggttcacttaaatgaaccatatttagaacacaacacaagtgaagaaagcgtgtttt

SEQ ID NO: 281218 - DNA, 434 bp, Zea mays
agcaaataaagtgtcagcccgcatccgtgctcataaagctgatgtcaatgctgttaccttcgctgatgaaactggaaacgtgttgtactctggaagtgatgatagtctctgtaaggtgtgggacaggcgttgcctttcaggggaaaagtcagcaggtattttgacaggtcatttagatggagttacatttatcgatagccgtggtgatgggcgttatttcatctccaattgcaaggatcagagaatcaaactttgggacatcaggaaaatgtcttccgtcgtgagatctcgcccagtgagtctagtggactgggactataggtggatgccatttccatcagaagctcataatcttaagcatccaggtgatcagtctgtggccacatacagaggccattcagttctgcgaacactttatccgttgctatttctcc

SEQ ID NO: 281219 - DNA, 534 bp, Zea mays
cgcctccgtgcttccgtctcgcacttccggacataaagtgcgaccatggccatggcggcgctgcgggaaacctcccgctgtttggcgtccagggggagatctgcggcctggcgacccgtgctcctcgcgcagtcccgcggcatcacttacaagctcttcgtcggaggtttatcacagtttgcgacgggggcaagcctagcagaagcggtctcacgttacggacaagtaatagaagctaccgtcgtcagggataaggtgaccgacgtacccaaaggattcggcttcgtgaagtttgcttccccggaggaagccaataacgcgagggaagagatgaacggcaaggcattgaacggtcgggtcatatacgtggacattgcaaaggccagacaggaccgtgctgcagatgccctcccaatagcgagaggccctcctaagcctatcagcaacgactgatagaggaaggccttggtgtgcgctcccaatagcgagaggtcctcctaaaccaattagcaaccgcttgttcaaagaatgcct

SEQ ID NO: 281220 - DNA, 520 bp, Zea mays
ggttttcgccgccgccagatgcgcaggtcttcggggggtccttctacttctcaggcgacgagcacccggcagtaccgatcgggtgttcttcactgggtccgctcctgcgtgctagaactagaagaatcctctgctcggctcgaacttggaaggggggaggcgagggatggggtccctgctttgctgcatggggcgctcggaggacgtctcggcagcgccgcccgtgagctgcttgtgcctactatggcctttccattattaccacaatttgaactcgggctctgctgcttgtcacagatgtgatacacgggtggcacctgatggtggaaggagtcctcctgcaaatcaagtggattcattggatactttgggtctccctccaaggcctttgccttacgatgatcctcaatccagccctcgcatggtgcaacacccacttgtatcaggacacgacaaagcaccaacgcatgttcagaaactaggacagcctgcagaaactaagaatacccatactgggtca

SEQ ID NO: 281221 - DNA, 841 bp, Zea mays
gcgtcttcgcgtgtgagggcgggagagcgcgcggggctagggtttccacgggtgatggaagcagaggctgccgcggcggtagtggcgtcgtccgcatctgcctcggcttccgcgggccggtctcgcccatctagcagcgccgcccaggtcaccagtaattcggctgtgcgagctggagaagaaaatgctgcctccctctatgttttatctgttattgactcgttaaaaaagaggattaccgcagatcgtttgacttacattaagaataggataggggagaacaagactaatatcagcagctatacacagaggacttacaatttatcaaaaaataggcaaattagtacatcaaagggtactgattcagcatcaaatttgctcacaaaaaggcaagatgatgcgctatgcaccctgcatagtcttgatattattccggttgacaaagatggtggcacttttcaagacgaaagtcctttctcttcatctaatgttatgtttggtggaaatcttggtcccaagaatgctattattagaccaattaaactaccagaagtgccaaagcttccaccttatacaacatggatatttttggacaggaaccaaaggatgacagaagaccaatctgtacttggtcgacggaggatttactatgataccagttgtggtgaagctctaatttgcagtgatagtgaagatgaagccattgaagatgaggaggaaaaaaaggaatttaaacattctgaagatcacattattcggatgacagttcaagaaatgtggatgtctgatgctgtactgcaaacgctagctcgacacatggagcgggctgctgatgacatat

SEQ ID NO: 281222 - DNA, 541 bp, Zea mays
gatgattcagccatcacaatggcatcctcctcttccttggcctccgccaaagccctagcacgctcccacgcgtccctcctcgcgccccaaacccagagaacaggtacccggggtctcgctttctttctcgcaggattctctcgcccggtccctcagtccggtccgtgtctcgcggctccgtgcgaccgtgccgggcaattcaggctgctccccttcgacgatccgtcttccgccgccactctgccgatggcttctgcacttcagcgcctgtatgtatctactgaatatgagcttggactttgattctcgtgccgtgatgcagtggtcgcgccagcgccgtcgcgctcgcgccgcgcctccggcaggatgcgcgcctctgctgccgcgccggcggagccgacgaagaccgtctgggtgtggaccgagagccggcaggtgatgactgctgccgtagagaggcggtggagcactttcctcttccgatccaaagacctcggcaaggactggtcatgaaccgctcgcataaatgctctctgcattg

SEQ ID NO: 281223 - DNA, 585 bp, Zea mays
tcgtcgagcgtagcatgcaggaacttattgggggggtctttcaggtctccggtcgtgtgccttccagtctgtctcacactagctgctgtgggacgatcgaagtgggtgtgtcagctagctagctgcgccgtgaccacgcacatgaccgcagtgcgcgcggggctgatcaagggaaagtgatcggatggagctggagctcgggctcgcgccgccgaacccgcatcagccgctggctgccgccgccgagttcgtcggtctcctcagcagctcggctggctcgtgcgggaacaagagggttctcggcgacgcgttcggggccgccaaggcggccacgcttccgctcttcgtctgcgaggatggcgacggaggcggcggcgaccgcgaccgcgacggcgtcgtcgaccatgaacagcaaagcaacaagaagaagaggctggtggggtggccgccggtgaagtgcgcgcgtaggcgtagctgcggcggcgggtacgtgaaggtgaagctggaaggggtgcccatcgggcggaaggtggacgtgtccatccacggctcgtaccaggagctgctccgcacgctcgagagcat

SEQ ID NO: 281224 - DNA, 780 bp, Zea mays
tttcagtacacagcagcacagccatggctgctcccaggctcgtttacgccagctgccacgctctgcgcggagtgctccacgacaagctccgcgccgttgagctgcagctgcgggcgtgccgccgctccctcgccggcgcgtccggctcttcgtcgacgacggcagccgccgtggccgcgctcgtctgcgccgccgcggcgttcccgcgagccgcggccttcttcctgccactcgtggcctccacctccctctgctgcacggcagcgtgcctgttcgccgccgtggagcggagcgcggccaaggaggctgtagaggccgcggtcgtggacggcgagggaaaggccgaggccgggctgctacaggtgatcggcgaggccaacaccggcgcgtacggcgacaggctcggcagcgtccaggtgggatgcttcatccgcaggtccgcgaggcgaggcgtgaacgaggacggcgaggaggtcgtgttcgccggcacgctggcgccctgcacggcgggcttcgtcggcgccggtcacgcccagcggcgcggcgccgcgctggaggaggagctcacggcgatgcgcgtggatcggctcgccgaaggcgtctggaacagctacttcggcgggtggtctaggtggcaccacatcgacacggcatgcagcctctgagccctctgcagctgcagtcaagcacttgatattgttgctccattattaggatcgtctgaaacaaaatgtctaagctactatacttatatggaagtcttaaatacagatttgatcg

SEQ ID NO: 281225 - DNA, 845 bp, Zea mays
atcttacgccacacctgaaggaactccaatgagccgaacgactatcactgaatctcaagaaacaccgtcaagtgaggtctctgttaataccaaaaagagcaggagcaaaaagcccaagccccatgcaagcaagaggtcgctggctagtcctggcagcgactcagtcggccggagcagcaccgacaacttctcaaaggaatcaaggcatcccaagagagagagctcaagcaaggctgctaaatccgaccacgtcgaacaagaacctcgcacgagcaacagcaacagcaacctgttgccaagctacatgcaatttacagaatctgcaagagccaaggcgatcgtcgtccccgaagatgagcccagatgtgcaggacagcaacccaaggaaaaggcactcgttgcccatgaccgacagcaagcatgactcgtcgcctcgcatgcagcgatcgtcgtcgcatgctcagcaaaacgtcaagagcaacgggcctgctccacacagcgcgtctgacaggaagtggcatatctgatgggtaggccgagcagcgtattcgaatgtctagatggctttcttgtgatgaactcctgccttctccgcacactccatctaactcgtcaagttttttatttttccttgattcgtcgttggaatactgagtatagttggaagaagggcagcagctgcctcttgatatgtgtaaatttgttggttgtgtacttgtgttatgtcactgatgtggtttctgtgtgtaatatatgtcgctttgacttgtcatgcaacattgaagagtatatggattggtctgttgtatttggcgacattgaagtttttgtgtgtgtgtgtgtgg

SEQ ID NO: 281226 - DNA, 477 bp, Zea mays
ttttcagatcaattgtagtcactgcctattcttggccatacggctttccccacaccccaacacaaacaggagaaaaaaacaaaaactagacgaaagagggaagaaaccaagaaattggcgaatccctgacgctccccactttcaactcccatccgcttgccgttgccgcgtttgtttatcgagccaatttgatcagggcgccacaccgaaccctagttcttgatttaatcacgggttgtgtggtcatgccggccgggtcaccccgttcttcttctcttccacgagttcaggaggtagagtgagagagaacatggaacgacaggggatggagggcaacaatcttctgcattttcttgataccccgagcgcccattacagaaggacatgcgacggatttgaggcccaacacggcggcgatgaacactctgagacatcagatactgatccggcgaatgcaagggaaatgcttgaatattt

SEQ ID NO: 281227 - DNA, 465 bp, Zea mays
ctttgcccttggcccttggcctcctttcgtcgagagagagagagctgtgctggctgctgctgccccgggtccgtcgggacgggtagatgaggaggaagagaacagctcgtgactgactgactccctccctcagcgtgagtgggttgcggacgaccacatccatccgttcccaccattcccttctcccacctcgcctcctccccttgcccttgcccttccacagccggaatcagggggtaatgggccagatgggaggacccgacggcgacggcgacggcggcgcgggcccgcaccaccagtaccactaccaggcgcttctcgccgccgtgcagaaccccagccagggcctgcacccctttcccctccccttccacgtgcctctccacgcaggagcgggagcacccgccgccggaccaggacctggagctgatgctgatgcctccacacacaaatgcaatgccggtc

SEQ ID NO: 281228 - DNA, 504 bp, Zea mays
cgggtcactatgaatttagagttatggcttttggtttgaccggggcaccagccacttttcaacgcgccatgaatgcaacattagcaccattacttcgtcgttgtgtgctagttttctttgatgatattttaatctacagttcgagctctgaagaccatattcagcatgctcgagcagttcttcgaactactcatacagtatcaatggcaaattaagttgaataaatgttcatttgccaggcctcagttatcctatctcggccatgtcattgcagcgggcggagtagctacagacccaagcaagattcaggctgtttctcagtggtcttctcccaggactgtgaaggaattacgcagttttttgggtttggcagggcactaccgtcgctctgttcgtcattatggtcttttggctcgacctatgacgggtctactaaaaaagggtgctatatttgtatggacttccgcacacgaagcttcctttgcagccttgaaacacgcttta

SEQ ID NO: 281229 - DNA, 214 bp, Zea mays
acaacggtcttgtcgaactggagagcatagatgagggatgtggaacaggacatagtcacatgtcaccgctgaaaacgggcgttgtcagattggtgacagggcatgccgtgtgtcaagacctatatatctgttgatgaacacacatggtcgaggcttatggcagactgtgcggtccatggatgccatgcacagtcttcagttggcaagaatgggg

SEQ ID NO: 281230 - DNA, 700 bp, Zea mays
gttctagatcgcgtcggccgccctttttttttttttttttttttttttttttggacgccagcgctccagaatcaatcaccagcagcaaccgcattgggatccaagggccaaaacacatctctcaatttcctccgatcctctcttgggccacaccaaaataaagagaaaactcacagggcaaaacgtacgcagaaactacatcaagaagcagccgtactgggccaggatagcccagagcagaacgagaacagcgctgtacaacaccatacatcttctagcgcgcttttagcagcagcgaggcaagtgatggatcaaaacgtatccaagccacaattagtcaagagattactgctactactactactagccatgaaagagaagcacgccatcatcatacatcatcgactggtctggtagtcaccagcaaacctcctcggggatgctctgcaggccgggctcccactccccggccgcctgcatccgccgcgcggcagcctcgaccgcccgccgcacgatacgccgccgcagcgactgcagcctctgctcggcgcccggccctgccgctgccgccgcgcactgcgagtggcgctcgctgctggccccggccaccagaccgccgtcgccgagcgccgcgaccatctgcttgagctcgcgcttgctgacgacgatcttgacgcgcaccgcgcccccgacgaccacc

SEQ ID NO: 281231 - DNA, 607 bp, Zea mays
ctggtggctgcaacttgattcagtgacatatattagattttttcccataaggaatggcatatatataatagctataatgctggcatgctgcattggttacatgcaggtagcagagttgcttgcgtgcgaaggccgcttggtctggagttaagcgcgtgttgtaatggaggggcgtgggaaccctccgcacaccaccactgatgctgtgatcaagaagccaaggagcgtcgcatccaggaagccaaggtccacggagcagctcacgtatgagtacaatggcatttgcccgccatcttggagcgctccccatgacgatgacactggcgttggagctggtggacatcggaggaaagagctacacctaaatagccctgaaatgaagggctccatggctcataggagcgacgtgcccaggaagataaggagggatgatagatctggaggcgaccatgatggccatggtcggagcaccaaaacagaggatgctgccaagcatgcaagagaaaatgtgcttgccctagagtgcacactaagaaacagtggatcccctgataacccacagtggtgtacccagagatgactatatgccttgcgaaaataggtcgtg

SEQ ID NO: 281232 - DNA, 479 bp, Zea mays
gagggtctattgtgcttatcttctctctggcggttgcaacttgattcagtgacatacattagtttttttttcatagagaatgtcatatatactaactgtaatgccgcattggaaacgtgcaggcagcggcggcggagttggctggcgcggaggtcacttggtcgagttaagcgcgtgttgtaatggaggggctcaacgccactgatgctgtgatcaagaagccaaggagtgttgcattcaggaagccaaggtccatgaagcagctcacggttgagtgcaatggcatttgcctgccatctcggagtgctcgtcatgacgatgacactggcgtcgaagctggtgggcagcggaggaaagagctacacctaaatagccctgaaatgaagggctccatgactcataggagtgacgtgcccagtaagataagaagggatgataaatctggaggtgactatgatggtcatggtctgagcagaaaa

SEQ ID NO: 281233 - DNA, 575 bp, Zea mays
cttcggtcagcgccaagcgtcccttcctgcttcctccttgccctagtactcaacacatcagcgccgacgacctcgtcctggccttcatcatcagcgtcaagctgctcgcatccctgctccccaccgcaccgagctgctcacgtctctgctccgtcctccctcatctttgtgcatgagcagctcctgtacgccgtcattttcagcggcgtagtcgtgtttctccgccggccagactcctcatcgtagtgtctcggtcctcctctacaccagcacaccaagccacagtcatgggacttcgtctcgtccgcactcgccggcaccggagcacccgcgcccttgcttctgttcccatggccgctcgccgggatgctgttcccagctccacgccgatgctcgcccagaacactctctgtcctcggcggttacaggactcagggtctatcaatgtcttcgatctcttgctctggtctccctggtcctcaacgcttgccaggaattctgtaaaatggagacgaaccaattggagaagggagatctacaaaattttatggatgaagaagaaaatgaagttgaga

SEQ ID NO: 281234 - DNA, 1057 bp, Zea mays
cctactcgatcgcgcgcgccgccaaggctcaggtggtgggatggccaccggtccggtcgttccggaagaacatcatgtccgtgcagtccgacaagggcgccgccgccgccaacggcgacaagtcctcgccggcggcaggcggcggtgccgcgttcgtgaaggtgagcttggacggcgcgccctacctgcgcaaagtggacctcaagatgtacaggagctaccagcagctgtccaaggcgctcgagaacatgttcagctccttcaccatcggaagctgtgggtctcaagggatgaacggcatgaacgagagcaagctggtggatctgctcaacggctccgagtacgtgccgacctacgaggacaaggacggggactggatgctcgtcggcgatgtgccgtgggagatgttcgtcgaatcatgcaagcgccttcggatcatgaaaggatcagaagccattggcctggcgccaagggccatggagaaatgcaagaacagaagctgaggagaagacggacggacggaagcttgcatctcagcaccaccaggggtggatggatgcaagaagaacaaatctccatggcttttgcagctctgctcgtctctgtatcatactcgtcgtccctgcccttcaggcctctgtatctccctgatcaatgaagtcgttttggtgtgtcaactgttctctccgtgcccagcttgtcagtgaaagagtcagtcagtgtccatcaagtctcatcttgtcctatacagaagagagaagccatgcatgaacatgtacctgtcctataacaatgtctttttttgctacctgtttttttttctctctctctctttttttggcacaagatgcaaaggcaccctgctcctgatcaaagggccttttgcatcataagctgtttgattataattaccatggtgtgtcagtggaacaaataactgttgcaaggtgttaaaaaaaagttgtattgtaatatgatcacctctcttccttgttgttttcatcgtctttggcattagctgttccatggaacaggattatttatgtaagctccagag

SEQ ID NO: 281235 - DNA, 686 bp, Zea mays
gccacgcctcccttcttatgactgtgatgcaccgattaaggagcatggagatgtgcataatgcaaaatacaaagcgctaagaagagtaatacatgagtgtactgggactcctctccatccacttcctgctaacattaaaaaagcaagttacgggattatgaaattacaaaaggttgtttctctgtttgacatcattgataatatcaatgatcctctgaaagtttctgtttcggagcatccactttatatggaacagataggccagatgtttggatttctcctgtacatgtcagaataccaagggaaactcccatcaagcatcctgtcaattccaaaggtacatgacagagctcaggtgtttgtgtcttgctcagctggtgttagaaccctaagatattgtggtgtaattgaaagatggtctaataaaacactagagataccgaacttaagatgttcatctaagaccagcctatatatcctggtagagaatatgggtcgtgtaaattatgggccatatatttttgaccggaaggtagtactatctcctattcaaatagatggcattactctccggtcactggaatatgtatccactggcactcaattcactggatatcctgccaaaacttcaactaatcactcaaataccttatgctggagccagtatattgtccattcatggcgac

SEQ ID NO: 281236 - DNA, 427 bp, Zea mays
gtggttccgctcctcctccccatcgacatcacgggggggccgtcggcgccctgctggtgcccttcgacccggagcatcgtcctccgcatagcggccgtgctcgccgtggcgtgcgcgtccctgctagcgcagcacgaggccagcaagggcttcgcagtcgccgtcgcgaacgacgcggcgcggggcagcgcggcggcgcggcgcggcgacctgcacttggcggccaacggccgcgccgagcgcgccctcctgcgcgccagccgcgccgtggagcgcgcgctgttcccggacgcgtcgttcccgcgcaggcaggtgcggcgcgtgaccgtccggatggccgcgcgcaacctcaccgcgggcgcccgcgccacgccgcgcgccccggccccgaggagtacgtcgtgttcctgagccccgcctcgtcgcg

SEQ ID NO: 281237 - DNA, 580 bp, Zea mays
ataccttcaaaatggcacctcaaccttctgctttcttgccagctcctgttactcagaccaattcatactccttaaggccgactgtttcttcttcagccacatcaggtgcgaaaacttcagatgttttatctagctcaatgcagaaagtttctccaatagtacctgggggtactgtgtctagctcagtccctactcctgctaaggattcatcaactggattgagtcaaaatgcttccaaacctgaaacgctaatatcaaaggtaactagtaccatagtttctgcaagttcgacttctgtcatatcagtcactgaaagcaaaccttcagtgcctccaacaactggcgccagcttgccttctactcatgtctctgctcctcaaacagcaccaacaacatcggaatcagttttcacttccacaggaaaaaatgtaggaccaaacactgacaccatctcaaccgatgaagatgacatggaagaggaggcaccttctgcaagtgccgaactgaacttgggagcccttggtggattcggccttgggtcccagccttcttcaagtcctcaaaagtctaatccttttgg

SEQ ID NO: 281238 - DNA, 486 bp, Zea mays
  unsure (1)..(486): unsure at all n locations
cccacgcgttcggcagaatctggacacgctcttcttgcaggggaatggcctcaccggcagcataccgtcggagctgggctacctcaggagcctcagttctttggacctgtcgaacaatgcgctcaccggtgagataccggcgagtttctccgagctcaagaacctgacgctgcttaacctgttccggaacaagttgcgcggcgacatccccggcttcgtcggcgacctgcccagcctcgaggtgctgcagctgtgggagaataacttcaccggcggtgtgccacgccgcctcggccgcaacggccgcctccagctgctcgacctctcgtcgaacaagctcaccggcacgcttccgccggagctctgtgcggngggcaagctgcagacgctaatcgccctcggcaacttcttgttcggtgccatcccagactcactncgccagtgcaagtccttgagccgtgtccgtctcggngagaactacctgaa

SEQ ID NO: 281239 - DNA, 986 bp, Zea mays
tcatctcaaggatgaattgctgctcgggaggattggtattggagcggcgtgtattttatactttatcctggttttctctctcgagatgttgcatggtgtcagtgtgtcagatgtgccgtaacagatgactccaaaatggattgcatgctcttcaaatagctacagataactatcttcacataaaatggagagtacaatgtttataaaagaaggaatatggataaggatccagattctcctatagcatatgaagaggcaaaggaaatggcaagccaaagctgcacaatttctgatgatcactcgttgttactgttatccattatctcctcagaggcattgcttttaaattcaacagcagacatggcaggtaccggtccacttttttctcaaggaattgcacttgaggctggactttgtgggtcaagagaaaatttaatgccttttggtaataccaacctttagctttttttccatgatgatggagttggacaagtaccatatggagtataagtgttagcctattatatctttgtacaaccatggcaaacgaataatttcttatacccccatgaagataatgtttacccaagtgtgtttgcgtgcgtgtgtaatttcttcttttgttttgctgctaagtttgatagttcaaaacatgattcttgtaaagtttggttttagtctaacaaatacactcaagtcctgacatgtaaactgtaaagttggactgttgcttggtggatctgtattgaactttattttttttaaaatgttttatggcttgtatagtttgtattcacttctcacctaagctacaatttgtttttccagcctttcaagatttggcacattgacataatgacatgggttggtcacggactggatgtcaattttgctccctgtaccttgtagattatcggttatgtcaattttcgaaattttatcgtgatggataacatttgaataaaacatagttaaataaacatgac

SEQ ID NO: 281240 - DNA, 500 bp, Zea mays
tgttgttctagcaacccatggatttgtgggtgcggatggatcatctgtgtgcaatgaggctgcattgagtgctctccggcgttacatcagcctaaaagaaaattcaattcaacaacttggtcatcctggctgtagtttttataagtgtaatagtcaagatactgaagattcaagctcattatcgtcatctttctcaaagttgaccatgtcatcatatgttgcttgcatgaacggtggtaacataaaaagtagcgagtcttatgatgatacagatgaaataccactatatgtaaccaataaggattttgacaaggctaaaacaaaagttagaccgagtgcgatgcgcgaggttattcttgagcttccgaaggtacgttgggaagatgttggtggtcagtgcagtgtcaaggagcaactgattgaagctatccaattaccacaaaaatgcccagaagcatttgaacgtttagggatccgaccctctagaggattgctaatga

SEQ ID NO: 281241 - DNA, 845 bp, Zea mays
tggactcgtgggcggacgcgtgggcttccttttgatgggcacctaaaccaacctcctggcagcgtaattctgccagtatctcctcatcttctctcgtcgccgggagagcgaacggatcgccgcgtgctcggccgacgggatgagccgggaggcgcagaaactcgattgcgccaccggcggcggcggcggcgtcgggataggggtcttgtcgctggacctgctgggccaggtgctggaccgcctacgggagccgcgggaccgcaaggcgtgccgcctcgtcagccgcgccttcgagcgctccgaggccgcgcaccgacgcgcgctgcgggtgctccgacgcgagccgctcccgcgcctgctccgcgcgttcccggcgctcgagcggctcgacctctctgcctgcgcttcgctcgacgacgcctccctcgccgcggccgtcgccggcgccggcgggggcctcgccggcctccgcagcgtgtgcctcgcgcgggccaatggggtcggctggcgcggcctcgaggcgctcgtcgcggcctgccccaagctggcggccgtcgacctgtcgcacttgcgtcagcgccggggaccgcgaggccgccgcgctggcggcggcggccgggctcagggacctgaggctggacaaatgccttgccgtcaccgacatggggctcgccaaggtggctgttgggtgccccaagctggagaagctcaacctcaagtggtgccgtgagatctctgacattggaattgatctgttggccaagaagtgccctgagctccgcagcctcaacatatcctaccttaaggtgggcaatggatcccttggatcaatttcgtcacttgag

SEQ ID NO: 281242 - DNA, 539 bp, Zea mays
attccgggcgacccggcggacaggccgcgacctgcgagcggctcggaaggttctcctcccgtgtccgcgtactaaggtgtcccggggagacctgctgcacacgcggcggcgaggcctccatatctctctatcatcacggcgcgggggaggaagccagcgagtaagctgaaaggggagagggagccaggggttcacgcgctcgccggagacgacgacgacgacgacgacggaagatgggcggcgacccggggaaggtcatcaggaacgtgaagggcgccgcgcagaagtacctcggcgttggcttcctgctcggcttcttcctcgtgctcctcacctacttcaccgtctccgagcagttcgcgatcacggcgcccaacgctgttcggaggacatcgacgggccacgcgcacaccacgaggtcgccgatcacctcggccgtcgaagagaagaggcagcagcctcctgccatagaggagaagccacccaagccagaagttgcaccggaggagaaagcctcaaggaagagaagccgccacgcg

SEQ ID NO: 281243 - DNA, 166 bp, Zea mays
gccacatcatgctgctgtcagttccaagttatgttcataccatagatttgtggtatatacgtcgagtataatgcgacttctcttatgtgtaaatgatcatattctcatgtactacttggtagtcgattgtgcgcccataccgacaaaaatacttcccttggtttgc

SEQ ID NO: 281244 - DNA, 352 bp, Zea mays
  unsure (1)..(352): unsure at all n locations
gtcgtgaactaggttggtggaatatgtgatggagagtgacagagtacttgtcgtgtcgtatcaacgggggctcaaggcggcggggtggtcgtcataaaggaggcgaggtcgggccaggctgccgtacatgggcgcccggggaacggacgtgtgttgtgcttgtccggggcgttgttgtattatctaccatttactatttcttacaattcattcctgcagtataccatgaaaagagatatgacatgagctactagtagacgacaagacgagcaaaagctttgatgtatgtgtgcacctactctttatacaatcaagtgttctcatttaagtaaaaaaaaaaaantaanaaaaa

SEQ ID NO: 281245 - DNA, 139 bp, Zea mays
gttgttataagacagccatcattggataatcaaaaggcgcagcctaagaggagtattgttgagtgcctcgagctctatattattggcaggaagctgtagcatttaccatgcatcaggtaattataagctctctttctcc

SEQ ID NO: 281246 - DNA, 446 bp, Zea mays
gccgttgtcccgagaaagcagaaggggaacggcaacctgctgagaggatcctgacgggcaggaggaaggaggccatggccaagccgcaggtggtgttgagttcttagctgaccgaaagaatggaggttttggacatggcaaagtcatcgtttcatgtgtagatggagtttgttcgtttgtgtgtggagccatgttcatgtgaggttagtaataaagtcgcaggctgctgcgtagatgatgtatgtattagtgtggtgtgtgtgtgtgtgtcagtgtgaggtagtgctctgtcatgaactcatgaccctgttttctgaagactacctccttccttgtgtgttctggggaggttcctgaacctgtttgagatagtgctagttgcctagtatgttggcaatgatatatgttagtgtgcttcgtctgaaaaaaaaaccttgttttgaatt

SEQ ID NO: 281247 - DNA, 943 bp, Zea mays
cccacgcgtccgtttgaccccagtactccactaacactcatcagcgcgccgcggggcgcgggcggacgtgcggcgctcctcggacggccgcgatggcggaagtggcggcgcggcgcgccgtcggcgtcccagcagggggcggcggcgaccaggcgaaccttgcggcggtggcggcggctatgcgggggcgcggcgaggtggacacgtcgtcgccgttccagtcagtgcgccaggccgtcgacctgttcggcggcggggctgccgccgtctcccagtggcgccacccgcaggctccgccgcgcgtccacctccgcccagaggaagaagaacttatgaaagttgaggaacaaacagtgaagctggagatggaactgttcgttaaggaaaaggaaacatttaaggtcttgaaggaactacaggaaacaaagcaggttatagatggcttgaaaatacaaatagagaaggtaacatgggaggacacaaatgctgcaaaaggccatgctgatacagggatggtacatccacttcctgctgtcgaacaaaataccgagccaccagtccagagcgcaaaaggtacacagtccccactaaccacgttgatcaagctcaatcaggcaaaagcattccttaacacggataccgtcaacatgctaaagagccagatacagaaggagaaaggctcgcttgagaaaacccgcgaaaggttacaattcaacctggggaaggcttcatcgttagaagcagatttgacgaaaactgtcgcacggctgcaagcagcaaaagctccacagcctgtccttgagccttctgaaatctggttgcagatgaagcacctgaatgctgacaaggcgaggcacaagaaggcgtcagaggatttgaggaacgagatctgtgagctgacagctgcaatcgagcacacgaggtctaagacgaagactctgca

SEQ ID NO: 281248 - DNA, 521 bp, Zea mays
aaaacccttatctttccctctacgcactcgcgatgctccctccagtcaccgcaccgacccatccgcctccgccctgggaatcgacgaccaccactagaccgccgccgccacctcctcctccttccggcgccgagtccgaggtgccgccaaagaagcggaagctggagggggtggggtttcagcgctcgccctattacacgatcagagaaaccgttgcaaatctccgcgtccgcttccttcaggtttgccaaggaactgattcagaaaagaaagatactgctgtaggaatcttgaatgagatgaaatctgtgatggaattatccaagaaaacacggcttgatctgtccgcttctgctgaacctgtgaaaccgttgaacaaacatgcagctagagctcctgaagataagcgtgttgggaaagttctgtctgcagagaagagtttagttcctccgacaagcctgggcctggctggacattttgtgcacaatacaggtgggggtgtaccactcaagcctgataac

SEQ ID NO: 281249 - DNA, 773 bp, Zea mays
ttgcctttctcgcttccccgtctcgccccagccgcttcccccctcccctaccctttccttccccactcgcacttcccaaccctggatccaaatcccaagctatcccagaaccgaaaccgaggcgcgcaagccattattagctggctagctaggcctgtagctccgaaatcatgaagcgcgagtaccaagacgccggcgggagtggcggcgacatgggctcctccaaggacaagatgatggcggcggcggcgggagcaggggaacaggaggaggaggacgtggatgagctgctggccgcgctcgggtacaaggtgcgttcgtcggatatggcggacgtcgcgcagaagctggagcagctcgagatggccatggggatgggcggcgtgggcggcgccggcgctaccgctgatgacgggttcgtgtcgcacctcgccacggacaccgtgcactacaatccctccgacctgtcgtcctgggtcgagagcatgctgtccgagctcaacgcgcccccgccgctgctcccgcccgtgacgccgttcccaaggctcgcgtccacctcgtccaccgtcacaagtggcgccgccgccggtgccggctacttcgatctcccgcccgccgtcgactcgtccagcagtacctacgctctgaagccgatcccctcgccggtggcggcggcgtcggccgacccgtccccggactcggcgcgggagcccgagcgaatgcgaactggcgtcaaaagcccccgtcgtcctcttcctcgtggtcaacaagaa

SEQ ID NO: 281250 - DNA, 888 bp, Zea mays
  unsure (1)..(888): unsure at all n locations
cttacgcttccgaagcgctggtgctctgggaaacttgagccacctcctcagcgagacggctcaatcatcaatgctgatgcccgtgtatgacaagaatcgcgctgaaactccaaacttggcacgccctaaggtgccaccaaaggagttgttcctggagcagcttactgctggacacgagagtccatcaacctgccgctcatcaggccaaactctctatttccctttccaacagcctttaggctacaacagtgagagtggcagtggcgatggggcgaatatgaattcactctggttcaaccagagtgacttcaactgcagcacaatttctacagtgatgccgccagcttcaccatcggccctctctacatcaatggggctgaatcttccacctgataattctcgacatggaggaactggcattggaagtactgcagtagattcattctactgggatggtactaatcctagcagcagtagcagtactgggagcagaggaagcaacagtatgggatttgaaccacagagcacgagctcaattctggagaacagtgtcttcccatggacagacatcggacaagaaaaagatacaagggctcacctggtagcggaacttaagtggcctgacttgctccatggaacctttgccgagacgaccacagccatgcagaaccagagccagacgctctatgatgacgtgatcaaggcagagagccaattcagcatggaagggatatgtgcttcttggttccagaatcagcagccacagcaacagcttcaggcaacaccagacatgtatgacagggactngcaaagaatgcaactgtnctttgagaatatctaggcattatgttncacatggaacagagcagatcagcagaagccagaatt

SEQ ID NO: 281251 - DNA, 520 bp, Zea mays
cccatgcgtccgcattccctcacctgccatggcgatccatccccggaccaccggcggtcgcaggcagccgctgccgctacccctgaagggggccctcctagccgccatcgctgtcgcgacggctctctccgtcctgttcgtcctgtccttcacggacacgctgaccttcacggacacgctgccctacctggggttccggccccgggacgtcgacaagagggacggcaaccggaggtacctctactggggaagccgcgtagactgccccggcaagcactgcggctcctgcgcgggcctcgggcaccaggagtccagcctccgctgcgccctcgaggaggccctcttcctcgacagggtgcttgtcatgcctgcaaagatgtgtctcagttcagtgcacaatacaaagggggtccttcaatcaagcaatgcaacttcacaacaaaggtgggaaacaggttcttgtgcatggaatccttatacgatattgacctcatatcaagaaccgacctgtaatttggat

SEQ ID NO: 281252 - DNA, 532 bp, Zea mays
ctcatgactcacccttcctccccagctttccaccaccttgtatacagcgcacgctcggctcgctagctcccgccaagcgagctctcctcctccacttctgttccatgcaccgccgcccgctccaggttcctacttcctagctaggcgaggctggcattaaagactgaacgcgctccgcgtgtttcgtttctgcgtgtcggttcgccttgctgggatggagaggccgtggagggacaaggacaagggagcggcggctccggcggcggggagggcgccggcggtacggcgaccagccgtccttctcgtccacgctcctcgacgccatatacaggtccatggacgagcctgacgacggggtaacatcgtcctcctcaaccgccgccaagaagcagaaccaggacctgcgccacagctgctactactacaaggcgtcgctggcggcggtgagctaccgcggcagcagcagggcggcggcgcccccgtggccacaggccgccaccacgtcgagctcctccgatcagtgctccagcta

SEQ ID NO: 281253 - DNA, 480 bp, Zea mays
ccggtttattctctactcttcttccccagtcctccctactcagtacttacctcagcacgccactgctcgaaggcggagcgcctccaaaatccatcccaatcccaaatcctctgaattcggacgccgctcgccccacgcagatggatgcccgcccctcgattcgcccgcgctgagcatccgaacccggttcccgccgcctcggctcattccggcgctgaaagattcagctccgcgcttccggccgccggagctcggtaatggcggggttctagcgcggcggacttaaagatctagcctcctcttttcctttccattttctctctttcgctgctaccccctcacacccccacggcgatggtcacggagatggcggcgcgcggcggcgaggcggcgcgcgtttggcgccggagaccgaccgcggcgacttcgaggtggttcgcagatggctccgcgccgcccactgtcgagggagccctgggc

SEQ ID NO: 281254 - DNA, 301 bp, Zea mays
tccataaaagtcgcatgggagatcttcaattctttagatgtcaaatatgtgcttgttatctttggagggcttattggctacccaagtgatgatattaataagttcctctggatggttcgaatcggaggtggtgtattccctcataataaaggaagcagattaccttaaggatggcaactaccgtgtcgatgctcacaagtaccccaaccatgtagaattccctcatgtacaagcttatgctaatacagatttgctctaaactgatggttagggctttgtatgcagtgagtcagagtttgaa

SEQ ID NO: 281255 - DNA, 490 bp, Zea mays
aagcgaataactccactccactccactccacctgttagaggcaagctagctcaagttctctcagagcttcttgccaggaaagcgcgcaggaggtcgacgggaacgaccatggtcagcgccaagagacttgcgcaaatggccaagaagtggcagaggatggccgccacggcaaggaggcggatcgcactggcgccgccggcaaaaggagccgccgagggatcgtcgaccgccgtgcagcacctcgcgtgtagctgtagccggcaagggccactgcgtggtgtactcggcggacggcaggcggttcgaggtcccgctgccgtacctcgacaccgccgtcttcggcgtgctcctcggcatgtcgcgggaggagttcgggttcgccggtggcgacggcaggatcacggtgccctgtgacgccgccgccatggagtacgtcatgtgtatgattcagagagactcgtcagaagaagtggtgagggcgctcctgagc

SEQ ID NO: 281256 - DNA, 558 bp, Zea mays
cggacgcgtggggtccggccaggcccttggcgcgcgtcgctggctcgcctcgctccagcgccagtgccagtacctcgccatcctctgctccaactctctccctgcccgcgaccacgccgcgatcacgccggtggggcggtggagcatgctgaagctggcgcagcggatgacggacaacttctgcgccggtgtgtgtgcgtcggcggcgcagaagtggcggcgcctggacgagtggcgcagcggcgagggaggagacgctgctgggaacggcggatcagcagccgcgggcgagggcgaggagaaggtgcggatgatggcgcggcacagcgtgggggcgcccggggatccccccggcgtggtgctcagcgccaccacgtcggtgcggctgcccgccacgtccccgcagcgcgtgttcgactacctccgcgacgagcagcgccgcggcgagtgggacatcctggccaacggtgaggcaatgcaggagatggaccacatcgccaagggccagcaccacggcaacgccgtcttccttctttcgccaaatgtaagcactactac

SEQ ID NO: 281257 - DNA, 485 bp, Zea mays
gtcgacctattcgtccgcagaataaaccttgagctcgtgcccatccgttcgtgcgccgtgactctcgtcttgtgcactttgacctgccattcctacaagcagaatggaagaatctgtctcggggtcaaattagtgtaaagtttcagtttagctttgaatctgtcatctgtgtggagggcaatgcctttatgctgtgttttccgttcttgtctctatgatgttgtatgtatctcattgtagatttgtctagactgactgttgggctttattagatttttctgaatgtcgtatagggcgcagtgtgaagcgtctgaatatttgacttgttaaccaccctctggagtctgtatttgttcctgcacaaactggagcgtcagttcccatgttttctgttatgtacacctaccagaatagtggacagctcagcaatggtgaaacagttttttttcccatgtactacactttttctaaaaaaaaatataaaa

SEQ ID NO: 281258 - DNA, 864 bp, Zea mays
gcttgtttaaccaagctttagcctttttggaatcatgctggctgtttcggttggagtcctactaacagatgccaccgagacagaatttaatctgcggggatttatgtttattatgcttgctgctgttatggctggtttccgctggtccatgactcagattcttctccagaaagaggaatacgcattaaagaatccttttaccttgatgagccatgttgccccggtgatggcaatagtaacagcaattatttccatcgtgatggatccatggcacgacttcagagcaagtcacttttttgatagttctgctcacataataagaagcagcttgttgctgcttttaggtggcgctttggcctttttcatggttttgacagaatatgtccttgtttctgtgactagtgctgtaacagtgactgtagcaggaattgtgaaggaagctgtcactattctggttgctgtgctattcttcaacgatccatttacatggttgaaggcgcttgggctagcaataataatatttggtgtcagtctattcaatatttacaagtataaaaggttcaaaaaagggcattacaatgaaaatgctgggacaaatacccaatcttccaattggacttcaaaatacgtcatccttgatgaagatactgaagctcaagatgatacaggctgatctgaatgtgatagaatgcagactatatatggcgcttccagagaagcaagatcatctgtgcctgcatagtcttactttcacaggctaactgacttcatattctttgagttcatcaattactctggtcagccatgcacgaacatgacgcttgcagccgtgtggccaggtgggaagattacacatacatggga

SEQ ID NO: 281259 - DNA, 539 bp, Zea mays
ctctcgcgtccgcccacgcgtccgaagacacgtctcatgttgggtcagccatggggacgtccctcccggcctcccccacccgccatcgcccaaaaggagcagcgatccatccatcctatcccctgtgccaaaccctagccggctatggagcatcccgccgccacctcctcacctgatccgacgccgtagcacctctccctgtccctgtccccatctccctccgtctccctggccaagcactccacctggaagcaccctgccccgaactgcaccgcagtcgtcgacgctaagcgctggcccacgctctccaaggttgcaagggtatgaagctcctagactcctcggatcccttacttgcgcccatcgctgcccaatcggtcagatcccttctctttgcgttcgttggtgtttcgtgccgccggcatggcctgcgtggtgacagtgaggtatgaggcggagctgacgttgatgcaaaattcatgtacatcaagtgccagatggtacaaaagggagtcatgaaggaccatgacatttcatta

SEQ ID NO: 281260 - DNA, 500 bp, Zea mays
cccacgcgtccgctcatgttgggtcagccatggggacgtccctcccggcctcccccacccgccatcgcccaaaaggagcagcgatccatccatcctatcccctgtgccaaaccctagccggctatggagcatcccgccgccacctcctcacctgatccgacgccgtagcacctctccctgtccctgtccccatctccctccgtctccctggccaagcactccacctggaagcaccctgccccgaactgcaccgcagtcgtcgacgctaagcgctggcccacgctctccaaggttgcaagggtgatcaacttgctattgggaaggaaacaacacgtcgtttgggaatgggtactaaatgtaaggatgagtcacttgcttcattgccaattgatgaattgaccgagaaggctgatggctttgctagagtctttccagcttggttttatgcttcttgcgctgatatggaagtttgacttcccaacatttaccgtccagatcat

SEQ ID NO: 281261 - DNA, 500 bp, Zea mays
actgcgaacgcatggtgatggtcgtgatcgcgatcaccgacacgagcgaatgcgcactgcgcgcgaccgcgtcctaggtcgaactcgatcagcagatcgcccgcttcgacgcgtgcgccggcctcgacgtgcgcggcgaagccctgcccgttcagctcgacggtgtcgatgccgatatgcagcagcacttccgcgccttgcggcgtcgtgatcgtcaccgcgtggcccgtgcgcgcgagatgcgactcgatgcccgcgcacggcgcgacgagcttgcccgcgagcgggtcgatgccgatgccgtcgccgaacatcccgccggagaacaccggatcgggcacgtcggccaacgcgacgatcggccccgtcaaggggctaagcaggacgatctgatcatgggtggggctcttcaactgggactcctcggcgcgtctcatcggctttctcggctatcagtgcgtttcggtgactttgttcaggtggcgcaaagaaacgggagt

SEQ ID NO: 281262 - DNA, 811 bp, Zea mays
cggacgcgtgggtttccaaagtcatgatattttaagttcaaacccttcgactatgaatcaaagaaatggacacctatttcatgcatcatctctgggagagagtacacatactccaggtcatgtcacattggatggatacgaacacacaacttattctcagcgaagtttcccaatctatcgtgggcaaccatttcagcagtacaacaacatgacttccagttacatccgaccgatgagggctcatcacaatggtcagcctgtctggtctaattataggctgacagaacctccaccaactacaatgggtgacggaatgctctggggagggaggggggtggccattcgtttgcagcgagcggactgccacctacacttaggaaagattttgggagaatcttttagtcctgaatccggaggaatgccgaatgccaccaaattgatggcatcagttgtttgcatctgcaattccgggttggattatttgctgggggtgcctactggtattgcaatttgttgtgttcctccgatgtctcccaggatgttcggttcaaatgattatatggtacgggatatgattacagtgctcgttctttgctatacctgcacgatctagtagaaaaatgtcagttgtgctacttgatgcgaatcttgctagttcgaggtttgggagagtttttctgtctcggttattgtcttcctttctctattctatttttgacagagggttaagttcctgaaccttaacatggctaagactgaagtgaaggccacgtggtcgtggtgacataaattcgcttttgtgatgctgttt

SEQ ID NO: 281263 - DNA, 485 bp, Zea mays
cggacgcttgggttgcaattcttttctgcttcggtgccaagaagctgagtagtgagcactgcaggtctgtgttgtagctgccaagaaatgagcttggggacctgcccggccgcggccggcgacgcgacggcagaggagctgcttcaacgggcgcgggggctggtgccacccgcccttgccgctgcgcgcgcggccactggcttcggtgggcggtggaaggctatcgcagcgaggctggagaaggtgccaccgtgcctgtcggacctgtccagccacccctgcttttccaagaactcgctgtgtcgggagctgctgcagtcggtggctgcgactctagcagaggccgccgagctcggtgcgcgctgccacgagcctccgaaggcagggaagctgcagatgcagagcgacctcgacgctctggccgggaagctggacctcaacctcagggactgctcccttcttgtcaagactggcgtgctgtctga

SEQ ID NO: 281264 - DNA, 713 bp, Zea mays
cggacgcgtgggcggacgcgtgggcgcgaaggcagtaaggcacccagcagcagccgctcccgaaccgaggaaccctaccacgcgggcgacggcggtgcgcgaccggtgtcgggacagcggcagcgccccctcctccatctgctggtcccaccgcctcctgacgttatccgatactgccaatccccctcttcgccgttgacggagcttaccgaggaaagaagggcagggccatggcgggagccttcgctctccgcctcgtgcctcgcctcgccgcagagccggcggcgagggggaagggcggcggagggaggagccaaccgcgacgccggcagcagggcggctgggtgtcaaagaaaccaaacaagcagcagcatttggtggatcaggaaggagacagctgggtcagggaagaaggctctccgtcttattgatgcttctgtggaaccatatcttttaggtttcgaagttaccaaacgaaagagaagctatttatggtgcattggacaagtggagtgctttcgaacctgaatttcctattatagcagcagcaaaagctttggggatgttgaaaaggcgacgacaatggttaagaataatccaggtaaccaagtggttgatgagcaaaggacaggtgctgacatggacaacatatgatacacttctgctcgcacttcttatggataaacgggtagacgaagctgagtcagtttgga

SEQ ID NO: 281265 - DNA, 459 bp, Zea mays
gccccgagtccgtcgccgtcacggtgacgccggcgaggctcacgttcaggcaggccggccagaagctcaggtactatgtcacctttgcgtccagggctcggcaaggccacgcgaagccggacttcgggtggatttcctgggtcaacgatgagcacgtcgtccgcagccccgtcgcgtatacgtggaagatgtgatgtgaggttccctgcccgcctcacatctagctcgatgacgaaggaataggataggttggtgtagtttgctcaccgcttcgcaaagagaatcggcgtgaagctctctatctctctctctcggctgcagtgcagacctgtacttgtttcctatctttcttttcggacatcaagtaaccctgaatctgaatgacgaatccgccgtttggtgtttgccataaaaaacaaaaatacaacaatcaaaggtcggccgctcgcgatctagaac

SEQ ID NO: 281266 - DNA, 766 bp, Zea mays
cgttccgttcccagcggttcccaccgcgcatcaatcaaaccctaaaccctgctctcgcgccgccgcccgcccgcccgcccgctatgtcgctgccacacccggtgccccgagagacggtggccagcgccgtcgcctccctcacgatgtggatgaagaagcgcacagcgcagacgcgcccaaacctcctcgccgacgagcgcgacgacctcgtcgtcctccagctctcgctccgccgtatccccgcctcgtccagcgccaggccgcgcctcctcccgctcccgcatcccgtcatcggacacgacggcgcctccgtctgcgtaatctcggacgaccgccccaagtcgcggtccccttccgcctccgatctcctccacgcgtcgaagtcgctccaccgccttccagtctctgacgtcatcccgctctccacgctccgcacggactaccgcccctacgagtcgcggcgccgcctcgcagcctcccacgacctcttcgtcgccgaccgcgccatcctccccctgcatgccgcgcgtcctcggaaaggcgtctaatcaccaagaaggctcgattggagtcgatttcacccgcatcggatggccggagcaggtccgaagggttcttggctctgcttttctgtacctgcggtcagggacctgctcggggattaaggtgggtaggctggacatggaggaggaggatatcgtggacaatgtgatggccgcggtggaggaggctgtcgagaaggtgccaaagaagtggggcaatgtta

SEQ ID NO: 281267 - DNA, 508 bp, Zea mays
tggaaacagaaagtttgaaagggtaactgggacgcacattggtggtggtaccatgtttggtttagcaaaacttttaacaggctgtaagagctatgatgaattcttgcaattaagccagaaaggggacaactttgttcttgatttaattgtcaaggatatatgtggagagcttgtctgccagaagcaagggctttcaacatcaactcttgcttctagctttgggaaagttattacttctaagaagaagctgacagactacaagcctgaagaccttgcatccacattgttgagcgcctttacctacaacattgcacaaattgctttccttgttgcatcacttttgggcctccgaagggttttcttcggtggatcatattaccgggtcacaaaagcacgatggaaaatatttcttatgcaattgatttctggtcacagagcccaatgcaagcagtatttttgcgacatgaagggtatttgggagcactttgtgccctgatgagttatgggg

SEQ ID NO: 281268 - DNA, 519 bp, Zea mays
gtaaaacgatacgtggcttccatgtatgactgggaaggcatgtcgaaaatcaagaacatcgaacaacaacaaaaatgatgaatctgaatcaagtttcattcagaaggcacttgtcatcgagaagattagacttttttgggctgataaatatcgtccacgaaatttaaatggatttacttgccacagggagcaagtccagcagcttaaacaatcggtctctgcagaattttgcccacatattattttcaaaggtcctccaggatcaggaaagaaatctttgtgcagagctgtcctcactgaaatttttggcgattcatctttgaatgtctctcactatttgaagagctgcaatggccaggggtccatatctgtgcctattctcgtcccagtttcatccagcaataaccatgtggaactccacatgaggtttcaattgaagaacgcaatcaatgctttgatgactctagcaaatgaaatgtctgataagtgtaaaatcactgagccaattgtgagaaagag

SEQ ID NO: 281269 - DNA, 468 bp, Zea mays
ctcgctgcaagtgctgcgacggtacaacggcgagctggagaggttcctccgctccgtcccgcgcgagcgcctgcactccctggtggtcggcatgttctgcaccgacgcgggcgacgtcggcgcaaagctgggcgtccccgtgtacacgttcttcgcctcggccgccgctactctggccgtcgtggcccagctgccggcgttgctctccggcaggcgagcgggcctcaaggagctcggggacacgccactccagttcctcggcgtcccgccgttcccagcgtcccgtctcgtcagggagctgctggagcacccggacgacgacgagctgtgcaagaccatggtgggacgtctggaagcgctgcacggacggcagcggcgtcttggtcaacacgttcgagtcgctggagagcccggccgtgcaggcgctgaggggtgcccggtgcgtgcccggccgcgtggtgcccccgg

SEQ ID NO: 281270 - DNA, 932 bp, Zea mays
cttggcttgtacgaaagagctaaataggtggttctcaaagcaatttgagaaggggccatttcgacttgttgctgaggaggggaaatccaaatgttcctgggttagtcttgatgacatcactaattgcttgataagaggagattctgcaaaatcgcatcatcaccaacgtgtcgctgagttgcaacgacttcggtccatatttgcaacaagtgaaagacaatggattgaagcgcaggttgagaatgctaaacagcaggctatactctctatattgaaagcacaagtgtcatccgacgaggctcatatacatagggatatccattctcttaggagaaaaggttctgagcttgctggagagctctcgacactttctcaaaaggtgcaagctttggtatctgagacaataccgtgcctgtgttcagaacttgctcaacttcaaggcacatatatcttgcaaggggattatgatttaaaggtcatgcgccaggagtactacattaacaggcaaaaaacgttcatcaatcacttggttaatcagcttgccagacaccagtttctgaagattgcttgccaacttgaaaggaagaatatagctagtgcgtactcattgcttagagtaatagaatctgagttacaaagctacctttcagcagtcaatacccgcttgggtcattataattcattgattcaagctgcatctgaagtacgagaacaaggagctattgatgatcgtgacactttcctccatgcagtgcgagatctcctatgtattcactcaaatgtccaagcaacagtgccaacatacatgtcagcacatgcattggttcagcagatatcagcactttaatctgacttgctttctcttcagtctgagctggagaacacccttccagctgaccggaaaagatgtatcaatgaattatgtactctga

SEQ ID NO: 281271 - DNA, 703 bp, Zea mays
atcagtcatgtatagttatgctatcattgtgcccgtcgtgttctttttcctgtttcagtattttggatcacgcccaagtcttgttcgattttggtgtatgtggggctattctctgtttatcttcatacctgcatctgtacttttgcttattcctgtgggatttcttcgatgggtcatcatagcccttgctggtggtgcatcatcttggttcatcactttaaatttgaaggaatgcactgaaggagctgatctaatggttctgatggctagtgcatcagtgctgcaatttgctctggcactgttcatcaaagtttactttttcgcctgaggtttgcttgatgattttgcaaaggtgacctgatgcgccctttgcccacggcttgttctgtaatacatcttgtgaaagggcatggcagaccagttctactcgacatcgtgacatacgtactgaccctagattgttatgctttgggcgttcttcatttgaagtgtctaatctgcaagtctctatctagctagggaacagaattttacagcgtgccgtacagagtaccgagtttaggcaccaaagtctttccacgttgttcagtgaaagcccttcacttgatttgcatacaatcctttcttgggtacagatatccagtgtgtatttgtgtgctaccaaatgggagctgttcaaagtaatggccaaagaccttattcg

SEQ ID NO: 281272 - DNA, 1417 bp, Zea mays
tgtatacatgtacaggtactttgttagattgaatagagaaggtaatgcaggcggcagccaccaacttcctcacgtgttgcaagagaggttgcatgctttatctgctgctatcaacgcattgcagcttgttgatccctcatttgcatggctcgattctatttgtgaagccgatgataaaatttctccaagtaaaagaccccggaatcttttgatggagaactcggcttttggcacaaactcagaactttctagattgcaattttgtgttgacattgaaatccttgaaaaagaatacatattaacagaagcacagtatatgctcagcactttgaaatcaagttttgatttttcagaaagccaatctattgagtccctgatggatattcttataaatgagaaattgtatgatatagccttcacaattgtgctaaaattttggaaggagtcagaaataaaaaagcaattggaccgtgtattttcagtcattgcgcacaatgctgctcgaacagatcagacaacaaatcaagtaaacaagtgccacttctgccttcttctgagaatgatgcatgggagatcaacaataggagtattgctgtgacccaacaattgcaggggagcaaccactgggaaacccttgaactatatttggataaatacaaagacctgcatcctaggttgccagtcattgttgctgagacgcttctttatactgatcctgagattgagctaccactttggttggttcagatgttcaaggctaataaggcagggaacaagatctcatggggcatgtctggaaaagaggcagatcctgctgctttattcagactgtacataaactacggacgccacgcagaagccaccaacctgctggtggagtatctagagtcgttcgcatcgtcgaggccagtggacgtcctccaccgcaagaagatgtccgccgtttggttcccctacaccgccgtcgagaggctctggtgccagcttggtgagatgcaacgggcagggcacagcgtggatcagtgcgaccggctcaagaagctgctgcacggagccctgatgagccacctgcagcaggtcgtggtcgactcggatgatgtgctgtcgtcagttggagatgggcaggggatggaggaccagagcagctgaagtcctgaagatcgtgttgttggcatgtgtagaaaacgatgtgccacccctggatactgtatgtgattgtttgtgtggtcagctgaccaagagttacgcctgtgtcttttatatagaattattattagatgaaaacaaagacggagcgatggctccatttgtaacgtgagcatggaactgtcgctgatgacgagctgttcacttcccatgtgtagatgtagaaggtggattgacgcatccattacagcactgctgcctggtattgtat

SEQ ID NO: 281273 - DNA, 514 bp, Zea mays
tttcgttttaacataccaaatttttttgttacacctggggctgtagatttaactttccatgctaattctcatgagattagagtgtcagaaacggagagtgctgtttgtagtaatgtttgtgcagaacaagcaaagcctggtctggaggaaagcagtgatcgggcaatggcctccgctgagtggaatcgccagaaggaagccgagcttaatcagatgttattgaaaatgatggaagtcatgcctgggaaatttgcgggtgctaatgccaccgctacaggtctcagttccaccaatcagcaaaaagctgtatctcatggccagcatacagagaagcgagacacaaaagtcagaactgagaaaggcacaaggcgaccagcaaaggaaccaagcaccaagcccttgaaggaaacagctgggaagaataaaccagcaatgacctcgaaatctggctcttcaacagagagacgtatttcaccagttccacaaagggcgcggcgaaattcatcacctccag

SEQ ID NO: 281274 - DNA, 740 bp, Zea mays
  unsure (1)..(740): unsure at all n locations
gcttgttgtcgatnccagctccatgcgcccatgattttctttacttgcgttctctcgagtccgcagcggatcttatcagctgcttgccttctgcagaagaaaaagaaaaaaaaaagaacagccttgttagttgttactacttcccatcgttcacccattcatattttttttcttggttcacaaagtaagaggaagcacaaactactccaacttcatggcggacttggcgctagttggcttaaggtgggcagcatcgccgattgtcaacgagcttcttactaaagcttcagcttacctcagtgtggacatggtgcgtgagatcgaacgactacaagacactgtcctgccacagttcgagttggtgattcaagcggcccagaagagcccccataggggcaagctggaatcctggcttcggcgtctcaaagaagccttctatgatgccgaggacctgctggacgagcatgagtacaacgtccttaaggccaaggccaagagcggaaaaggtcccctgctccgagaggatgaaagctcctccactgcaaccactgtcatgaagccttttcattctgctatgaacagggcacgcaacttgctccctgggaacagaaggctaattagcaagatgaacgagctcaaagctattctgacagaagccaagcagcttcgagatcttcttggcttgccacatggcattactaccgagtggccagctgcagcacctacccatgttcccacac

SEQ ID NO: 281275 - DNA, 463 bp, Zea mays
ctcacgcgtccggacatctaataagaataacactgctgatcgtggtagcaaatccgagattggaggcctcagtgccatcttaaagcttctatctccaaacttaatcagatcgactcttctactctggactgtctttcttggtcatgcctttctgtactatggtcttgttctactcacatcagaactaaatcatggaaataggatctgtggatcagaagagggggcagaagtgacaacaacagcccacatacatgatgagaatctctacagaaatgtatttataacaagctttggagaggtccctggtcttctcctgtcggctgccattgttgacatgatcgggcgcaagctctcgatgtcttccatgctttacatcagttgcctgtgcatatcttcccttatgttcgcccagacggaatcgctgacgaccatctttttgttctgtgcccgggtttgcatctct

SEQ ID NO: 281276 - DNA, 1102 bp, Zea mays
cccacgcgtccgcggacgcgtgggttctggtattagtggaacttctgtgcgacttactgctggagctggtctccctgttcacatgaaaggtgaactaaacacagctttcataggactgggggatgacggtggatatggtggtggctgggttcctttggcagctcttaaaaaggtgctgagagggatcctaaagtacctaggagttctatggttgtttgcacaattgcctgaacttttgaaagaaatactaggatcaatcttaaaggacaatgaaggtgctctcttgaatttggatcaagagcagcctgcactccggttctatgtcggaggatatgtatttgcagtaagtgtacatcgggttcaactgcttctacaagttttgagtgtgaaaagatttcaccaccagcaacagcagcagcaggctcaaagcaatgctcaggaagagctagcagcagttgaaatcaatgaaatatgtgactaccttagcagacgtgttgcctccgaaccatatgatgcttctagagttgcttcttttatcactttgcttacattaccaattttggttctgcgcgagtttttaaagctgattacatggaagaaaggtctttccccggttcatggggacattgctactgcacagagggctcgcatcgagctttgtttggagaatcactcaggatcagcttcgtctgataacaccgagaacagcagtttagccaagagtaatattcatcatgatagagcccacagttcagtagaatttgccctgacatttgtacttgaccatgctcttattcctcacatgaatgtagctggaggagctgcctggcttccatattgtgtatctgtgaaacttcgctattcttttggggacaacaatcatatagctttccttgctatgaatgggagccatggtgggagagcctgctggttgcagtttgaggagtgggaaagatgtaagcagaaggtttcaagagctgtggaaactgtgaatgggtctggtgtagctggagaggtaggccaaggaaggctgcgaatggttgcagagatgatccaaaagcagcttcaactctgtctacaacagctaagagatgacccactt

SEQ ID NO: 281277 - DNA, 532 bp, Zea mays
gactagttctagatccgcctcgtctaaccaccaccacgagggagagttaaagtcgccagtacagaagagtgaaggggagagggttgctgggtccgattcggtgggctcatcgccgtcgggtccacgaattggtgcctaggagtctcgcgtgcttcggggacataatcgatggtctcgctgcggtgggttggtggctggagacctcagaattcgtcgtcatagtgcgagctcctccgcgtgtgcaccgtgcgccgtggccaggggtgtctgcgctgcaattgccaggcatacaagatgacgatggtgcaatgcaagtgtttggtgcttttggttgatagaagctgctggatgcttttggtatttttgaaagatgcaagtcgtgcttctggttgatacttagaagttggtggttcaaaactgaaaaacctgtcaggctgtcacttgcttttggtattggtatgcttatatatgatgttatgcacttatgcagttcagcatgtttgctgcctgcctgcttgctgctcagctgcag

SEQ ID NO: 281278 - DNA, 476 bp, Zea mays
acgatcattcaggatgggagaactgataaatggggggaagatcaacagactgctgcagatgactgactccggtgcatgaagagcactctggatccatgaataattgataccccaatatgtctacataatgggacgaacggagatgacatctttatgcggatcgatctgtttctgtagatgaagactgatctattttgtctgtcccgcagcaaaagctcaagggacggagccggacgaggccaagccaccacctctgccgttgccgatgtactagcagcagcactaggaatggcatcctaggcaagatcgacgcgtgcttggacggctcgtcgtccatggagaaggccaccaaatgggatgcccaccactcgcatctgaggggaagaagagcacggggactccgattggacaacatcttcttcgcctcgacatcagcaatgtcttcccctctgctgctgctcatggaggcggactgg

SEQ ID NO: 281279 - DNA, 501 bp, Zea mays
ttttcttacgaagatttactatcagcgtcacgatgaggccaccaatggtgacggggctgcctgtggaagatcaagcagtaaaggactacactgtagaaatctttcagaagttcttcaatgaattaggacactcatttcattgcaattataatatacttgaacggaatgagtcagtggttacatacatagtttcggagcatgtcgatcaaacaaacaaggtagactacaaagttgcttatgataatgttcaaggtgacatatggtgcctctgccgtttgtaccaatccaaaggaatattgtgcaggcatgcactcactgtactgagacaggagcttgtgctgatgattccacaaaaatacatcattcatcgctggtgcaaggactgtaaacaaacttgtgcttccatatcccagcctgtctcagcaggtaatcaggaactgggaagctacgatgatctgtacaaacttggccacctatactttgcagaagttgtggaatttg

SEQ ID NO: 281280 - DNA, 692 bp, Zea mays
ccacgcgtccgcggacgcgtggggctgaataatgctgagacaacgaaagtgcaggctctctctgagctagagaaagctaaaaaaactgtcgaggagctaacaaccaagctggatgtggttaacaagtccaaacagttggccattcaggcaacagaggatgcaaagactcgaaccaagcagcttgaaggtggcagcacaaatgaatgtctaggaacagatggtcctctgaggcaggaactcgaaagtgcaagggagcagcatgctatcgctttggcagaacttgatgcagcaaaacaggagcttagaaagctcaagaaggattttgaaacatctttggatatgaggttgtgtgctgcccagcaggaagacgaatcactccatacaactgaagccaacaaagaaaaagctaaccaacttcttggtgagattgcggaaattcaagaatcgcttatgcatgtttaggcagctacggtgcaagcacacgaagaagaggcacaaatccttgctgagaaggatgttgctagggccacgtataaacaagctttggaagaaacacagaagaaattgttgtctttgaggaatgattttgaccctgctgcttatgatagtctgaaagaaaaactagaacaaaccaattctgaggttgcatctatgcaaaaaaagatagaagatgctcgggctcaagatttaga

SEQ ID NO: 281281 - DNA, 467 bp, Zea mays
atacttttgtcactacagaaggacatttcttctaaagaacaatctttattgtcagaattggagaatattttccaggagcacatggaacaagaagaaagaattaatcgcgcacatttcatgctcaataagatcgagaaagaaaagactcttgaagtagagaatcttgaaagggaggtcgtcagcctcgctgcacaggtctcctccacacacgaggagcgagaaagtgccactctggaatgctattcgagaggtatctgtcctgcgagcagacaaggctaaacttgaggctaatctccaagatgtcagtgcgcagctgagacgttaccagtctcaattggaagacctccgtaaggagtctaaaagtaagattaaagggttggttgattcccttaatgcctccaaacaaagcgaggaaatgttgacatcagatgctgaacatatgaaaaagttgatggaagctgctagat

SEQ ID NO: 281282 - DNA, 901 bp, Zea mays
tttcaatggcatatctacacactaagaaatactgaaaaccccataatgttgcatagggtgtttttccgaactattgtcaggcaacccaatgcaggctacaagtttacgtcggctcaggtcagcgacgctggagtaggatgtcccgaagaatctctgtcatttacatcgaatagcatcttaagatcactgatgactgctattgaagaattagagcttcatgcgattaggacaggtcattctcacatgtttttgtgcatactgaaagaacaaaagcttcttgatctcgtcccattttcagggagtacaattgttgacgttggccaagatgaagctaccgcttgttcacttttaagatcaatggctttgaagatacatgagcttgctggtgcaaggatgcatcatctgtctgtatgccagtgggaggtgaaactcaagttggcctgtgatggccctgcaagtggtacctggagagtcgtaactacaaatgtcactagtcacacctgcaccattgatatctaccgagaagtggaagatacagaatcgcagaagttactataccattcagctacttcgtcagctggtccaatgcatggtgttgcactgaataatccttatcaacctttgagtgtgattgatctaaagcgctgctctgctaggaacaacagaacaacatattgctacgattttccgctggcatttgaaactgcactgcagaagtcatggcaatccaactgttctagtgttcctgaaggcagtgaaaatagtaaatcctacgtgaaggcaactgagctggtgtttgctgaaaaacatgggtcctggggcactcctataattcccatggaacgtcctgctgggctcaatgatattggtatggtcgcttggatcttggaaatgtcaacac

SEQ ID NO: 281283 - DNA, 330 bp, Zea mays
caggagttgttctgatgaagcttatctttgttggaccctggtcattaggtagagtaggagttgggcatatggtgtacatctccggtttgacttgtgccttgagttcaacaaatatccttgaagtctcatggcgtgaaaaggagccagggtctctgtttgttaacttaagcttgctgccagcactcctaaactcatcgtgcctgcataatttatcacccttgtcagatcttccccgttcgacaaacagaacacatatatcccatgttcggttagatggcatcgattgtgacagtttaaaggtgtcgctgttccacaacatttgcggcagtg

SEQ ID NO: 281284 - DNA, 417 bp, Zea mays
aatcaacacacatgtgaagcgaagctggcacgtgcatgtatgtggatccacgacacgtgcatctgtaggaaccctgattttggtatggtttctacactcaaattcatcagtatgatataaggcaatctgctggctggtatttaagagtggccctctcttcatatcatcgaaaggaaagtgctgagagaggtggcatctacaggatgtcatgtcgaacgtgtgaagtttttttagaaatatgtatatttgtgtgaagctttttagaaacttggctccattttattttctatgttcctctcggctttgtttcctatcctttccaatgacttgctatgcatttgcactgtatttggcatgtctaaaactgctacacaaagcttgaaacccattttgtctaaaaaacccaccccttgttat

SEQ ID NO: 281285 - DNA, 471 bp, Zea mays
tttctataatcttagtaatttaagttctgttcaaactttcaattccatcgtccgtgaaaaattgataagtatgaatgtgttgacttgactccattttatcttctccttatttgagcttgtattcttattttttaatacattgctgccctgcactgagatttctattgtaaataaacaaagtgctatttaaattttgatttattccttacgaatgtctgttggtttcaggaaagtgctgagagaggtggcatctagaggatgtcatgtcgaacgtgtgaagtttttttagaaatatgtatatttgtgtgaagccttttagaaacttggctccattttattttctatgttcctctcggctttgtttcctatcctttccaatgacttgctatgcatttgcactgtatttggcatgtctaaaactgctacacaaaacttgatatatattttgtctaaaaatactatatccttgtt

SEQ ID NO: 281286 - DNA, 541 bp, Zea mays
  unsure (1)..(541): unsure at all n locations
tcgcccacgcgtccgcccacgcgtccgcgagctcagatccctcgcctcgtgtcgtgtctccggtcgacgacgaccaacagccagtgtgggccagacggacaccgccgagctatagcgcttggtgatagcaagggacgaccggcggccggaccggagcacgtacgtacgtaccgcagcgatggctcggcagcaaagcgtgcaggccttgtgtgtgctggcggcgcttctcttcgccgcctccctgccgtcgccggccgccgcgggggtgcacctctcctcgctgcccaaagcgctcgacgtcaccacctccgccaaacccggccaagtcctgcacgccggcgtggactcgctgacggtgacgtggagcctgagcgccacggagccggccggcgccgacgcccggtacaagggcgtgaacgtgaagctgtgctacgcgccggcgagccagaaggaccgcgagtggcgcaagtccgatgacgacatcagcaaggacgaaagcgtgcagttcgangtcaccgagcgagcgtacgcggcggcggcg

SEQ ID NO: 281287 - DNA, 353 bp, Zea mays
gccaacgccttcgccgcgcggatcgaggaagccgcccgtgccgcttacgccgccgccaatgcgacgccggaggaggcggcggcgtcggtcgccgccaatgcttgacaagtctagttccgagaggaatcgaatcgacagtcgacagatgcatgcatttctgtattgagatgagaatattactgtacgtcgtcaaacttaattaatgcgttgttaatcgcaaccggttgataagacattagtttgcttgcttgcttgtctgtctccactcctttcattgtctaccgtacctgacttgtattatgcggcgtcgcgtcgcaacgacacccagctgagtgaacgaaagttagttaatt

SEQ ID NO: 281288 - DNA, 835 bp, Zea mays
  unsure (1)..(835): unsure at all n locations
gacgtagtttaccgggatggagtaccttctgagcgaagggatggagccggacctattggggatccgtaagcagaagcgggggagccccgagaaatctagccccatgctcgcctactacatccttgacggctccatctaccaggcgccacagctctgcaacgtcttcgcctcacgcataagcagggctatgcatcatatatcaaaagcctttaccatagcatgttcaaagttggagaagattggaaacgtggaaaccgagcccgatgcaggagcctctgaatcaaagacccaaaaggaagcaatcgacctgaaggaactcaaacgaattgatcatatcctgtcatccttgaaacggaagataggggctgctcctcccccacccccttaccccgagggctatgtcccaccatcagcagaacaagagaaagcgccggatgatgtggcagcatcagaggcaccgcctcaacttgaccctatcattgatcaaggtccttcgaaaagaccaagattccaatgaaagatttgtagcttaaacctgctgactcgacaacttcctgtatgctttaaagtcgccgacgtggactttataaatccattcttgctggttggttatttacaggccaaagacagaactaacctcgtggcatgatatctcgttctctgagttactagcttgaatcttgtagattggccagtgccatttgctccgggcttgtaatcttgtagataggccagtgtcatttgatctggtctatctactgagctgtcataacttatgacgtggttatagttttgccctggtgcaaatctgcaaaaaaaaaaaaaaaaanaaaaa

SEQ ID NO: 281289 - DNA, 670 bp, Zea mays
atttgagttccagtgaggatccagatatccatttcaaatacatagaagcagctgcaagaactggacagatcaaagaagttgagcgtgtaaccagagagtctaatttctatgatgcggagaagacaaagaactttttgatggaagcaaagctacctgatgcccgcccactgattaatgtttgtgaccgctttggatttgttccagatctgactcactatctatatacaaacaatatgcttcggtatattgagggctatgtacaaaaagtcaatcctggtaatgctcccttggtagttgggcaacttctggatgatgaatgcccggaagatttcatcaagggtttgattctctctgttcgttctctgcttcctgttgagccactagttgatgaatgcgagaagaggaaccgcctacggttgcttactcaattcttggagcatctagtgagtgaaggtagccaagaggtgcatgtccacaatgctcttgggaaaatcatcatcgacagcaacaataaccctgagcatttccttactaccaacccattttatgactctcgtgttgtgggcaaatactgtgaaaagcgagatcctacacttgctgttgttgcttatagacctggggcaatgtgacgaccaggctattaaatgtaactacaaaaacttattggtta

SEQ ID NO: 281290 - DNA, 625 bp, Zea mays
  unsure (1)..(625): unsure at all n locations
cagagcactatatggaggaggctttgaaaatgagaaatctgctgcaagagtttgagaagaaacatggagtgagacatccatcgattcttggagtcagagaacacatatttacgggcagtgtgtcatcccttgcttggttcatgtcaaatcaggaaactagtttcgtaacaattggacaacgagtgcttgccaatccactgagggttcggtttcattatggccatcctgatgtcttcgatcgtcttttccacgttacgaggggtggtgtgagtaaagcatccaaaattatcaatcttagtgaggacatatttgcaggattcaattccacattgcgtgaaggcaatgttactcaccacgagtacatgcaagttggcaagggaagggatgtgggtctcaatcaaatatctctgtgtgaggcaaagatagcaaatggctgtggcctacagacgctgagccgtgacatctaccggctgggtcatcgctttgatttcttcagaatgctatcttgctactataccaacaattggtttttactttcagtacaatgattacagtgtggactgtataatggttttcctctatgggcggntatatcttgtacttagtggacttgatgaagcgctgg

SEQ ID NO: 281291 - DNA, 977 bp, Zea mays
cccacgcgtccgatgggatggcccaactgcagatctgttcctgggatactacacaatggctacattgcatactcggagctgctcgacaggagcgtcgtcggcggtgctgtaaacatctcctagagtcctcgggcacaagaaggtcaggcggtgatgccaatgcagatcatccaatcagatccagaatgcctgccactgtatacttggagctgctcgacaggagcgccgttggcggcattgcaaacatctcctatagtcctcgggcacaacaaggtcagccaatgacgccaacgcagatcatcccatcggatccggtattcttgacgaaaatccctgaagatgggaaacccacgctgctggtgcaaacaccgccggtgatgccagtgtaggccccattgcccttggcacgggatgtcactgactacaatggagtacctttctttcttcgatgtcagtcgattatgtttactatggaatatggatgttctcttatatgcttggttgtagctcctgacatgcagttgtagcttggctcgaggcgggcatcagcgacgacaaacatcctgctcaatttgttgtatgataaatactgcgaaacaatgctggtgtttcataagatgaccgtgcagctcatgaaaatccagagggtggagtcgagcgagacgacgtggccggcgcggcgccaggtcgtggcgtgcgccgctgtttgctggtcgtggcgtgaggtcaccaaggaggtggtgaagacgctcaaggagtgcggcaggatcaccttccccatgtcccttaagcagaggcttatgattttgaagatctagaatctatggttgaagaaatagccaaagcattcaagacaaagatgatgtttatatatgttgacactgctgaagaaaaccttgcaaaaaccattcctcactctctatggcattgaatcagaaaaggcctactggtccagttcttgaaagggtgggaatgtg

SEQ ID NO: 281292 - DNA, 453 bp, Zea mays
cccacgcgtccgatagagacacgcaccactcgaaccagaaccaccaggctgctggtgctggaagggggcgcggcagctgggcagctggcaacggacatggcggcggccggcggcgagaccatgatgacgagggagcagctgctccacctcttctcccgcttctccttcgtcacctccctccccgaggtcaagcagcggattgccgacgccgtcagggacaagcaggaggctgtggccgtgaccactgaaatacaagaggagattcttcgcgagatgggagtagatccaagttttggtattgggttgccttggaaaggtgaatgtttgtttacaaaaatgacaaggacttgatgattaaattctataatttgttgccaaagaagaaatggctattgatgaagctgagcttgaacccagagattggctgaaaaactacatgctcaacaaataatg

SEQ ID NO: 281293 - DNA, 655 bp, Zea mays
taagctcactctggttgtattttacgctgtaaatcaaaagaaacgggctcagaggcttgtgtccatcaacaatccttttgcgtcttggggatcattgggagaagatattggtgcagcaccacaactgaagagtgctaaattcttctcattggaagaactcaagttatgcaccaatgatttccgagaaattaatgcgattggagctggaggctatggaacggtttaccgaggaaaacttccagatgggcagttagtggcaatcaagagatccaaggaagggtccatgcagggtggccttgagttcaagacagaaatagaactcctttccagggttcatcacaataacttggttggactggttggtttctgctttgagaagggcgaaaagatgttagtttacgagttcatacctaatggaacactaagcgaggctttatatggtatgaaaggaatacaattagactggagcaggaggctcaagatagctttggattcagctaaagggctagcatacctccatgaccatgccaatcctcctatcattcacagagatgtgaagtccactaacattctccttaatgagaagatgaccgcaaaggtttcagactttggcctgtcgttgctggtaacagacagtgaggaagggcaactatgc

SEQ ID NO: 281294 - DNA, 508 bp, Zea mays
  unsure (1)..(508): unsure at all n locations
tcggttagcccaccacgccctgaacctagcccggacacccgccaggacaggccagcccaacgcgatgcgaccgccgcctcagggtccgcgccccgccatgtccatgggctccccggtgcagctcaggcggctgaagcctctgtaccagctcgtggtgaacaacatcctggccatcgtggccgtgccgctcgccaccgcggtcctgctcaaggcgtcgtcgctcgggcccgaggagatcctggcgctccggccggcgcacctgttcctggccgcgttcctgcctgcccgcggccacggtgctgttacctgatgctccggccgcgcgcggtgtacctgggtggactacgcgtgcttccgcaccagccccaactgccgcgtcccgtccgcgacgttcctggagcactcccgcgtgtggccgggcttcgacgagcgccagcgtccggtcatgacgcgcctgggnnagcggtcgggctcgggaggaagacgtgcctgccgtacgcgcagcact

SEQ ID NO: 281295 - DNA, 915 bp, Zea mays
ggctgacggttattgaggcgatgaactgcgggctgacaacctttgcgacgaaccagggagggccagcggagatcatcgtggacggtgtctccggtttccacataaacccaacgaatggcagggaggcaagcaacaagatcgccgagttcttccagaagtgcaaggaagacccaagctactggaacaaggtgtccactgctgggctccagcgcatctacgagtgctacacatggaagatctatgcaactaaagtcctgaacatgggctcgacgtatggcttctggaagactctgaacaaggaggagagagtggccaagcagcgctacctgcagatgttctacaacctccagttcaggaacctggcaaagactgtcccaaggctgtttgaacatcctcctccgcaagccccagcaggcgcagggcctagtacgatgacggtaacgaggccgaaagaaaggcaagtgtgcccactcttaagaactttactgaagagagaccgcgggagcaactgactgaccaattcgttgtttcacaatcccaaatctggttgctgcagaaagacacagactaggatccagaggatcatgaccagcttgatggggcagaagcctgctacttctgaataataataatacattagagccagggagacgagatgggtgtgcatgcgtgatctcctcaagccaaggtcctggcggctgcacatatattcattcattccattgagaccggaccagatcagtgtgtattgtgaaatttgttgtggtgttgcatgtgtggttttcatctgtgtactgttgattggagagctggatgatgtaaagagagtcaaagtgcgcatggttcccactgttaataataatttatgcccaggattgaggaaaaaaaaaaaaaagggggggccgccgattatta

SEQ ID NO: 281296 - DNA, 574 bp, Zea mays
ctcaagtttaccattcttggtgaaacatctgcttattgggtcttctcttgtgcatttctttgtcttcttcgcttgtggaagttttatagaccgcctcaagagtattgccttactggtcgtggaggctcagtaaagctggaactgactctggactatctgttgttgatgcacaataatcgcattgagttctcaaattcgtctgcccctaatagggattcttacaacagtatgggctcagtcagtgaggtctctgctcagccgatttatattgattctttccccaagctaagtgcttggtatttccagaatcaagcttgcatcgcctctccactttctggtctttgcaacaaaaaccctgtccatcaagttgcgaacaaaattttgaatatgatttgccgaaaaatgaataaaggtgggagtatcgtctagtactctttcatccacttctagtagtagtgtcagtggttcctctgtaagtgcatcagatgatccttgccaaaggcctgctgtttctggttgggaatttttagaagctgttccttgtgttcttgaagctgttctgacagcatgtgct

SEQ ID NO: 281297 - DNA, 466 bp, Zea mays
gtaaagtttcgcatactggtcaagatgcagacactgcatgttcagcatatcttcatctcaatggattttgccttctgatgattgcacatgatgaaagcaaatattattttgagagaatccaaggttcatgatgctatccgatgctttttcagggctgcatccgggtatgaagctccaaaggctttggagaacttttcattggaaacagggtttcaagtttctggggaatctagatctatttctttgtggagacttaactactatgagtgggcaatgcaaatttttgagcaacactccatgagcgagggggcgtaccaatttgctcttgctgcactagaactagttgatatcgtcgacgggatagataatggaattgaagctgagggtcttccagagaccgcagcaatgattaaaggacgactatgggctaatgtattcaagtcacttggatttgaaacactttcac

SEQ ID NO: 281298 - DNA, 897 bp, Zea mays
cgcacgcgtccgcggacgcgtgggccgcatctagctctaaaagaaccaagttgtgtcctcagggaaatttggacgttccaacaatgtatgttacagcgatggggaatggttgtactgactccgtggaaactggaaagtttcccagggtcttgcaaggtcaagatttgatgagttttaggactcgtcatgttccgtctgctcctcaaactgttgaggctgcaaaacttcaatcttctggtgctagtaggttcctcagtaatgcacgatggctgcgcattgggtggtccaacaagcagactcgcagtgcataactctgattttacctaccaatctgtaggcttcaatgaatctattggattctcagaggtcttgcaaggtcaagaaatttctcgggcagttcctatgttccaaggaatgatgtctgaggcttgttcactaaaaggaggatatgggctgcatagttatatgcgtaccccagttgctgttactggattgtcagccacaactcaagagtgttctctcacactatctactccgccaggagcacaagttccttctgtctaccctgataatatttttaaccgaactgtggttcgacagcttggactggcaagcaagtttgatggtggagctacaaatgcccagcagtctgtcccatttgataggccgagggaaatttggagcaagccacagcatgaaatatctgatcaaacgaaaatggatcactttgagactagaagagcttcagcacctggagatgatgctgctaagcatgggtctggtggagaggtggttcgcaaaactagctgcagactttttggtttctcgttgactgagaagatcttgccagcatccgtggattctggcactcaggctcataggtcacccacgcataaa

SEQ ID NO: 281299 - DNA, 848 bp, Zea mays
cttgttcaatatttggctgacattatggatgagtgcaaggataagattcaaaatacatgcgggtatggacctatcgcgtttatggcttcagttcagtcacttcagagtcttcctcaagacttaacctcttctggaagatttgatttccatattgagctttctgctcttgcagtacctgagcgcaaagcactattgcaacatcaagttgaggagcatgatttattgtgttctgaggaagttctgtcagagatagcatcaaaatgtgaaggttatgatgcatatgacttggaaattttggttgatagggctgtgcacactgctgcttatcgctttcttctgccttctaatgcttgtcacaactctctgaaacgaactttgttgatggaagatttctttaaagcaatgcatggcttccttccagtcgccatgcgtgatcttaggaaatatgctcctgatgataaagatggtggttgggaggatgttggagggctagatgaagcagtaactatcattaaagagactcttgaattgccgtcaaaatacccaaatatctttaccagggcacctgtgcggttgcggtcaaacattctcctgtatggaccacctggatgtggtaaaactcacattgtgagagctgcggctgctgcttgttctttgcgattcatttcagtcaagggtccagagctattgaatgaggagattgggtcagctgggcaagctgttcgcgacttttttgcaaaggccgttgctgcagcaccttgcctattattctttgatgaatttgactccattgcaccccagcggggaactcatagtgcaggagtttctgatcgtgtagttaatcagtt

SEQ ID NO: 281300 - DNA, 482 bp, Zea mays
  unsure (1)..(482): unsure at all n locations
gcgcgtcaggcggctgcggcccggtggaggaaatggaggactggatgaaggccgcgcgctccggatgcgtccgctggtgctcccagaccacggcgatgttccggttcggcgggaagaccgcttacgtcgccgtgaattacctcgatcgcttcctggcgcaacggcgagtcaatagggagcatgcgtggggtctgcagctgctcatggtggcgtgcatgtcgctggcgaccaagctggaggagcagcacgctccgcggctgtcggagttgccgctggacgcgtgcgagttcgcgttcgaccgcgcgtccgtgctgcggatggagctcctcgtcctgggcacctcgaggggcggatggtcgccgtcacccccttcccctacatcagctgttcggncggcggttcgggcaggacgagcgcggggcggtccttgtggcgccgtggagtgcgtttccggcgaacaagcgatggctcggttggagtcc

SEQ ID NO: 281301 - DNA, 490 bp, Zea mays
cccactcgtcctaaatgagcatggtattgcatttgacactttaaaaaagtcctcatgcaaaaggccatcccctcgccttccttagtaaggccctgggtcccaagtctaggggattgtcaacatacgaaaaagagtacttagcagtgatcttggctgttcaacagtggcgcccctacctgcaacaccaggagtttgttatcctcacagaccataaaagcctcacacagcttaatgagcagcgcctccatactccttggcaacacaaggtatttaccaagctccttggtttgcagtacagggtctaatatcgtctgagcactgagaaccgtgttgctgatgcgttgtcgcggtgtgccaccgctgatctgcacgctctgtcatcagtggggccttagtgggtactagacgtgcaggccatttattgacagggtgctgcagctgaatccatactttccaatcttgcagacgactcagaggccctatcaatcta

SEQ ID NO: 281302 - DNA, 543 bp, Zea mays
tgactcttcagcttttcaaacttgaagacgtggcaatgggtatttggatccaacagtacaagaacagtgggcagcaagtaaacattgtgactgatgaccggttctacaatgaaggatgcgaagctgactacgtccttgcccactaccagaccccgaggcttatgatgtgtctgtgggagaagctgaagacggaatatcatgctatatgctgtgaatagcatccgaattgcaagtaggaggcgatagaggaatggatagatagaggaatggataggttagccttggttttgaagaagacatttgctccgattttgacgctgtgtggaaaattgttgggactatgcgcaaaaagcctgtaacattgggttctcacttctgtgctgtggcctgtgggttcatgttctttgtttttgggtagaaaatgttaatccgtgcaacttgatggatgttgtaaaaaaagtgttgtaggacatttgagagagtttatctggcacaacctgtcaaataaaaaaaaatttctaagaattaaaacaataaataaaa

SEQ ID NO: 281303 - DNA, 328 bp, Zea mays
gcgttcacgcgtccgcccgtactcgaagccagcaagcaagcgctccccgcgtgttcacacctcgacctgcgacgtgaggccggcgtggaccagccgccgaccacacgccttggagtctgccagccgccgaccacaagcgccgccgccgaccgccgcaagggggaggagagatgaagtgggggctggcagccgccgtggcttccgcggcgaccgtggcggcggcgtcgggcgccgagctcctcgcctgcgactgcgacgcctacgctgcgtcgtcggcccctgccgagaccgtcggcaggtgcgacggtctggtgctctgccggcagca

SEQ ID NO: 281304 - DNA, 1168 bp, Zea mays
tcgttctgccacggcggacggctcctcgatgaggtggccagggagggtaaactctcagagcgccgcgccgccaatgtgatcaaggagctcatggcggtcctcaagtactgccacgagatgggcgtcgtgcatagggacgtcaagccggagaatgttctgctcaccaagtctggaaggttgaagcttgcagattttggattggccgtgcgagttgctgatggtgtgtcaagagtcgaagtggtgctaacttggtagttgcagtcgagttgttgtcatctggaggtagttgttacttgcacggagttctggatatttgggttcacagcatcaataggattgacatcatgatggtcaggtcagcaattgactggtgttgctggcagccccgcatatctggcacctgaggttctactaggaaattactcccaacaggtagatgtatgggctgcccgggtgcttctgcatgttctgttgatgggcactcttccgttccaaggaaaatctgtcgcagctatctttgatgctataaagactgctgaacttgactttcacagcagtcagtgggcatctgtgtcactgcttgctcgtgatctcattggccgaatgcttaatcgagaggtctcttcaaggcccgatgccgaagatgttctccggcacccttgggtcttattctacactgattgcccgcagaaagctgaattctctaacctatggggtactaacaaaactgcagctcccatgattcatcaggagatagtcaggtttggttactgcgagtcttcatcttcaaaatcctcaagtgacaactctgaagagcgagatgaatgcggtatagttgacgcactggcgacagcaataacacaggtgaggatctcagagcccaagaggagtcggctgttcagcctacccaacgggttgttgccaccaagcaggaacagtctccgaacatgaagaggatgaatccgtgtgtggctttctaacttgacctacctagctcccatccccatgcatgtataaacgagataaacgagctctgtgattttatagatggaaaattttccccgtggttgatgttttgcgattgctagctcgctgaggctgcaatcctctgtaaatatatcactgttgtcatcgtttctatacatcgatgatcaccgtaattgattcg

SEQ ID NO: 281305 - DNA, 700 bp, Zea mays
cgatacaaaatctgcaagagcaataatgtttgttgagctgaagaagctgattgaagctaaccccttgttccgtgataagctacaatttcctagcctgaagaattctaggctgcggacacttattaaccagagcttaaactggcagcaccagctttgcaaaaatcccaggcctaatcctgacatcaagactctatttgttgatcattcatgtggacaaccaaatggtgcacgtgctccatcaccagcaaacaatccattactcggatctatgcccaaacctggaggtttccctccattgggtgcccatggaccttttcaacctgtaccaacacctgttccacctctggctgggtgggatgtcaaaccctccagcagtaacacatcctgctgtgtctggtggtgccattggatttggcactcctacaaatcctgccgctttgttgaagcatcctataacacccacaactgctaatcctggtatggattatccatcaggagattctgatcacatctccaagagaactagaccagttggcatgtctgaggaggtgaatattacggtgactatgctgcccgcgacctatccgccgagccataattaccaacacgatgatttccataaaactgttgcacggacctcgagcctaggatcaacaccgatgagtatggattttcactccactttatcatactcttcttc

SEQ ID NO: 281306 - DNA, 944 bp, Zea mays
tcgccctttcctcctcctcctcttcttcctcctcacctcacctcctatttagccgtccgaattgcttgtcagcatcttcccagcttcttcttcttcttccaaccgcgctacgctctcttgtccccggtgctcgcttggattcttctctcttcataggaaggaaggattggctaccgagatattcctactagtccagggctgtagtgcatcctgcgcgcttggtttattctgcagccagtaccagtaccagtaccccagctgagccggtgaggagaggagatagagagagcgagcgggagcgggagcgggagcgggagcagaggaggagggccatggaaggcgacagcttcttccgcggcgccatggccaacggcggcggcggcggcggcggcggcagcgggcaggtggtggacgggatgctgatccacacgttccacaggagccttcgtgcaggtgcagagcctgctggaccagaaccggatgctcatcagcgagatcaaccagaaccacgagtcccgcgcgcccgacaacctcacccgcaacgtcggcctcatccgcgagctcaacaacaacatccgccgcgtcgtcggcctctacgccgacctctccgcctccttcgcgcgcaccatggaccacgcgtcctccgagggcgactcctccggcaccggcaataacggccgcgccggcgccggcgccggccacaagcgcgtccgccccgcctagagctagcttttagtttttttcttcttcttcttctgctgggtctagcttggcgtggcaatcctaggtgttgccattgccactaggaggcgtatttagtcttttctcttgcggttcttcttgttcgccttcttcctttgtgctcgctagctgcgacgaacgccggtgattagtgtatggtaatttagtgtcaaacagagagctgccatgtggatgttgctcct

SEQ ID NO: 281307 - DNA, 539 bp, Zea mays
agacaggtttacgcgctgacaagctgcccttccgcgaactacacgttcgacgaaatgccgccgcgagagtcgagacctcttcatcgtcaactgagattcgcctagcatcttctcggattccttccccaactttcgtccccatcagcggacctactcgagatcgacgagactcgtcggagcccggttcctaggcgtcccagcgcccgactggatctcctggctcgggccgccttgatggtccctggggtcggtccggggtggagttcgaggcgatgagcaggcttgcgtcggggctccagcgcttgcggaggtcgtcgtcgcagtgggaggtgctgtggtcggcgctcgcgtcatgcggcctagtgcttttctcgcagctcgccgtggcgatggttccccgtctcttccctttcctctccctcctcgcgatgctcccatcgcgggttttggtgttcatcgcggctatcgtgctcgcccgctgtgagggaggttcatcggcgtggcgggcgtcggccccgctcttcgtgctttttaacatt

SEQ ID NO: 281308 - DNA, 557 bp, Zea mays
gcgtgtgttttcactcggccactttccacatctgtctctctctgggtctctggtcgccacgcgccgtaccagcgccgggcgccacatggctccctggatcactagcctactgtgggacgcgaactgcgtcgtctgcgagaccgactcgcggctcccctgggccgtcgtcggacgggcattcacttttgtgcgcttcccgcatcacccgactggctgggctggggcctgcgtcgcggcgccgtgtgcggagcgcaagcgggcacccggcgtcgcctacgccaccgtagcgtaccgggagagcatctacgactccaccgttaaggacattgatggaaaagatgttcctcttaacaagctcaagaatcaggcgctgctgattgttaacgttgcttctcaatgtggggtgacaacagcaaattacactgaactatctcatatctatgagaagtacaagactcaagggttatcgatcactgcatttccttgcaatcaatttggtgcacaagaacctggatcaaatactcagattaagcagtttgcatgtacaagattcaaag

SEQ ID NO: 281309 - DNA, 1332 bp, Zea mays
ccctttttcggcagttcgcgctgcggggcaagagcagctccaaggtggtggtcgaccgtggcttcctcgtttccaacgaccacgaccacactgtcgtggtgcagcaggccaagatctacctcgccttccagctcaggttctcctaccgcctcacccaccagcacatcgtcatggccttcggcaacagcatccccgtcaagaacaggctcaccaggcaccaggacaagacctccttcaccttcgatttcacaacgggcagagcttcggtggacgggtccttcccatacggcctgcggcgtgcgcacggcgcgctgaacgtgttcgcgtggggagtcctgctgcccatcggcgccatcctggcgcgctacttccggcggatggacccgctctggttctacctccacgtgggcgtccagctcgccggcttcatcatcggcctggccggcgtcgtcgccggggtggcgctgtacaacaagatccaggccgacatccccgcgcacagggggctcggcgtcttcgtcctcttcctcggcatcctgcaggtgctggccttcttcctgcgccccagcgccgactccaagtaccgcaagtactggaactggtaccaccactgggcgggcaggctggcgctcttcttcgccgccgtcaacatcgtgctcgggatccacgtcggcggcgccgacagctcatggaagatcggatacggcttcagcctggccgtcctcctcgtcgccgtcgccgcgctcgagttcatgctgtggacgaggtggtccaagaacagcaccgccaccccgacgtactaggaacctgctgctgcacgtaccttgttgtttttccggggtcggatgatgttttgtgtttgcctttgaccttgtttttttttgttgttggtggtggtggtgtatctatatgatatatcctttggaactgcctgcaatcgcgtcagcgtgcgttcaggcaagtgcactgccactgcccgtagttacttcgttcagcacgcctggtggtgtagtggtttctctatgattctttatttgccgaggcatgttatacccgtgtctgatatttggcgccctcttcatgactgccccctttgcagagtggattttctccccacatgtacatgtggccatatataaagacttgcccccaactatccattttgctttaaggttcgtgctggtaaaagaaaaaaaagctggaaatcagcggttgagattccttgtgtggccatgtaaaatatcataggccctaaaagttaagcaccaatgtcccaaaaaaaaaaaaaaaaaaaaaaaaaaaaaaaaaaaaaaaaaaaaaaaaaaaaaaaaa

SEQ ID NO: 281310 - DNA, 296 bp, Zea mays
accaccaccaccaacaacaaataaatacaaggtccaaggcaaacacaaaacatcatccgaccccggaaaaacaacaaggtacgtgcagcagcaggttcctagtacgtcggggtggcggtgctgttcttggaccacctcgtcaacatcgtgctcgggatccacgtcggcggcgccgactgctcatggaagatcggatacggcttcagcctggccgtcctcctcgtcgccgtcgccgcgctcgagttcatgctgtggacgaggtgcgccaagtacagcaccgccgcagcatgaactcg

SEQ ID NO: 281311 - DNA, 560 bp, Zea mays
  unsure (1)..(560): unsure at all n locations
ccctacttagggaagctgggctcctggcgtgccggaccggtccggcagtgccggcccagagcgacccgtcacgcctcccgtacgagtggcatcaggattaggactgttctttcaaaagtcccttttggcagatccaaagggagcacgaatagtggaatccaaagagaaagcagcaaccctcgcccataaagcagcagctgctgcagttcaaccggtccctgcttctgcttggtctcgaagactcttctcctgagaagctcatttggtgaaccgtgactcgtagtgcattagatttgcatttagcgtgttgagggcagtccctaaggtgatcttcggatatctggagatttatagcttgggctagtgttcggtagtggtagaataagtttcagtgtatgtatcgttgctttgctttgtgtttttgaggatcaggcggtgaggctgagagaagtgctcagcaactcaacattgaactgttgtagaagatctttgattgcttttattgctgcaacatgccaacaaccctctgttggattcgncnaaaaaaaaaaaaaaanaaa

SEQ ID NO: 281312 - DNA, 495 bp, Zea mays
gtcgtgtttcgcgctgacgcttcgcgcgggtccgagggcaggcggcagcagcacggatgtagcaccagggcgaccgcccaggttatcgtcggccgccggcggcgacctgtaccccggtgagaagatgcatgtgagctcgatctccgggcctcctcctcctggtcccagcagatcctccacgccggcgtccgaatcatccaaggggacataagaaagaaggatgatgtgcggaaggctttccgtggagtggactgtgttttccaccttgcttcttatggcatgtcagggaaggagatggtgcagactgcgagatctgatgaggttaatataaatgggacctgcaatgtactggacgcttgccatgagcaagatgtcagaaggcttgtgtatgtaagcacatacaatgtggtattcggaggaaagccgattgtcaacggaaatgaggcggtgccttattttccgattgaagaccatgttgatgcttatgggcgcaca

SEQ ID NO: 281313 - DNA, 449 bp, Zea mays
actccatcgagttggtctttggtcgtgcttcgtgctgacgcttcgcgcgggtccgaggtcaggcggcagcagcacggagtagcaccagggcgaccgcccaggttatcgtcggccgccggcggcgacctgtaccccggcgaggagatgcatctgagcgcgaacgaggggatcgagggtctgcgattcgcggtgacgggcgggcagggcttcgtcggagctgccctcagcctcgagctgctccgccgcggtgcccgcgaggtccggtccctcgatctccgcgcctcctcctcctggtcccagcagctcctcgacgccggcgtccgaattatccaaggggacataagaaagaaggatgatgtgcgaagggctttccgtggagtggacttgtgttttccaccttgcttcttatggcatgtcagggaaggagatggtgcagactggaagatctg

SEQ ID NO: 281314 - DNA, 790 bp, Zea mays
atgcatctcatctcatataagaataactaatcaagatcgatcgagaatggcgtttccgaagcttactagtcgtctagccgcgctagctgccctcgctgcggccatggcggcggcgatgatggccgcgaccgcctcggcgcagaacacgccgcaggacttcgtgaacctgcacaaccgcgcgcgcgcggcggacggcgtgggcccggtggcgtgggacgccagggtggccaggtacgcgcaggactacgcggcgaacgcgccggggactgccggctggtgcactcgggcgggccgttcggcgagaacatcttctggggctcggcggggcgggcgtggagcgccgccgacgcgctgcggtcgtgggtggacgagaagaggaactaccacctgagcagcaacacctgcgaccccggcaaggtgtgcggccactacacgcaggtggtgtggcgcaggtccacccgcatcggctgcgcgcgcgtcgtctgcgccgacaaccgcggcgtcttcatcgtctgcagctacgaccccccgggcaacgtcaacggccagcgcccgttcctcactctcgacgcggctgccaagtagaggcagagagcccggctgcatgcagtgtgcgtacgcacgcatctgcgtgtgcatggcgtggctactcgatcgatcacgtactgcgtgtgcgcgcgcaccataataagtattgtgtgtacgtatatatccgcatctgcagtgtttgtgtcatatataaaataatcgtctgcgtgcgcttaaaaaaaaaaaaaaaaaaaaaaaagaa

SEQ ID NO: 281315 - DNA, 558 bp, Zea mays
cgcttcgggggcgtctccgcggccatatcttcctctttctgctcggcttcctcgtcaccgcccccctcctcgccgtccactggtgccgagccggcgcgggtggagatccgttcgctttggatcgacttcttcgtgtttgggttgaagccgctcgatttgctcaccagaaattcagattttcgagtggaattcgcttaatatagcaatgcactagggtttactgtgcaccactaggctactgcctctgctattaggaagccgacatctgttgtttccgaagtctttcaagtctctgttgggtggcgttgctattgtgggtgtgataacatgataaagcaatttcttggacgtctccccaagaagccatccaaatctggagataaggatcctattggccggcccagcccctcggtgtcgcaccagccattgggtccgagagctggagacagggccaccaacttgtgtagccatccaccggttatctccagctctgggctcagtatggcagtgcatgcatgtcgcaatgcatacacgaggcacacgtgacggtgattcggc

SEQ ID NO: 281316 - DNA, 977 bp, Zea mays
caaaaggggctgttcgttgacaggggtgttggctcttctatgcttccaaaatcagccagtgcatgctccttggcatctgggtttagttttggatcagcaaagacaatgccccgcccacccggccctgttgcagctgcagctgtagctgatcgtttgcatgggtcaaaggaggaccggaagctggccattgttttggttggcctaccagctcgtggtaaaaccttcactgcagttaagcttacaaggtaccttcgttggttgggccatgaaactagacatttcaatgttgggaagtatcgccgtcttaagcttggagcaaatcagtctgcagattttttccgtgatgataatcctgaaggtattgaggcacgtaatgaggtggctgctttagcaatggaggacatgatagattggatgaatgctggaggtcagggttggtatatttgacgcaacaaacagcacacgaaagcgaagatatatgctaatgaaaatggctgaaggtaactgtaagattatatttttggagacaatatgtaatgatccatacataattgaaagaaacatacggctgaagatccaacaaagtccagactatgctgaacagctagattatgaagctggactggaggacttcaaggaacgtttgattaattatgaaaaggtctacgagccagtaggggaaggttcttacatcaaaatgattgacatggtaaaggggcaagatggtcagttacaggtaaataatatcagcggttatctccctgggaggattgtcttcttcttggtgaactctcatcttacaccacgacctattttgcttaccaggcatggtgagagtttacataatgttagaggaagagtcggtggtgatacagttctaagtgaaactggcgaactttatgcaaagaaactagccaactttatagaaaagcggctcaaatgtgagaaaacagcaactatatggaccagtacccttc

SEQ ID NO: 281317 - DNA, 390 bp, Zea mays
ttggggtgaccacgcgttctcggacgcgtgggtcggacgcgtgggcacgagctctgtctgtgtgaagatgaggacgcgctgcaaccagctggggctgcctctcgcgctgttgtttgccgctcttcttggcagcgcgcaatgccagagctctcacggtggtggcgccgccgccgctaacctcacggtggtgggcaccgtgttctgtgacgcctgctccaccagctccttctccaagaatagctacttcttgccaggtgtccgagtccggctggactgcatgatcaaagtgaactcgaactccaggaggagatcaagatcacggcggagaaggcgaccaacagggacggcgcgtaccatatggacaatccggtgatcgacggtatgagtgcg

SEQ ID NO: 281318 - DNA, 775 bp, Zea mays
  unsure (1)..(775): unsure at all n locations
cggaattcggtcgagcaagccaagtctgataatctatctaagcactgtctgattacatagttccagccctcgttgaggccatgcataaagaacctgagccacaaatttgagcaagcatactggaatcattgaatgaatctatacagctatcaggaacacttcttgatcaaaatcaagtaagatctgcagtggaaggtgtcaaagaagttatagttgcaagcactaacaggaggatagaacgaacagaaagggcaagggctgaggactttgattctgaagaagaggagctactcagagaagataacgaacaggaagatgagatctttgaccaaattggtgattgtctaggcactctcgttaaaaccttcaagacttcttttattccgttcttcgatgaactctccatgtatttgacacctatgttgggtaagaataaatcaccagaagaaagaaggattgccatatgcatttttgatgatgttgctgagcattgccgtgaagcagcagttaggtattatgatacataccttccttctctattagaagcctgcatgagtgaaaatccagatgtcaggcaggctgcagtgtatggaattggcatttgtgccngcagtgggtggttctgcatttaggcctcacactgnggaggccctatccagattatacaatgtaatcaaacatcctaatgccctggatttggataatgcaatggcctatgacaatgctgcttctgctcttggaaaatatgccgatttcatcgtgatatcatgatgta

SEQ ID NO: 281319 - DNA, 977 bp, Zea mays
tttttcttgttaacggacgcggcgtccttctgcaggaaggggctcgaacaggacccccctaacgaggaattcaagaaactgttgtcggaagtggattcaaaactgagagagcaagatcgtcagagagcgaaggttgcacaagcaatcgccaaagccaaggatcttgctgctgctatgggaaagagaggggtgaaacttgggaaggcagcctatcaagagctgacaggggtaaagaagccagtgctggatgagcagggcgtgctccactggcctgtgcgtctgctctacccagaggtcatgtcgagggacttcattgaggattttccagattcagatacttgctcgccccaccttgatgtcatgtgctcagaaactgtctccaccattgccatgggatgataaccatgtttacacatgggactcaatcgcattatattatcagggtggttttggcaaacctttgtcccgaagtgaggtattaagatatcttctagacggcaatgtcgattcgtgggcgcttccagatagccttcttgacggggaagacgacgaacatgacagttccaaatgtaccactgttacatcaactgatagctccagtgagtggatcaaggtaaaagaaggaaaaacacttcaggaggtgctgcaggataaaggctatattgttcctgcaattcctgtgttcttcgttgtttcaaggaagtccacattctataaagacttcaaggctggaaactggtctttgccatgaaacagaaccggacactaaggttcagcttaaattgatctctgagacgggcagcggatatggcaagaaagcagaagatgccctcttgtgatcatggtcctttggtttaaaaggagtgtgcttttttcagtgtctgcagactgacagccttttggtaccgagaatccgagatagacagataagacgaggcaatgtaatatgaatttctatgtgaaccgattcagtgttt

SEQ ID NO: 281320 - DNA, 836 bp, Zea mays
cgcaaaggcttcattgcttcacctgcaatggagactgaaaggtccgcgcataataaagtgcatattcagtctggtaatgcttcaaggaaaactgagggatttatacaacagagcatcaatgccaatcgacaaaagaatgggacatcagtacaacattctgaaagcttcaccacttctgctcgaagaactgctggtggctttccaccagcacctacaacggaggataaattcaaagctgcaaggctttcatccagtaatgaagctgcacccagaaaagagggggttggacagcgaatcagtaacattagcatattgcttccaaagagaactgagaacacaaacaaagatgtcgcgaagaaagaagttggcacctcctctccattgcctccagatcctgctaatgctatgcataagggaaatggcaaggttggtaggccaatggacaacacacaaggacccatgcagagatttggcagcccatcaacatcaagtgcaacatgggggatggatagaggagcacctaggtcatccatcccaagcccgagcattacaatacggagaccgaatggcatggtacgaccggctgaaaatctttctgtctctgctaagaaacctgatgcaggaggcctttcacctgctatgggtaaggaaaaggaacaaggtggaaggttgctgcaagctaatatttcaactgatcagaaactggcagctgaaagtcgttctgtctctgctaagaaacctgatgcaggaggcctttcacctgctatgggtaaggaaaaggaacagggtggaaggttgctgcaaggtaatatttcaactgatcagaaactgggagc

SEQ ID NO: 281321 - DNA, 569 bp, Zea mays
ttcctagtgtggaggagaacctcaggcacgggaaggaagaagagtccccgcagtctcggggctcgcaggaagggtgctcgtcgtcgtcgtctccttccgcctccgccgctggcaaggagatctcgcctccgcccgccactccgcggccactgcagcaggcgctgtcggcagccctgccgccgccgccgtcgccgtcgccggcttccaccagccgcgaggacgacccgtgccggaccgcgcactcaggctcgtccggcaaccagtcccccgaacccgctgcgagaaacgctccaccgtcagaggctagctccccaggaccgtcggagtacagagtctgcagacccgtcggggctcaggacgcggccacacagacagacgacagcgagagggacgctgctgaaaaccatagtcctcgcgtggccggagcgtccaccatggacacgacgtcggatgctcgagatccaggaatgccaccggaggagctcgccgctgtcacccatggtacccgagaccggtcgtgagtcaccgccggccgtgtgctcctccgatgctgcttcgcctggtggcag

SEQ ID NO: 281322 - DNA, 784 bp, Zea mays
gaatttgtttggtgccatatccgagggccttgtctgcgcgtctttgccggatgacttgcagaacaaactccaggagcttgtcgaatccgagagccctggtaccggttggaactatgccatcttctggcagctctcgcgcacaaagtctggtgatctcgtccttggatggggggacggctgctgccgtgagccccgaggtggggaggtgggagctgctgcttctgcaggcagcgatgataccaagcagaggatgcgcaagcgtgtgctgcagcggttgcacatagcattcggggttgctgacgaggaagattatgcccatggtattgatcaggtcactgacactgagatgttcttcctagcatctatgtactttgcttttccccgttgtgctggtggccctggccaagcatttgcagcagggatccccctctgggttcccaatagtgagcgcaaggtatttccggccaactactgttaccgggggttcctcgcaaatgcggcaggatttaggactattgttttggtgccatttgagagtggtgtccttgaactggggtcaatgcagcacatagctgagagttctgatactatccagaccatacggtctgtatttgcagggacaagaggtaataaggctgcagtacagagacacgagggaaatggtcctgctccccctgaaaggtcacccagtttggcgaagatctttggaaaggatttgaaccttggccgccttcagttggtgtacctaaggtagatgaaagggatatggaacagaggagtgctg

SEQ ID NO: 281323 - DNA, 733 bp, Zea mays
tcgcctgcctgcacgtacccggacttactggctggatcgacccatgcgtccatgcttgcgtccacgcatccggcataaggcagtggggttcttggaggcatggaggattcctggagttgcgccattcgctctttgcctcttcttctccaaattggttgcatataccttcctgtactggctacccttctacatcagccatacacgcatcggtggcgtgtacctctccgatgcaatggccggcagcttatcgacgatcttcgacgtcggtggcgtgttgggaggagtcctcgccggccacatctccgaccgtctaaacgcgcgggcgatcacagctgccagcttcatgtactgcgcgatacccgccctcttcctgtaccgcgcgtacgggagcacgtcgatggcgtggaacgtctgcctcatgttcgtcaccggaatgttcgtgaacgggccgtacgccctgatcacgactgcggtgtcggccgacctcggcacccacagctccttgaacggcaactcccgggcgctggccaccgtgacggccataatcgacgggacggggtctattggagctgccattggaccgctgctgacagggtacatctcgtccaagagctggagcgctgtgttcaccatgctgatggcggcggctctccttgcgggctgctcttgaccagcttgtgtgcgccgagctgcaggggaaaacacctacagtgcgagcatgacgttgctgatg

SEQ ID NO: 281324 - DNA, 674 bp, Zea mays
gcgtggttgttcaatattacaaaggttctgtcatttgttatcacattcctgttcttggagctgattttcttctcatctgctctgagtagtgttggagatgggggttgggcgttgttgatttttgcatctgttctactcatgactacgcttatatggaactactggagcaaactaaagtttgacagggaagtcaagcagaagcttccaaaggatttgatgaggaagttagggcccaaccttggtaccatcagagctcctggactaggcttagtctgcagtgatattgtgaaaggagttcctgcaatttttggtcattttctgacctcactccctgcgatacactcgataattgtatttgtgtgtatcaggaatgtgccagttccggtggttcctcaaagtgaaaggttccttttccaacgtgtatgctcaaggggctatcacttgttccgctgtatagcgagatacgggtataaagacaagaagcaggagcaccatagcgtatttgagcgtcttctgattgaaggccttgagaaattcatacaaagagaggcagtagagctatccctacaaagcgaagacgacattgactcggacgaagagcctccaacccctgtgaagatcatcacagcaccaaatggcagcctctactcgctcgacgttcctctcctggcaga

SEQ ID NO: 281325 - DNA, 579 bp, Zea mays
  unsure (1)..(579): unsure at all n locations
ggacgtggtgactcacggcacacccactgcacgcgctagctcgagggcggctccgcctccgtcccatggatggccgccggcgccacctcatggtgttcacggtcgcggtcactgctaggtggtggtccggcgtgctagatctcacgcctccagggcaggctccctcgcatgggtcgccgtttcctcatggtgttcacggtcgcgctcatcgctcgcagcgcggaggcgtcgatctgcatctatgatcaggagcccttctgcgaggtggacaatgcctcctcctctctggccaatacttctctgccagtcgcctgctcccaaggggaggggcgctggaatacgggcccgcagatggcgtcggctgtgcaggcggccatgatcgacgaagcctcctcagatctgtgctcatcgccaccagggtgataacctttgtatctcgatcctgctcagcatctcggtggtcgtgcggtgccagctggttcggtcggngcagcaggcgctcctggcacccgcctatccccgagggcgcgaccaaagggagtccacgacgaggaagcgacagggccgaaatcagatatg

SEQ ID NO: 281326 - DNA, 580 bp, Zea mays
tgcacgggctgcaacccacgctgtgcggggcgtcagggcagctgcggcgacatctgcatctgcatctcccacctcgtctccctcccgcatctgccctgcctcgatcccgccgccagccatctaagggagccgggagccatgtctccctccggcgagctgctggcgtccatctcctccgctctcgccgtggccttcgtcttcctcgcctgcgtcgagctcggcgacgccgccgccgccgtcagcgtctaccgcctcatccagtacgacctcgccggcgccccgctcggctcccgcgccgcggtcctcaatcaccacgccgcggtgctcccgctccctgccggcgcagacctctcccgctccgccctcgtcgcgccgctcctcgaccttccgctctccttcctcagagagtacctggtggagaaaaaacagctggggggattgctcattttgctcccgacaaaccagggtgataaggatagtgcggatgacaagggtcaagtcaaaggtgtactgactgagctggagaaagtgcttgtgcacgaacaagttccatatccagtgtactttgctttgggatgac

SEQ ID NO: 281327 - DNA, 475 bp, Zea mays
cccacgtgaccgcccacgcgtccggcaaagaggaggtggttggatttggaaaaggagaagctgctcaagaagaaacaggagggtaaactcttgactgggaagcagaaggaggaagcaaagaggttagaagccatgaggagacagtttcttgagcagagtgaactccaaaaggctgaggatgctgcccctgagaccaagaagaggccaatatatgattctaagaaaaagaaagctcaatcaaaggccacagagactgcaaaagtagtcgaagaacaacaggaagaactcaatgaagttaacaatgacgaggaagaatatgtgctcgtggatcaggaatctcaatctcaggttgaggaatctgatgagaaaactgaacctgaccaggagactgaagagccaaaaccagaagaggacgaggaagatgaggatgagtgggatgcaaagagctgggatgatattgatgtcaacttgccta

SEQ ID NO: 281328 - DNA, 982 bp, Zea mays
aggcaatgttggggaggaatactgtgtcaagaaaaaggatagagttgaagttgttgcaatgcttggtctctttgggttgctgatcagcacagtgcagatacttgtatttgaaaggaagggcctagaagcagttacatggtctccaacaatgataagtctgtttgcaggatttgcagtggcaattttcgtattctacacagttgctcctttcggttcttaagatgagtggagctacattgttcaacctttcactgctaacatctgacatgtgggcagtcgccattcgagttttattctatcagcaagagataaacaggttgtactacctagcattcgcagttgtggccattggattaatcatctattcgttgaatgatagatcttcagatgatgaaacagctggaagtacagaagcaccggcccaatatcagcaacttccaattgaagacaattcaacaagaattggttctagttcaggtagccaagaaaggacacataaggaagaagttcatatctgttagtgggataataatgtattaatgtacgaagacacttcattgtcaatgcatggatttttaccaaatcaaatatggcatagagatatgcagagtaaaatgctggttgcttcatgtataggaaaacgtttaattggcccaagaagctaagcaagatgaggaagagaatcagaattaattttctttacaagtcagtccagcagattattcacaagagcagacccattgctgaaggctcccgcatcagtgagatctaaggaagggataatacatcgggtcaaaatgatctttgactagggattgtgaacaatcacagctggtctgcaaagcataatagcaacagtatgaacatgtaaagggagttactagtcactaaagctctttcaagaattgtctatgaaggaaaaaaaattctagatagtgtatggatagcttacatgctttactggaatgcagaattatgattt

SEQ ID NO: 281329 - DNA, 715 bp, Zea mays
aatgcagtgaggcccacgtccctctcgtctcgtacagacgacgacggaaagaggatgatgcggggagtcggaggtccgctgctcaccatcggggatctactcagcgacctcgctgtcgacgacccactcgtcggcgtcggagatgcgtctgtcccatcatctccatcggcggcgcacaagcggggaaggccaatccgtccgatctcagccggctctttgaggaacactatgacgatttgatgaaggctctacaagagaaggatccttcatggccctcactgatgctgaagctgtgcgcggcgctgaagactgcggataggctgatgagttgcgcggacacgaacgcggaacagctgctggagaaggtgaaggcactggagggcgtcctcgacaggagcggtcatgcggtggcagagattgtacaagctctccagaggtcaggcctagccaatgatggtcacggttccccgtcaaaatcggctagcaagtagacgttctggtctgctttttgttcgtcttctatcccatgcaaatctctgggtattgtgagtgagttgtatgtcgacctgtgcctccacggctttgcggcctgccttgttttttttttttacccctcaccgctcttggaatgcgcgtttgtgggtatcctgtcggaagtagcgggcgatactggatttgcggtggacaaccttttttcttcggggatcattagctt

SEQ ID NO: 281330 - DNA, 503 bp, Zea mays
gaatgtcttcgccgggctgatcactaaaatggtgtcccgggaagaggcacacctagttctgatggagctgatgaaatggcgctcggctgggctggacccgccgtatgcacaagccgcgcaggcgaggcagcctgacccgtccacagggaggatgaaggtcgccaataagcagagcagcaggctcgcatgggagacatgcctgagtgagctcaagtcgctcggcaaggtagctgtgcggctcatcttcctccatgctacctcccggggttgcaggtgtacaccgtcaatggtgcgctggctctgtgcacctgggaccatggctagcggcaatgatcgagcgcaccggttggtctttgtcgcggcagattccaagctagagaggagagacttctccagcgatgacagacatggatgcacagttactcgctgaaggggatgatgatgatgctacctggcactgtggaaccctaatcagtgtaacaagtatccctggttaattgttt

SEQ ID NO: 281331 - DNA, 461 bp, Zea mays
  unsure (1)..(461): unsure at all n locations
cgacttggtctccgcgccgccgacccccatcacgggcaactttcacctccgatccgtcctccaaaccctattaccaccgctcccgccgcccccgactcgcgctcggatggcagggcaaccccgcgagcgtggtagccgctcgtcccggaagggccggtccgcccgcgcggggcttgcacaggcgcccccgccggcctccgatcccgatctgaccgtcggagaggatgccgcgccgtggctccgcgccacggcggacgagcttgaggagcgcctgctgaagaggctggatgaggcgtacgcggcggccctggcccgcctcgccgacctcggccacggcgaggaggcatccctcggggccgttctccactcgggccactgttacggcaagctcaacgaatcccgtttccatcatcgtggccaacgcccgcgcctacctctncgatcctggccacgccagcgcg

SEQ ID NO: 281332 - DNA, 479 bp, Zea mays
aggaaccctaggcccagcactcggcgacggcggcgcgccaccggcgacgggatcagcggcatcactcccctccttccccggcgcggcggcgcctgcacctaggccctagcactgcagcactcgacaacaggatcagcggtcgcgcccccctcctccttccccggcgcggcggcgccctgtagctgcagatctgccactgtccgcctgccggtcatggagcacctccggtggcgccccacagtgaacgagcgcgacttcattgagtgtgcgctccagtctgacctccgtgttgacggccgccactcctttgacttccgcaagctcaagatcaccttcggcagggaggatggctcgtcagaggtgcagctcggggagacacacgtgatgggctacgtgaccgtgcagctggtgcagccataccgtgacaggccgaatgaggggacgctggccatattcaccgagttctcacccatggccga

SEQ ID NO: 281333 - DNA, 943 bp, Zea mays
cctattcgtccgccaaagtctacacacaacagtgataccatttcttaacgagagtatgtttcatttggaagttcagataagaacagaagatatggatttaatagcagaaagaggcattgctgcacattacagtggaagaggagttgtttctggacctgttcggcctggaatatcaagtggaagaaatgccaaggggaaagtaatctgcttgaacaacacaggctttgctctgaggattggttggctcaatgcaatccgcgagtggcaagaagagtttgttggtaatatgagttctagggaatttgttgatactatcacccgagatcttctaggaagccgcgtctttgtgttcactcctaaaggcgagattaaaaacctgcctaagggagccacagtggttgattatgcttatctgatccatactgaaatcggcaacaaaatgattgcagcaaaggtgaatggcaatctggtttcaccaatccatgtacttgcaaatgctgaagtggtggagattataacttatgataaattatctagtaagtatgcattccagcgtcaccagcagtggctacagcatgcaaaaactcgcagtgctagacacaaaattatgaaattcttaagggagcaagctgctctttctgctgctgaaataactgctgacgcagttaataattttgttgctgatcttgaagacgaaagtgatagtgagctctcacttccaagcaccaagaatgaagatagtaaattcaactgggagaagatattaagttctgataaattattctttgtcaacaaaagtagtgatggctttttacctgttaataatgtccatacgaaggtcaatgggaagcaaaacaaaactgttaaggatttgggcatcaaaatcaatggtcattctacaattcgaggtgatagcttcagtgagttaatgcaccctggcaat

SEQ ID NO: 281334 - DNA, 410 bp, Zea mays
tgtcactggactacgcgctgtcgaacccgtcccacgtgggcgccgtggaccccttcaccaagctgcagtacacgagcatgctgtacgcgcaggtggacgccgtgacgttcgcggcggcgcggctgggttacggcggcgtgcccgtgcacgtgtcggagacggggtggccgtccaagggcgacgccaacgaggccggcgccacggtagagaacgcgcggcaatacaaccggaacctgctcatgcggcaggtgagcggcgagggcacgccgctgcggcccaggctccagctcgaggtctacctcttcgcgctcttcaacgaggacatgaagcccggccccgcctccgagaggaactacggactctaccagccggacatgagcatggtctacaacgtcggactctcccagctc

SEQ ID NO: 281335 - DNA, 1013 bp, Zea mays
gacgcacgcgggggccggggctggggctagacggctagtgcgttagcccgcttggcaactaccaaaccaactcggccgtcagtctgctcctagtcctcgcgcgccgccgccgcgccgcgggagagcaccacgtacgtacgggtcaaagcgcggttgccccaagctcacagtctgctagggttccagaatggcggcggcggcgaacggcggagacggggaggagctcctcctgctctcggccgtggaggctggccgcggcggcggcgtacccaccgaggtggaggattcgtggcggctcaacttcgaggggttccgcccgccggaggcgcaccaggagaggccgccgaacggtccgcttcaccactgcctcggcgtgctagctcaaggtcctgaggatgttgttgctgaatactaccaacagcaagtggagatgcttgagggttttagtgagatggacacacttacagatcgtggtttccttcctggaatgtccaaggaagaacgagagaaggttgccaggagtgaaacattagccatacggttgtctaactttgcaaatatggttctctttgctgcaaaagtgtatgcttcagtaaggagtggctcacttgctatcatcgcatcaactttggattctcttctagacttgttgtcatgatatatcttgtggcttactgccttttcaatgcatacgccaaatccctatagaaacccaattggaatagcgtatgcagccactgaaccagggaatgcaaggtgggattgcttggctggtcatacgaggttcgatcttgttctgggtttcatgtaggaatcaaggaactagctgaggtctccttccctcaagatgacaaacaaacagaaaaaactaccctcaaggtgacctaaacacaaagggagctacataataccctacaagactagaccagcacggtgcaccgccgttctgtatgtcgctggctatgctaattgtgcagccgacccccttccatcctcagtgccctcctaccatt

SEQ ID NO: 281336 - DNA, 733 bp, Zea mays
acgtgttgccatactacaccacccacaagatcatgcagggactcctcgacgcagtacacgctggccagcaacgagaaaggccttgacgtggtgctgcggatggccgactacttcagcaaccgcgtgaagaacctggtgcagatccacactatccagaggcactgggaggcgatgaacgaggagaccggcggcttcaacgacgttatgtatcagctgtacactataacgagagaccagaaacacctgacgatggctcatcttttcgacaagccatgcttcctcggaccacttggtcttcataaagacgacatctcgggcttgcatgtgaacacgcatctccccgtcctcgttggtgcgcagaagagatacgaggtcgttggcgatcgtctctacaaggacatctcgacttacttgtttgatgtggtgaattcttctcacactttcgcaaccggaggcacatctaccatggaacactggcatgacccaaagaggctggtggacgagatcaagatcagctcgaacgaggagacctgcgccacctacaacttcctcaaggtgtcgcggaacctgttccggtggacgaaggaggccaagtacgcggaccactacgagaggctgctcataacgggatcatgggcaaccagaggggaacacagcccggtgtcatgctctacttccttcccatggggcccgagcggtccaagagcgtcagtggccagtcaccgtctggcct

SEQ ID NO: 281337 - DNA, 641 bp, Zea mays
cccacgcgttctcaggatttcgctcaccaaacgagatacaaaatcagcatcagtcaacatcaaagagacctatcgaacatctagaaaatcaaccctttttacaccttttccatcaagcagaagatgatagcatgcagcaagttcaacattgtgctcagttcccacccattcatcaatgtacgagcactccacatctatcaggtaacccccaacaccagcaacaggcttatttatctcaacatatatcttgcttgcaagttgggcaaggtcatcttggaggacgcatgcatattattccaaccagccctgcgaagttctgtgatgagtgtggctccccatatttgagggcgacatcgaagttctgctcagagtgtggtaccaagaggctaggaatgtgaggtgacttgatcaatgtgtatatgaatctgatgatgtagcaattgtagtcttatgtttgtaaaagggtctctagcgtaatggttaaggcagcccggcgaagttctgtgacgagtgtggctccccatatttgagggcaacatcaaagttctgctcagagtgaggtaccaagaggctaggaatgtgcggtgacttgatcaatgtgtatatgaatctgataatgtcccaattgtagtcttatttgt

SEQ ID NO: 281338 - DNA, 448 bp, Zea mays
accacccgacaccccaccccctcaattcacacccccacctgctgcatcggctccctctggcgccccgcctcctggcccagatccgtgcacccctcgccctctccggactcgatgattcacagatccgcccagctgcccaggcaccgactaccggcgtccggatctcctgctccactgctcgccgcctcggggctctccggcgtcggctcagcgcggcgggccccccaatagcctagttccggatccccccaccgcccacgccccacaggtcaagcaccggccaccgatgtctgacgaacgagcgaactccccgcggatgcaggaggaggaaggtgtaggaagcgaccaccgacccatccgcgtttcaccatcacgctctccgatctcaagggttttgtccgctggctttgctaagggcagcaacgtacatagactggtcgtcttggat

SEQ ID NO: 281339 - DNA, 590 bp, Zea mays
gtgagctttggcagctgctggaggtgaaggtaggggaggcgtgtcagcatgcgagtcctaccttccaatgggcaaactaacacggagggtactcagagccaatgggatggaaaataaggtcaaagtatttcacaagcgatcagatgagctcggagttggagtcgagcttgattctcgacctgatatattggtaagtgaaattcttgattctgagctgctgggtgagggtctcatacctactctacagcatgcgcatgacatgctattggtgaaaaatccaaagacagttccatatcgagctactacttatggagtgttggttgagagcacgtccttgtggaagatgcatgatctgcacagcaatgaagcaaatgctgaagatggtgtgaggcttattcccagtggaacacaaattgttctttctgtgaagtcacagcaacatgcgatgcaatgtgatgcgctggcagatgaaataagattgctgtcagaacccttcaaagtttttgaatttgacttttcggaacgtccagatagtcatcgtgaaacatagattgagataaaagcatcagctgatgggcatgctcatgcta

SEQ ID NO: 281340 - DNA, 658 bp, Zea mays
  unsure (1)..(658): unsure at all n locations
cccacgcgtccgcgaagctgttccagaaaggcattggtcttaagaggaacctccatatggcaacgatgctgtacaagtctgttgctgagaggggaccctggagttcactgtccagatgggctttggaatcttatttgaaaggcgatgtagggaaagcattgctcttgtattccagaatggccgatcttggatatgaggttgcacagagcaatgctgcctggattcttgataggtatggtgatcaaagtatttgcatgggagaatctagtttttgtacagatatggaaagacatcttcgtgcgcatgctttgtggtggcaagcatccgagcagggtaatgagcatgctgcattgttgattggcgatgcctactactatggtcggggcgtagcaagggactatgaacgtgcagcagaggcatatatgcatgctcggtcacagtctaatgctcaggctatttttaaccttgggtacatgcattagcatggtcatggacttccccttgatttgcacttagcaaaaagatattatgatcaagccgttgaggtggattcagcagctaagctccctgtcatgcttgcactaacaaggttgtggctaanggagaactacgcagacagttttttggttcgctttatcgattcacttccagaaatata

SEQ ID NO: 281341 - DNA, 521 bp, Zea mays
  unsure (1)..(521): unsure at all n locations
ttcgtcgcctttgcccacctcccaagcttccgcctcctcccctcccgcgctttctccgattcttccacgagcttccagatcgcgaaaccaccatagccgcagtcaggcgagacgagtgcccacccgcgccgcgggattcatcggaatggcgtacgtggaccacgccttctcaatcaccgacgacgaagacctggtcggcggcgcggtgggaggcccgcgtggcgccccggtcaaggaaatcgcctttgctgccgcgctcctcgcttttgggcgtctcaggtgtcgtcgcggggatccttcatggctcgcgcaccatagtcgggcggcgacccgcgcccacggcattttctttgcagttctggagggtnttatggtcataccagggggtctactacacangagtagcgtattatgcttacaaagggacaaggggtttcaccttctncacatacctnctatctgaagaagcaattgggatggctcatccaactatccaacacaggttggctctctctctctct

SEQ ID NO: 281342 - DNA, 395 bp, Zea mays
tttgggaagcatagttcattagtatgtctgcgttacatgttcttaagcagggatcgtggaagaacctgtgttgggaggtggtagagaagatgtgccaatgattggtttttggtcaatgtcttctctggtgccgcagaagttggagcggcatagcgagtgcatgttgccgcttttactctgtgttgctgtttgctttatgattccttttattccatggcacctgaataactcccccaagtggtagagatcaggacttgtgagctcgatgccggcgaagttgagctgttgacgcttgatgttggttacggtgatccgtgtcacccaagtgttgggtgggaactggggactatggttccattgggaagcctgtgaggtagttgacacgagggcacagt

SEQ ID NO: 281343 - DNA, 980 bp, Zea mays
tttcacgcgtccgtccacgcgtccgcccacgcgtccgtccacgcgtccggcgggagaggggcggcggccggtccgtgtccgtgtccgtcgacggttggttcgggaatggcgcaggcggtggtgccggcgatgcagtgccgggtcggagtgaaggcggcggcggggagggtgtggagcgccggcaggactaggaccggccgcggcggcgcctcgccggggttcaaggtcatggccgtcagcacgggcagcaccggggtggtgccgcgcctcgagcagctgctcaacatggacaccacgccctacaccgacaaggtcatcgccgagtacatctgggtcggaggatctggaatcgacatccgaagcaaatcaaggacgatttcgaaacccgtggaggatccctcggaactaccaaaatggaactacgatggatctagcacaggacaagccccgggagaagacagtgaagtcattctatacccccaggctatcttcaaggacccattccgaggtggcaacaacgttttggttatctgtgacacctacacgccacagggggaaccccttccaactaacaaacgccacagggctgcgcagattttcagtgacccaaaggtcgctgaacaagtgccatggtttggcatagagcaagagtacactttgctccagaaagatgtaaattggcctcttggttggcctgttggaggcttccctggtccccagggtccatactactgtgccgtaggagccgacaaatcatttggccgtgacatatcagatgctcactacaaggcatgcctctacgctggaatcaacattagtggaacaaacggggaggtcatgcctggtcagtgggagtaccaagttggacctagtgttggtattgaagcaggagatcacatatggatttcgagatacattctcgagagaatcacagagcaagctggggttgtccttacccttgatccaaaaccaattcaggg

SEQ ID NO: 281344 - DNA, 619 bp, Zea mays
ccagacttggtaattttggacgacaaggttttgtattatctgatttttcgggatggatgccaaaaggttcctgcatctggtcgaggagaagaaaagaaggatcctcgagaagaaagaagccccactaaagtgggagcagaagctagaaacagcagctaaggccaaggttgatgcagaagcaaaggtgaagaagctaaattcaagaaagcacaggaggagaggagatttgtcctcagactctgatagtgactatggcagcgatgttgatcgaaaacacttgaagaggaagaaccgcagaaggaacaagaagcatgagcattctgacctctgatgatgccaggagacgcaatcgtagatctagaaggagcaccgactcaagtgatgacagcgacagtgaatacgagaccaggtctgaagaagaacgtccaaggaagaagcgctcgcacagaagaagggcatcaccggcactcttcaaggtcaggactctgaaaactaccagcggtgatgaggaagaacggagatctgccaaggaccatactcagagccgcaggtcaaccatcggtcgtctgatgatgactcaggcaaggacaaggtcaagtcaagacatgggaagggtctg

SEQ ID NO: 281345 - DNA, 508 bp, Zea mays
ttgcacatgtccatattcagagctgctatggctttctttgattccactccgagtggacgcatcctgaacagagcttccactgaccaaagtgaggtggacaccggcatcgcataccagatgggttctgttgcatttgctgtcatacaacttgttggaatcattgccgtgatgtctcaggttgcatggcaggtgttcgttgttttcattcccgtggctgctacgtgtttctggtatcagcgatactacattgataccgccagggagatgcaaaggctagtaggtgtctgcaaagctcctatcatacagcattttgccgaatcaataacaggatcgactaccatcagaagttttggcaaggaagatcagtttgtatcagcaaatagccatctaatggatgcctactccagaccgaaattctacaacgctggagcgatggaatggctttgctttcgcctggatgtgctgtcatcccttacatttgcgttctctttgatattcttgatcaatc

SEQ ID NO: 281346 - DNA, 580 bp, Zea mays
tgtgggcagatggcgcagatccccaatcttgacaacgcgccgctcaaccttgcggccctcagggagcagtcgcagaaggacttgttcggcatcctaaaaaatataaggggaaagaagtgcttggttatagatcccaagctcgctgggactctctcattggtcgtgcagacatcgctgctaaaggagtatggcgcggaagtgcggattctctctcccgaacccctgcagacggaatgccccaaaattgtatatcttgtgcgctctcagctgaggttcatgaagttcatcgcaagtcaaatcaagaacgatgaacctaaagggctccagagggaatacttcctttactttgtacctcgccgcactggtgctttgggagaagatcctggaggaagagaaagttcatcagaaactgacattcggagaatatcccttatatctagttccattggatgatgatgtcttgtctcttgaacttgaccattctttgcaggaatgcccttatgaaggagatacaagttctatctggcatgttgcttaagcgatccataaattagagtttgcctttggagttatcccaatg

SEQ ID NO: 281347 - DNA, 555 bp, Zea mays
  unsure (1)..(555): unsure at all n locations
ttggcacagtcatacaactcggttcttgttgcgtcagctgagaaagttatcctcgaagccatccatgactcacaatgctatcaagtccttcgagcaaacaaggtggagtttgagattgtgtcatcggagcgaaccaacattgtggacacccaagctaggttctgctcgtgccgccgatggcaaatttacggcatcccatgcgcacatgccgccgccgcactgctctcatgcggtgaagacccccgcctctatgctgatgactgcttcagtgtgatgaagtaccgagaaacctactcccagccaatatatcctatcccggacaggagccactggaacgattcgtctccctggtcacaaggtgcggtcagcaggccgatgtggtgcttggcccgcccaaatccggaggcctcctggccgacnaagatgaagatctaaagatcgagagcataagcggcaagcggatctncaggtgccgatgccatttctggcatctaaagagtgctttggagtgcacgtccgtgtgacatacttgtttatgacagtaggatctatgct

SEQ ID NO: 281348 - DNA, 810 bp, Zea mays
ctggctgcaaggattttgtggaagctatatactcgagtgagaaactcccaatgctctcaagggtcaggcagtgtacctggtgcaaagcaaacattaggggctatgaccatcattgtcctgcatttggtacttgcataggacagaaaaatcatcgtctatttatggcccttttgacaggatttgttgttgctgaatcaacatatacgatgtgctcaacaaaatatattaccagatgcatcagttcagggactataagatcggagaatcctgtatctttaaacatagtaatcagtacaacgctcttctctatcctccaggtcctctggcagattgtattcttgatgtggcacatatattgcatctgcttcaacatcaagacagatgagtggattaactggaagaaatatcctgaattccagatgaaggaacaacctcgatcagattctgaagtcaaatttgtgaacccatatgacaagggcatgctgtgtaacataagagaatttctaaagccggaatgatagatagccaattttgagtacgaagacctggaactagaaagatgggaagtctgaagtgcgttataactggatggaagcttgtttccttgttggctatagattttcaggaatctattctgatgttgtagccgtttagttgagattccagatttatgacagcgaatctggttcagtaaactgaaccaaacacactctgaggatcattgaactccctgtagtttaatgtgcaagtaacattcttttgtaaggttactttcacttatggaaaacatatcacggtcctgcatttttc

SEQ ID NO: 281349 - DNA, 716 bp, Zea mays
tccaaatccaaatggacatatatttgggattggagggagtattgcataagctagtgattgtattatttctaatagatcctccgtgctgttacctgattgtattcttgatgtggcacatatattgcatctgcttcaacatcaagacagatgagtgggtaatttcaaatttcccatgctttggagtcttcgttcatcaattgcaggtcgtcttctcgttagctgtttcttgtagctaaaaggtcagattttccagattaactggaagaaatatcctgagttccagatgaaggaacaacctcgatcagattctgaagtcaaatttatgaacccatatgacaaaggcatgctgtgtaacataagagattttctaaagccagaatggtagacagccagttttgagtacgaagacctgacctctgatggaactatagaaacatgggaaatctgaagtgcgttatactggagccaacatggaagcttgtttcccttgttgctgccgtagcatttattgagactcgtcgtgaggattctgctgtgtaatttaatgtgcaagtagcattctatagttcacatcgtgatactgcattttttcctgtctggtcttgcgaaagggtaacccttgcagggatttgaatcaatttgaaggaaattgccgtgcagtttatgaccatacccttgataattggtctcaataatgtgcaaccgttgcttcacgg

SEQ ID NO: 281350 - DNA, 813 bp, Zea mays
gttgctgaatcaacatatacgatgtgctcaacaaaatatattactatatgcatcagctcaggaactataaaatcagagaatcctgtatctctaaacatggtaatcagtacaatgctcttctctatcctccaagtcctctggcaggtcttaggtgagctgatcatcatgatggatgcagttgaatatttaggcgatcggatgaatgctctcaaacgattcttcgttacctccaagattgtattcttgatgtggcacatatattgcatctgcttcaacatcaagacagatttgtgggtaatttcaattttcccatgctttggagtcttcgttcatcaattgcaggtcgtcttctcgttagctgtttcttgtagctaaaaggtgagattttccagattaactggaagaaatatcctgaattccagatgaaggaacaacctcgatcagattctgaagtcaaatttgtgaacccatatgacaagggcatgctgtgtaacataagagaatttctaaagccggaatgatagatagccaattttgagtacgaagacctggaactagaaagatgggaagtctgaagtgcgttataactggatggaagcttgtttccttgttggctatagattttcaggaatctattctgatgttgtagccgtttagttgagattccagatttatgacagcgaatctggttcagtaaactgaaccaaacacactctgaggatcattgaactccctgtagtttaatgtgcaagtaacattcttttgtaaggttactttcacttatggaattcatatcgtggtcctgcatttttc

SEQ ID NO: 281351 - DNA, 693 bp, Zea mays
ttctcttggacgcgtgggcggacgcgtgggttttggaagaaaatatgacttcgcgagaccagactattttgatggacacaatgcaagtgtcgcactcaacgttcatcaggggtttaaccaagaggattccctggttatgaatagggcttctcttgaacgaggtatgtttaggactgaacacctcaggagctataaggcagatgtagaaaacaaggatggaaccaaacgactgaaattgaaggaaaaaatagactttggaaaaacagcaagcaaaagaggacgtgttgacaatcttgatgatgatggcttaccttacgttggtgcaagtcttcagaccaatgacattgttattggcaaagtctcagaatctggagaagaccacagtattaagctgaagcatacagaaaagggaatggttcagaaagtattgctttcagcaaatgatgaagggaagaattttgctgtggttactctaagacaggttcggacaccttgccttggagataagttttccagcatgcatggccaaaaaggtgttgttggttttctagaatctcaagagaacttcccatttactcacgaaggtatagtcccggatattgtgataaatccacatgccttcccaacacgtcaaactcccggacagctgcttgaagctgctctggggaaggggatagcctgcaaaggtacaat

SEQ ID NO: 281352 - DNA, 846 bp, Zea mays
actttagaggtttgacagacggtagcatgaaggatcagattattggcctattactggaggttctttcaagatgctcttggcgtggctgctcgaaattatgctcatgcccttgccgaattacatcttacttgcgggtattggatctcatgcttgatgttgcaaggacagggaaaagcagacatactgaagtcattcaggcattgctgctagagttaacttcccagtgcttgagcgacacagcgtcaacccagtacgcattccatgatccaacccgtattgaactaaaacaacaagcaactgaatcatttttgagctgtgttggtctttctaagaaaaccgatgaaactaacgatgatgatgtgcagttgcaaatactcggtgaaccaactttagagatgcctagagtggattactcccttcatgaagtacacaaggagatcctgtcatgtctcactgatccttcatatgatgttagaattaccgtgctgaagaggattctttggctcacaaaatcaatcagacatggttatgcagataacatgttgcaccagtgggcaggagttaatctgcagcctgctttaatggaacggttgtttgtggaagaacaccctaagtgcctttattataatctgaagatcatcttttcatggaacatggaattcccattcaacaatggagaagattctagcacacttttgtccttgtgggataggttagttcatttaaacagcaccatgtcacatgcaaaaacgagagaaatagttctaatgttgcatgggtatgtgcatgaaattgttcactaaacaatctaggggtggtatttcaatggattgtcttaagaccagt

SEQ ID NO: 281353 - DNA, 408 bp, Zea mays
tcttgactccatgccaagttctccgccaataggggcgggtttagccgccgaagggttataatccggctgtctgcttttccctaccaacctcagggcgtacgatcgggtggcgatcaagttccgcggcgtggaggccgacatcaatttcagtctggaggattaccaggacgacatgaagcagatgggccacctgagcaaggaggagttcgttcacgtgctccggcggcagagcacggggttcccccggggcagctccaagtacagaggcgtgacgctccacaagtgcgggaggtgggaggcgcgcatgggccagttcctcggcaagaagtacgtctacttgggcctggtcgacaccgaggaggaagccgccagggcgtacgaccgcgcgggcatcaagtgcaacgggca

SEQ ID NO: 281354 - DNA, 536 bp, Zea mays
ttttggcatcacacatgcatttggaatgggcagggaagtgttagattgggatggaggagcagaacgattggtacttcttcagccacaaggacaagaagtacccgacgggcacccgcaccaaccgggcgaccaccgccggcttctggaaggcgacggggcgcgacaagcccatctacaccaagagctgcctcgtcggcatgaggaagacgctcgtcttctacaggggccgcgcgcccaacggccacaagtccgactggatcatgcacgagtaccgcctagagaccaccgagaacgggaccgccgcccctgaggaaggatgggtggtgtgcagggtgttcaagaagcgagtggcgaccgtgcggaggatggccgacggcgcgccgtggtttgacaaccacgtcgccggcgggttcatgccggaccttgttggctcggtgccgaggcagctgatgcaccaccacccaaacgccgtagcggcggtgtacagcggccagcagcagctctaccactgcaagcccgagctggagtacatcacc

SEQ ID NO: 281355 - DNA, 640 bp, Zea mays
aaggtggacccctggggggccgcgccgcaatatccgggtcgtcccacgcgcgcgttttgacccaaggttatggagttcactcggaggggttacattgaatgatgaccattgtaaaaaagcattggaagtttcaaataataaatctgcgcgagctatgcgctctctggctcgcagtgcatacagcaggaatggcttccatacatccaaaattctatgggaatctgcattgtcggtgaactcttggagtccagatggctggttggcatatggcacagctgcatggaaggtctacgatctggactgagcctggggctgcgtctagtcgggctggacagatcgagctcttaaaaggagaagcatgtaccaacatagcctgcctgcacatgattagaggaaaaagccaagcaagagcacaagcattgacggaagctgtaaagttcacgaggaatagctgggaaatttgggaaaattacagtaaagttgctttggacacagggaatattagactgacacttgaagctttgaaaactgtattgaatttatcctcaaacaagcagtttagtgttggtatattggacaaggtgatgacaatgcttgaagaacaatctccagattttgttgatactcacgaagcatcaga

SEQ ID NO: 281356 - DNA, 652 bp, Zea mays
  unsure (1)..(652): unsure at all n locations
cccgtcncgtcgcttcgatcccccgagcttcgctcacaccggtcacctccgcctcctcccgcttcgcgcgcatctccttctatcgctccagcctccagcacacgtcctccatgccctcgcggttctgatccggccatagccatgcagcaccgctcgccggaggcggcttcggcatccgcctccccgacggccgcggcggtggaggccatggcgccgggcgtcggcggggttgagccggccgtgacgctcgaccaggttccgcgctggagcgacccggaccagcgcatctccctgctgtcccccaccgccgccggatccgagaccccggcctcgtccttcctctccttctccgccccgtcgattacgagatcaactcgaagatctacctctggcgaggccatccgtggaacctcgaggtcgacgccgtcgtcaactccaccaacgagaacggggacgaagctcatagcagtcctgggctccacgctgctgcaggttcggggctcgccgaggagtgcgccaccgtgggtgactgccgcactgggatggctaagtgacaaatgcttatgatttgcctgccaggaaggtcatccatactgtgggcccaaaatatggatgaccggcctggcaggcgaatgataagcatttgtcatat

SEQ ID NO: 281357 - DNA, 809 bp, Zea mays
ctgaaaaggtactgttggatcaaaattttattgaagacatgcgtaccatgccaatctacattcaaggaaaaactaaaaacctcatggaacgcgctatttggaacgacacatctttcctaagtaacatgaatgtcatggattactccttgcttgttggagttgacaaagagaagaaagagcttgtatttggaattatagattatttgagacaatatacctgggacaaacagctggaatcttgggtgaagacatctcttgttgttccaaagaatctatccccaactgtaattttacctagggagtacaaaatgagattcagggcctttatgtcacaatactttctatcagttccagatgcttgagtcttgaggcccaatcattttctggtattggtgaccgaacatatcttgagttaggacttcggagatcagggtgccgttggttatttccctagtcctgtgagcaccacggcatattggcatcatgttttgagcattgaaattttcccatagtttcattgttgtgtgtgtctatccttgtccattttccttctcagcagttgtgtacatagtagcagctaggacacctgggaagtgcaaattttaagcaaacgaacggtgatggacgcacaaatagcctagtcattgttttttattgagttaattagggtggagatctttccccaaaaaggggggggatcaaaggtctgctggggtagaggaccatgtaatgtactccggtttgtgtttatcggaatatattcctgaagtttaaagttaaaaaaaaaaaaaaaaaaaaaagggcggccg

SEQ ID NO: 281358 - DNA, 589 bp, Zea mays
ttctgactttggaagagatgggtgagaacggggatgcattgaatggcaggggggatctcagcagcagcgacaacgacgacgaagactacttccacgacgaatttcgctgagaccaatattggtactatcctgacacacgcaaggaacacagctgacgagcatcaaggggcgcacagagggtcggaacgtctagcatactatgtgggatgcccgggctgggctgctgacagaatgggagagcttagagttacggccatggagggaggaactaggttttagccgcttggttcttcaaggtgtttgggttaaatggaacgacgacagcatcctagtaccggccaggcccagcagtgatggatgttacgcggcaaggtgagccccctttatctaggctgagctgcattggtctccatcctgatgttcctgcagcaggggaaatgtagttcacggagaccaatgagtggaggagcgtcatctctgtggcgagcggcttcagaaatctaacgggaacgtgttgtttggtgtccgaaatgtatgtgtgtgtgtgtatgctatgaattcacccctttctggcaaaatgtccccgtct

SEQ ID NO: 281359 - DNA, 355 bp, Zea mays
gccacggggggcccgttcgttaccgtcctcctcggcggccttgctggtctcgcgctgggcctcattgccttcctcaccacggatcccttcgccccaccaacccgattcctcggcgcgtggctcgccggcgggttcgccatgagcgtggcgtgggcgtacgtgatcgccaacgaggtcctgtcgctgctggtctcggcgggaatcatcctttccgtggactcggcggcgctgggggtgaccgtgctcgcctggggaaactccatcagcgacctaatagcgaacgtggcggtggcatctcgcggcggcggcgcgcaggtggccgtgtccggctgctacggcgggcccggtgttcaac

SEQ ID NO: 281360 - DNA, 390 bp, Zea mays
gtcgcatacaggcagcaggatgctctttattcccctgtgtcagcttcagcgaagctaatcccattccagtgcccgtaccgcgccgtccctatcgtgccggatcgccacccgctcgctgcgcccccacctccccccctcgccggttcgccacttcgccccacctccgcgcctcagatccatccccaatccggcaaccctagcgccgggttcctcctcctcgtctccgcccgccgccgcctccattgccagaggtgatcgagggggagagacagagcttgggtggtcggattagggagagagggaggggaggatgttcccaaaggcggagaatacgagacggcgggaggcggacggaggcttgccgtccttcggcggcccgttccaccctaa

SEQ ID NO: 281361 - DNA, 506 bp, Zea mays
  unsure (1)..(506): unsure at all n locations
gcgcatggttccgtagccccgcactgcacaggcgctcaaaaaccctagtccgccccgccgcccccgccgccagtccaccacttgcccacctcgtcgcgacgtcgcgcagatatcttcaccgcccgccgcagcaggttcagctgctggcacgggacatttgaaccggcactacaaagcttgtttagcaaagctaggaaagactcaaggaggaggtacgcaaacccatcttaactttgctgctgatggtacaataagtacatgggtttacaacccacaggtagcacgtgatgaaatagccaaatttattgcttgtgaagatttaccgattatgttgggcgagagccaaaattttaaaaacttgattcaacgtgctttttgcccacaatatcagcctgtcactagaaaaaccaccaaaactggattggattgcaatttacaaaaaaaaacctggtggtcttaagaggcctttaaaaggttaaannctaattgctttaactcataccttg

SEQ ID NO: 281362 - DNA, 1405 bp, Zea mays
cggacgcgtgggcggacgcgtgggcggacgcgtgggcggacgcgtgggtgaagaggtccttgacaaagaaaaaatgatcatttcactagaagaagaggtgaaacgtcttaaagctaaactagatcagcttgaacagcataagcatctagtgactgagagcaccagtggtgttgagtatcatggaggcaaaaatggcaatcatgccttgaactttggcgaacttttcactgcacaaggaagtataaaccagccctactcaccacaaatcaaatacacaaaactaaactttaaggttgacacattctttgctgttggatctccctgggtgtcttcctttccctgcgtaatgtccgtattggtattggcaaagggcgagattattggaaagataagaacataattgaagagatgccatgctgccggcagatgttcaatatttttcatccttttgatcctgtagcatacaggtgggcttttatacagagttgaaccacttgtatgtgaagattatcaaaagaagcgtcctgtaattgttccctaccatagaggcggaaagaggatacatgttggagtgcaggagttcacagaagatatttctgcacgttctcaagcgattgcctgtcaattgaagtcactgaaggtcaaagcagtagctgctttgctagcattgagcagaaatgacacagaagaggatggtgagagtgctaatgaggaaggaagatcgtatggttccattatgatggaaaggttgaccggctcaccggatggtacgaattgatcatgtgcttcaggagaaaacatttcagcatccatacctatctgctctgggagctcataccaactattggcgagatcatgatactgctctcttcattctcaaacatttgtatcgtgatatacccgaggatcctccaagcgatgtcattgaaaggatgcctattaaactattttatgagagagatccagttgaggaagaaacgcctgtgacgttttcagatcatgcagcaattaaggaattctgcagaaaggtgaaagcttactcaagaaaaatggaggatgatgccaactgccaagcctcgtgatggatttttagtctctcgttacggcctcacacgttcctgggcaagcagaagcaagatgcagacatgggaaggaagaacgaatcgtgatcccaagaaaagaatccacgagatgcagttccacgcttcacgccagaatcagagcacttggagaatgttgtacggagtagagtcggttgccttgctcgttcctacatttataatgcagtgttgtacatagaacgtccgactgtagttttgtgcatcttgaacgtaatgttatgctgcctgctttaaatgctacagaatatatttttgcttttgcatccctagtgtgcgtcaattgc

SEQ ID NO: 281363 - DNA, 466 bp, Zea mays
gtgctttcacatcttcattttttatcttctgtgtcatttctgctcaatgctagtatagcagctactgctttgacctatagaagataaaaaatgacacagaagaggatggtgagagtgctaatgagaaagaaaaatcatatggttccattatgatggaaaggttgaccagttcaccgaatggtcgaattgatcatgtgcttcaggagaaaacatttcagcatccatatctatctgctttgggagctcataccaactattggcgagatcatgatactgctctcttcattctcaaacatttgtatcgtgatatacccgaggatcctccaagcgatgtcattgaaaggatgcctattaaactattttatgagagagatccagttgaggaagaaacgcctgtgacgttttcagatcatgcagcaattaaggaattctgcagaaaggtgaaagcttactcaagaaaaatgga

SEQ ID NO: 281364 - DNA, 596 bp, Zea mays
ctgaggcacaggagactgttgatcctgctgaaaatcatgtgcagcaccaagattatttggaatataaggctggcaatgtgattgatgatgaaactcatttggaagagcatattcccccattccccagttcaacggatgttaaaagggattcacctcttgctcttccccaccctccatcacctaccctcgaagaacctgtggaagaagcacccaagacatatgcttcagtgttgcgaacgaaatcaaaggcaacgctggcgattacagagtcacagcaggctcaacagctggcccagcagccacagtctgcctcagtgcatgaaaagtctaacctggacaaccaccgggatgttagcgtccctgaggatgaaggtaatgaacatggctaaaaatccattcgatccttgtgcgcctgaactgaagagtttctttcggtttatgttgggaatctttcgccatttacttcggtctttgatcttgagaaagtgttccaggcttttggaagaattaaacctgatggagttgctatccgaagccgcaaggaggctggagtatttcttggctttgttgagttcgaagacatgtctggtattcag

SEQ ID NO: 281365 - DNA, 388 bp, Zea mays
attcacctcttgctcttccccaccctccatcacctaccctcgaagaacctgtggaagaagcgcccaagacatatgcttcagtggtgcgaacgaaatcaaaggcaacgctggcgattacagagtcacagcaggcgcaacagctggcccagcagccacagtctgcctcagtgcatgaaaagtctaacctggacaaccaccgggatgttagcgtccctgaggatgaagaagagtttctttcgggttatgttgggaatctttcgccatctacttcggtctttgatcttgagaaagtgttccaggcttttggaagaattaaacctgatggagctgctatccgaagccgcaaggaggctggagtattctgtggttttgttgagttcgaagacat

SEQ ID NO: 281366 - DNA, 515 bp, Zea mays
gtcaagaaagaggataagaaatcactttctgacattcccctttcccattcagcagtcaaggaggatgagacaccagttgcttcaattggccctccacagtctgcagttatggagaacattcccaaacatacacagttacaggatgctcatgctggggagaggccaccaaaaaagttgaaattatcccaagaaactacagagcaggacatagatccaacgaatactgaacaaagacctttggagctacagccaaagaatattgacagaagcaaatggtttaacattgaatggaatgacagactaaagatggctgatgataaggggacacttgtctatattcaaaatctcgatattcggtttggacctgctgacatagaggagttagttcgtaaagcattacagctaaattgtactgcgaagcccattaaccaccccacatatgatgatccaaacaatggcgaagcatatgctatattcagaactaaagatgctgctgatgctgccatttcaaaaat

SEQ ID NO: 281367 - DNA, 641 bp, Zea mays
atttattatctgcaggaattgagcttgtttttgattcttcctccagataataaatcatatattacaagtgaatcctattcagactctgcctcatttgtcgttcacagtggaaacaaggcagcaattaacttaaatcttccaactgcaaggccgaagaagtcgccgctgcatatggaagacaatgctagaagggataaacttcattatgagaatcagcatgtcctggagagtgttgattcgcctttagtttcagtagatttagaggatgttataaactatactaacttcatgaaatatctaactaaagaggatcgacgtcagttgctcaaatttcttcctcctgtggactccttaacacctcctgaaagccttagaagcatgttcagttgttgccaattctctgatgctattgacagctaccagatgctgcttcgagagggaattctcgacccatccttatgtggtgatgaggaatggaagatagtgaagacgcttgccttaactaatttaacataatgcagttggctggagtgctataaacagaaacagtgagctaaagataccgggggagtggggggcatcagtggaccgtttagctttaccaagtctactatgaaaccactcaaaaggacccgtgacac

SEQ ID NO: 281368 - DNA, 526 bp, Zea mays
gtgagcaagacgcttaccggggcatcctgaatggtgttagccccgattgtcccagcaagagagtgattgatctgattcttgcataccacagattagttgggcccataccacccgaaattggaaagttaaatcagttgcaaaccttgtcactgcaggggaacagtttgtatggttcactccctcctgaactggggaattgtaccaagctgcaacaattgtatctacaaggaaattatttaagtggatacatcccttcagaatttggcgatctggtggaactcgaggcattggacttgtccagtaatacattgagcggatctgttccacattctcttgataagttgtccaaacttacatcattcaatgtttccatgaacttcctgacaggagccataccatcttctggttcacttgtcaatttcaatgagacatcctttgttggcacccttttatgggagcaatattgtggaagagcctatatataaggtgagactacagtgctgtaaaagatggagatcacgctgtt

SEQ ID NO: 281369 - DNA, 355 bp, Zea mays
cccacgcgtccgcccacgcgtccgatggcagggagggtcacagggaagatgacccagcgaagggcctagcacacgtcgtcaatgagattaaggggaagcatcagctcaagtatgtgtacgtatggcatgccatcaccggatactggggcggagtgaggccgggtgcagctggaatggagcactacggatcaaagatgcagcggcccgtgccatcgccgggggttcagaagaacgagcgctgcgaagccctggacagcatgacggccaacgggctgggcctcgtgaaccttgacagggcgttcagtttctacgacgagctccactcgtaccacgcgtctgccgggatcgacgggtg

SEQ ID NO: 281370 - DNA, 460 bp, Zea mays
gctttgtatgcagaggtgttccagaatgagtttgtagcacaaccattggatttcttcggagatgaaactgtggaaatcaactactatattcaatcattttatttatcaggcatcataactgatttcccgaagacagtcagaagatataaaagaaacacctgtacagttctgggaaaggatatgcccagctacatgcagcctcctcaggctggttcccttgcacagtttctacataccttcaaaacccagcctgcatctctgccaccaatgtcgacgctgaattcttcaagcgtggaggagccacctcttgctactgttgcgttaagaagtgtatctgatggtagtgcctcgggggcgaccaagactcctggcacaccttctgatgctccaacggctacagtaaatgctggcatgctacttgtgatgggttaagttgtattgaagccataatgatgaacac

SEQ ID NO: 281371 - DNA, 631 bp, Zea mays
ggatttctgcatcctcagccaggatttcttctgcaccggagactacatcacgcctgagatgccgcaggtggccaacgagttcgacgacgacgacaaggagaacatcccctgcccaaaatctccggagaagtcagcgaaccctcgtagcaagcggtacagaaccgattgttctcccaaagctcgggacgaccatcagattacgccggttctgtttgacagcctgactcgagatgattcggaagaagagcagccgaagcagcctgcgctggaaaagaggggtggttatgtctcccagtcagcagtggctctgcgttgccgggtgatgcctccgccatgcgtcaagaatccatacctcaataccgatccatgcatagatgctgctgtttacggtgggaggcagtgcaactcagcagtattttctccttcaattggtggtaatggtctttcacgctatcgaactgatttccatgaaatagagaaaattggttatggcaacttcagtgttgtgttcaaagttctgaataggatagacgggtgcttgtatgctgttaaacggagcatcaagcaattgcataatgatatggaaaggaggcatgcagtgaatgatgtccaagctatggtagtcttaggt

SEQ ID NO: 281372 - DNA, 563 bp, Zea mays
acccacgcgtccggcggcctcggaatgctgaggagaaaggacttgattggtaagccgcctcagaaaggacgctcctccccaaccccatccccgcccccgcgggctcggcgggttgcgctgctgcggtgcggtgagacgcgggggcacggacggaggccgccactggatctcgtggagctggcccgcgccgagagcgatcatgagctctagaggccttgtccgcctcccggtttcctgtagtgctgctgttgatggagtcaatggatgcctcacctacagtacatgtcgttcaagaaactactactatcagtattctcataccactaacttgcaaatttcaccagtagaccagatgcctttgcctcggaaattaaagaaatcaattcagcgaaacgcttactttttaacccagaagaggaagctcgtaccacactgttcatcagaccttagtacctcctgcagaggagtgcccaactatttatcaatcaatgttttgcaagaccaatcaaatacaaaacagggagctattcgtaaagcgcttgtcattttgaatcctaattctg

SEQ ID NO: 281373 - DNA, 446 bp, Zea mays
tctcacgcgtccgctctccctcctcgctcctcggctcctcgcttgtcgctcctcctcagccctcaccgcgttccctcggtcccaccttccccgcgaagtaaccaccactaggacatcggtccacacgctaagcatctagtgcatctaggtctacgcggcgcgggcacgcggccggtacagcttccccctgccccccatcctcctcgtcgccggatgatcgccgccggcgccgcctcgatggggcgcgcagcgactccagcccccggggcccagtcctcccggttgccgcgcgccgtctcgaggctgcggcttgtgcttcgctcctcggaagcagcagcgaggagcggcagcaagagatggatagggtgcttccggccgtcgccatcgccggccaccgccgcggtcggggcggccgtggtgaacgaggctaagggaaatcggccgga

SEQ ID NO: 281374 - DNA, 398 bp, Zea mays
cgcacacccctgctcacgaaaccgtaggccgcgccgcctccccatacctacgaaactagcatcccgcggcggcgatggccaccggcgacaacgacaagcccccgtcgcttgacgcagacgtcgacatggccgacctagcttccctcgacgccacggccgctacatccgccgccgcgggcggcgcgccttccacccgcttccgtcccaaggccaaggggaagcccaggccgaaggctgagcctcccagacccgtaccagtggccgtacccaagccggagccggagccggagccagagccagagccagaggcggatccggtgccggagcccgatgccaaccccgggccggcaccggaggacacgatggaggtcgactaggcgggggacgctcctggacat

SEQ ID NO: 281375 - DNA, 411 bp, Zea mays
tttgggtgctgggctccgggctcaactcctggcaggtgtacgagcgcgccgacggccgcgcgcagctgctgcagtcgggcgtgcaggtgcctcagctgctggggagccttctgttcctggtcgccgcggcgctgaaccgcccccgcagcggcggcgagccggcgtggctgtgcctggtcgggagcgtgctgtggctggcggcagcgctgctcaacgtgctgaaggtgttcgccatgcaccagagcgacgcgctgcggctggagaagctccgcggcggcgcgcaggagtggctcagccgcgaccgcgagggccgcgtgccgctcaactgggaggaggccggcaggagacgggcgctgcccaccgagcttcggtgatcatcgtccgcgccaggcgcccatattccggcgaaag

SEQ ID NO: 281376 - DNA, 482 bp, Zea mays
atgaaatactggaaaagcagaatgatttaatggagcatgcagttgatgatttcaagcttcctactcaattggttcaaagatatgttaaagtttcatgtggttcgaggcttgcagttcttcttatgattctgaaatctctatttgaaagacaagtctctcagaaggtcgttgttttcttttcaacctgcgactctgtagattttcaccacacagcactcagccagcttgagtggagctctggcccacagcgtgatatggataagaagcaaaaatttcttagctgtaaagtgttccgtttgcatggtaacatggagcaggatgatcgcaagaagtcatttttgggttttggttctgagaaatcagcaattcttgtatctaccgatatcgctgctaggggtttggactttccaaaagtcaagtacatcatacaatatgattctccaggagaagcttctgaatacgtccacagggttgggagaact

SEQ ID NO: 281377 - DNA, 274 bp, Zea mays
tgttgacgcgtgggaaattataataaccacaggtagtaaattctagtactccaaatcataattaccacgactgatggagtgtattgcattcaacgtttggttatcggtacaaagttagaaatggaaaattttcacgtaaggaattagttctttttttagtataatacaaaggctgatttgggagcataagcgataaagcctgctttgtttgattaattttatactggttactttcaaattcccaagtcataataccatgagcatcatttattgg

SEQ ID NO: 281378 - DNA, 526 bp, Zea mays
ttctaactccatcgcccgttgcagcggcggcggcggcaatcatatcacccagacgcggacgccatagtagattagattgatctctccgtggggaggaagaggagcaagagccatgtccagccccacgcacgtccgcaaggccatccgcttcgcctccctgcgggcaaagatcgcgcagcagggtaagacaggcctggcgctgcgcctgctcctcgccgccgcactcgccggcttcctcctcgtgttcgccgcgcgcaccctggtcacgccgtcccctgccccgacctcgtcgtcccaggcgcaggaatatcaccaggacgccgcgccggagtgcggcaaggggaacgcgggcctgccgctggcggtggcggaggcgctggtgcactacaccacctcgaacgtgacgccgcagcagaccgcggacgagatcggggtgtcgctgcgcgtgctgcagcgccgcgcgccctgccacttcctcgtcttcgggatccccctcgacagccctatgtgggcggcgctggtccac

SEQ ID NO: 281379 - DNA, 626 bp, Zea mays
cgtgctcggcccccgggagcggcgacacgctgcgggacctggacttcctgacgcccgccgtgttcgacaacctctacttcgtggagctgacgctgaggaagaacaagggggtgatgctgccgtcggaccaggggctggtgagcgacccgcgcacgagctggctcgtccagggcttcgccgacaaccactggtggttcttcgaccagttcaggacctccatgatcaagatgagccagctcaggggaccccaggggaacgtcggcgagatccgccgtaactgcttccgcccaaacaccaacggcatcgccgcctctgcttgagttgactgaccaggcaccgatccattacttcactttcactgtgtgtaataattaataataataaaacaaaaacaacgccagcccgtacgtgccgtgtgaggggggcacgtggttgtggctatactgtagccgtcaccaccatgtcggcgtcgtccatgcatgtcgcattaccgatttttgttcatgttccgatctcatctcatcatctcgctatcaataacaattataatagtgtttattagtagtaaaaaaaaaattaaattcgtttgatgtatagtgattaaggcccgtaccgaagggcggccg

SEQ ID NO: 281380 - DNA, 534 bp, Zea mays
tctccacgcgtccgcccacgcgtccggtctgaacagtttaatgagtttcactcactttccactgtgaatattgtagatttgatcactttgttactggcgcatgaatgaatgcttgttagctgtgctcgtttctgatctctttctctagacaatccttacaaagcctacaaatgcattgattgatttgattctgatactgtaataacagctggatgtcacaattgtacccaggagtgatgataaattcatctgcattatctgttctagcaggttgaaaggttttgaacatgtacagctgtgtgctagtctgctagtacccttgattcattgttattggttattgccgacaaaaactttcttgtaggtgtaagcttttctgcctgtttgcattaatattaattcttgtttggcgtagagatcagactacctttggctgcccctttcaatttaagatcatttcactttccacatatattggtgcatgcatttggttttactataatgtgtcacatgtggtattaacagttgacatat

SEQ ID NO: 281381 - DNA, 507 bp, Zea mays
gtaactaataagcgggtgatgctgcttcagtgcttggatctagataaaatggacaagaaaccttctaaaatactttgggatgttccttgggaagaagtactttcattggagctagcaaaagctgggtatcagaggccttcacatgtaatcatacatctgaagaattttaggaggtcagagaactttgtaaggcttattaagtgcaacattgacaacgaacgggaacctcaggctctttcactttgctgttcaattcggaaaatgtggagatctcaccaagcagcaatgaaagttataccattgaaggttccatcaggccagcgtcatgtgtatttttgtgtcagatgatgataaaaaggaatcccacagtttatctaggcctttgctaagctcgggaggaacctctactggatgttgagcaacagttcataaacaatacagtttactttcagaaaaagtggagcagggaaccagaaattaagagccgatgcatactagttgccaagc

SEQ ID NO: 281382 - DNA, 513 bp, Zea mays
gccaacttgctgctgagcagtcaagatgtttcaaacttgaggtcgatgttgcggaactacgacagaagcttcaaagtatggatgcattggaaaaggaggtcgagctgcttcgacgacacagagccgcgtcagagcaagcagcgctggacgcaaagcagcggcaaagttctgggggcatgtggagctggctcgttggtacccctcctgatgataaatctgaatcgtgatcgcgtcgtgagggcagcactttagttcatacaggccgtgattcatatattatacttgtaacatttatatacccgttgatattttttttacagttactgaattcgtgttcattttgaccacagaagataaggaaatcattagttttatgccttgttttggcgtattgcaatcactcaaatgtatcaggaagtttcacccttatttcttgaaaagctagatttcaacattgtcatcatgtattggtcctccttttgaagacatggttcaatatatgttattcgtttg

SEQ ID NO: 281383 - DNA, 648 bp, Zea mays
gagtggaacccgttctgctgcttgagaacagggggccactgtcattgcagaatgttgaaacgtccagggacagtgcttgtcatgaggtattctttgaggaaagcaacctcagggataggtgtgaaccttctgtgtcaaagaatggggactcttatgtgttagacattgtagatatcgacaaagataatggcaatcctcaaatgtgtgcttcctacgttgtggagatatactcaaacctaatggcttcagagcttatgagaagaccaagtccaaattacatggagggtttgcaacgggacatcacaaagggcatgagagaaatactcattgattggcttgtggaggtttctgaagaatacaagcttgttccagacacgctgtacctaactgtatatcttattgaccggtttctttctcggaactacattgaaagacagagactacaacttgtgggaataacaagcatgcttgttgcctcgaaatatgaagagatatgtgctcctcgagtagaaagtttctgtttcataaccgacaatacatacacaaaagcaggaggtgctgaaaatggagagccagctgctgaatgactggggatttaacttttctggttcaactacaaaaacatttcttaggagaatccttagagcg

SEQ ID NO: 281384 - DNA, 429 bp, Zea mays
tttgggatcctgaagccggacatcacggggcccggaatgaacatgctcgcggcgtgggcgccgagcgactcgcacacggagttctccgacggcggggccgacctgtccttcttcgtcgagtccgggacgtccatgtcgacgccgcacctgagcggcgtcgccgcgctcctcaagagcctgcacccggactggtcgcccgcggcgatcaagtcggcgatgatgacgacgtccgacgcggtggaccgcacggggctgcccatcaaggacgagcagtaccggcacgccaccttctacgccctgggcgcgggctacgtgaacccggcgctcgcattcgacccgggcctggtctacgacctccgcgccgacgactacatgccctacctctgcgggctggggctgggcgacacccgcgccggggagatcgcccac

SEQ ID NO: 281385 - DNA, 388 bp, Zea mays
ctaacttctctatacattttgcaatagcactgggtctcaggcgggaatgcgagaatgctaatgtttgcccacataagtccggatgcagaatcttgtgcagaaacccttagtacactaaaatttgctcagagggcttctactgtagaacttgggactgcactcgccaaccaaagaaggcagtgaagtaagagagcttagggaacaggttgatactcttgaaaaaggctttagcaagtaaagaactggaaaaaacaactcttaaagtgaagggaagtgcaaccacgagtgagagaacaaagcaagtactggattgcactccccctaggccacggagattaagcctagagaatgctagtgataaagccaggatgccagaaagaaagatact

SEQ ID NO: 281386 - DNA, 437 bp, Zea mays
  unsure (1)..(437): unsure at all n locations
cgnctcgctgacgacgcagtcaagacagctggcctttagagcctccatgtgttttgatagtgcatttatttaacttgcgtgcattaatatatttttttctaaaaacttggtcaaagttagagaagtttgacttaggacaaagctaaagtgatgtatcattcagaagtcggaactgagggactagcaactaaaaagcccatgattcatttactaaaacatgcatgataaaactgtggctgcaagctgaatggttaattggtctttcatataacgcgacaattgtttttatgaactttatctggaatgggagctgttccttttgtgcgattttcagtacgactacacagatgaagcattatttgtcggatgtcatttttaatgtggtattttcacatcgactgaacagacacagtgggatgactacttttactcttatt

SEQ ID NO: 281387 - DNA, 569 bp, Zea mays
gtcattcccttcgtcgcggagaggaggtcacgcggctgattcccgccgcttgcgatcgggttcgtagggagcaggatcagctgacgcgatgttccccaggatttcccggctcggggcgcggctcctgcgcgagtctagagccgagacaagagctggaaacttgctaaacagtcaacgcattttctttcaagatcatgttaaccggcattcgatcccagtggtgactcctgctgtattatcgatgccgagtgcgaaagattggtagtagaatttatttagttgaacatgaccccaattgcacttctttcccgctaatattaaatatgttactagctattgatttgcttcataaaacgactttgatttggactatatctattattttcatcatttggtttctattcaataaatctacctatacattcacaacctgaaatagctgttgcaaaagaagatcggcattcttttacctcaacatgttagtttttaaaattttggagaactgtaagcaaagcctttgtaccgcaggagtgatgatttatctcttcaagttatttgtgttaattttt

SEQ ID NO: 281388 - DNA, 415 bp, Zea mays
agctgccccgcctgcagccgccgcgccgtaactgccgcgtccccccccgccttctttagtctcccaccgaatgccctgttggtctcttccatatcagcatcctctaaacaggagagtggtgaggggagccgcctttttaaagtcatggcaaaatcattttctacaagatggcaaagtggagaaattacgaacttccaatatctcatgcatctaaatacacttgctggtcgagggtatagtgatctcacacagtacccagtatttccatgggttctcgcagattatgagagcgacgttttagatctgaggaatccacacacatttcgcaggcttgataaacccatgggctgccaaaccgaggaaagtgaagaggaattctgcaagagatatgatagctgggatgaccctgatgtac

SEQ ID NO: 281389 - DNA, 762 bp, Zea mays
ttcactcgtccgcgcctactctgttttctgattcactgaaccgagcgagttctcgtcgcatcgtatgcgcctccttctctgattccccaaaaatattccctgttttgctgttcttttcttcctcgtaatccgctcggcttccattgttgccgccgctaccgacggcgacggcagacatcaagtgtcagtcctccttccgccgaagtcttcttttggttggactccgactctccgacaggagttgcgctcctcctccccctctactctactggattacactagcgtggagatccatctctatttgtttttggtctcttctttgcttggggcaaggtcaatcacagttgattagataccacttgtactctaatctgtcagtctccacgtgcggctgcatatatactgtttcaaaatttcggagtaaggtctgaagtctgaaccctcatgctgcttcagagggattgaggctggttgttggtcgcacttgcacatggcgcagccacagcagcgggtgtaccaagcttggaagggggataacgtctaaacagaatgctagccaacaagtttgtaactttgccaatagtggaattgagctaaacctccataggccagcttcttggccatgtcagtttccttttcttctttaattatctcagcagtcataaagccagtgtttgtctcatttactgagatttgtatgatgataattgtacgagatcgttattgggatgtgctacatgatcagcctggcttgtttttgag

SEQ ID NO: 281390 - DNA, 596 bp, Zea mays
ttgtctcgtgggtaaggctggtactcgacgcagtagtcaagatgggagttttataatgcagaggagttcccaagaggatactcaatctggactaagtgatccctttagcgatatgtcccttgagatagaagacttgattatcccatggagtgagcttgttctgaaagagaaaattggtgcaggttcttttggtactgtgcaccgtgcggattggaatggttcggatgtcgcagtaaaaattctaatggagcaggacttccatccagagcgtctcaaagaatttttgagagaggttgcaattatgagaagtttgcgacatccgaacattgttcttcttatgggtgctgtcactcagccacctaacctttcaattgtgactgaatacctatcaagaggtagcttatacagacttttacacaggcatgctgcaagggaaaatctggaggagcgccgccgcttgagtatggctttcgacgtggcaaaagggatgaactatcttcataagcgtaatcctccaatagtccaccgggatcttaagtcaccaaacctgttggttgacaaaaagtacactgtgaaagtctgtgactttggtctct

SEQ ID NO: 281391 - DNA, 592 bp, Zea mays
ttctgctcaaaccgaagagatatcaataaatgatgatgagtggaatgatggtttactggcaaccatccgtgagaaggttcatatggaggctgataggaaggccatgtccaaccaagttatatattgcttggatggagctaggattggcatacagtatgagacattctttgctggagagccttgtgaaatttttcattgtgttttggaaagcaagtcattcctggaaaagatgattatgattgaacacaccttacctttctttctgcctgtacgtgaattagaaagtgatctgttgtcatctaattcaattaaattcattgatcatcttgaagaaattttacaggcttatattgacaggagagagcaggttcgtcttatcaaggagctctacgggaaccaaattggcgagctgttccatagtcttccttataatatgatagaagtttgtattggaggattttgagtgcaaggttacaatcagtatccgatattcggatctactgcagaccctgccgagtcaggcaagggtcttggcttggccacttcgctcggccaagaaaatatctacaagaagcagcagtgcatcagctgc

SEQ ID NO: 281392 - DNA, 435 bp, Zea mays
cacgtgcaaggctgtcaaatatcctcaaaaggcatgaagatctgaaagagcgcctttcacgggattctgataagctcatttttgagcgcctacagaaagaatttgaggctgcacgggctgctcaaaccgaagagatatcaataaatgatgatgagtggaatgatggtttactggcaaccatccgtgccgcccccgcgtccgtatggaggctgataggaaggccatgtccaaccaagtaaatgttccagcagatctttcatttcaatcgaggactacatataggattagaaataaggttatctagtagcttggatggagctaggattggcatacagtatgagacattctttgctggagagccttgtgaaatttttcattgtgttttggaaagcaagtcattcctggaaaagatgattatgattgaacacaccttac

SEQ ID NO: 281393 - DNA, 396 bp, Zea mays
ttctttctcctcctcgtgaagcgagctctccacgcccctgcgattccatttccatcctgcccgctcccaacttcaaaacggccgcggcgcagatccacacgcacgggcaggcaggcaggcatacggacaggaccgccgccgcagctttcaaatcccggggcggattaccctgcagacggagcccacagcccagcaccgcagcagtccaccgggatctcgccttcgtcgccccgtgtcgcgtcgcgccggtggccgagcctggggacgctagctagagcctactactgtagaccgtagagccatggggaacagcatctaccggttcctatgcgtgcctgtgcgcgccctcgtcgtcggagcacgggctccacggcgcgcaccccgccgtcgccgtgc

SEQ ID NO: 281394 - DNA, 1188 bp, Zea mays
ctatttccccattttcattcccatcccaattcccatccgtttcatttccacctccttttccagtttcgactcgattcgaaacaggataccaaatgcatgatcgatcccacaagccgcagccggcggaggccggcaacggcgggccggctggcgagggcggcggcgggaacgtggatcgggtgctcttcaagaacctcgtcgagatggtgccgctcgtcgagtcgctcatggaccggagggtcaacccggcatactcgcgtcgcgcttcgctggtctacacgccggcgccgcccaagaaggcaagcgatttgaaaagtgtcaaattgccacagagcgtatcagccaaaaagcggagagaccctggtgatatagccaagaagagcaccccagattctaacggcgacaacggttcagttgtgccattatctctgtcaggtgctgaaaatatgcccaaggatgaggttgccgtgctaagcgagcagatcaatgacctacaaaagaagctgcttgagaaggaggaggcactgaggtctgcagagagctctgtgactgagatgaatgcagcatatgcaaccatcgatgaactccgacgcctggtggctgacaaagaagctttgatcagatctaccaattctcagttgcatgatgcatagattatgcttgcagacaagcaagcgtctgtagagaaactggaatgggaggtgaagatgtcaaataaaaaggtcgaagatcttcaaggagatgtgtcaaatatgggattcgagataagctcgttgatggcatttttcgataaaatttcagagaatctttcagagtgaaattgacaagatcgaggtcgacaaaatagagcaggagaggattacctatggtgaagctctcgcggcagcgagagagaaccctgacgaggagcacttgaatatagctgccgaggcaaggtcaaggctgcaggtccttgtactatagtggtggcccccttctaattctagtgtatgtatgataatgttgaactgctgatgtaattttaccttgttggcttgagttgaggcgcttgtgaaatcgttccaggggtaatggaacgagccctgtatcttttttttttcctgaggtctgcattttttatcatgaagcttgagctatagttagattttttgtgacggttatcatctcaagatttaaacctatggttgg

SEQ ID NO: 281395 - DNA, 357 bp, Zea mays
ctcccaaccgtttcattcccacctaacttactttttccgatttcgactcgattcgtcattccaaacaggacaccgaatgcacgattcgatcccacaagccgcagccgccggaggtggcgagggcgccggtggcgggaacgtggatcgagtgctcttcaagaacctcgtcgagatggtgccgctcgtcgagtcgctcatggaccggagggtcaactcggcctactcgcgacgcacttcgctagtctacacgccggcgccgcccaagaaggcgagcgaattgaaaagtgtcaaattgccacagagcgtatcggccaaaaagcggagagaccctggcgatgtatccaagaagagcacccc

SEQ ID NO: 281396 - DNA, 505 bp, Zea mays
gctgcaggttggctggatgtggcttcggcagcgacaggcagcctggacgagcaacgcattctggctgattttttcgaacacagctccggcgccgatgcccggcacgcaaggagggcaggcggtggcgttccgcatctccggcgacaaggccttcttcttcggctgcgggttctacggcgcgcaggacacgctgtgcgacgacgccggccgccactacttccgcgactgctacatcgagggctccatcgacttcgtcttcggcaacgcccgctccctctacagcgactccgagctgcactcgacggcgcagcggttcggctcggtggcggcgcacgggcggcgcgacccgtgcgtgcgcaccggatttgacttagttaactgccgggtgaccgacacgaagcggttgtacgtggggcgggccatggcgcaggagtggcgcatcgtttacgcctacacctactttgagagtgtcatcgcgccaggcgggtcggatgactggtaccag

SEQ ID NO: 281397 - DNA, 1374 bp, Zea mays
  unsure (1)..(1374): unsure at all n locations
tctttatcaatcgtatacctcatgatagcaggaggaaggcattcaagacttggaagatacgagagtgctctcagaaacattgtttctgctggcgacgcgtaccatgaggattgcatgaaactcctcaatgataatcctcagctgttcccactgggcctccagttatttaatgaaccagataaaaggaatcaaattcttgaggcatggggtgaccatctctctggagagaaatgctttgaagacgccgctttgacttatcagtgctgttcatcatatcagaagtcactgagagcttaccgtgcctgtggagactggagaggtgtttttaccgttgcaggtcttctggagttaaaaagggaagaaatcgttcaactcgcacacgagttatgtgatgagttccaggcgcttggcaagccaggagatgctgctagagtagcactggagtactgttcagatgctgaaagaggtgtaagctactatatcatggcaagggaatgggaagaggctcttagagtcgcttacatgcttagcacgcatgatctggttgaagctgtcagagacgcagcttcagaatgtgccgcgtcactgatatccgagtaccaggaaggactgttgaagatcggtaaatatgcagcacgctatttggccgtacggcagaggagattgtcgctcgctgccaaactccggtcggaagatcggtttatggatgttgaagatgacagcgtttcagaaacgagcactagcttcagtgaaatgagcgcatataccacaagggagtcgagcgcttcggtcatgtccagcaacgccagcaaatcacgggcggcaaggcggcaaaagaagggcggcaaaatacgagctggaagccccggggaggaaatggccctcgtggagcatctcagggggatggcgctgacaggcggtgcccaaaacgagctgaagagcctgctcgtggctctaatacagctggggcaagcggagacggcccgtcgggtgcaggaggctgcagacagcttcgaagtgtctcagagggccgcagtgaagctggccgaggacacggtgtccagcgaccgcgtagaggagagagcgcacaccctcgagcgttacgtgaggatgctgagggatcgggagtctggccatggcgaggctggtggtacgtggcggatcaaagcgttgtctccccccgtgacagggtgagagggttttttttactggttagcagtttagcgttgtttaaatcgggacgaagagtgcgtcaggcttaaccttgtcgattaactgctgtagcatcagttgaaattcttggtgcctggtggggctgttgtattggatccccccttgccgataccagatttgtcccgttttttttctgncagg

SEQ ID NO: 281398 - DNA, 758 bp, Zea mays
cttcatgcttcatctaagattgctgcatttgattttgatgggtgccttgccaataccagtatgaagagggttggtgcagaccagtggtctttacagcataaatcaattccagaaaaattgcaaagactgtacgatgatggttacaagctggtcatattcaccaatgagtcaaacattgagcgctggaagaacaagcgacaacaagctgttgactccaaagttggccgccttgataactttattgaatgtgttaaagcccctattcaggttttcattgcttgtggtttagggaaaggaaaaggtattccagatgatccataccgcaaaccaaatcctggaatgtggtggttgatggctcagcatttcaattctggaatcaaaattgacatggatcaatctttctatgtcggtgatgctgctgggagagagaacgatcatagtgacgcagatatagaatttgctaaggccatcggtctcaagttccatgttcccgaggagtacttcggtttctaattacctgtgaccagctagtaagatggttacactacgtcgtttagtgtttggatattatcaatactgtggctattctggtatggtgatctacatgtctgtttaaaccgtcaaataatatcccagttattcacttaggtcctgtttgtttccttccagaattatgtaatccatatggattatataagtacttaataacctgcttatggattatcataatctaggtatctagattatataatccccct

SEQ ID NO: 281399 - DNA, 444 bp, Zea mays
tcgtaccggagcaacacatgtcatcgtgacaacacgtcttccacgcgtgatgaacctcgagccgatgcagctgccgcagctctcgtacatcgatgcgatggccttgatacaggggaagagaaagaaggactatctgcctgaagaagccgaagtcctcaggaagttcgatgagcggttaggcaggctgagctttggcctgtgggttgtcggttcgctgctttctgagctcatgatcgctccttcaactctgtttgaggccgttgatcgaatatcgctgaacgagaatctgttccccattggcgccaacgacgatggattctgccgcaacaattctttcttggtgaaggtcttggtcttctgctttgctctgatggaccgagcaaaaggaggaagccttacgccaaggatggccatcgctggttcttggttagcttcaactcctgt

SEQ ID NO: 281400 - DNA, 761 bp, Zea mays
tctttgtttgcagttcaagctctcatgatgatcaagaactacctcaaggatcctcatggtgtactgaagaactgggaccaagactctgtggatccctgcagctggacaatggtcacttgctctccagagaaccttgtcaccggcttagaagcaccaagccagaacctttctggaattctctccccaagtatagggaatctgaccaaccttgagacagttcttctgcagaacaacaacataaacgggttaatcccagcagagattggaaagctaagaaagctcaaaacgcttgatctgtccagcaaccacttctctggagaaatcccaagctctgtgggccaccttgaaagccttcagtatttgagccttcacaacaacacattgtctggtgccttcccttcatcatcaactaatttgtcacaccttattttcctggatctgtcctacaataatttgagtggtccaatcccagggtccctgacaaggactttcaacattgtagggaatccactgatctgtgcagcaaccatggaacaagattgttatgggtctttacctatgccaatgtcttacggactgaataacacacagggaactgtgattcctgcaaaagctaagagccataaagttgcaattgcatttggtgctacaactgcctgcatcagccttctgttccttgccgttggttcactattctggtggaggtgtaggcgaaaccggaagactcttttcaacgttgatgatcatcagcacatagagaa

SEQ ID NO: 281401 - DNA, 296 bp, Zea mays
caaaagacttggaaggtatcaaggcatccatgggatctattaattatgatgagggtcagatggaagctttgcaaaaggaccgttctgcagagttagaaattattcaaaaattaaaggatcgtgttcgtaacctttctggtgagcttgctaatgttcacttcagttatcgagaccctgaaagaaattttgacagatcaaaagtcaaaggggttgttgcacgtcttattaggattaaggacagctcaacagcaacagcactggaggttgctgcaggtgggaggttattcaatgtggtt

SEQ ID NO: 281402 - DNA, 365 bp, Zea mays
tttcccacgcgtccgcccacgcgtccgaatcacccctggatcgccggtgatggagatcctgcgtccgtcgccgccacccagccactgcccactcctacgctgcggcggtcactgggagcagcaccacggcgagacgtgggtccacgtggctgtcgggaggtcgccggagaagacgctttcgctgctacgatgggccctgcgccgcttcggttgcagccggatcgtcctgctccacgtccaccacccgtcgccgctcatcccaaccctcttaggaaagatccccgcggtccaagccacagaggaggtggtgctctcccatcgcaagtccgagaaggaggagatgaacaagatcctcctcacctacc

SEQ ID NO: 281403 - DNA, 723 bp, Zea mays
  unsure (1)..(723): unsure at all n locations
cagtaggtaggcttatatggagtgtaaaatagtggaggatatcggggttcacccatcgaggctgaaagaattctgtcagagatcccatgttcttgagagtggaaaacactttaggctggagatggaaccacccatgttcggttccttggtacatctgaccaaactgcaaaactaaatgtgcaatgtcttgaaatcaaggtgcatgtggagctatttactcgacaatctgaagtcaaggcgtgtgaaaaaaaagcccagctgcattcactaaccgcagatgtcctctgccactataatatagagtagggagagaaattttccttccccggaaggtaccggctgtacatattaggtattggttgtttgtgcaggcatttgttggcattttgttgtgcatcgtcttcggtctgtattgtttgggtcgaagctgtaaaatgtaaatggcgttttcaaagatggaagttttttcttgagcacatacatcntgtcgtcttctgcaaccgcagtggcacggggccagcgggtctagatgaagaagatgccgccgcgcgcatgcggtttgggatgcccggtactagcttgtatattagggaaaagctaagttaatactcacctggcagatttggtgactaggctctttcaagctgtaaaggaccgaaggagaagacacgaactccagggctgtagaggttggcttgctgcctttttaatgagagctaaaag

SEQ ID NO: 281404 - DNA, 342 bp, Zea mays
cccagcacagctacagacggtctctatggccaagaaaggggcgaagagaaagcagcagccgccgccggtggctcccaccgcgaagaaggggagcaaggctgtgcccccaccgaaggctgcgaagagagcgcccaagaagcaggagcttctcgagtcctccgacgattctgatacggagcagcagctcctggaggaggcctcccacctcgacgtcccctctgattccgacgccgaagagctctctgggtcggacgctgaggctgacgagctctcgggctcggatgccgattccgacggaagctcgagcagcggcgacgacgtggaggatgaggaggaggagga

SEQ ID NO: 281405 - DNA, 385 bp, Zea mays
ggtgaattggattcgtattatcacaaaacaaaccggtgtagattcaagctggattgcggccggtttagcagcgctatccgcttggcccaattcgtctactgctcctccagctcctccgctgcgccgccggtcgccgcccgacaccgccgaagaagagcagacgccgagtccaggacgtcgccgcggggctcggggaacgcggtgttgccatcgcgaggaaggtcggaagttcgctgttcgcccgccggatcggcaccgccgccaccgcccatggcaaccgtcgcccccgtcgtctccgacctcgtcgacttcctcaacgcgtcgcccaccgcctttcacgccgttgacgaggcgaacggcggctgaaggcggcggggttcgtgca

SEQ ID NO: 281406 - DNA, 460 bp, Zea mays
taacgttccccttccagcacctccattcccagccacgagacgacgaaaccctagcctcccctccccctctctcaccaggccaccacctcgccggaacccggcgcctcgacggagcacgggatcatcggccgccgtcggccgcggctgcggaggagcggtgtaagatgccgaacggcggcggcggcggccagaagaagcggaacacgaagatcgagccctatcggcaccgcgtagagaccgaccccaagttcttcgacaagtcgtggcggaagctccatgacgccatccgcgagatctacaaccacaacgccagcggtctctccttcgaggagctctacaggactgcttataacatggtattgaacaagtttgctcctcagctctatgagaaactcacagaaaacatgaaagagcatcttgaagagatgcgcacatgtatagaggctgctcaaggtggttt

SEQ ID NO: 281407 - DNA, 602 bp, Zea mays
tgcatcatatcataattatgatagcattatggctggtacctctgccatgaacattacatctacagctgagaccgggaaggttcctgaaagggttctgcgtggtgatttggacaaaggccaaacaaattatagattggaggatcaacatgtcatagttcaaccaccacagggaagacttccatggggtattcctgcagaaggaagcgttccaatgaatagagttcagagtcaagcaaaacaacacttggaaaacatggatgcaaagcaagaccataagaaattgctccctgatccaaaaaaatctccccttgacaaattcatggacacatcattgccttcaagaaacatggacatgaggtcacagaggcttgacttcgatgatgtctctgagtgcgaaattccttgggaagatcttgtgattggtgaaaggattggcttaggtacttattttgctaccaagttttgatatacactcttctgcttttgaactactcccttcggtttcgttttaactgaggtcctagccttttttgtgtgaatgttaaaaaaaaaaaaaagaaagaaaaaaaaaaaaaaaaaaaaaaaagaaagataaggtgtag

SEQ ID NO: 281408 - DNA, 407 bp, Zea mays
ttcgcgtgtgtgcttgcaggcactggcagccaggaggtatcggcgacgagatactgcagcgcgcgtccatcgcctcgtcccctccacgctccgatcccttcgcctcctccgcgcctccctccccgtccccctccttacccccaaaccctcggcgcaagtctcgcttccgcgacgcccctacccccgattctccactcggtcgcgccacatacacctccacctcgcccatctccgccacgcattctcgccaccgccgccacgcctccgcttcctccgcccccgctttcgcggccgatggatccggtgacggtgtcgcccgcctcaactccttcctccgtcgacagcgtgccatggtcgctgacctacggcgggcccctggtcgggcacagctggcttcgccctcaagc

SEQ ID NO: 281409 - DNA, 381 bp, Zea mays
gctggttcatcgatcagaagacagaatacatcgctgttcctctctggtttcagccccatttccttggacgtgcagttctgggagtttgaacaattcatcaacagaagccaactcgtctacaacaacaaaggcggtatctacagggagatcctaccaagggcggagtacttctcccaggcactttacaccttcgacatcggtcaaaacgacatcacctcaagctactttgttaacaataccaccgaagaagtcgaagccataatccctgatctgatggagaggctcacatctataatccagagcgtgtactcgcgtggagggaagggacttctggatacacaacacagggccggtcggctgcctggcctacgcgctctgacg

SEQ ID NO: 281410 - DNA, 711 bp, Zea mays
ttgaaactgaacataactttcttcgtgttgttattttatatattactacaacccaatgtcaccggaatcgatttcatgaaaatcaatcttgccaatatgggtgacctaagggctggcacaaaatcatggagtcaggaacatgatttccaacttaggctgatatttttgagattctttgcacagatcctgagtggttaccgtaacttcattgatactacttcagcgactggtttcaattctcaagcttttcttatccggcgttctcgagcaactaaccagcctgtcgactccatgtcaatgattatgcagtttttggagactcaagggttcttggattatctggagagatgcaacactgcagaagaaaatgcccacaaccttctcgataagttgcaggatgcaaccggaagaggacaaaaccctctaaccatatttccttctcaagtttctgatcctgagattataacaatagccaatcctgagattggaggactagacaatagacactgctataagaggtttccagcaaatgcaagaacagaagaacaagaagaaaaacgtaagtcgattctagcgttagctagtggggctagtaagcaagtaccgagttctccttctatccgagtaaatgggggcccaaaggcagaaagtctgagcccaagagagagggcggctgagagagaaaggatggttctggactaaaagtgaagc

SEQ ID NO: 281411 - DNA, 461 bp, Zea mays
gtcatgcatagtgcatgtatgagcacattatatgttattgatagatgggaactgtagagaaggtaactgggcagatgcaataagattgtattttgagatgcatcaaaatggtattcctccagattattgcacacataatgcattgttcaagggatttgatgaaggccacatgtaccatgcaatcgagtacatggagaatattgttttggggtgaataaattgtcctgctggccttgcatcacagatatttcgtgtaagaactttctcatgtattgcagatttctcgtcatcagcgtaccattatttagctttgctcatttcttcaaacatactttactcggagatgatatggtgtttgtgggcaaggcaatccctttcgtaagggaaaggaaaagagagtttgagacaatgttctctgatttatgttgctgggtgctttcaaaaggatagttgtgcccccc

SEQ ID NO: 281412 - DNA, 1349 bp, Zea mays
tccacgcgtccggcgtgagcgcacccctcgtactcccatagtcccatcccatggaggccaccccgatctccatgaagccaccgtctccggcgccggcggcgccacccccagccactctggagcccggggacttgccaacgcatgccttcggagggaccgagctggagccgtccagcatgaaccagctcgcaatagctccggaccccaaacggccgagggtggaggaggctgcggacggcaacgggtgcaagcattgcgcctgcaaaaagtccagatgcttgaagctctattgcccatgtttttctggaggcggttattgctctgataagtgtggctgccaaccatgtttcaacaaagaagcttttgcagaaacagttcatactactcgcaaggtgttactttcgagacagaagcgtatgtcaatgaaaatcaataggagacctgaggcgaataccgaaccaatggaagatgctcaccattcttcttcttcaactccaccaaagagaggttgcaactgcaagaaatcaagttgcctaaagaaatactgtgattgctaccaggatgggactggatgttccttgttttgccgctgtgacgattgccagaacccttttgggaaaaatgaaggcataatggctgacgacagtaagcgctatctgtacactggtgctgatttggatcacagcgagggcgaacatgacttcgttgtggagcgctcgcctcgtctgcagtcacccatctcgaaggagtcttccttccaccaaaccccacctcatctcagggcgtcaagcagagacgcgcacgttttcccacacgcgatatcccagtggcaggcgctgccccgctcgtggcactgttccaacaagaggaacagcagcgaccgagccatggacgactccgcgaactacaagaactcgaaccatgactactggcaggtacccaagcacgaggacagctacagcatatcgaaatgcgtccagatcctgaacggcatggcggagctgtcgcaggtggagaaatcggttgcccccgacgtcttcctgcagccgggcaaccgggaaattttcgtctccctcagcggcgacgtgcgcgccatgtggctgaagcgcaagattcagcacctggcttaaattttccttgtgctgtgccgttcttccgagtggagtacaatcttttagattgtgcatgttcttctggtcgtggggtgggcgtgcacaggattctaggttcttttttcgccctgtatactgaggtgtatttctggattacggttatgtattgtctttgtagagagagccgttttcgagcctggtatcggctataataaaatgagattatacattgtttcc

SEQ ID NO: 281413 - DNA, 413 bp, Zea mays
ccctctcgttcggcgcacacctcttcgtgctcgctcccatggaggccaccccgatctccatgaagccaccggcgccacccccggtcactctggagcccatagaattgtcaacgcatgccgtcggactgaccgagctggagcgatccagcatgaacctgctcgcaatagcgccggaccccaagcggcagagggtggaggaggctgcggatggcaacgggtgcaagcattgcgcctgcaagaagtccagatgcttgaagctctattgcccatgttttgctggaggtggttatcgttccgataagtgtggctgccaaccatgtttcaacaaagaagccttttcagaaacagttcagactactcgcaaggtgttactttcaagacagaagcgcatgtcgatgaaaattaataggaga

SEQ ID NO: 281414 - DNA, 374 bp, Zea mays
tgtcgcaggtggagaagtcagttgcccccgacgtcttcctgctgccgggcaaccgggaaattttcgtctccctcggcggcgatgtgcgcgccatgtggctgaagcgcaagattcagcacctggcttaggggagggtgtgtttcattgcgccatgtgccgtcctctcgagtgaggagattggaggggaaattgagttttcttttagatcctgcatgttctgctgctggtcgtgggcgtgcacaggattctaggctcttttttcctgtttactgaggtgtatttatggattggccattacgtattgtctttgtagagatagcggtttcgagcctggtatcggttataataaaaaaaaatgagcttatccccctcct

SEQ ID NO: 281415 - DNA, 703 bp, Zea mays
gtcacattaattatctgtccggtccaatccctccggatatcagcaagctgcaagagctgcagagcctgttggacttgagcagcaacaatttcagtggccacatccctgcatcactcggctcactctccaagctggaagacctgaacctgtcccacaacgctctggtcggcgcggtgccgtcgcagctcgctggaatgagtagcttggtgcagctggacctgtccagcaaccagcttgaagggaggctgggcattgagttcggccggtggccccaggccgcgttcgccaacaatgcagggctctgcggtagccctctgagaggttgcagcagcaggaacagccggtcggcgttccacgcggcgtccgtcgcgttggtgactgcggtggtcacgctgttgatcgtgctcgtgatcatcgtgcttgcgctgatggcggtgcgccgccaggccccggggtcagaggagatgaactgctcggcgttctcgtcgtcgagctcgggcagcgcaaaccggcagctcgtcatcaagggctcggcgcggcgggagttcccgtggggggcgatcatggaggccacggcgaacctgagcgaccagttcgccttcggatccggcgggtcggcacggtgtacgggcggagctgtccactgcgagacgtggccgtgagaagatcgcggcatgacagcgcatgctgtgcacgacagagc

SEQ ID NO: 281416 - DNA, 479 bp, Zea mays
ccctttcgttctgaaccaaatccttgcttgcattggcggagcagcatcatgccttccacgacagcgcatcagaagccccacgtcgtgctggtgccgttcccggcgcacggccacatcgcgccgcacgtgcagctggcgcgcgccctccgcgcccgcggcgtccacgccacgctcgtccacaccgagctgtaccaccgccgcctgctgcgcaccaagcagcagcaggccacgggcggcgacgacgccctggacccggacgagggcttctccgtcgaggtcatcccggacgggctatcgctggaggacccaccgcgcacgctgcgtgcgtaccacgaggcgatggagcgcaactgcctcgagccgttcaaggcgctgctgcgggacctgctgctgccgcccaccggcgtgccgccggtcagctgcgtcgtggccgacaccccgatgccgttcgcggccgtggcggcgcgcgaggttggcgt

SEQ ID NO: 281417 - DNA, 480 bp, Zea mays
cctttcgtggacgcgtgggctggggagtcggagagacggcgccagcttacactttaagatacacatccaaaagacaacgggtcctcgacaggcacctggagttcatggccagggtgatggagggtaacattgtgctgggctgtggagatgccacgtggaggtcctacgttctgtgtttcgtcaacttgctggtcagcttcgtgcccgcgtgggtccctgaagtgaagctaaatacgctgcagaaactggcatctgggcttcggagatggcacgaggcgcgatcttgccctctctttgcttgagctagggggagccaagaccgtgacttcagtagttgaatctcttttgcggtgagctggtgctcaactgactgtatagttttctacgacagggttggtccatatacacattataacatgttaaatgatctaaaaattcagtcatcagaaagatgaacagtacagttctaccggagcttga

SEQ ID NO: 281418 - DNA, 463 bp, Zea mays
cccactcgtccgcccacgcgtgcgtctccacttcacacctgtttgctggttttcatctcccgttcacctcgcgtgccgcatgcgcgacaactagagcgaccgccgccgctctacgcccagctgcccatgtcttcgtcgggcccttcgccggcgacgggaacccaccacaccaggtcaacaccgttgcaagtaattcatgttttgggaaacttcatgagaatttggtctgtttactccttgtatagctacctatccaacagtggagattcaatagttggctttatcttcagttgtcttgtacccacttcagtcatattcttggtcttacagaagccttggaaaggccgacctttgcccaactcacagggtggttcctacagctgtcaatggaggaatcctggcattctactgtggattatggggttaaggacttcttgctgggggtccactagtggctctactg

SEQ ID NO: 281419 - DNA, 271 bp, Zea mays
ttgcaagcgacgatgaatgtaatttcaagaggagatggggtcgcagatcatcaggaggcgtggacacaaggcactgaacggaagaatgtggactacggcggaccgaccaagtgcagcaatacattgctggtcaccagtgctcacctatccattttcttttactcgtaattgtatgtattcccctgcaaacaaaggggaacttccggttccctggcgaaatgtaatggtattaccatgcgatctctccaaatataaatggaagtttgctgag

SEQ ID NO: 281420 - DNA, 422 bp, Zea mays
caacagccccttccgcgccgaaacctcgtcgcgtcgcgcggaagagaggagagggacgggggccgcgggggcgagaagagaacaccactacggattgcctcgtcatccaccaccgctccaccgctaaaccctcgagtgctcttccgcgcggcggggcgccgagcgtgaaagccacctgctctcgtccagtcgcactcgcgccgcgaggggaaaccctaggagcggcagatctagagcgggcgctctcgatccggccgcgtagacgcccgttttggccggggaaatggcggaggatcctgccgccgaacaggagacgcggcagctagaggaccggctcagggaggtcggggaacggctgcaggcgcctcccgacgacgcggaggacctgctcaacctcctcatcgaagttgaggagtgtttac

SEQ ID NO: 281421 - DNA, 505 bp, Zea mays
ttgtcgcgtgggttgagagcttgccgtccagcgttcatcggatagctcctgagctcgatctcgggtcgcgcacagctgctctccccttcctcccgctcagctcgctcttcggtgctgctctcgatcgtcgtctcgctccatcaccggcggtcgcttagcctccgcgatcccggccggtggtcttcttcgccgcattatctctctctctctctctctaacacaaggacgatgtcgagccggaggtcccgcgcgtcgacggtctcggaggaggagatcaacgagcttatctcgaggctgcagacgctgctccccagcgcgcgccgccgtggcggcagccaggtatgaatatacgatacaacgcatgcgcattcaaaccaagatgtgcatgatctagctagctagctaggtagttttacttctctgatctcacagtattgagtagtgacactgacaccatcacaccgacacgacacacatgcataaattaaagagtgctatacactgc

SEQ ID NO: 281422 - DNA, 500 bp, Zea mays
  unsure (1)..(500): unsure at all n locations
gttctatatcgcgagcgggccgcccttttttttgtttggttttttacgatcagattttgctatatcactgaaattttaagggatcaatgatcagtgcattgccgccaatggctgtacatgatacgagttaagttacagtgcacacaggcacatcaataccacaagtctagccttcgttcagggcacacaggcacaccaataataccacaagcttagcattcgtcaaaatttgtcaacaggcaccagtatcactcgctcaagtctgattaaacacataaaatgtgatttcaggcaaacctgttttcttttacataacaatgtctttggtccccccggtgccagcacttcaaaagatgttccttcttgtacctcagtgctcgtcttgagctcacaatgaaagcttcaattggtcagtcgtcttctagcgtcggacattgagcatctncttggcctcctcctgctcaaccagcagggaatcgcttgcatacttgctaagcagc

SEQ ID NO: 281423 - DNA, 250 bp, Zea mays
ttggcttgtccttgcgaccaagacagaacagagcggtgctctgcttcgctctgtttcgggtccgccgcacatgcatgatgtgatggaaaacgttttgttttcttgctctttttttttttttggagtttcgatgggtacccgctggtagatgggtccctatggctccgcgtttccctggcattctgtcagtgccaggtggaggctgtagagtaatcaagtaactagccgtaataatattattaattatttt

SEQ ID NO: 281424 - DNA, 267 bp, Zea mays
caccctcacgatgaagttgctgggggacagcaacaaggaactgacctgcatctctttcgggttcagcatcgggtttgttgcgccgaatcccgtcatctgaacccagtatcgaatttgtcatggatgtactttacatgaaccttatagtgcaacattctccagtaagactcggaacgtgtgaccaactgctgtcttgcattcggagctgggcgcctatcttaactgcatacagttttatcatggacctaccagagtttggtgctccgt

SEQ ID NO: 281425 - DNA, 733 bp, Zea mays
cgaacgctcacagttcacagctcacgcacccatccacctccaaagtccaaaagcggaacccacgcctgccgcaacggcgaaaccgtcggaaccctagatctctctcgcccgcgctccgaaaccccagatccgccatgcaccagcctagagctcgctacccacccggctatggctccggcggtggaggcggagccggacgtggcggtggaggcggaaatggaggaggtggcggaaaccacaactactacggccgaaacccgcagcaacaccactaccaccagcagcagcagtcgcagcactctcataggaactcttcgtaccagcaacagtggctgcggcgagaccaggcccccgccgttgcgggggcagcgtccggaaacgctgtggccaagacggcgtctcagcttgacgccgtaggctcgagctcccaagactggaaggctcaactaaatataccagctccaaaatgttttatgatttgaaatggagggagtatcttcaaattggaagtaagcatatggaatcatttttctaattgctgctagctgctaccataacatgagcaacataactggctacaaaataatagaagttactggttcatcaattcttctatgtattatgttttatttatgttgcaagcccactgaattattggtagtagttagtactcattactggtggtcatgttgatgacttgatgatcctgatatggtgaacgaaccagttcttt

SEQ ID NO: 281426 - DNA, 497 bp, Zea mays
gcttgtctcgcagcaattgtatgctcgtctgagcacccaccccttcggccccttggccatgctgctggcgatggtgccactgtcgtcataaaggctgtcctggatagagcaacagagctcctcaccgagcagcctgccgcgccagactatggcgctccaaaccgagccttgtggcaagcgtcgttcaatgccttctttgggctgctcactaagtactgcatgagtaagtttgacagcatggttcacacgatgcacaagctcggtgctgctgctgcaacagcgatacgcaaggaacttccggttgagcttctgcgcgccagccttcctcacacggatgagcagcagcgcagactactgctcgagttcgcccagcggaccgtgcccgtctctggccatggctccgacgggtgacggacgggcgggtggcggctggtggaaccatggcatctgaaacaataccagcttaaggtggtcagcgaatattggtgcgctagatg

SEQ ID NO: 281427 - DNA, 451 bp, Zea mays
ttgtgttggtggacgaatgctgaggatccctgtcagggtttagctgcatgcatggacctttctgatgccttaagaagtccatcaccttaccatgctgtctctcacctgcctattcatcaggatggttcatgcaatggtttacaacattatgccgctcttggaagggactatatgggcgcggttgctgtcaaccttgttcccggagagaaacctgcagatatctactcagaaatagcttctagggtactgaatgttgtatgtgaagactcgatgaaggatcctgctactaacccaactgcttcattagcaagagttgtaggtgatcagcttacaggtggataggaagcttgtcaagcagacagtcatgacatcagtctatggtgttacatacattggtgctcgtcagcagattaccaagggactgcaagagaaagggcttatcacagatgat

SEQ ID NO: 281428 - DNA, 606 bp, Zea mays
gcaggtcgactctagaggatcacttatttcagaacaaagttcgcgtcaaacttggctccactgatggctttattggcctctgccaagctgggttctacatactgaccggccttattttgtaccttggcggtttgcagattgggaccctcgttacggcgggcaaaggtgtcctggacataaccgatcgccccgggggtttgcttaaccgttgccgctaccccgtcatttttcggacctttcagtacttggaaaccccagttgggatcttggctagcaccaatcttgcttctaaaggtgctactaatagcgctgaggtggctagtaaaaatatccgtggtgccactaccatcggcccgtaccacaactcgaatgggagtgttgggcagtttggaatccacctggttccaggtttttagttccccggtgaaaattttacccaaggcaatgcgagaaagttgtacttttttgcctggtaaattgtcaaccaccgccacagcgccaccagcggtgggacaccataaccacaccccgtttcatctgttggacgtgggcggaaagtgtgcacagcatccgtggcaccaaaatcaaccccgggtaccgagctcg

SEQ ID NO: 281429 - DNA, 597 bp, Zea mays
cgggacaacttcaggctaccctagtagtggctcccactattgccttcgccattgtctggatagggccagactgcctggcgatcggcggcattgatggccacattcggttgtggtatcccttcaccgagcaggcaccagtcctcgtaacggcccacaccgatattgtcaatagcctcagttgggatgccaactcgaacctcctggctagctccagtagcgacagcaccgtcaaactctgggatgtagagacgggcatctgtcatcgaatctggcgcgaggcggtgcccgttcggtgggctacctggagtcctgacgggcatactctggccatcagccgagaagatggcggcattgtcctctggaatccccacagcgatcaagccccgcgttacctcaacggtcatccggaaactgtttggagtttagactggaaccccgatggtgcctggctggctagcagttcccatgatgccacggtgcgattgtgggatgtggtgacgggacgctgtcggcgaattctacgcagtcaccagaactgggtctggtatgctcgctggcacccacaccaaccgcgggtcctctacagcaaacctgcgg

SEQ ID NO: 281430 - DNA, 627 bp, Zea mays
ggtcaatgccattgaaaaagttttggttagtccggggcaaaatccagcgcttttggtacgcctattgaacaacttgcaggccaagggctttaagctccggggggacgctgaactctgtgagcaatttcccgaccatctcaccctagctaaggagaatgaatggggtaaagcttacctggacaggacagtggcctttcgcactacccaaaacctgaaaacggcgatcgcctggatcaatagccatagcagtggccacggggactgtattgccacggattcctaccaggaaagtcgccaattttccatgggggtggacagcgccctggtttatgtgaatattccgccctatttttgtcgtaatccccgccatggggaatcattatttttgggagtatcgagccaaaagggtcaaaggcgcggcttaattgggctagaagcatttatgacccccaagcaaattgtccagggagaaagtcgcagttgagcattttttgagccattacccatgtcccatttaaattctctggcattactgactctaatagtattacttcccccattcttaatctcctggggcattaaattagaagagcctgcctttgctcccccaccggagttgccctgggt

SEQ ID NO: 281431 - DNA, 810 bp, Zea mays
ggtcgactctagaggatcggctttgtcgtaggcttgggttcccatcacaatgccccgggccgcatcagtttagtaaagaaattccctggtgggactgccgtcgccccaaacgggtaattgtttttgtccagctttttgcgcttcgtaaaccttatggatcaaggcaggaatcacgtgggaactgcggggatcgaagttatcttctgggccgtaaagatttactggcaagaggtaaatgccattaaagccatactgcaagcggtaggattccagttgcaccaacaatgctttcttggccacgccgtagggagcgttggtttcttcaggataaccgttccataagtcttcttccttaaagggtacaggggtaaatttgggataggcgcagatggtgcccacacaaacaaattttttcacccccgcttggtgggccgcatggattaactgcacccccatcattaagttgtcgtagaacaattcagcgggcttttcccggttcagaccaataccccccacatgggccgctaggtgaatgacaatgtcttgattttccactgcccgttcgcaggctgacgcttgccgtaaatcacaagtctttggagcggggaatggtaatttttgggcgatcgccaccggctgcaattaattgggcaacaacttgtttaccgaggaaaccggccccgccagtgaccaaaatacgttgattttctaggcaaagcatggttggttaagaaaatattgagttaagggagggatttgcataagatttactgtgcccataaaattctccaccatttgaaggccagggaa

SEQ ID NO: 281432 - DNA, 683 bp, Zea mays
caggtcgactctagaggatcgccagcgagttgggcattgaaccggaggaaatccaagcggcccaaaatctagccgctgaccatttcacccgggcccagggttatatgcgtttgggctactgggacgatgccattgccgaattagatgacgccattgcctttaatcctggggaatcaaagtttttactctcttccgctgaagcctacctggggaaatggaaacagcaccaccgtgcccccgatgctgaccaaatgcatttgcgggtgcgtcagtgtttatcgttggaacccggctgtgaaggggcgttggatttattggcggaatttcggcggcggcaaaagcgctatttccgcaccatcgtgggcagtttgatgtttgcgggggcgatcgcgagcgatggcgtatgaccggcaataagctacactgcgccgattccagcaaagataatcccctaagcaacgcaataatcttctgcgaaccttatataaggttctgcatataacgcacgatggcgtatgactcttttagcatcctgaatagggcaatattctactgcaacagttatagactgtcgctgacgggcattttaagagaagactttgctgacgggctctcatgccggtagtggacacctagaccctgacaaataattctggggaatcaccgccgatcgccgccagggc

SEQ ID NO: 281433 - DNA, 937 bp, Zea mays
ggatcgcccccacgactgataaggcgagattattaaagccatgacggagtttagcctcgtgttatagccagagtccctagccattgctgatgcgagattatttaaactttgccaagggatattgaccagacgggccgtgctaccaagccgttgctgtcgcaagtgtcgcttaacccgcttctgggctatccaatggttattaatcttgtaaacgcttatcctgccctgctcactggcaatgtagaaccgcttatggactctaagccagttcttccagtttggactctccaaactcagagggtacttagtccctgcaccgtgcaagtatccgtcaatcaccgtcggttgaggctccatacctacattgcccctatcaagccagttttagcacgctgggaagcacgataatctactgcgactaccctagggtactcccgtagaaaagcgttatgaagtatgaccggcaaaaaaccacattgaccctatcagagcaaagctagcacggtagggaacgcgataatctactgcaacacctataggtctgttgctgacacgcacgatgacgtatgacccttttagcacggtagggagcgtgataatcttctgcaacacctatatagtattgttgcgatcgcgagcgatggcgtatgaccggcaataagctacactgcgccgattccagcaaagataatcccctaagcaacgcaataatcttctgcgaaccttatataaggttctgcatataacgcacgatggcgtatgactcttttagcatcctgaatagggcaataatctactgcaacagtaatagactgtcgctgacgggaattttagagaagactttgctgacgggctctgatgccggtagtggacacctaaaccctgacaaatctttctggggaatcaccgccgatcgccgccagggcgttatgcccgc

SEQ ID NO: 281434 - DNA, 613 bp, Zea mays
ggtcgactctagaggatcttcactttccaggagccgccccatgtaataggtattggctaaggtcttttccgcttcgccggaagacactgcttcaatttgggctgtgtcattgccctggggttccctagcaaaattgctgacgaagcccttagcccatgccaaggtggactcttccccatcagctaccaccaaggaagccaccagggattgattatattcattgctggaggaacggataatcacccgacctttccatttgggatcggctagttcttcgtaggtggacaactcctccggtttaactttccccttgttatacataatcacccgggcccgcttagtgaaaccaaaccacatcccgtccggggagcggagatattccgggacattagtctctaaaatctcgctttgcaccggctgaaaaatgccgtcctcttcggcccgccataaacgagccaaatccactgtgaggagcacatccgccggactgttggccccttcagacttaatccgttccagcagttcgtctgccttaccttcaatcaggttaacttagatgaccgtttctgcggtgaatttggcgtacagttcgttgtcggtgttgtagtgccgg

SEQ ID NO: 281435 - DNA, 580 bp, Zea mays
  unsure (1)..(580): unsure at all n locations
caggtcgactctagaggatcgcttcttggtctgtgcgtaaatttacctcgatcaacagtagctaattgagactgnctcttttatatcccactccttaggaataagcccgatcgccgactgtttgaattgttctggatgccttacggggtcacggagttcgccgttttcatgaatgcctcgggtcagcaggtcatggactaagcccgctttgatcttgttcagcttggcgatacactcctgcgttttggcgatcgcctcatgcatcgtatccaatatttctgctatcttttcctgctctggcagtgatggcggattgcatttaattctattaacatcatttcgattaagtccaggtactcctgtagaactatcaagttttctcagatcaaaagcctgtaataaccaatatatgaagcgtaaactattgtcttgctttaaagttacataatacgtggtatcaatagcccaacaatttttatttgcccaatctacttggtctacgctgnctttacgcncaacaattatattagagaaatctaatcataagctttatggaatgcaataattcattaaatccccg

SEQ ID NO: 281436 - DNA, 754 bp, Zea mays
ggtcgactctagaggatcatgacagacttcctctattcgataggttgggacagggagggttaaaagcttagctaaaggtctgacagtaaatgcggactcgaaaagccgatgctaatgctaattttaacgaaattattttgaccaacaggactgggcaattattattgaccaattgttaactttgttaacgaaaatttacaaattctgagttttgttcaacgatcgccattgtcctgggccgtttgttgggcgttgcgccagacagcgatggtacgactgaggttgaggcgaaattccggccagccccagacactgccaggctcatcttcccaggaggtggaaaaaatgccatagcttaagcccaccacccctagaccaaaaaagagcagactcaccgaaaacaccacataggtgggaatctcaaaccagtcccggctcacaacaagataaaaaagcacaaaggataacatgcccagcccagtgggaatgccggagaacagggccatgcgtttaaccatcctttggctcaccacggcgggaatgccactgtctgctgaacggcggccctttttatctttggctccgctggttttagtgctcggagccaccactgcagggggctttttttcaacctttttcttttttgatttccgctcaaaaggaagacggtctcgattggtggggtcagccatgggaaaaatgcaaaaacttaacgacggataccgaggcgtttgatccccgggtaccgagctcg

SEQ ID NO: 281437 - DNA, 730 bp, Zea mays
atgcctgcaggtcgacttagaggatcgccacatgaacgtcgcccttaaagtccacaatgacggcggtggcaaaggcggagaccaagccaaataagctgagcacaattaccgtacctaagacaaataggctagctttgcccagggcttggcggcgggaagtaacttgcagagtgccaatgtagctcagattcaccggcaatagggcgaggatacagggggaaaaactagcatgcagtccccccagaaaagccagaggtagcaataccaggggattgccggtgttttgctggtcaaaccattgctggtaatgattttcaaccgcggcaatgaaatgatccaggcccgctgtcagggaggcccattgactagtgagcaccactaaggacagggctcccaaaaataaaattaggcaaaatgcccagggagccatggaggaaaaggagcgacgggcacgatttaacatggcgatttcagaatttggtcaacgaggagcgaagcagaggctgaccaaaccgcctgcgccccggtggggaggaaatattttgataaaacctccaaggttgctagagcttaagtggccccgggtcggaaaatggacaaaattatgcaaaaagaaatggggcgatttcggtaacaaaccccccggcgtcaactattttttcgccattctggaaatttccccatcaataaccttggcgtagtccccagcattggcatttttacgaaattg

SEQ ID NO: 281438 - DNA, 671 bp, Zea mays
caggtcgactctagaggatcgcgccaatttcgtcctcggtcacgtgggctcggatggtcaagtcccctctactgacagggtctacctccatcagcagttccaaggcccgcttttgcattttttcacgcatttgtcgttgttctacttcggcgattttctgttgggctaagaggtcggagcgttctaaagctagtcccacctgcacagtcaattggccaaataaatcaatttcattctggtgccagtccctcggcccggagcactggtgggcgatgagtagtcccagcagattgcctttgtagttgatggggccgacaaggttggctttgacttcaaagggtttcagctggccaatgtggcagggggtcaggccggcgttgtaaatatctcgggtggcttggatacgtccagaacggtatttttctacataactatcagcaaagcaggggtcggcaatggtggcccccaaggctttgggatatccttctgctaccgattccacaattactgtgccggcccaggtggcatcgaaccgatagacaatgacccggtctgctttgagcgccagacgaatttcttgggcgccgatgtcaaaaacctgctcgctgttgatgacagaggaaattttcagagtcaattctttaaggatttgggcttgctgggcgctttca

SEQ ID NO: 281439 - DNA, 767 bp, Zea mays
  unsure (1)..(767): unsure at all n locations
catactggtttttcattctctgttgtacatcttttaactgccgtaaagaaggctatggtcactcctgctgaagatactcctccagccacagcgacacaaccggatggagaggagggcaaaaagtggttcaacagtggagagcgcacacaaacgccccatcaagaacaaagtgcaacagatcaaactgaacaggtccttgagggtgcaaatgccagtgctgtagaacagactgtaccaatcaatacaccagcgcttactgttcaagagattgtcaatcgaattagagcaaatcctggagatcctaggatacttgaaacacaggagcccctccaggatttagttcgaggagtattaaaagtactttcatctagaacagctcctctaggcgcaaagggctggaaagcactagttgcctatgagaagtcaaacaaaagttggttctgggttggtccagcaccttctgtttcatcatatgatgaccccgatgaagaaacctctgctgaagcatggagtataccacacaagatgctcgttaagttggtcgacgcattttctaattggctgaaaagtggtcaggaaacccttaagcagataggttccctcccaccaccttcaccgccaaatcctgcaaacttggatctgaagaaaggttcaaggagcttaaagcgcagaagagtctgaacacaatatgcccgagctcagatgaagcgaggacatatttncagcgtgaggaatttctggactatactgtgagatctgtcacgtgt

SEQ ID NO: 281440 - DNA, 621 bp, Zea mays
gtcgactctagaggatcagtgggttaaacgggtctcccccaatgcccaattcctttttgctttcttttagactcttccaaagttgcttaatgcgctcgtaagcttccatcgtctcgattttacccgctgtctctaggttacaaataacgctcaccttttgggcaaattcttgcaaatttgcgttgaaaaccagcttctccggtttgaaatccccataatatttgcttttgggatacagaaatgcgtctttttccggattatcagtcatatcatctcttcgacggacaagaacagtacccattgtaaaggtattgaccgttttccggggttgaccgaaggcaaaggtatgcttaattgagaccagataatgccaagggaactctagactcgtttccctaaccttgaccaccccgagctgcaactctccctccagccatggcattggcccccaactggcacaattgtaattaatcttctaaggtttgtcccattgtgttcactggcattatccaatccctcggttatctttctgctcagcggtccgatagcctgccaatttcccttagccccaacgataaaagagggttttgggggatatggccctaggggacagcattgctg

SEQ ID NO: 281441 - DNA, 532 bp, Zea mays
actctagaggatcgccaagctctaagaccgggaaaccgaaccttacctgacttagcactcctctgccaagagtgctaaagtgctttatggacttgtccgccacctttgacgttatttgtaactttttagtctatgtctaaacttatttcctttaaggatgaatccagacgctctttggaagcggggattaatgccctggctgatgcggtgcggattaccctcggccccaaaggtcgcaatgttttattagaaaagcagtacggtgctccccagattgtcaacgatggcatcaccgtagccaaagaaattgaactgtccaacccggaagaaaatgctggagctaagctaatccaggaagttgcttccaaaaccaaggaaattgctggggatggcaccaccaccgccactattattgctcaagctttagtgcgggaagggtctgcgcaacgtcgccgccggtgctattcccgtggctctccgtcagggaatcgaaaaagttaccactttcctcgttcaagaaattgaggctgtg

SEQ ID NO: 281442 - DNA, 496 bp, Zea mays
gctgtggtgatactgagagaactcaactgccgcgactctgtctgcatttgtcccgctgcccgatcgccagctttggccccaaaggaattgctacagaccaactccgccaaatcctcactgtggtgggctggactcagacgttcggggcgcatttccgtcaaaataactggaactcctgcttgggcaatttgccaggcggcctccgtacccgctaagcctccaccgataacatggatgggcgttaaagtggtcatagggaactttgaaaattcaaaaatagttagagactaacattttaaagcaggggacagtctaccgcccaaggagaaggccccatctcctgaagaatggaattttccttgtcttgatcaatgtttgaccttggaacccatgcctatcattcctagccccaaagtcctgttagtggatgatcagcgggtaaaatctagatgctctgtcacgggccctggattccctgccagtgggaataatcacc

SEQ ID NO: 281443 - DNA, 590 bp, Zea mays
  unsure (1)..(590): unsure at all n locations
ttccacgcgtccgcgcgccgccccctccgcccccgttgtccgccttggttccctccttgcacctccctcttctgccccctctctcgttgcccgccctccagcgacaactgctcccctcccacacgctccatacatttgcgctccatgatcgggagacgatcccatctattgattttgatgcttggatctgggaagcgaccactaggtttcttgcattaatttcacgtggagatggtgcgacacaaccctgacggtgatcctcttcgccgcattctcacagatatgcatcgccatctctttccttccctctcccgtccagtggcgaagccagcatggaatcgaagcctgagcactcggacctctggttactggctattgctgtccctgtacctgccggtgccgtatggtgggtggtggactgcctgtacccgcgaggcgaacaccacacaatgggtggatgcggagcctgggcacatgaccgggcgtgcgaggcattgacttcgccactgcntccttatagatctgttgaatagtcgtgtcacgttcttgttcttgagggccatatgccatgcgcgtggtggactgatgcg

SEQ ID NO: 281444 - DNA, 637 bp, Zea mays
caggtcgactctagaggatcgcctagatgacagccatagacccgtaaactgccgccatgggtaggtaacttttccacatcccacacctgcaagccagctttagcaaagatttttgtgaccgtgtagagagaaagataggaaaaatgctcatggtaaaccgtatcaaattgggtctgggccagtaattgcattaggtggggaaattctaaggtaatggttccccctggtttcaggtcttgttttaaacccaacgtaaaatcattaatatccggtacatgggcaaagacattattaccaataatcaaatcagcctgttggccctttgctgagagcgatcgccctaaattttctccaaaaaactcttttaaaacagcaatccctagtttttccgccgccgccgccgtgctagctgttggttcaatgcccagacagggaacccccgccgccacataattcttgagcagatagccatcattggccgccacctcaatgacaaagctatccgtagtcaaacctagccgctcttgtaatcttttccacataacgggccgcatggcttagccaactactagacgtgctggaaaaataggcatagtccacacagaatagctcttccgcctgggtgtagtcttctgtt

SEQ ID NO: 281445 - DNA, 695 bp, Zea mays
atattttaataaaaaatttaactctcaaatgatacttgaatatctcaggcccctttgtagatctgacccaatgctggttttagagtcttccttgtacgtccttgagcgcaacccatcagaaactattgagctctttttgtctgaaaatgttccagcagatttggtaaattcatatctgaagcagcatgccccaaatttgcagtcaacttacttagagctaatgctctcaatgaatgatactgggatcaaccctaatctgcaaaacgagctggtacaactgtacctttctgaagttctagactggtacaagattctgaaggaagagggaaactggacagagaagacatattccccaacacggaagaagttaatatctacgttggagagcaattcaggttacaatacagacgcacttcttaagcgccttccccaggacgctctttttgaggagcgagctatattgtatgggaaaataaatcaacacctcagagctctctctctctatgttcacaagcttcagatgccagagcgagcagttgcatattgagaccgtgtttatgaagaaagagaacatcatccgtgcaaatcaaatatctattttaatcttctacagattcatctgaacccaagaaaagctgaaaaggaatttgagcagagattattccagctgcatcacaatactctggaatccaaag

SEQ ID NO: 281446 - DNA, 326 bp, Zea mays
gtcgctaagggacccgaaaaagatagttcctccacccgccccgcactgtcgatgattttcaccgtcacattattaagccccgtattcagaccaaaattacgaatatcctggggccccgctggcaattggagagtttgccgcaatagtccattgacaaaaatttccgccctagcagggctttccaacagaaattcaatctgccctgtgggcctagtggtcaaatagggctggaggagacaaattgcgaaacatcgcaaatcccaccatgggcacaaaggactgataactgcgggcggtgctaaacagatccccgggtaccgagctcg

SEQ ID NO: 281447 - DNA, 679 bp, Zea mays
caggtcgactctagaggatcgtggccaggacagagggtgccaatcaaggcgtggcccacttcatggtatgcaattaagcgtttacttttactatccactaggggtgtaccttccatccccgccaccacccggtcaatggcatcattcacttccgccatggtgatggcctccttgcgccgccgagcggtgaaaatggccgcttcatttaacacgttggccaaatctgcccccgtaaatccgggagttctcctggcgatcgccgctaactgcacctcttcgtgcaattttttgttttgggcgtggattgccaaaattaattcccggccctggacatcggggtaatccaccgtcacctggcgatcgaaccgtcctggccgcaaaagggccaaatccagcacatcggggcggtttggtggccgcaatgacaatgagcccgctgttgccctcaaagccatcccatttccgtcaacaattggttgaggggtttgtttcccgttcatcgttgccgccgccatagcccacaccccgttgtcgacccaccgcatcaatttcatcgataaatactaggcagggggcattttccttagcttttttgaataaatccctgacccgggaagcccccacccagacaaacatttccacaaattctgaaccggaaatgctgaaaaagggcaccccc

SEQ ID NO: 281448 - DNA, 684 bp, Zea mays
  unsure (1)..(684): unsure at all n locations
atgcctccnggtcgactctagaggatcgctgtggtcaatggggaactgttggttaaacggttgaggatggaaaagctttaaatttatctggcttctgaaaattctgactatccgcccctggtcatcaccgatttaatggactttgaagtatggggcgtggtcaccaatgtgattcatcccctatgaacagtattgccctggtggattgcaataatttctatgtgtcctgtgagcgggtctttcaacccctattaaacggcaagccggtggtggtactttccaataatgatggttgtgtggtggcgagatcgtcagaagccaaggctttaggaatcaagatgggggtgccgctgttcaaaattcgagatttggttgagcgacataatattcaggttttttcttccaattactgtttgtacggcgacttatcccacaggataatgaccagcctgcaattatttagccctgtcgtggaaatctattccattgatgaagcgtttctggaactgactccaaatcaaagtaatacaaattatggggaagaaattcggcgttgccttaaacaatgggtaggcattcccgtttctattggcattgcccccactaaggtactcgctaaagtggcaactgatgtggaaaaacaatccggggctggaacattttgtttagacaaagcagaagcgg

SEQ ID NO: 281449 - DNA, 746 bp, Zea mays
ccatctaacgcctgaaggtgcggaggctcttgcggctattgtcaaggctttctatgaacgtttaagaaaagattctaattaatagtcatggcaagacgaaagcaaccaaaatatcggtatggctttaagagtgaagccaatggttatgctcgcgaatttcgtgaagaattgggattgaagccaatcgacccattatgtccatggtcattagcagattatttggcaattccagtagaacccttatctgcttacaaagatatgattccaaaatctgttgaatactatcgcaatggtaaagcggacggtttttcggcaattacaataattgatggctataaacgtcttatcattcacaatgatgcccatcatcctcgacgacaagccgcaaacatagcccatgaacttagccatgggattttgggtcacatgcctcaacctgttttggatgaaaatggatgtaggcactttaaccaacaagaagaagatgaagctgagtggctgggacctgcattactaatttcagaagaagctgcactacacattgttaaaacaggtatggatataaatgatgctgtcagacattatggggttagcaaaaatatagttcaaatgcgaatcaatgtaactggtgcaaagaatcgagttgcacgtatgtctgacactaatccaagttaataaacttgatatttactgaaaagtgaccgccatcataacttcaccaaccttttatactcaaaccacatacg

SEQ ID NO: 281450 - DNA, 948 bp, Zea mays
gggggacgcctgaggccccgtcccggaacaaaccgggccgagccacgacagcttttacgcgctactggcacccgaccaatggggataactatcgccactcgggcctagtggctgggcactatgaagaggggaggctgaacccaccgctacaggggaagacaaactcatgggagatggcattatggtcattgttgggacagcactaacaagtttgtacgagcagccatgattgaatgcgtgctatggaagttgtgccatggaactcggggtctggaacgaggggacgaaatggggcaacgcgagtggatgacttggaccaaagctgaaaatgaccctagctacgagagaggaagccgatagaaggcactaagtggtgcttagaagaggcatctggtatatacatatacctgacgaaaccaagaatgagtccatttggaatatgagctaagattaagacccacagcgagaatccctcaaaagtgaagtatcaactactacaaatctgccaattccacctacttaagtgatagcgcttttagccagaaaataaaccgctagtcagtaaagttttatgacgagattttaataaatctaagaagcggtaaaattactaacgccagcatcaaaaattccttcaataaattagcagaaagaagacggctcaactaaaaaacatttttaattcgtaaaccccttcgctcatacgtcgttccatgcgaaagttcatcttctcaaatagatgcaacatggctcgattttccagtaaaacatcagcggtaaaacccagtaaaccttgttttttggccaattgggttaaataattcaacagcagagcaccaatgccttggttatggtaatcatcccgcaccacaaaagcgacatcggatatgtgactatcttcgttgagggcatactgacccacccccacaatggcttcttgatgttgct

SEQ ID NO: 281451 - DNA, 526 bp, Zea mays
gttccgcccgcgtggcgcgtgacttggacgcgctgccttagtttttccagcccttgcactggcgatcgtgatagtcacggcacgcctgatggccgggccgccgacagcaaacaatccacaatggtgcctgagtcatgggtaacgggaaacatccgcccatctgcttccgttttgagttgcaccccctccgccccaaaccaggcgatcgtttgctggggttgaaaacgactgaacgctccccgcaacgccttacccccccggggatagttttgcactaactgggtcgggtcaaagcaatggtgggtcacattgcaacgtccccccccagaaatgcggactttagccaggaatttcgaccccgcctccagcaaaattactctaccctccggcagatttctggcacagttaatcgccccaaaaaagccagctgctcctcccccgaccacaatcacagttcttgtcatagttttgaccaacctttatctctggatttcactggaaaatggatccccgggtaccgagctcg

SEQ ID NO: 281452 - DNA, 558 bp, Zea mays
ggtcgactgtagaggatcgccacggcggatgccccggctagtgcggatgagttgcacgaaccattgtataaactgcgggcagaaagtgctagcctaatgtgcacgttgaaaaactaccggtatatccagggttaaccgaactttcatggctgaaactgtttacctaaaaaccagtatttttgaatatctaacatgctagacctagtcagaggttgatttcggattcaaattaccgatactggttacgccctatgaacttttaggagactagccatgtttaaggatgaaatcggtgaaaaaatgcataaacttcgtcgggctgactctaagtcttttaaccacgattgacaggcattgtacgttgtcgcaaatagaagagaggctatcagcggtcgcacctatgtgatccctaatgtccatcctgaagattaacacgaagaaacccctacttcataaatttaattccctatcttcccattccgtaatatttcctttagtcctttctttgtatcagtgaataagccctatccactaagcttgagcccacaaattcctatt

SEQ ID NO: 281453 - DNA, 911 bp, Zea mays
caggtcgactctagaggatcgccttttcgtcggcggtaatgacaacggtagctccttgagtggaattattcacccaaccattctttcccatttcctgggcaagggtataaacaaagggacgaaaacccactccttgcacccttccctggacctgtatggcaacggtttttaacattattctacttccattaatactgttaaataacctgctatgccacaactaagaattagcgttatttttccaataagatgctaataattggtggggatagggagaggcaacgagagcttgggcttgatggtaatgggcgctataatctcgatggctccggtcaacttcctccgttgggagaatagtttttaactgcttgagagtttgcaccgccactgtaggaaaaaaggaaaacttacccggtaacacacaaaggtagttgctctggggattaacttcaatccaataactatagcgacgtttttgggcatcgtcactaatgaactccgttttaacgcaatcgtaactccagagttgacgttgatataaattttcttcgctgaaataccgtgccgccgtatccaaaagtaattcaatttctccactagctaaataatcattttcgttactgacgtaaccagaatttgccagcatggaatagtttagaaattccgaagaatcaggaatatttgccctttgaaaaaaatgattgaaatggtaggagtttttagtggacatccgcacgaaattatgggaactaatggcagggtaagctaccaccatggtgctgcgactttgttttagcttagctcgcacctgtagagtgggtaaaatgcgctcaaagcctgctcccactgcaaaaataaacgctttggcattaaggtaatgttgctgtccttggcaatctcgataaaagata

SEQ ID NO: 281454 - DNA, 856 bp, Zea mays
ggtcgactctagaggatcactttttccttccatattcgtatctattctatctaaaacatcattatttatttcagtcaaaatccaaacgccttcaggtaattctttagcttttttgacaattaattgaacaatagattcatcttctaaacgaaaactagaaatcaataaaaaacgctgggcagaactaattagagcttcaatttcttttctatgcaatcctctacccacaataaagtctaatcctttaggctcattttcagaaatggtaaactcaagtaaattttgataattaaaaacaatatattttttcttgtactcatcaattagtgatttagcttcagccgacaaaaatgaaggaaagcaatttttaatgagggccataactgcaatttgaagttcagacggtagttcctctagtttttgccagattgtaatatattcaccagttgataaaggtatcggtatggcaaaagttgttaggagaaatgtaatgctgctctgataatctcgaccgatgctttctgtttaattatgcctaaagcttcctgacgtatggattgtaatcttaaattgtctacatcattactaatatctaaattataagtgccatcgcaatgctgcccactccataatggtaactggggatcatggggcgataattgtagagaaataattgggcatgtaaaacaatagctatagaaaaactcctcttgaattaagttttggtttgcaggagttaagaaggttgaggaaagataagatgactttcctcctactttttgtataagatgctctagggtctgttgagataaaaaatttagtccaaaagattggtgaatataggaaatatgatggc

SEQ ID NO: 281455 - DNA, 747 bp, Zea mays
aggtcgactctagaggatcgattttggcgcagtgaaaaatcaaattgattcggtcctctcttccaacacctctgcccaaacggccttaacggcctttgcggtgggcaccgccggctttgctcccccggaacagatggccatgcggccagtttacgccagtgatatttatgccaccggggtaacttgtttgtatttactaactggtaagacccccaaggagattgattgcaatagccaaaccggggagatggactgggaaaaacatgtgacagtttccagcaaatttgctgaagtgatccgcaaaatgttggaactttctgtgcgccaccgttacaagagtgcccaacaggtgctggatgccctggagatgcccacctatgaggatggcatgatgcagggcatggtttctaccccctttactaccctaacaggagctggggacgagccggccacgggtatccgcatggggaatagttcttctccagactatggcgacccatccacccgatttaacaccaatgtccagcccagggaccctagttccactagcctgaatactggcattaaaacccgcacagctaaaccgaggcaaagtcccagggatagggctaccagcaatattgagtctccgaccaccagggtacgtcctgcctccaatatggcggatggaggctctgaaggaacaggggggattgactacaacatggttaacccaaaaccctttgcccgtcgggaagaagaaaagca

SEQ ID NO: 281456 - DNA, 551 bp, Zea mays
tcattcttatccctggggaagaaatcacgtacatctccatctctcagccatctcatttcttctccgttcctgatgacactagagggattagtccgcacatcagtgcttggatcttgctagcagccgagctacttctccagcatcaatgtttgaaaccgtcatatctgcaatttccggtcgtcgacctcgccctgctgcttatcccgtcgccagctgtacttgtcttcctcaccggtgtgccctctcggctcgctcggcttcaatctccatcgcgcagcggcaacttcccttttctctggtgccgcgcacgctgctggtccttgcgagtccaccttgctccggccagtgacaccggtgccggctcgctaatgcttgcgcgcgtctgtccacgtcgccagcagctcggtctctacgtgtctccctcagcatctcggcatcggaactccatcatgtctgtatgtgtgtggaagaacgagatcgtgggatcggagaagaaagcgaacccatgtggtttgtgcgttcgtttggcttggaattggaactgtggatat

SEQ ID NO: 281457 - DNA, 1051 bp, Zea mays
catcgggacgatacctttctaatccttggcagaattgctctactgtttgtgttccctgtccgaatccatagacttcatcaaaatagggcttatcaatgctgattcccgtctctattaccggggacgtgatgacaatatccttgtcttctaaatatctatctaagttatccatacagccataggcagggttagtcttatcgcttactgtatgggcatctaagacccctactgacttatcagggaataacattttgaataagtcccctaggttagttgttgaatagatagactgtgctttttgtgccccggtgcaaatctgtatttttttaccattagcaacagtattaatagcggaagtaagcaaatcttccggggaattataaacaatcaaattacgcttatcctgcactggcttaaacgtgttaacgacaatatagcattctgccttaccaccgattaagtcttggacatacttgatagtcaccggggacaaatcagcatcagacaaaataatcttgccccccgaatcagcggcggcgatcaatatttcttggaagcgggccaagatggctggtttatgtttgcccaggtttccccgggaactatctaataattcccatatcaattgctcgcattcatcaaggatgatgtcatggccccggaatgtttcggggtcaagtttcaggatgctatcaatgcacaatccgattcctaaggccccattagtgtcgctctcggacaaatctctgatgtagtccacaccaaaccggccggatagggcaatgcctagttgaattcggtgagtgagtggataagtccggcgaaaatcttctcgccgttgctccaccatttttgagatcgcttccgtctttcccgtgcccttggctgatttaatcccgattattttggcggtggtaggggcattaatgttgcttaggtatctttcgtgccgggtttgattcacccattgggataggtcagcatacggcttgtttcgcagctgttctagcctgatgccccgagcgatcgcccggtgaaatttagcagggtt

SEQ ID NO: 281458 - DNA, 910 bp, Zea mays
tgttttagttttctcattcaagtcccttcccaagatagctagggcttctctgatttttgctttgatggctccaccggcattggctttaaggctgagtgcctccgtcagaatggcgatcgccgttttgacctcgtaggagctgggaacatcttggagctgtcttcctgccagtaagtcttccctgtagcggtcaataatgccctgcacttcatccttaactggtatcgggactcttaggtgagtggtgagatacggggcatgatgtccccttccccctttgggtttatctatgccctgcatgggtttagcctgttaacgggattatattcccatcataactccctgtttttggtatccagttcctaggcttgattaattaataaggattcagtggatacggtatcagagtgatacaaaatagaatcccgctcaaaccaccgggaaaaaatagccgatcgcccatcggggtcaatattggcggggccataatgtcgcttagtattgccccgttccccaaaccggcccagatactcaagatgtaaacccatttttttcaagacagattgcacgaaggcgatcgcccctttgtcagggttgatcgtgatgcccaaggcctgcttaatttctgccttgttgggcaggatagtcttctcgaaccaattggctagggaatccttggaaaattcccctatcccggcaaggaatctttcaaagcccaatactttaaggaagtgaacggggacggtgagagtcttccggcttgcatcctcggcccaaacctgtccatcttccccggccaaattttggagcctttggctgcccctcgcccgtagaaattccgcaccggtggtgacggtataatgcacggtcaattgggccagccttccttcatccccgggtaccgagctcg

SEQ ID NO: 281459 - DNA, 678 bp, Zea mays
atgcctgcaggtcgtctctagaggatcatacaaaattgcccaaccaaaatagtctggccccagctggggaagctttttaataattggaaagccgatgtaactagtattgcccactgtactaactaaagtaaaactagtttggaaagcaagggatggtttgggaaaaagggtttggacccagagccagcttagaaaaatccccagtacaaccgcgccccaagctacgatgggggagagccaaattcctccggataaattcgctttatgaacaaagttaattacccctaggggaactccaaaccaaaagagaaacttacccaagtaattgggaactactagggacagatgctcgttttttgaaaagtttccctgcagtttttcaagggaaaaactcaataaaacaccagttaaaattgccacactaataggcaaatacagtcgaaaaataataatcaagaatgaattcattggtcaatcatgattaatgggtaacaattaacggctcttgtagaaaagcaatacgtaggtcttgagattcgtgattgtaatattgcccgtaatttatcgctaattctaaacattgttggggtgaataaacagtcaaattaatgccccgaattcctagtaaaataagatgaattttttgtttatctaatattttccttaatgctggaggaa

SEQ ID NO: 281460 - DNA, 610 bp, Zea mays
gacaatggatccaaggatgcagggaccggtgctcaggccacgctggagagactggtgtccaagcacaggcatcggcgtgaccctgatggccccccgtttgaaggcaggttttccgacgagtcatcatctttgctggagaggacgcttgaaatccgggacaggtcctacaggctcaagatcggtgtgatgagcgaagcgcatcctcctgtatatggtgacgatgaaagcgccgccagtgctgctgattcagatggcgaggagtttagccgaaacgtcaaggaagctgcggagatcctgaggaaggccagggcatccatggctgacgaagagaccgcagacgcactgctgtacagaccggctaggctcctttccacagctgtggctttgaggccaacaagcctggtagcagtgggtcagctagggaacacgtacctcctccacggagagctcaagctcaaggttagtcgcgagctgaggacactcttggccagcagcggcgcctttctgaacggaagagagcgtgctccacggtccaggaaggtagacaggaggatggtaagcagagagagcatctcatccgctcttgtggatgtatgcgaggaatgcgaga

SEQ ID NO: 281461 - DNA, 482 bp, Zea mays
cgggtgcggcggtggtcaaaattgaagctggtgattcacctacttttgccttaggggactccgatcacctgcaggtgggggaatgggcgatcgccattggtaatcctttaggattggacaatgcggtcaccacagggattttgagtgccacaggccgccgcagtgcggatattggtgtgcccgacaaacgggtggaatttatccaaaccgatgcggccattaaccctggtaactctggtggtcctctcctcaatgcggatgggcaagtaattggtatgaacaccgccattattcaaaacgcccagggcattggttttgctatccccatcaacaaagcccaggaaattgctcaacagttaattgctacgggcaaagtggagcacgcctacctcggcattcaaatggtgaccatcaccccggagctacagagccaaattcgccaagaaacgggtatgaacattcctgtggataagggtgtagtg

SEQ ID NO: 281462 - DNA, 722 bp, Zea mays
ttctctcgtccgggagggcacgggagtggtggcgcgaggagtatgcagaggagctcacgaagaagcaaaagcgaagggcacttgccaagtcaaaaagtgatgctggtgcgatgtctggtttgcaatggtgggagagggattgtgaatttgaggagaagggccattcaaggtggacgatgatgaaaagctggagccggaggagcagcaatggcaatggcaatagcaattccagcatcagttggtgggtggacggtgtgagaaggagcagcagggattgggccagcggggaatttgtgcctaagagtggtggagcagtgagcagcacaccgagcatgcgtggcacagtctgctatgtggctcctgagtatggtggaggagggcctctatcagaaaaatgcgacatttacagctttggtgtgttgctgttggtccttatatctggacgacgcccactccaaatgacaacctcaccaatgtcagagtttgagaaagcgagcctcatttcgtgggcaaggcatcttgctcaagttggccgcttgcttgatcttgtagaccctgcactgcaggatgttgaccgagaccaagcgctgctatgcattactgttgcactcctttgcattcagaggtcaccagctcgccgcccatcaagtgcagaggtgcttgatatgcttgctggtgagggtgagccaccgcctcttccgatagagttctcaccatcacct

SEQ ID NO: 281463 - DNA, 515 bp, Zea mays
  unsure (1)..(515): unsure at all n locations
tttcatctgtaccgccactgccaccacgtgctgcatgggtgtgttgtgatgattgccaaaagtggcggtgcatacctgctgaacttgcagatgtgattggagaaacaaattgcagatggacttgtaaggacaatggagacaagacgttcgctgactgttctattccacaagagaaatcaaacgctgagattaatgcagaactcgatctttcagatgcttcagctgatgaagcagacaatggtggatctaactccaaagcttgcaaaccaccgtcatggactcttgttaggtcaaacttgtttctgcatcgaaaccgcaggacacaatccattgatgagagcatggtgtgcaactgcaagctcaccccaagatggccgaatgggttgtagagatggatgtttgaacaggatgctcaacattgaatgtgtcaagcggacatgtccatgtggagaacaatgctctaatcagaagttccagcggcgtagctatgcanaactgagatggttccattctgg

SEQ ID NO: 281464 - DNA, 670 bp, Zea mays
caggtcgactctagaggatcggcgttaaccatggttctctctccgaaagaatgcttttacctactttttacccccgagggcatggtgcaatcggccctggaattcatcaaaatttgtgagtccttagatttccgcaacctagtcgtttccatgaaagcgtcccgggtaccggtaatgttggccgcctatcgcctcatggtgaaacgtatggacgagttgggcatggattatcccctccatctaggggttaccgaagccggggatggggaatatggccgcattaaatccaccgctggcattgccacccttttagctgatggcattggcgatactatccgggtatccctcaccgaagcccccgaaaaagaaattcccgtttgctacagcattctccaggcgctgggtttgcggaaaaccatggtggaatatgtggcctgtccttcctgtggccgcacgttgttcaacttggaagacgtgttacatgaagtccgagatgccactaaacatctaacgggtttagactttcgccgtcatgggctgtattgtcaatggccccggggcaatggccgatgccgactatggctatgtgggtaaacaagccggttacattgccatcaaccgtggtcgggaagaaattaaacgagtacccgaaaccgacggcgtacaggaa

SEQ ID NO: 281465 - DNA, 630 bp, Zea mays
gaggatcaacgctgggggcataaatatccgaaccgtggtaggtaatgcgtccctcctctctggcgatggaaaccaaatcattcatgcgattgaagcaacggagcagggtgctcttaccacaaccggagggaccaataaaagccaccacccgtctttcgggaatggaaatattgcaatctttgactgcaaggtgggaaccgtaataaacgttaacgccctgggcttctaacacccccttcgtggccacgccgttggaaactaccataactaatatcctcttgaaaattcaaaaataattggttactaataacggaaaagcttgggttgttctagaccgagggacttcccaggtttgacagagtataacacagacaaccatttatccaaagcgcccactggcatagtccttggtgtcctgttcctgggggtcgccatacgccttgccagttcggtcaaattcctccagatagcccactttattgcctatgtccgtggcttgtgcgttgtaaaaagcagtgtaatccgccaccctggtggcctgttgcatattgtgggtaacgatgattatggtgtacttttccttcagctcattcatcatctcaaaaacaaacagggtaggaatggggtcta

SEQ ID NO: 281466 - DNA, 611 bp, Zea mays
  unsure (1)..(611): unsure at all n locations
caggtcgtctctggaggatctggggagttagcattggccactgccatcgcgggctgatttcccagctggtaaactagcaatgggaagaataacaaaataaataagtaatttaatcaatttatttatcctataaactaataaaagcttggcaacaattggtttccctgcattatccttgacgcaggggcgatatggctcagcgaaatgcccacggggaccaggggagttaagcggaataaaccgatgatagcaataatatgaatcggattaaattagggcagaatttctagaaataattagtgggaagactgtaatctttttaaaaagtagcccactaaataaagggaaccacagagaacagtcaattgttcagaattttcgttggttttctctaaactttccaaggctgtaaaacaatcatcaaacagtgtaacctcttttaaatccggaataatctgccaggctaactgctccaacgttggtaaatccccgctgtcatggtccggcactggcactaataacagtgcgatcngccggacgaagtaaatgctgaaaaatttggtcatgttccctggtgctgagcatacccatcacccaggtaatggtgggca

SEQ ID NO: 281467 - DNA, 1072 bp, Zea mays
gcttttgctcggtaatatcggcgacaaccgccaccaatccggcaatattttcttcactatccaataggggagcagcggaaaggacaatttcaatccaactaccgtcttttttttgacattttaattctaggctaggggaaaccatgcctgataaaactttctgtttaaattgctgataatcttccagcaaaatgttggatgttaataattctggatgggcaataatttctgtttctgtccaaccaaaaatacgttctgctgtaggattccaaatctgaatttggtctgctaaattaagggtaaaaatacccctgggggaggccgcaatcagggattgcagagtatggttagtgtggcggagagcggcttccgttttttgtcgctcactgatctccattcttagggattgatccctggcggcaagttgctgggtgcgtttttcgactcggttttccaaatctttattgagttgctgtaattgctcatataattccgattgttggatggcgatcgccgcctgattggctagctgtttcattaactccacttcccacggttgctcctggccgggtaaaagcacattgatgggtaattaacagcccccaaagatagggaaattctgattcattatctagggaagaagcacgattatgttgaagaatgggcactactaattttgatttcacgccaaattgtttgacgaaatcagctaggcaaatctctatgtcatcctggtcaatgtcattaatggcccgtactttacctttggtgtaggcttgatggtattcaacgggaaaaacttcatcggaaaaggtccgccctaaaatactaggataattggcattcaccgattccgtaatggcgctgcccgtgccatcttgccaaatgcgataaattagaactcgatcaacttgcaacaggggtttaacttcagcgacggtggtatttaaaaccgtttccaagtttaaagattggcggatatgttgggtaatttggttaataaaatcgttcccgttgggtttgaagcaagatgctaatttcaatcctgcggcgttcttggttttgtctgtgc

SEQ ID NO: 281468 - DNA, 521 bp, Zea mays
ttcccaccgccgcgcctacgccttcccccgccccccgcgcggaggagggtgccgccggcgatggagacgacggccgcgggcgcgccaagagcgcagacgctgcgggacctcgcggaggagggcaagaagcggggcgtcctgctcctcgtcttcgccttcgggctggccttcctcatgtcccttacgagctcgtcagtttggtttaatctgccatttgccatagctctgattgttttgttccgctacatatcgcttgattatggccttcgtagaaagagcgtaactagaacagatcatgccagtcattcactcgtcaaaacttgaggtactgaggtaaagaaagtcattcatcagactgaaacggatggaataatagattggaggagcaaggttaactcgcctccaggtgaagcagcattcgaacagttcacaaggcaccttatctcagaatgggtaacagatctgtggtactcgcgcgtaacacctgacaaggaaggtccagaggaactcatcgatgtagt

SEQ ID NO: 281469 - DNA, 480 bp, Zea mays
tccactcgccgcgcgacgaagagaacggctcccccttccccgccacctactcgggctggagcaacaggttctcgaagcgaaacattctcgccccaattgtgggggttcatgggcgccaacggccacccaccgctggcgagcacccgcgcgcacaacgggtcccactccggcggaagcggaggcggaggaggtgggggagggggagcgaaccctagcaacggcggcacggcggcggcgcttcggcacgaccctggcctggcgcgggagtggttgacggaggagcatgccatccttgacgaactgctggtcaagtatgcatccgacttacctgtcgttcgttatgcaaaattgcaatgaagttgccagagaaaacagttcgggatgtagctttgcgctgcagatggatgattaaaaaaggagagcgccaaaagaaagaagggggatcattactcgtctaagaaaagcaaggacaaaaaggag

SEQ ID NO: 281470 - DNA, 411 bp, Zea mays
gtgtggggaaaaaaaggaaagaaagccaggagcaccgcaccactccactccactccacttccctcctcgatccagccatggcggcctaggccccctagggttccctgtcagcccccacccaggcgcctcctgccgcttcctccgctcccacccggtggtcgcgctgcccgattcggccgccggcgtccaatgggaggcgacccgatgctcgaagccggccgtggccgcgcgctgccgacggagattccctgagctcggcggcgggttcccgtgctcgccgagcgatgactctcggcgccggcgctgcccgaggcactgggtctagggcgcgtggctgggtgggagcgccccgtgcgtgcaatgggggaattaaggcggttctgtagagtcgccgcggcggtcttggttctg

SEQ ID NO: 281471 - DNA, 644 bp, Zea mays
gacctaaaaaagttggttccttgtactatcgaggaatttgccaagagaattgctggtgctgaagaaagtacgtcgtcagaatcttctgaaactcctgagtcaccagaagaagagaaaaggcctttccaaaggggagatagggtcaagtatgttggaacctctgcagtcgttgaagcagatcagaggatcattttggggaaaatacctactcaagatggctcaaggaatgcctatacttttattagtggaaggggtctatcaaatggacagcgtggggaggtatatgaggttaatggggatcaggttgctgtcatatttgatccttctatagagaaatcacacaatgcccatgaagatgtaactaacaaggaggaaaatggatcagcaactgtttactgggttgattctcaggatattgcacatgatcatgataccgaatcagacgattggcatattgcacttgaagcactttgtgaggttttgccatctctacagccaataattgtctactttccagacagttctcaatggttatctagagcagtttcaaaatcagatcgcagagagtttgtgcaaagagttgagaaaatgtttgaccggcttaccggaccggtagtattgatatgtggccagaactactggca

SEQ ID NO: 281472 - DNA, 1300 bp, Zea mays
ggttcttcgagcatgggaagtgttccatgagagtgttcatggtgtggaacagcccgcagtgggcgtatggcatcaggcaccagaggggactggagagtctactcaagcagcacccagatgcctgtgtagtcatgctatcggagacactggaactagagtccttccaccaattcgtcaaggaaggatataaagttgctgttgcagtgccgaatcttgatgagcttttagaaagcactccaactcacgtatttgcatcagtgtggtatgaatggcggcagacaaaatattaccatttgcactacagtgaactagtacgccttgctgccctttacaaatatggtggaatataccttgactctgatgttattattcttaaacctttaacatcgctccggaattctattggtgccacaaatcatgtctctggaaattcccgttttggtggggctgtgttagcatttgaaaaacagagccctttattggaggagtgccttagggaattttattcgacatatgatgataccctcgtgcagtggaatggggctgaacttatgacaagagtgataagcaatatttctagcagagcagatgaaaacagggggcatcttgacattaagttggagccctttgttaaattttaccctataagctctactgatattatacgatatttctcagagcccgataacatggtccaaaaagcacatcatgatgcaatcttttctaggatcgtgaatgactctaccactttccatttttggaatggcatcacatctgctctagttcctgaacccggcagtcttgtttcgaaaatccttgaccgttactgtctccattgccttgatgttttgtagttgcaacagtctgaagctcctgctaagagctttattttggtttagaacaggtacacagaagaaatctttcaatgaggtactcagaatggctagtattgctgaatcttgcaaaacattgtgatggggggaagattaccggcagcactgtgtatatattgttttcactaaggtttgtgccggagctgcgcctgcaaagtccaagcatgttgacttgactagttattgtcgatagcaaaagtcttcctcctggcaatacagaatgcaacaactgaactactgaaggcacttggaactagagagttttgactagttcggtacccttctatatttgcacatatactgataattttcacaatttgatattttgaaaataacatgattcgtgtaagacagtagaaattgaaggaccatataccgaattcactgggtttatctagatgtttggt

SEQ ID NO: 281473 - DNA, 544 bp, Zea mays
cagtgcttgacgcattgcatgcctccattggactgtgccaaaggaattcacagcgcttggacccagaggaatctcagtccctttggttccaactccttgactccttctcagagccattaaaaaaactgtatgggatcaaggatgtaaatggaaaaggtgtcaagtccaattggagtgaagcatcaatggaacatctgaaggaaaaaggactatctcaacaaatgaggatttcaactaaacaaaagtgcctaaatgttctgcgaaaagtattttcacaatgtgttggagaaataatagaggccatggctgggtatattcccctaccggcaatcatggcaaaactgttatctgataatgggaatcaagagttcggtgatttcaaacttgtgatacacagaatgttatctatgtatctttacgaaaaaagaatactggaaacggctaagtcagtaattgaggatgactcattttacaccttgagcttattaaaagaggagtttgtcatgggtttccccacagactttcgtatgctgcatatgcaact

SEQ ID NO: 281474 - DNA, 530 bp, Zea mays
tccacgcgtccgctcgcctgccttcgcacgggtgcgccgcccgttcgacggccacgccgcgccgcgccgctcagctgccccggcaccggcccttcctcgccgagctcgggatcgccgagcccggtgacctctcagccaagcgctccagacggttgcagtctccgcagtccgagcccacctgttccccattggctcagtgcgcccccccccatgggtcggttcaggtgtctcaggcatgcgtcgaggttccttgcgcttcagtcaggcgaggtggtcctgcagaggcgcgcatggattcagccgaacacatcttgcagttctactggcatctatattagcaataagttctatgatcgattcatgttgataccatttgtatggagccggagttttcatgctacagatcaccgttgttcgaaacacaaggactactacaaaattcttggtgttcccaaggatgcatcgcaggatgacatcaagaaggcatttcattctcttgcaaaaaagtatcatccagacacaaatagagg

SEQ ID NO: 281475 - DNA, 443 bp, Zea mays
tccacgcgtccgcccacgcgtccgcaccagattacggccggcggcggcccgctctgttccatcgcccccaagcggcgggccttggctgcgccccctaaatccaccggcgagagtaaagggcgcccctctctcacacgatggcctcgagctccgcaagcggcgccggggtggagggcggggtcggggaggggccgacgacgctggacgagctgtaccagatcaacgtagtgccggccgagctccacttcaagttccgcaaggagctgcagggcctccgcgtcggcctcaacctcgagttctacaatcttgaggtcaatgactttgaggcaaagatagtactgaagcctctagattacgagcggaaatggaagttccagtacaagcccatcaatggcgacatacagctgctttcaaagagataccagtcccaagtttctaaatct

SEQ ID NO: 281476 - DNA, 474 bp, Zea mays
ctcatcagcaatataatacccaagatacaatctaggcagcctacaatctaacgtactccaggctccagctgatttgtccacgcggcatggcgacggccagcgccgcttcaagcttcctcgtcccggcgactgctatcgccccgacaccctctgcatgcccatccacggttcccaagaacaagaagaatgctgccggccggcggcggcgcacattgcagtgcagggccagcggccggcggggcgacgacgaagacagccgcctcctctggctgccccggcgggaagtgctgaccggtctgggcggcgtggccgccagcttcgtcgggtacccggatctggcttccatcgccctggaagcgaaccccgtggagagctgccggcggggcgagaaggtgacggagaagctggtggagtgctcggacccgaacagagacttcccgtgcccgccggcgtcacgggtccccatcgtggact

SEQ ID NO: 281477 - DNA, 508 bp, Zea mays
aaccgccccttctccaccacggccagtctcgctttctagtcgcttccgcgtcctccactcgccgcgctccccatcccggagcgcggcacaccgtagccccgcgccgcagcggctggccggcatgaagagcatgtggaagcagagcggcggcctggtgtgcgccgacgccggccccctcagccctctcggaggccgctcgcggcgccgcacgaggctgacgctgtacgcggtcgcctttgccttcgccgcgttcaccgcctacgtcgccttcgcctcgcctccctccgcgggcgccggcgcctcgtggttcggcggagtgtacgcgtccacggcgccgtaccgctcgcagatttccagcctcttctcgtccatcttgcccgccgactcgcccgccccctcgccagagccgctgcgcgtcacgttcggcggatcgggcggaggcggtggccaggtgacccgtgatgcgagcactgtgcaagttgggagcgcggcggaaagcatcagctct

SEQ ID NO: 281478 - DNA, 553 bp, Zea mays
ttggtgtgggtactgaggaagacgagtattcaaaggatcgggtaattgttgcagtgcggcaagggaacatcctcgcaactgctttccacccagaattgacatcagactccagatggcatcgtttcttcttggacatggataaagaatccccagcaaaggcgttttctgcgctctccctgtcgtcatcgtcaagagacactgaaggcctgccaaagaataagccgtttgatctgcccatttttgagtaacgctacagacaagacaaaccaaaagattgaaggaacgaagaaactgaccgtatttattatcgatcatcatttagccggttacaaaaacagccagctgagaatctgtcatactcagccgaaaaaagtgttgtctggtagctaacttgtacggataaaaaataatcacgctgtgtgctgtacgcaattctcatcagataaagcgaaacattgttttcctgggaattatagttttgctgaaggtgaccagttgaacacttgaacatggtgatgcttttcccctctaagtgcaacttggttcaagagcc

SEQ ID NO: 281479 - DNA, 489 bp, Zea mays
taattcattgtcgattacatctcatcgcctgaagtgaacttcctcaccagtatatctggaagagttagcaagaagacaaagcttgtgttccgctttctcgacgaacgctctattgagccatcgacaaaccagacatatggctccatgctgaaaaatctgacatttgtcaagacttttgcctctggaatacttgttcccaaaagctatatctggcctgttacaccagataattacctgctgccttatacttcagtggttgatgatgctcacaaagcggggctagaaatctatgctgctgattttgcaaatgacttaaccatcagctataactacagctttgatccattagcggaatatcttttcttcattgataacggtgccttctctgttgatggtgtattgactgatttcccgattactccttcagggcagttggttgctttagtaacctgaacaccagcagattgatcatgctaaccttagttatct

SEQ ID NO: 281480 - DNA, 496 bp, Zea mays
ccggccggattccgggtcgcccagcgttctccacgcgtccggcctcctctagagcgttggcgtctcggcggcagtcatcggatcggaacctgcacaagtagaagtgcgcaacaagccttgccactaacatgccttcagtcgaggtcgaggtccaggtgggcggcgccggcgggtggaggccgaagcagcagcagaagcaccgccaccaccaccatccccttgagatccgtacaggtgtgggcggacaacgtggaccgcgaattcaagctcatccgcgccgccatcgagcggttcccctacgtgtccatggacacggagttcccgggccgtcatccaccaccctcccccggccggtcaccactccacgctcaccgcgccgcagcgctacgccctgctcaagttcaacgtcgacgcgctgcacctcatccaggtcggcctggccctggcgccgtcccctggctctcccgccgcgctcgccttccagatcaacctccgc

SEQ ID NO: 281481 - DNA, 322 bp, Zea mays
ccagcctcctctagagccttcgccgcttcgcgcctcggcggcaatcatcggatcggaacctgcacaagtagaagtacgcaacaagccttgccactaacatgccttcagtcgaggtcgaggtccaggtgggcggcgccggcgggtggaggccgaagcagcagcaccaccatccccttgagatccgtcaggtgtgggcggacaacgtggaccgcgaattcaagctcatccgcgccgccatcgagcggttcccctacgtgtccatggacacggagttcccgggcgtcatccaccaccctgccccggccgtccaccactccacgct

SEQ ID NO: 281482 - DNA, 189 bp, Zea mays
ccgacccgacccgacccgacatgccttcagtacaggccgaggtgggtggccgttggagaccgaagcagcagcagtaccctctggagatccgcgaggtgtgggcggacaacgtggagcgcgagttcaagctcatccgcgccgccatcgagcgcttcccctacgtgtccatggacacggagttcccgggcg

SEQ ID NO: 281483 - DNA, 527 bp, Zea mays
ctggtgaagtcacaactagtagtagttataaaaagttaaattctacttccatccgtacggaacattcagattacccactgcatcgctgtaagagaattgttcctcatggacagaacagtggggcatttttcattgcagtccttcataaactctcttccctgaatgagaaccaggtggtagatggtgtcagaattgaccagaatatctccaaagaccagactgagaaacttgagaaggatttagtatcacataaggcatcatctgaagaaaatactgtgcatcagcaagtgattgataatgcaaatgttctggatggagaacagaatagagacagggataacaaaagttcagaagataagagctcagaggattctaaggtcaatgttaatgaggcagcaaagggtcaagcaggaacaagggataggaggaggcagcaaaaccaaggcaggtggagagggggttgaccctgtgatattttttaaagatgaagtgacagtcaaaagcattgtatctttctatgggatcac

SEQ ID NO: 281484 - DNA, 566 bp, Zea mays
ccggcgcggaatctccggggcgccacacgcgttcttattttttttcgattcccctctccagcgtgggaatcgcatccatggcttcctcgtctatccacatccaccatccccggcttgccggcgacgagatccaccggaccctggaggcctcctactcccccagcgcgtcctactgctccgacgatgccttcgtccccgtcttccgcccggatccgtccgccccctccgtatccgcgtccgcatcggccgaccgcgtccgcagccttttccgctccgtcgacgtagtcctcttccgagatacgctcttcgcgcccggtcgcggcggcgacggcgacggcgacgacctcgggttcacgggcgcggacgcggaggcggcggagtacgacggcgatctcacctccatcttctgggactgcctccagatcgaggacgccgacgatccgctcgctgcctcccccgccgaggagttcgagtgggacgaggtcgcgtctccatcgggcgccgcccgggaagccccggagcccgagtcggaggtgctcgccgacgtgccgcccgccgccgccgag

SEQ ID NO: 281485 - DNA, 524 bp, Zea mays
tctgacgccgctcgcgttcgggaccgtaccgggctcccctgccgtatccgcccacacaccctccctccccgccgcttccgcccggtatcccccactcgcgcggccgtaggacacggccacgtgcgccgcctcaaactgttggggctgtggctggggcgggaggagcggcggcgctagggtttccccatggacggcggcgaggatcggacgttcaaggcgaactttaccggcgagggggtgacgatgctgcaggaccgcgtcaaggagaagctcagggagctcatgggcgactactccgacgacacccttgccgagtatgttgtagtgttgctaaggaacgggaggcgcaaggatgaggctgcaaaggagctacatgtttttttaggcgatgacaatgatgcatttgtatcctggttgtgggatcatctgtcctcaaatttgcacctttatgttcaacctaaagctggctctctaaggatgacactagaagcagtcacaatgctgcccgaggattgcctgtcaca

SEQ ID NO: 281486 - DNA, 521 bp, Zea mays
gctggtatccgtggcagctgcagtacctgaacgggaacaccaacgagaactaccgggggagcgctacggccacgttcacatcgcaacctgtagcgccaagtggatttgcaaccaggaatgcactagcacctctacctagcaacactctgacgaatggcagctgcaacgacagcagcaaccttggcgcgtctggggccgttgcgtcgcctacaaaatctgtcctgtccaaagtcatggacttgatgttcggcctttaagttgcgttgctcacccaaatggtgccgggtttttgtttttggggttccttctgggaaaactctaggccagaatgaggttcacttatcgatgttacggtaaaaacgttacgtgatcaccgtggttgaaccactgggtgtcaatgcgaccgttatatgatgctgcgagctagcatcgcgatattcaaacgggtgtattgatgcgttgcatatcatgtctgaaacgacgtcatgaacctgacttgtattttggtggacatgtcacat

SEQ ID NO: 281487 - DNA, 526 bp, Zea mays
gtgctgttctccgacaggggggcaccgccggggcagcacaaggacaaacccgccggcgttgccaacggccggaagcccggcctgagtggcggcgtccggggcctgaacctgagcgtgaactcgtgcatcgggtaccggcaccaggttagctgccggcgggtggaagtcggcgccgcccgcggccctggccccgggctgttcggtatcaaggggctcttctccaagaaggtgcattgagtgagcctgttttgtgttcacccaccctcgggctctctgatcactcgtgtagtaactcctcttttacccttccttttactagtactttttttaaccttgtgggttatatatatataaatggtacgatgagatgtgtgttcgtgagcgaggttgttattacatgtaaaaaattgcatggttagccagtaaccggtttttgtaaggctaatgcttgcttggtgacatgtactgtaaaaagttcgccaacgttaacaacctctgtttatgaaaaaaaaaaaaagggcggccg

SEQ ID NO: 281488 - DNA, 543 bp, Zea mays
ggtaaaaagaaataagcattcacttaatgaaaaaaatataagtttaaaactattagatagagtagaagatacgatctatggagccatgtgtagagccaagccaaggcccggccggggcagtgcgcaaaacacttgtcgtccgtcgtctcgctctccacatccgttgatccatcccttccaactccaatcaactccgtcccaaactacaatacgtggcagcagaaaaaggtgtatcttttaccagaaacagaagctagattcccagattgctccgcttgatcgctggtgaatcgacccaaccgagtggcccatggccggaaccgagcggctccaccgcccgattgacccgccgcggcccgcgggcagccgctccgtcgtggtcagtgctggtggctcgccggcgaggtgggacaacgataacgacgactgcggcgtcgacggacgtgtcgaaggcttggcggtgagctcctccctccgctctctctgcccgtttcgtccctattaagtggttgcgtgtaccggacgcgtgggcggacgcgtggg

SEQ ID NO: 281489 - DNA, 690 bp, Zea mays
tgaagactctgtagcatcgtggacgctgaccaacttgttgcattcacccaatgagaagttacaagtttctgcagctgacttttgggatggcattctttccttggatgaggctggtgaaccgttggtcaaccttgggtattttccaagttactctgttctaaaacgggctatgctgagctatggatacctatttgatacttcaggcactaaggcttcaatccctggaagcactgctgcaggtggccctggtgatagtctgcctcataacatcattgcttggttaagagttgtatctgcttgctgcaaaatcagaaaagtgcattccatcttctcgccttctgaggcagaagaacttcttgctattgccatttccctctttttggaccgtcgacttgaagggttgctgcttgttttgggagactgcctgaattcacttatattatacttcaatacgagtgagtgggaaactagctgtgtgatggcggctgaatcaattgctcagagggtcacactggacctaaattgttaagggttgctgactgcatcactggtgcgaataagcgcagcaaaatcctaaggagtcaggtggcacttcagctgctgaagatcagctttgggcttaaggtggccaatgtgagaagaatttgaagcctgcacattcataacgtgaaggagaaagaatgtgacttc

SEQ ID NO: 281490 - DNA, 604 bp, Zea mays
atgataagttccagacttggcagaaattttgatgagtgccgccacatcattactgaaggaaaaacatcacggtgttctgatatctgctgttcagctttgcatggagctatgtaatgccagccatgaagcattggagtacttgaggaagaattgccctgaaggactggtccgaatactgagagatgtatccaacagttcatatgctcctgaatacgacattggtggcatcacagatccattcttacatatccgagtgcttaaactcatgcggatactgggccaaggagatgcagattgcagcgagtatatcaatgacattcttgctcaggtttcaacgaaaaccgagtcaaataagaatgctggaaatgctattttatatgaatgtgtggagacaataatgagcattgaagctacaagtggtttacgggtgttggcaattaatattttgggccggtttttgtccaaccgcgataacaacataagatatgttgccctaaacatgcttatgaaggcccattgcgtagaaacacaactgctgcagaggcacagggcaacaatattagagtgtgtcaaggatgcagatgtttcaattcgtaaaagggcc

SEQ ID NO: 281491 - DNA, 695 bp, Zea mays
ttctccaatcacagtgaggaatgcacttgctagatatgccgaccttctaaattcaccgaagaaggcttctctggttgcattagcttcttatgcttcagatcctgctgaggctgatcgtctgaggttcttggcctctgctgctggcaaggatgagtatgcccaatgggttgtggcaagtcagagaagcctgttggaagtcatggcagagttcccttcggcaaagcctccactaggagtcttctttgcagctgttgcccctcgacttcaaccaagatattattctatttcatcttcacctagtatggcaccaaccaggattcatgtcacatgtgcggctcgtgcgcgaaacaacacccgctggaaggggtacatagagggagtttgctcaacttggattaagaatgctgttccttcggaggagagcaaggaatgcagctgggctccgatatttgtgaggcaatcaaacttcaaactacccgctgatccttcagtaccgattatcatgattggccctgggaccggtcttgcacccttccgtggcttcttgcaggaaagacttgctcaaaaagaatctggagctgagcttggtcgatctgtgttcttctcttggatgcagaaacagcaagatggacttcatctatgagggcgagctgaacaatttcgttgagcaaggagcactgtctgagcggttcttg

SEQ ID NO: 281492 - DNA, 955 bp, Zea mays
cacccggcctgtcgtgtcgatctcactctcagggtccggtccggtgcatcatatatacccttggtcgatcgatcgaccagatagatacactagatagctaggattgcattgtgttccaccaaaagccagccacaacacatcgacatgatgcaggacttgttctcggtcccttcgtgtttctcggcgggcgagaagcttccggacgtcccggcgtccgctgcggccaccaccaggtccgggcagagcgcggcgacgctggtctaccgcgcgggaatcgccggccacgaccgcctggtgacggtgacgtggtgcaggaacctgctcacccacgggctgaccgtgtcgatcgaagggtcggcgggcggcggcaaggacaagagcggcggcggcagggagtggggcgacgccgactgtggcgcggcctcgtcctccaacaagggctgcagcaccgcctgcaaggtggagatgcagccgtggcacttttggcgcaagtacggcgccaagcagttccacgtcgacggcagggccgtggacgtggtctgggacctcaggagcgcgaggtactccgacgagcccgagccgctgtccgactactacgtcgccgtggtgtcggacgaggaggtggtcctcctcctcggcaacctcaagaaggaggcgttccggcgcaccgggtcccggccgtcgctgcgggacgccgcactggtgtgcaagaaggagcacgtctttagcaagaagcggttcctcaccaaggccaggttccacgacaggggcaagctgcacgacatcagcatcgagtgcagcagcagcaacctcggcggcggcggcgtcgacgtcgacatggtcatcaagatcgacggctacgtcaacgtcctcgtcaggcacctgcagtggaagttcaggggcaacgagtgcatctccatcaaccagctcaaggtgcaggtgtactggaaaagaa

SEQ ID NO: 281493 - DNA, 525 bp, Zea mays
tgtgcctatgtttagtggcagcacccttgaatggcttccatctgatcagcctaaagagtaaacagtatacattattggacccagcacttgggggaatcaataggtggagttttctagttctttttcccgtttccactagaatcagcatagcgaaactattctgcttgttgaaagcaacggtggaggatctgcttgttgagttgttatatccatttgcattgcagtgcaattctggaagtagctaaaaggccatattgtatgtttatcaaggctagtctactgatctagaccccatagcatctgtggtttctaaggtgccaaggcgaccaggcaagagctgggtgtgtctggacgcctagatggcacaaggtgctacttttccccaaggcgagctgggtatgcttggacacctagcctctgaaacatgctaccacatccataataatgtaatgaataaatatcagcatttcagttacatagccgtataaccttctagtccggacataatatttctatgtttttgtt

SEQ ID NO: 281494 - DNA, 1618 bp, Zea mays
  unsure (1)..(1618): unsure at all n locations
cctcttgatgattacaggcttgtagccgaggtctattttgagcgaatgatgcagtccacaaaacagattttattggagcactagttngtggtcgactcaccaaagctaataatgtcaatcaggaggagttgganatattatacgctatggatcaaaggagctttttgaagacgagaatgatgaatctcgccaaattcattatgacgaagctgcaattgagaggttgttagaccgtgatcaagttgacggtgatgaatctgtggaagatgaagaagaagatggattcttaaaaggattcaaggttgcaaactttgaatatatcgatgaggcaaaggctcaggcagaaaaagaggaggcacggagaaaggcggccgctcgggcggaaaattctgaaagaaactactgggatgaactattgaaggatagatatgatgtacagaaagttgaagaacatactgctatgggaaaagggaaaagaagccgcaaacagatggctgccgctgatgaagatgacattcatgatttaagttccgaagatgaggattactcattggaggatgacatttcagataatgacacaagtttgcaaggaaatatttctgggaagaggggccaatattctaagagaaaatcacgtaatgttgattctattccattgatggagggcgaaggacgtaccttgagagttcttggattcaaccatgctcaacgagcaatgttcctacagacactcaatagattcggttttcagaattatgactggaaagagtatcttcctcgtcttaaaggaaaaagtgtcgaggaaatccagagatatgctgaacttgtcatggcacatcttgttgaagaaattaatgattctgactatttttcagatggcgttccaaaggaaatgatgcgtgttgatgatgtactagtcaggatagcaaacatatcccttattgaggagaagatggctgccacaggaccaggaaaaattacaaacatttttcctaattacttgctctatgagttccaaggcttatctggtggaagaatatggaaagcggagcatgatctactgttactgagaggcatactgaagcatggatatgcaaggtggcagtatatatcagatgacagagagaatgggctttttgaggctgcacgacgagagcttcatctcccttcggttaatgaaataattggtgctcagttgaacgaggcaaatgggaatttggaaggtgcacaggaaggccaagcgaacacaacaagcatgtcgcattacaaggagatccagagaaagatagttgagttcttgagaaagagatatcatcttatggagagagccttgaatatggaatatgctgtgataaagaaaaaaattcctgttcctgatgatattactgaacaaggtgttccagcaggacatgctccttttattccagatatcagtgaactgttgcgggaattgcccaatcttgagccaatttctaccaatgaattggtttctgagggcacagctggtcagttacaagttccccatctctacaataagatgtgtggagtgcttgaagagagtggtgcttatgcgctcagttccttctttggagacaagtccgcatcttctagtttggcc

SEQ ID NO: 281495 - DNA, 974 bp, Zea mays
  unsure (1)..(974): unsure at all n locations
tatgatttcactcgaatactgagcgccttttatttcaaggggtatactttattgacaaaaatacagcgcatcgaatggaacaataggggtatgtccagcgcacatgcaatttttatcacggctgtatcattatatattgtcacgtcgactgctcttttctccgattgtgtcaaggggcctattacattccgtaattcgataatatccacttctgcattgggggtttctgttggctacttcatcactgatcttgcaatgatcttctggctgtatccttcccttggtggaatggaatatgtcctccaccatactctttccctggttgcaatagcttacacaatgttgtctggggaagggcagttttacacatacatggttctcatttcagagacaaccacccctgaaatcaacttgcgatggtttcttgacactgctggactgaagaaatcaagtgcttacttggttaatggaattctgatgtttgttgcatggctggtggcaaggatatttttgttcatgtatgtattttaccacatctatttgcattacggtcagataatgcagatgcatgcctttgggtactacctgacatttgttgtgccatcagtgctctttgtaatgaacacaatgtggttcatgaagatcttaaaaggtgtgatgaaaacactggcaaaatggccatgacgtggatgacgccaagaggatctcagaactatcaacaggatttcgtctttctggcatcattacgtgaccttaatctgtgaagttatggatatcagggtaactagagaaacataatatgtaaagtattagcaaacaagctatattaggtgaaattgccctattttcagtcgagctggaagttcataaccggtttggtttgtaccggagatccagcacgctgttctgcttaccccacctgtgccatgtgtatatctgaagagaattttaatgggtggtttgttcnncagaac

SEQ ID NO: 281496 - DNA, 680 bp, Zea mays
  unsure (1)..(680): unsure at all n locations
atttaacgcatctggcattgtgttcatgggagacaacatgaagccaaacttggaatcaggctccattaatggagaggcaaatggcgaggatggagctaaagctgatcagaagtccagccagcagatgggatctcatgctgcatatcctccatgggcaatgcatcctccatctggtgcagttctttacccaccttatcctatgcaaggcatgcctttctatcctggggtgaatccctactaccctccatatcctccagtggatgatcccaggtaccactagccaggaaggaaatctttgaggaagcactcctcggatagtaaggactcagaaactcttgacgctgaaagtgaccatagcagttcaggtggaggaaattctcatggtcacaagtcacatagaaaggggacagaggtctggaaagaagcctagtgtaggttgttatcaagaatgtgaatgtaacatctaagaaagtgtggctcatcagagagtgaatcacaattcaagtctgaagttgagtctgctgacagtgacaactcacactccaaatcaagagaaagaaagcataaancttcatgttcaaggagggtaggagaactacttttgatcccggagatgagtttacaaggatgaaacatcgatggcactggtgtgagcaggcaactgagtgcattccaaattc

SEQ ID NO: 281497 - DNA, 388 bp, Zea mays
ccttttggtgtcccaaacactgtaggaactgtggctggggagcacccatttggagagcacccttccaggaccttgttcgtaaggaacatcaatagcaacgtcgaggactctgaactgcgatctttgtttgagcaatatggggatatccgtaccctttacactgcaacaaagcataggggctttgtaatgatatcttatttcgacatcagagctgcacggaatgcaatgcgcgcattgcagaacaaacctctgaggaggagaaagctggacattcatttttccatcccaaaggagaatccatctgacaaagatttaaaccagggaactcttgttatttttaacttggatccatcggtttctaatgaagaggttcgccagatttttgggg

SEQ ID NO: 281498 - DNA, 461 bp, Zea mays
tttggacgcgtgggcggacgcgtgggtttttttttttttttaatgtatcgaacccaacataattttatcacatgttcaacggtattcaacattaaatggccatttcatgccttcaaatcacacaaaacatagcattgattctacaaaactgtggacaaaaccatgccttcaaatctaattgttcaatacacaatacttaatatttgaatatataagacttctaagctgttggagcttaagggcacccttctcttccaattccagtcttgttgctcagagtaaaagcttctgcatcccttcctacatctcttgaaggcaaggccaaaatgtttcaggttgggcagcattagatgcatctagatacttgcgtcgcatccaatcttgtgagcacataagcgcctcaaagatctcttgattatgtcggattcgctgctcgctaagacacaacacttggctaaagc

SEQ ID NO: 281499 - DNA, 649 bp, Zea mays
cgcaactcgcaccagcacagcagcaccggcagcaccaccaaccccagggcagccgcgccgccagccacgacaagcttagcagcccctcgcactcgctagggtatttattggtacaatcgggtgatctgcgtgccgcatcgcgccgggacacgggagacaatggcgttcacgacgctcggcggctgtggggcgcaggcttcagtgcggttggctccccagaatggaatccttggatctaattcgaagccattcgcgggcatcatactcaagaaacctcagcaggttggatccctgcccctccgtgcaaggggatccattttttcttcaccacgcaggcttttcccccctaaggcagcagcccctaaatcaggggattccatacgcattgcagtgctaggggccagcggttatactggagctgagattgttcggattctagcgaaccaccctcagtttcatataaaagtgatgactgcagatagaaaagctggcgagcaatttggatcagtatttcctcacttgataacacaggacctgccgagactggtcgcaataaaagacgctgactttcagatgtggatgctggtttttgctgctgccacatgggacaacccaggaaattattaaaagcttaccccgacactaaaga

SEQ ID NO: 281500 - DNA, 403 bp, Zea mays
tggtcgcgtgggctttcatattggtttctaaggggacatccataatatctgtaggtgggattcatacctgggtgggccctgactatggccagctaatttgcactatataagtaaataaggtacttgagctagagccatctaatggttttgcatcacctctggaggaagtgatgaacagatcgcttttttggcacaagtctcaacttgaaaataatccttttggggcatggttggttcgataccttccaggcagctcactggccaggcagcccgaaatcagaagcctgggaacagctgcctgagcgaggcagcttctgtcatgagccaacccaacagccccttaattcgaaaatggagcgcgttgggtttttagtaaccatttggcaaggtgatattttttctt

SEQ ID NO: 281501 - DNA, 482 bp, Zea mays
ctcgcgaggagtcaaaatcagttgttgcagtcaactggccggagcctttggagaaggttcctacttctactgtgatggaggaaagcacagtagaaaatgtggtctctaggatcacgactgaaagagatgttttagtagaaacagatgttgtctcgggcaaggataaggaagatatccgtactttggagtctgagaagtcaattgttgatagcaccccatatgtgtctgatgacggtccgccatcccttactttcagcaggggaaagggctcagatgcaggaaatggcagtggtagtctctcaaggttatctggtttgggccgtgcagcatggagacagctagctgctactcttgatgagttctgggggcatctgttttgattaccattggaagctcactcaagaagctagcaccaaaaagtttggtatcttgcttgggatagacctttagacctcctagcacatctcttagaacggttaaac

SEQ ID NO: 281502 - DNA, 511 bp, Zea mays
ttataaacccaggaagagtgagacaccgatgatggttcaatgactacatcaacactagcttctcatcaccacccgccgtcgccctcattgtagcagtactccttgacaacacactcgatgtgagagatgcagcaagggaccgaggaatgccatggtgggcgcggttcaggacattccgtggcgacagcaggaacgaagagttctacactttgcctttcaacctcaacagattctttccaccgacttaagccaaattgccattgagaacacgctgcatgtcaagtggtccactcaagcaagcattgcctaacaatgaggtctgcttctgatagagtagaacaacaaaaggctcgacaaaggaagaactaattccctgttaccaatcgattgtacataaaacaaaactgtttaggttgaccaccggtgtcgaatcagaatgccatattttgatgtaatatgagtttagagatcttatgaacaattttcaagccttatatgcaagctagctttt

SEQ ID NO: 281503 - DNA, 368 bp, Zea mays
tcgcccacgcgtccggtcctgctcgctccgccgtcctccgcccgccacccgccggactgccaaagcccggaggcctgaggcccgagttacgcgaggagcagcagaaccagcggcccgccgcctcatccctcagcggccacgcgagtgcgcggtcggcgcggagtgagcaggagcaacccgtggctggcggtcagtcgctggctagctggagcctggagttgcgacttgcgagcggcgttagaactcgccccacctataatttttgtctgcctccgtcactgattccacccgttctgttgccggcgacagaggcacagagaagcgccaatccgccggcttgatctgaagcatggacaagcaatctgatg

SEQ ID NO: 281504 - DNA, 539 bp, Zea mays
  unsure (1)..(539): unsure at all n locations
ttttccctcggccctcatcccctgcatctgctccccctctaggcctctaccgaaccctagccggccagctgagcttattgaaggcaagctaggcgagagcagcgtccgccgccgcgctctcatggcggcgcccaaaccgatctgggtgcgccaggctgaggaggccaagctcaagtccgaggcggagaccgctgccgccgccaaggccgccttcgacgccaccttcaaggccctcgctgccgcgcccggcgacgacgacaacgacgctcgaccccgccccgccctccccggccgagcccgcctcccccgactccgacgacgatgccccggccctgccaggcccggtcgacccgtccaagtgctccgccgcggggcctggcatcgctggcggctctgccggaacgccctccactttacncgtcgtcgccaaggatcgccacagccggaggctcaccgccggtggggcgcgcgtgcactggcgtgtctcgcccgtgcgggagtcggcgggacgaactcgaggcactgtaaagacaacggga

SEQ ID NO: 281505 - DNA, 400 bp, Zea mays
tcgtttcgatacaacatacgggcccgcatggcactgcattgtcggcacaagctttggctcctacgtcactcactcgttggggggtttcctgtacttctccgtcgacaaagcctacgttctcctcttcagaactgccgtccagccacttgtccagctacaatgagccctgaaacatgttttactcgaactggtgtagatgcagcgcaaatgtaattttgaacagaatagacgacgctcagcacaccgtgtcttgccgcgtttgagtagcagaggtaatttgatctgtacacaagactgtagaacagccgtgcctctaacgttgtactgcccgaactcctgctttgtaaacgttcttgtgcaatcgtttggagttaaaaaaaaaaaaaaaaaataaaaaata

SEQ ID NO: 281506 - DNA, 616 bp, Zea mays
  unsure (1)..(616): unsure at all n locations
aaagcctatgcttcctaagggtccagtaaggaggttagctgttgatgccacgcttagagcagctgcaccataccaaaaactgcgcagagagaaagaacgtgacaaaacaagaaaggtttttgttgaaaagactgacatgagagccaaaagaatggctcgaaaagcaggtgctctagtcatatttgttgtggacgctagtggtagcatggctctgaatcgtatgcagaatgctaaaggtgcggcgttgaagttgcttgcagaaagctacaccagcagagatcaggtttcaattattccttttcgtggagattatgctgaggttttgcttccaccatcaagatctatagcaatggcccggaaacgtcttgagaagctaccatgtggnngggtggttctcctttagctcatggcctaagtacagctgtcagagtgggtctgaatgctgaaaagagggnccgatgttggggcgtatcaatgattgttgcaatcaccgatggaagagttaatgtatcactgaagagatccactgacncagaagctgctgctgcttcagatgcaccaagaccttcttcttaagacttgaagacgagaatcttgagtggttgcaaaatataca

SEQ ID NO: 281507 - DNA, 521 bp, Zea mays
acctgaagttgcctctattgtccgacaaggcttcggccaaggctgattctgtcagaaacttgccgaaaacccttggttcaatgagagatgggagagtctcgtttcaattgcaacacacgggagaaatctacattagtcaagggtgcaatgtgacgcaaacagtcttcaacgggattaatgtgcttgctggtgttggccttctttccactccgtttacaattcatgaagctggatggactggccttgcagttctagcatgctttgcgattgtttgctgttatactggaattcttctaaaacattgttttgagagcaaagatggtatctcaagttatccagacattggagaggctgcatttggaagaattggccgtctgttgatatctattattttgtataccgagctatattcatactgtgtgggaattcatttttttggagggttgataacctcacatcaattttttcctaaaggtggtttttgattggcttgggaattcatgttgatgtaaacatttttt

SEQ ID NO: 281508 - DNA, 519 bp, Zea mays
tgatgatgctaggatgaccaatataaatttgtttaaggaatttactgccctaagcagggtaagtgtttcctgaactacaattgttttttttggctttttgcagatctgcacatctgaatttcctattatcctgttgggctgcctcttttttggagtgactgtagcaaccacttctaattcattttcaattgtattgaactggatgttgaccttcctagcataattagctctattttttaaaaaaatagttcattatgtatgtttctattttttatggtaccgcctatgtttatataaatttagcctagcactgcttgaataacaagtgattgaatgaggctcatatgcaaccattaaatcaatatttatgaaccaatgtttgtttaagttataaaacatttacaaggaccatcgatgacctcaagaagctggtggtggcgtagatgggaacgcaccccgagaagatttgcatctagaggtggtgaccccacctctgtcctgtaccgccacctagtacct

SEQ ID NO: 281509 - DNA, 877 bp, Zea mays
gtccgtgttcgtgtccgccgccgagtactacggcgctgccggcgggcacctggagataggcggcggcggcggcaaagtcgccgttggcggcgggggcagggactccagcagcgacggatccagcaacggcggcggcggcggcagtcgccaccaaccgaatcgccggaggaggaacagcttcaaccacgggaggcgggaggggggccggaggccggccccggcggggtgatagggaggacagcgtgcgccggaccgtctacgtgtccgacattgatcagcatgtgaccgagcagaagctcgctgaagtgttctccaactgcgggcgagtggtagattgccgtatctgtggcgacccccactctgtcctacgctttgcgttcatcgagttttctgacgatgctggcgcaagagcggcgctaacactcgcgggaaccatacttggctgctatcctgtcagagttttgccttctaaaacagcaattctacctgtcaacccgaaatttcttcctcagactgacgatgagaaagaaatggtatcaaggactgtatattgtactaacatagacaagaaggttacggaggaggatgtaaagggtttcttccagcaagcctgcgggaaggtttctcggctgaggctccttactgacatagtacactccacatgcattgcttttgttgagtttgctcaggtaagtaaaacaaagtctgttattggtatattatgatggaattaagattttagttaatttcaagtgctatcggtacacaataagtgtgtctagcaatgggcattatgtgagtcaagcgaacaaagtctttaatgatatatatgatccattaagatgttaattattctcaaggatgctgtgaagacatg

SEQ ID NO: 281510 - DNA, 390 bp, Zea mays
cccccccctccgctttttttttttttttttctgctcaaaacagtaatcactatcagcacacataaaaagtaggcattacaagaaacacacaagagaaactccaaagttctagaccatataatgcttgcactagttttgccaacaatataatgcaatagctagttaattgaagatgctaagactaacaagtgaggaagcaggtagctgccatacactttgggtggtaacatgatcttccacagaaattcttcagcatcccctaaatagactcttcgttcaagaagagttggaaagcctgcggtcaattgacagcagctgtgtccgaagatgctgattattctccagcaggcggtcattattagtcagcaagccttcggattgttttggata

SEQ ID NO: 281511 - DNA, 374 bp, Zea mays
gctttgaagatacatgaatacattgaatcagacatgaaaattgttgaaaaactcagttgtcataatcaaaaggaagtccgtcatgacaatgaagcaagacaattaccaaataacaaccaggatgtttgcttgaataagaactttttgcaaaaccgatatcatgtggagtctacacgagctcccagagcaacacatcagattcctatatatcaaccgtttaaaattcaaaatactacagagtgtgatagagctagcctaagtaagaacatgcccagaaagcacagttgtggcacttggaaagagtatgagatacttgaccggtcaacaaagcagagaccaattttgtggcccattgaagctagaaaacagacatg

SEQ ID NO: 281512 - DNA, 653 bp, Zea mays
caggaaagcaaaatggaggtggaggtggatgtcgacgacgatacaggcggtacaccagcttccattgcgcagcaggagacccatgtcgaagctccaggagggacgagcatcaaggagagcgtgcaggatgtcgtcctcggcggcggccagcatgttgtcaaggatgtcgcgcttacgatctcacaagcgatcgggcccgtggaaaagggcgtcgggaagatccaggagaaattccaccacatctcgctgaagccaggggacaagaaagagcctcaagttgctgtggaggagcacgtaactgagaacgtggtggatggcaaacctgctgttgcggtcaacgcggaggttggagtccaacagaaggcgcaggatcgtcgtggcgaggaagaaggtgtgcaactcaaaagaacagagaaggaaggacgattgtcacacctgtgagtgccatggtggaagatgcaaaggaagcgggagcaggtgcaggagcaagcggagtcgaaggctgaagctgtgcgagggccggacggtgaacaggggtgattgtgttggcctgcatctaaatgggctgtaagaccaactccagcagcctccgtatacggctctccatccccttatttccctgcgcagtacactattcaaaaaaaaagaaagaa

SEQ ID NO: 281513 - DNA, 489 bp, Zea mays
tgccacgccatcgtccccgcttcgccgcctgcctctccggactcccactctccaagccacctaccttcctacacccaagtaggagtacctacctgcgcagagcccacgacggctcggactccgccgtgtcgacaccgctcctgtcggagcatcgaggctacattaccaagtagtagggaaaccatgggccctgcgccgagggagcccatgaagcagcgcgtgaaccgctgcctgctgcgcctctcggaccgggacacggaggcgatggccgcggcggagctggacgcgatcgcgcgcgagctggacgccgacgagctgccggtgtacgtggccgcggtctccgacgcgcggcccaccgacaggacgccgctgcggcggcactcgctccggctgctggcgctcgtcgccggggagcacccgcgggacgccgtcgcgccgctcgtgcccaggctcctggccgccgcgctgcgccgcgtccgggacccggac

SEQ ID NO: 281514 - DNA, 484 bp, Zea mays
  unsure (1)..(484): unsure at all n locations
cccacgcgtccgcagttgtttttgatacactgtaccttatcattgtgtttggtcatggaactccggaacaagatgtgctggatccaccagaagattgtttcagaatcaggttgatcattacacttctacagacctgtggtcactatttcagtaaggggtcttcaaaaaggaagctcgacaaattcttgctacactttcaaagatacattattagtaaagggcccttaccactcgacatagagtttgacattcaggatttatttggtgagctacgaccaaccatgtctaggtattcgtcaattgaggaacttgttgccgcgttagttgagtttgaagaaaatgaacgttcagccccagtagaaaaggttgaaaatgaaagacactccgacaatgaatctcagaaaagacactcgcgagatgctggtccatctgngaatggtgaaagcgctgcaaatggaaccgagggaaatggcaaggcttattg

SEQ ID NO: 281515 - DNA, 539 bp, Zea mays
tcgggcgacggacgccgcactgttggggaactggtttggcgccgctgctgtatcgcaggtccgcgtgcccaccttccatcccaagatgctgcaggctgttaacgaaatacttgaagagaagacaaggcaacgatctagtccatgtatgaacggcgctagttttaccttggagaagtcaaatatgcacaacgagttacacgcagctctccaagacgctgcggcgctgatgtctgaacagcagcaggctgatccggcgaacggcagcggccgggatatttgctcggcataggtacctcacagtgaagctggagcagtcgaacgccaaactgaagtttgtggcaaaattaccagcactgcagacctgaactcctgatctcacattgagatctgtaaacatggtgccaacacgtggagggagattgacatacgccctatatggcctttacactaatattctgtggcaggtccccagggatcgttttaccttgctatcgtttcccggtaaaaagacactgacagttttgctgagcacttgacgc

SEQ ID NO: 281516 - DNA, 677 bp, Zea mays
cttgacactaggtgctatcaccctcagccagtatggtgaaaatcttgagggtctgttaatactgaggtatctatttgggctcccttctgatcctagtggttccttggaatcatctggtgagagtccaagtgagattgagttattcatgaagacatatgaagagaagatatgccagggcattgaaaattcagcgactgctgttggaaagactcttttacgcaagctactgaattcgatcaaattactacgctcaattcttgagaattctggtcaatccgcagatacagttcagatggttcttgaagaaggcactgactcactgtctgaaattgctcgctctgttgttatgacagctcatcttatgccatccctagccaatgtgtcagtaaatgatgaatctccttttctcttctctaatatgtggaaggttattgttgattcagaagagcctcttgactgccaagagggtgaatttgcaaagaggctagtttgggagttgcctgattcttctcttgatagacaactagcacctggccaatctgccaggaggaaatttgcactggcagagagtgcaagtaggcgtgtaagggataattaactgcctgaacccactgggcagttctcacgaggtttaaatacattcaatgcttttttgggacatacacgcagagacactt

SEQ ID NO: 281517 - DNA, 590 bp, Zea mays
gcgctgcccccgtgcgtgccccgccccggtattcccgtctccccccacgcgcgttttaactctctcaccctccgtgctcaattctgaaaatgcattaatgtctgatgagatgcgtgctgcagtgaggcatgcggcatcacttttcccaactgcaatcattagcggaaggtctcgtgataaggtttttgactttgtgaagctaaatgaattgtactacgctggaagccatggaatggacataatgggccctgttaggaagactactgactccaatggcgtggaatgtattcggtcaactgatgtgcatggtaaagaagtcaacctgttccaacctgctagtgagtttttacctatgatcactgaggtgtatgaaaaacttggtgagagtgttaaggacattgatggtgcaaggatggaagacaacaagttctgtgtatctgtgcattaccgtaatgtggcggaagatgactataaaaaggttttccatcgtgtactgctgtttggaaggttacccttgctaagactacccatggagggaggtttttggggccggcctgtattgattggacaaggtaagctgggagttttac

SEQ ID NO: 281518 - DNA, 891 bp, Zea mays
  unsure (1)..(891): unsure at all n locations
tnatgttgctacttttgggattactaatagaacattgcttgagtgcctggtattttgccttctagatgattattcttcagaagccttggaggaggcctgctctcatcttcccaagatctctagcaaggaaacacatccaaagatagcacaagttcttctggaacgacaaaaatatgatatggcacttcttgtgctaaagtgcacagggcatggaagcttctctgctacagaaaactttaaaaaagatgacatttcatctcttagtgaggcagtgactgtggtccgtgtcagagttgaatgtcccctcctgtcagaagcgtttatgtatcataggagctactgctctaaggtgaaagagcaacactcagcagatatgacacatgctgaggatgcattaaaaaactcttgggtttatcatgttgagatgatggtggccgaattttgtgctatctgcattgaaaggaatttagttgataaaatgattgatctgccctgggattctgaggaggagaaacatcttcacaagtccctcttcgactctgctcatgaagtgcccatgaaaccaaatggtagtctgcttgttgtctactaccttcggcgttatcggtatttggaggcatatgaggttgaccgtagtcttcaaaaatttgagcaaaagatattggaaaatacaactgaagagattgcttcaaaaatcagagcaattgctcgatggagagaaagtttagttgttaaatgccttgacatgcttccggaggtccagagagagaatgtgaaagccatcaacagtggagaacanagtcaatttgttcgaactgctcaattatcttctccagctcatgtgggcaatcacaaagtcctgtcatggacttgagcacaacttttacgact

SEQ ID NO: 281519 - DNA, 1088 bp, Zea mays
ttccacgcgtccgggaccggaccggcgacccagccgagagggagcaagaggtgctgagctatcggcgccgcaggtcttgctccggtcagccacggcggcatcggcatcggcatggcggggcggatggtgcggagctgcgtgcagacggcgctcaaggcggccaactccgtcgtggggctcgccggcatggccgtcatcctctacgcgctctggatgctccgcgcatggtacagggagatcgccggcctcggccaacgccccccggccccctggttcatctacacatttcttggcctggggatctttctctgcatactgacttgctctgggcatattgctgctgaaactgcaaatggtcactgcctctactgttacatgaccatcgtatttatgcttattatactggaaggcgcaatcactttggatgtatttctgaatagcaactgggaagagggtttccctcctgacccatcaggcaagtttggggatttcaagcactttgtgagatccaattccgagatatgtgaatgggtaggcctctcagtggtggctgctcaggtgctgtcaatcgttcttgggatggtgctcaggacccttgggcctgaccgtgagaccgactatgacagtgaagacgacacagccgtgcccgcaaggctgcctctcctgagaaaccagtcccagcatggatcttgggactacgctgaagctaccacgtctcgtcagggacttccgttattacattctaaatgtgttcagcgttaataaaagccttgcgacgttccattgcaggtgaagaacaacagacccttcaggatggtcatagattatatctttttcttcttcttatatggagagagtattcctatgttagaatagcagaagcagcagcagcagcagcggtagagtagttctgaaacctggacgccattcagcatgctcagatatttgagtagcatgtgaactgacccttataaccccgcatactggggaaggcagagatgaggccacgattggtgccttcactgaccaaagacagagatgtttgttctttcccttgttgtttatccatcagctgcaccatccatttt

SEQ ID NO: 281520 - DNA, 392 bp, Zea mays
gcgggacgtgacggcgaggcggcgactagtattaacctaccacaacaccaagtccccccccccacctccgcattgtctccgccgcgatttgtcaacgtgacgtcacgccgcgcctccgagagggagccagtgtggtggaggacacgaggctgccggagccgcaggtgttgctccggtcagcatcggcatggcggggcggatggtgcggactgcgtgcagacggcgctcaaggcggccaactccgtcgtggggctcgccggcatggccgtcatcctctacgcgctctggatgctccgcgcttggtacagggaggtcgccgacctccaacaacacctcccggtcccctggtgcatctacacatttcttggactggggatctttctgtgcctact

SEQ ID NO: 281521 - DNA, 552 bp, Zea mays
tcgttcacgcgtccgcccacgcgtccgggtggtggtggcgcaaatgccttcggagtagcaacatcttatagcaaaccagcagctccttcaatgtccggtgcgaagttccttgtgccaactccagtcaatgttgcttcagaacagatggctgagctaggtgcccacagtgaaaccgcccgacaggatgaatcgtcgtcctcaccagcgatggaaacatcatttagttcgccgccatcactgatacagatgcagtcaagcattccgcggtacccaagcggtgacaacattccacggtacccgagcggtgacaacattccgcggtacccgagcggtgacaacattccgcggtacccaagtatggataacgtcagctcccccacaggcagcattaacagctcgatgtcaaggtcaagagcgtcatcatggagcggaacgtacccagagcagttgagcagcactgccgcttccaggtcacctgatggacagatgacgcagtcaccatcgatgcctggaagaagacctccgcacagccgttccaacagcgcgtcttct

SEQ ID NO: 281522 - DNA, 1565 bp, Zea mays
gttgatcaagttctgttgataaagcagcttattctgaacctaaccctgactcggccaagtcaataaaacatcttattgcagctgcccaagcaaggacgaaccttatggcttctgctcttgcaaaatttgatgggtcttcgactgataatagtgctattacctctacatcatatggtttgccaagactaagccctagtcctgtttttcgcattccatccccacctagaattgcttttcctgagagtcctggtcaacgtattctgaaaagcccaatggagcttgataatggtcatggaaagagtcccaaatctaggcaggccagcggttcacctacgtggtggttctgatgcagcaattgctcgtgatgctttggagggaatgatagagactttatcaaggacaaaggatagtataggccgtgcaacacgccatgcaattgagtgctctaaatatggcattgctggagagattgtcgagcttctcatacagaaattggagaacgagcataatttgcatcgcagaattgacctcctttttcttgtggattccataacacaatgttcccattctcatagaggagttgccggggcttcatatgttcccactgttcaagcggcattgcctcgtcttttcggtgctgctgctccacctggagctggtgctcgtgaaaaccggcgccagtgccttaaagttttaagattgtggcttgagagaaagattatgccagaagacatactccgaaagtacatgggtgacattgaggtgccaaatgatgatactagcactactttaatgttgaagcgaccatcccgtgctgaacgttctgtagatgatcctattagggagatggatgacatgcttgttgatgaatatggaagcaatgcaacttttgagctttctggaattttatcatcaaaagtgtttgaagatgatgaagacttccctcaaaacaatgggtcatcatcatttgtttcacagggcctgttgaaggtgatgtcatacatgaaactgaagataatattgctccagcatctgttgaggaacacattattagagtagaacatgtagctactgatgctgctatggaagatgctttagagttacttggcaacaaccaacagactcatggagctgacattattgaacatgactctagtcaaggtccaggttcagagcaggcattgatcgcccagaatgagcttccccctctacctgatggccctccaccacttccatcagattcaccaccacctccaccttctttgcctgcttcaccaccacccgttacaccgtcaccaccaccttcactctctccagcttcaccacttccgccaccacctcccccactaccatctggaccacctcctcagcctgcaccaccacctttgccaacccaggacccacctcttccttctattccgctgcctgtttcttcatttccgttgtcattgggttatcagcctccagcgccagagttcttcatgacgcccaagtttaatcaattggcccagatgacagttaacacattaattcaagctattggaaattctacaacctttattcct

SEQ ID NO: 281523 - DNA, 761 bp, Zea mays
tttcacgcgtccgggcaaggcttctccatctggcaaccggggaccggacgatcaactcatccgcgcgactccgcttcgtcacgcggcgtcgccggcctcctcccgtgcccgtggatgcagtgcgcagtgcatctacgaaggtgtccaagccgccgccgaaaccgaagcgaagagccaagtcccctatccccaagcgcgtcatctcggacgtgttcaaggaggcgaaagctgccaccaagaggttctccagcccgcagcggcagaggaagcccatgtccccgcggtcaccagacgacagccctccactcggcttcgcctcgctaagagcaccgagcaagctgaagatcaacaccagagcatcctcatggccacgaacaaaccttgacagtggaccggcaagagttgctgcgccggagatccttgagaggtggacggtcgatcgctccgagttgctcatcggccatagatttgcatgcggggcctatagccgattgttccacgggatctacaaggaccaacctgttgctgtgaagtttatcaggcagcccgacgatggcgaggacgacgaactgtctgctaagcttgagaagcagttcacttcagaggttacaattctggcaaggctccaacatcgtaatgtcattaagcttgttggggcctgtaatttgccgacggtcttttgtgtcatcaccgagtttttgtccggcggttctcttgaagctttctttgcgaaagctggagcgtgaaactctttctttgga

SEQ ID NO: 281524 - DNA, 365 bp, Zea mays
agacgcgctggatttctctttccactcggacgagcacagccagaggctccagagagtgtgttccagcccggctcctttctctacgaaggatggtacggcaccagctggtgattccagagcgagcagtgcatctatgaagatcatcggacaagtgtccaaacccgcgccgaaacgaagagccaagtcccctatccccaagcgcgtcatctcggatgtgtttaaggaggcgaaagctgccaccaagagggtctccagcccgcagcggctgaggaagcccacatctccacggtcactagatgacagtcctccattctgctttgcttcgctaagaacaccaagcaagctgaagattaatagcagaacct

SEQ ID NO: 281525 - DNA, 803 bp, Zea mays
ggaaaaatttttgggtctcatggacatcaacgaatcgcttggagtgctagccaagctcagggaagcctcgtggactcctcctgaatctgttcatcatgcaagactctcatatgatgctcctcggttctcatacgatggaaaggaagcaacatcaaaattgagggaggtacctaggttgtcattggacatcaaggaaggtcacctttggaatcgtgaaattgactctaggttggacccaagcttgagttctgcagacagaaacagcaacactgttactgggtccaatgcagctttcgagacccagcaggaacagcctgcctgcaagcggcttcctagcgttgttgcaaagctcatgggtttggaagagttgccagagcataatcaaagtacagcatcatcacatgcatgcaataccgttcaagagaacaagcaagatgccatgttgaactccttgagcatctcctaccagtacgagcatgctcctcaacaagaaaggaatcctgattcaactgtaagaaatttacccaactctaagttccctgtccaaactgcaccatggaagcaacaagaaaggattgtccttccacgaaaactgccaaagggatcaaaaggagcccacggaagagaacctgctgcaccatggaaccagctgaaggatcttgattttcagcaaccacacaaagaccttagagcacttaaacagattttggattctgcaaatggactattagaaataagaaacgggaggagcattatgccaagctaataatggaaccatgagacaaagatggcatgcgacatga

SEQ ID NO: 281526 - DNA, 446 bp, Zea mays
  unsure (1)..(446): unsure at all n locations
agcgtgtgctcctcttcctgtggttcgtcacaaaaggttgcgccccaaggattcgcatttgcttcgacaataacgttgcatataccgaacggcgatgtcatcagcctcacaggagatgggcgtgcggataagaagagctcacaggattctgctgcgttgctcatgctctatgagctgcagcggcaacgtagattccaagttcaagaagtatgaggaatcacctcgtggttccatcaccaaagatgcaatgttaccgccaccggcgattattgcttgggcatcttggagtaatgtcaccgccaaatcagtctttagtcgtcagccgcacgggggtgtaagaaaataatgtacttcattctgattctaaattataagacaccccgaattatgtaatctaattatcataatgtcctataatttgaaatggagcggtgttggtttntnnt

SEQ ID NO: 281527 - DNA, 917 bp, Zea mays
tcgcttacgcgtccgcggacgcgtgggctaagttaaagaagcacgaagaatcacatgtccagctggaatacacagaagttatgtgctgtgagccaggctgcatgaagttcttttcaaacatggaatgcctgaaggcgcataaccaatcttgccatcaatatgttcagtgtgatatctgtggtacgaaacagctaaagaagaatttccagcgccatcatcggatgcatgaaggttcctgcgtcactgagagggttaaatgccacatcgaggactgcaaatgttcgttctcgaagaaatccaatttggacaagcatgttaaggcggtacatgagcagcgtcggccttttgtgtgccaattctctgggtgtggcaagaggttttcttacaagcacgtaagggacaatcatgagaagtcaagcgctcatgtgcacactgagggtgattttgtcgaggctgatgagcagcggccacgttcagtaggtgggtgcaagaggaaacccgtatctgttgagagtttgatgcgtaagatggtagccgctcctgacgatgggcctgctcatgctgatgcaactgaatatttgagatggcttctgtcggtttgattggacgttcaagtgccctttgtgtagttggaaacatcagcgatttacttggcatgtataggaagatgaatgtctctagtatgttatgtaaatgtttatgtacggtatcagaaatacagatcattggccctcaattataaaggcaatatgctgtattggcaagatcttgaatgtaagagcggttgctcatgatcattagatctatgtgtcttcagcccagcttggcaacatgttttggtatgttcgcagttgcagtgtctttgcctttttttgcctcctgctggttgcaggtccaaattggtttcatgacccctg

SEQ ID NO: 281528 - DNA, 646 bp, Zea mays
agaaaaaagaactttcaccatcctccctatcaatacaagattcatctacacaaattataatatactccgtgcgaaggaaagatcaaattagagattcattcgatcaattctgattgtttccttccattccaaaccaccttcaattctgatttctgcgggtgtgggatatcgtccccccttgccattccaaatcctcctctgcaattttctcatggcagctgacgtttccatcccaactcgatccgcgtcaaccgcccgctaattcctcctagttctagtcccctctctcctgcgccgactcatctttttcctcgtgtcactcccctgctgctgctgctgccgggaagatcaaatcccgtcaaaaggctccaaaggatcagagttctgtcaagatggcatgcccaagaggaaggacaccatttcccctttgtttctttctgatgatttgcctcatggctcagctgggagcttccaatgttgtactcatggcgaacaacactaccttgtcgttggatgatgtcgaggcaacttttactccagcagtggaaggttcaggtgtaagtggcgttctttatgctgtggaacctaaggatgcatgcagtccattgagagcgaaagcgattcaaggctctgtctcaccttttgc

SEQ ID NO: 281529 - DNA, 483 bp, Zea mays
catgtattacaccgcatgacatagttctttaactaatggcagtgtacctttttaaacctttagatggctgaattgaagggagaagatgatttatcagcaggctctatgagcacaactgcatagtcaagacataattcttcggcccctgcagacttcaagcagctaagaagtgttacgcccattgacatctttccacgacaagagacctgggcaagagaatccggacgtgctgagggggagaggaaggagaggaggaagatatcgggcaagagaacccattgacatccttggatagggtccgtctgatgccattcatcgctgtctttgatctcgggaaggcctcttagccagctcaattttattagaaattttgttgttttaagatacagagtccatggttactattgtacgcttttctgagaaacttgtcatcccaataatttggttctggagctatatactgatctagcttgttttagtacc

SEQ ID NO: 281530 - DNA, 727 bp, Zea mays
gtttgaaaatttatctggtcatgagagatcctgcatactatctggtcagcatagaacaggaaattgcaactgcagaacaggtagtcgacaaggcaatcctgatgaagaaactagcacaagggctagcatatcgagaattgttatgttagcagaagcactttttgaggttctggatgaaattcaccaccaatctgccgcgttatcgtcatcaagaccagcgttttcttcaattggatccgttcctgctccaagggagattgttgagcgtcttccttcaaaagtgtataggaaaccattgaaataccagagcgaggaagcagcacaatgctatatttgccttgttgaatatgaagagggagattgcctccgtatacttccatgccatcatgaattccatctaacatgtgtagacaaatggctaaaggagattcacagggtttgcccactttgtcgtggcgatgtctgcagatctgatgcactgattggaaaggtcagctgattctgtctcttgagaatgcagcttcctacagagaaaagtggagctctttccatggttctaattccgatacaacctacaaaactattgcacaggatgctcctgtattgtatggaaaattcgcattgaaactggtcacacgctattgtgaatttaagactcttgtatggtggggcgagtttgttgatattggattgttgccttccgtttccttaaaaaaaaaagagaaaa

SEQ ID NO: 281531 - DNA, 615 bp, Zea mays
ttgaatatgaagagggagattgcctccgtatacttccatgccatcatggattccatctaacatgtgtagacaaatggctaaaggagattccccgggtttgcccactttgtcgtggcgatgtttgcagatctgatgcacccattggaaagcccagctgattctgtctcttgagaatggagcttcttccagaaaattggagagcttggcatggttctcatccaattccgatagaaccgccaaacttctgcagctgttattttcatttccccctctcttaatggtcagtacagcatcgcagtcatcctattatgaaactgatgacgacatgccatggtgaatttaggattcttgtgtggtggggcgagtttgttgataatggattattggcttccgtttgggcgattgatgtcgggtgcagccattctggccaactttggttccacgtgtttcctactatttgaacaggggactaaaatcttcaaagttaccgtccttttctaagacgattaggtcttatataactaggtgagtgcccgtgcgttgcgacggaaccatataataacacgataacttatgtacccacgtgtgttataatgtgatcggcatgtgcccgtg

SEQ ID NO: 281532 - DNA, 469 bp, Zea mays
cccgactccgctgatcccctcaccacgcaaccctcgccggatcccggcatgccgtcgtggaagcctctcgctggcggcaagctcaagaagccgctcactgacaagcagcgcgctgccgcggagcagcgcctgtcccacctccgcgcccacctcatcctgcgctccctcgactccccagctggcggggcccgttccctaccgccgccgcaggaggcggcgctcgatgccctcggcctgctcatttttttccgcctcgacctgcagtccggcgccccgcgccccgacctcatcgctccgctcgtcgcctactacgaccgtgtctgcaagcgcagcttcctccgcggcgtccgtgtcggcgtctcgcgccaccacatcatccgcgcgctctgcctaccctcgaagcccgcctctgcggcgccggccccagcagacgtcgatcccgagcggtggtcgctgccgttatgcagct

SEQ ID NO: 281533 - DNA, 503 bp, Zea mays
tctgttacgcgtgggttggcattgtcgtgaggcagctacctttgcatttggttctatccttgaaggtccctctgttgaaaaacttgctccactggtccaggctgggcttgatttcttgctcaacacaatgaatgatgcaaatagccatgtaaaagatactactgcttggactcttgggagggtatttgagcttgtgcattcgccagcgggggcaaacccaatcattaataattcaaaccttcctcgtatcatgtctgtgttgcttgagagtagtaaagatgctccaaatgtggccgaaaaagtctgtggagctatttattttcttgcccaaggttatgaagatgcggagtcaatgtcttctgtgctcacgccttatctacctaatatcattgctgcacttctttctgttgcggaccgggctgattccacccatttcaggctttcggcctttgcttattgaagcactggatgggattgtgagggtcagcaacataccctgaact

SEQ ID NO: 281534 - DNA, 430 bp, Zea mays
ccgagaggtacaagcgatccacgagtggcagatattttgaggatatgtatgctacagacgctctgcgttcttcagacaagacgattgttctacctatgccggaagtggtaaaagctaaggtcaaatgtgatatcactaaggaagctcaacccgggaggggagcacaaagcaccttgagaaaggagattcttcagctcgagaagcacctcaaggatcaacaggctgtgcgtggtgcgctggaaaaggctttagggcctaacgctggccctgtcagcttgtcgccagagaatccaatgccacaggcagctaatgaattgatacgggagattgctacattggagctggaggtcaagaacagggagcagtattctcctgacgctgtaccggaaaggatttgagcagcagcaagcgcctggcgttttccccccct

SEQ ID NO: 281535 - DNA, 490 bp, Zea mays
tctgacgcgtgggcggacgcgtgggcgacgagtcggcgttcgcaaactatccatcatcggattgctctgccatggccgactccggcgacaacgtgccggttaacgcgagcgcgcgaggagggaccgcctgtctgatactgagtccatcaatcgagcacgggccaaccctattctctcccagatctgcttactttgtacgccaccatcgcccactccggcctcagctcctcgagcaagttgccatgtctgctgccacgctgagggagcagcttaacgccctccttagagcagatctaggtggccagggccaagagctgcaggaccgagtggccatggtggccgggcgagagtctaaggaggaactcatgcggttgcgctaggagatcgtcgagtttcacaacgagagggtgcttcttgagaactacatacgccctctactacacaggtcttgtccacatttagttacacgtgctacttcagagagaaattt

SEQ ID NO: 281536 - DNA, 653 bp, Zea mays
tcgtttttagttttacatattttatgttatttgaataactatagatatatatccaaactgcactagtagagaaaactcttaaaacgcatgtcccaatatagatataatatgaaggattattgtgcttaaacaaattttagattatgggcatagcctacttagttcatactgaaatgaataaatttatgcattttcaaactaaattttacgacacttcttgttgtgttttatgtttctattaaaaaacagtcttactgcgttttacaccaaatttatgacactttttgatgtgttttacagcaatctaggtgccaccagtgtgggcgcaacccatcacgaggcgatgctggcgagccagccatagcgcgacatctccgtccgcgtcgttaatccctatgggtgtgcaacagcagcggtattcaacatgttaggtaaaagtatcgatgcagaccaaagattaacccttgatggagacatgttgacccctgaccttgctggtctatttactagaacatcaaagagtcctgcataccatgtttatgtcatgagaagtaataggaagtagaggatatctaggtggttttggcaatgtatttagtgattttaaccattccccctctaatgcaaaggaatacccccttgccttgccatcc

SEQ ID NO: 281537 - DNA, 609 bp, Zea mays
  unsure (1)..(609): unsure at all n locations
actactcgntcgcccacgcgtccgcccacgcgtccgggtggtacttcttaggagtgagtcgaagagtgccccataagttgcagagtagaaacatattccactgttacacacactcctctgctgtccacccccatgattccgagatagtcttatatctgaactgtggaaagtggcggaatatcaaattccaagccaaatagactactttattaagtaaatttcaattccttcaaaatgaatagatccaaatggcccatgaggtaaatataatgaacttgattggcacaaatttgtcatttggttgcactgatttgtgtaacggtttaataccatctttcaagcgggattttagctccttattacagatctgcaagctaccaactcgagttatttgcatctgtatgttgattaaaagaattactttacaatcttctacatgatgattagattataattcttttgcaaccttttatgtgttaattacaagaactatcttgtgtttatcctccatagtgtcatttggttgacgcacctttaatacgctgttaaggcgagcttcaaaattggaacatgtggattatcagttcataaagaaacatctgtctgaac

SEQ ID NO: 281538 - DNA, 646 bp, Zea mays
  unsure (1)..(646): unsure at all n locations
gaatgcagcacaagcaggcgcatcacttcgccttccatgcgtactagacggtgttggtcgcgctcgaggtttacttacggggctccgttagcgtcgagcccccggatgtgcctctccttcgggacctgttcctaatcgagggcaagtgtcctagttctttggaccccggtggctgccacgacacccgacacccgccgcctgctccaccgtcgcggctgctcatgccctcgctgctgacctagcgcatgcaaacctcacatttcgaggcctaaaaccctcagcgtcagtggccggcacgtggcctctctagtgcccatcggtgccatggcagctctcgcgccgtggatcctacggcggcgacccgtccgctctgtcgcttctctggtctccattcgtgattcatggcatcgaaggtgtgggtcctcttcctcatatccttcagcatcgttcaagtgtttgtggggatggtttggaccagaggcacacgggcggaggaggccgtggtttcagcagcccgtgaggtgcgggagcacgacgatcacacttgatacagatggcaagtttgcgaggtttggagtcggcgatatgggtgttaccaagcagaagtggaggcagcagccgncttcaaagaagaagatgtcgagaa

SEQ ID NO: 281539 - DNA, 532 bp, Zea mays
gattgtgctgcgcctgcgctgcgcagctccagcaccagagcaccagctcgatcgatctccctctccaatgccgtctttcatcgacggccccactttacgggcgctgctccggccgtccaccaacgggcgccggaccaagatctcggacagcgggggcggcggcggcggcgggggcatcttcaagatgttcaagctcatgcccatgctctcgtccgggtgcaagatggtggcgctgctgggcaagcacaacaaccgggcgctgctggccgaccacgcgacgacggtgacgctgttcgggccgcgccggggccgcgtgagcctggccatccacgaggacacgcgcgcgccgccgctgttcctcatcgagctgcccatgctgacgagcgcgctgcaccgggagatctcgtccggggcgctcaagctggcgctggagagcgacacccgcagcgcgcgccgccgcctcgtggaggagtacgtctgggcccgctactgcaacggccgcaaggccggatacttcattcgcaggaaggag

SEQ ID NO: 281540 - DNA, 629 bp, Zea mays
tcgtttgtagcttgctcgtcttgctgaaatggaggttaagtatcgatgcaaccaaatcctagagatcggtcttccaatgggagggcttgcaaaattgtttgcccaggactgggagagggtgatgtcaccatggttatgccagcaacacttgctcagtacttgaagatcattcagaatccaacatacgcggagctccaaatggctgccaaccaaggccgcaggtgcacatgggagaagctctccgcaatcagagcgaactgcgccattgaacttgcactggacgaatccatagcggttctaaaccacaaacggaggctaaaacgaagcatggagaggacggcggcggcttcgcagggtcactctaactatgtccgacccaagactccgaggaggataccgtcatggagccgcatcagtcgagagaactctttggagtctctctcggaagagatctctgcggttgctgcttcgtccatgcagcaaggcgctgctcttgttgtcggcgcaccaccaacgactctttctcagcatgttcggcgcagttctcatgacggaagtgagagtgagtcagaaaccattgaccttaattcctggaccaggagtggagggcctctaatgaggacagcgtc

SEQ ID NO: 281541 - DNA, 573 bp, Zea mays
ttatgttgtcactgaagaaactcgttgaggggctggggtcggagttcactgtgaggggcgcggactgcggcaagttcctcaccgaggagaaggcaaagaggtcgtctggagcttgctccacatggacagcggacaccacattgaggctgtaaggcggagtcggcttgctttaagagtttgaagttatacagtagaaacttactattcaggctacggctccattccggccctcagtcgattgtggggtgccacatcgccatatagcatctaactgctttgtgtaggtagtctattttggtgtttgaatgcactagagcctagttagctgctaaaattagctgaagacaaccaaacattatatctgttcagctattagctaattttagcaatttagctaacaattagctagttatttgttagttagctaattttagtagcattttttagccaacaaactattggttctagtgcattcaaacaccccctatctctagctcttctggtaaaaacatatttggcgctcagggacaacattctaccgtagcatgtataaaattcgtcttggtcaggtgt

SEQ ID NO: 281542 - DNA, 727 bp, Zea mays
tggatgcgtgggcaggaacactgggttatgggggtcttgagtatgctatggggggacaggtgacacgcaaatgagatgtgtacagctttggcgtgctgcttctggaaattgtttgcgggagatcaaacagcgatacaagattagcatacggagatcagatactccgcgaaaagacatggatgcactacgagcaggggagtctggagaggatcatagacaggtccttgggcggcggcgacctggacgtggcgcaggcctgcaggttcctgaaggtcgggctgctgtgcacgcaggacgtgacgaggcaccggcccgacatgccgagggtcgtcgccatgctgacgggcgagtgggacgtcgagccggagacggtcagcaagcccgccataatcagcgacttcatggacctcaaggtcaggagcacgaggaaagcgagcgacaacgtggccacgccgcctacgtcctcctcgacgttcctgtcctccctcatggcgcactcctcgcccttgctgtcgaacgagtccacgcaggcctccatggcgttcaccggggtgtcggatcgcgagtgatccttgatcccttcgtcaaagactggtcaggctggctggtagtgacctgagttggttggaggtgtggaagacatgtgtagtgtaggcaggcaggcacagatggattcccctgcttcgtttgtaggccccacctcattgttgagtcaaaaggttcaagt

SEQ ID NO: 281543 - DNA, 453 bp, Zea mays
ttatgatgccagttctcgtcgaccacggtgtgaccgagcgggtgatggagcagcggaaggtcggagtcaaggtgcggaaggagaagagtgacgaagcgttccttggtgacaacatcgccacagcgatacgggctgtcatgtgcgaagaagagagcaagaggatctttgtggccaatgctaagaggatgcaggagattgtggcagacgacgagtgccacaagaggtacatagacgaattcgttcagagcctgagaacctacaagaactgaaacatgcatgctgagtgcactcaggcagcatacttggcaatggcattggcgttacacaagtgatccgctggactccagctaatagtacgatgtatcttattttgctgcaatatgtaactttatcattgtttggttgtaaaaatatttgaatttgtttttgcggccccacaaaaaagttattcat

SEQ ID NO: 281544 - DNA, 400 bp, Zea mays
ttccttaataacaatgcaaacacgaaaaaagggggctgcaaaaaatgcagtggggtatcatgccaatcctaagacaagtaggccatccagaagggcaactcaatctacagttgctgaaaagaaagtatctgatctcatcacgtcttcttccaagaagcagagacctgttggtgtcacttccaagaagcattctaaaggaggaaggaagctgctagtttcatgtgatacaactgatgctggaaatgatgcacctcaggtaccccctagcgtcttccctgatctgcaggcccagcattctgatggtgttgcagatgatcgtcccaactgattccatattctctccaacataccatcatcacaaggaaggtggtgtgaataacctatccaaaggcttagaaga

SEQ ID NO: 281545 - DNA, 526 bp, Zea mays
cggacgctgggtcgtgcctgacgacatcgatgtgcactgccttgctagtttgatcaaggcctggttctgcgcgctcccggggggcgtgcttgacaggctttcacctgagcaagtccttcactgcaacacagaggagcaatgcattgagctcgtgaagcttcttccagcaacccaggctgcacttcttcattgggtcgttgagctcatggctgatgttgttgaggaagaggagtcgaataagatgaatgcaagaaatgttgccatggtttttgcaccaaatatgacacagatgtccgatcctctgacagcactgatgcatgctgttcaagtgatgaacttgctcaaaaccttaattctcaaaacacttcgggaacgcgaggatgatgatgcaggggcctattcttcattctcatcttcgttatcttcatctggtgaacttgacgaggatgatggccatgaccaacaggatgatgaaaatgatagtggcagtgagaaaaactataatggcagtgctaacggaagacca

SEQ ID NO: 281546 - DNA, 447 bp, Zea mays
tttttcccctctcgcccccatcttctcccccgtcatcaactccatatgcagcacggtggcctgcgggcagggcaactgcacgggggcgccgggcacgctgggctaccgctgcgactgccgcccgggctggacgcagctccacgtcggcgacagcctcaggttcctgccctgcgtcatcccaaactgctccatcgacagctcatgtttcaatggttcgccggcgccggcaccggcgctagcgctgacgcctttgccgccacctaaaaacttctcgctcgacccatgcgagctagcgtactgcggcgccggcggcacgtgcaggaagaacggctccggcatgagctaccactgccagtgcaaggagggggacagcaacctcctcaacatgaccgcgatgccttgcttccagaactgttccatcggcgcagactgcgcaagcataggtat

SEQ ID NO: 281547 - DNA, 584 bp, Zea mays
atgcagcagcaccctgggatttgtggatttgtccactaaccgactcacaggcgatctgcccagctgtctgaacggtaatttgaataacaaggtcgttaagtttgatgggaattgctttagagttgaccctgcccaccagcatgaagataaatactgccaacaatctcataatgggagaggatcaaaaaaggatgttggacttgtagtcactgttgttggcatattgtttgttattcttgtgctttctctgttgttaatggcttccaacaaaagaagctgtcagaaagttctggccgaacaacagatccagcaaaagcgggcacaagataatttgttgtcaggaatgtcgtctgaactgctggtgaatgacaaggtgcatatactcaagctgtcaagttaggaacacaaatacaacccgtcatatcacatttttttctttagaagaactcaaggaagcaacaaagagctttgaaaggtcagcatttttaggcgagggagcaattggaaagctgtaccagggaaggttagagaatgcaaccctgattgccataagatgtttgccattgcaccagcgatattcaatt

SEQ ID NO: 281548 - DNA, 432 bp, Zea mays
gtttgagcacaggcttgggggctttttcaagcatcagatcgagacgggggcttccatggcctacggagatggtttcagaactgggaatcgagccgttcttcattacggcttgaagcgcacccttgagcatatccggctaactgggacctttccattttgaagtagcatggattcatattttgggaaagcttatattatatacatgattttcttccagagttccattacaaccaaagagataaattgtaaaaaaacattctttccagaatccagagatataatatctatgaaggccaaaatgaagtattaaatgattgagatcgatggtcagtctgcccaatcattttgtattctgatcaaactctggaatgaaacaatggcaatctttttatatggtgtcagtttctctaaataccagtaccattttacagt

SEQ ID NO: 281549 - DNA, 460 bp, Zea mays
tctcacgcgtccgaaaaattcgcagtagtagcctaatttctttcctgctctgacgtcatcctcctctgggcgacacgggcggctccccatcgaccgcacccaccgccgccggtcttcacccccgccgtcgccggagcagctcgccggaagttcgacgagcagcgaggagggcggcggcgggactgctctctcactcatttccctcccttcttccacccactccactcctccctcttcctggaggtggccggcgacctgatccgccgctgggaaggccggatcggcgggctgactggccggatctaggggctggtcgccgtccgccgctcctccctgctggcatgggcaggtggccttgtggccgcaaccatggtggctcgtgcggctagcccgtggcggtagtgcccgcgctcgcgtggccatggccgtggctggctcgcgacgttggcgcccacgcacg

SEQ ID NO: 281550 - DNA, 499 bp, Zea mays
ttcgtttattgattatccttacatggctcgggccttgagccatatacctcggatggtcgagcctactcacaaggccgcatccagctttagagccatgcctctggcactgccttttcaaaacggacatcggcaggctgctagtcttactcagagagacatgaatctagacaggcgccctgcaaagttgactaagccgacaggcaaggatcccccagaaaacaagaacaagtcgggcctaacggatctcccagaagacaagagcaaatcatgggatgcggatgcatccttctcgttgttccaattcaacttgccaatagcttcgcctgtaacaccatcatcaaaagataagagcggagagctggccgcaaggacgccactggctcaggtgcaagctcagctttgctcgagggaacaagcagatgtcaaggagtatagcctggtcttctcgaaggataatggcatattttcgttatgtagataaaagaaaaactgtgacaaa

SEQ ID NO: 281551 - DNA, 580 bp, Zea mays
taataaaccaggaaaacatgtattccacattgtgacagatagtcttaactatgctgcaatgaaaatgtggttcctggctaatccctttggtaaagccgctattcaggttcagaacattgaagagtttacatggttaaactcaagctacagtccagtgctgaagcagttggaaacgcggtttatgattgattactacttcaggactgggcatgctaggcgcgatgaaaatcccaagtttcggaaccccaagtacttgtcaattctcaaccatctgaggttctatctccctgagatcttcccaaggcttaacaaggtgttatttctggacgatgatactgtagtgcagcgagacctaagtgcgctttggttggtagatctcaaaggcaaggttaatggtgctgtcgagacctgtagacaggacttccataggtttgataagtacctcaacttctcaaaccctcttattgccaagaattttgatccacatgcttgtggttgggcatatggcatgaccatgtgggttttggccgtctggcgatagcaaaacatcactgaggtctactatacctggctcatgttg

SEQ ID NO: 281552 - DNA, 592 bp, Zea mays
tccacgcgtccgcaacactgaagttagggaccaccctgccgatgagattcaatgttgtgacagcagttgtaaagatgtgcatgttactaaagatatcagtcctagcacatgtcgtaagagtgattatcctgctgatcttaactccgtgtcgtttgatgaatctaaagcacttgcacaagccttacaggagaagatggaagcacttatgctcttctcacaggaacaagaaagatacctattagagaaacagagagacctgattgttatcgaggaactccagaagaacttatctcaagttaaagatgaaaaggtgaaggtcctgatggaattaacaaaactaaaagaacaatatttgctattgaagggctctgctgtcaaggaaggtcatgatactggtgattcatctaaactcattcctgggcatgaccaacaagggatgctgaagactatgctgaagaggacatctttaagacactggatgaggaaagaaagtaatactattggacatgggagctctgatggaaatgatcataccagtttgcaagaacattcagtggatgttgcaagattaaaagtgaaaatgctatgcttt

SEQ ID NO: 281553 - DNA, 843 bp, Zea mays
ttaggattgttaggttcttggacacttggggcatcatcaattaccttgcggctgggtctgtgcaccgtggtctgaggatggcaacttcgcttctaagagaggaacctacaggggaactgcaattgcttacagcaccattgaaatcaatcgatggtctaattttgtttgaccggccaaaatgtagcctcccagtggaggacatttctaggatggcagcgacttcatcgaactcggaggctgtggattttgatgctgcattttcagacttggatggaaagattagggagcgtttgtctgagagctcttgcagttattgcttacagcctttgccaagtttacattaccggtcgcaaaaggaggcagatatttttctatgttctgattgcttccatgatgcgagatatatcactggacattcttgcttagatttccaaagagttgatggggataatgatgaatcagaaaatgatagtgataaatggactgatgaagaaacattggtgctgctggaaggcattgagaagtacaatgacaactgggatgacattgcaggtcatgttggaacaaaatcaaaggcacaatgtatctaccattttattcggttgccagtggaagattgtttgctagagaatgttgagatacccaatgcacccattccatttcgaccacaaagcaatggttatcaatgtttagattccaatggcagcacatcaggagctccagttcaaaatatccaacaaggcaatgagcttgcgttcataaattcttctaattcggtcatgtcactggttgcatttttggccttttcaattggacccagaagtgcagcatcatgcgcacatg

SEQ ID NO: 281554 - DNA, 479 bp, Zea mays
  unsure (1)..(479): unsure at all n locations
cccacgcgtccggcgtactgcgggccgctgccgatcgagtaaaaaaaaaacgccgggcatcggccgcctcctacccccaaccccctccaccctgtcctcggacaggcggcgtcggtgcgccggcggtgccagcgcggaggcggaacacccagacagcccggaccttcagctgtctgcttctgcgtctggcttgcgggagcgatcccgtcttctgtcgaccagtcgtggactcaaactagagctggcttcgccatagacttctggaggaggcaacgggattgggaattggaacatggggagttcggtcggctgcttgggaggcggctccaagtcgaggcaagatcagaatggtcaggtcgtcgcgggttcgtctccccgttcaggtcatgaattatcaagacctggaaataatgtacatgtattctccctaaacgagttgaagactgccacacgaaactntcacatgttgaattgcattg

SEQ ID NO: 281555 - DNA, 850 bp, Zea mays
tcaatagcttctggtatcttgatcagctggggcagtcagcaaagtatgacaccaaggtctactgcagacagacgctgattggtggcaattacggccttcttgacaccgagactttcgtaccaaacccggattactacagtgccttgttgtggcatcagctcatggggacaggagttctttctgtagacatcagtggttcttcgtacttgcgcgcctacgtgcattgcgccaagcaaaagggtggcgtcactcttctcttgctgaacctgcaccgaacgatgggcttcatggtctcagtcaggaacgacctaaatgtcaacctcgcagaagggcaagggatcaggagggacagtgcctttgtccatggcctgaagaggacggtttcttgggtcgggagcaaagcctccgatgggttttccaagagggaagagtaccatctctcgtcgaaagatgggaacccttttgcccggaccatgctgctgaatggagcccctcttgagctccctgaagatggtggcatcccttcattgtatccagtggaagtttcagttaactcgccaatctatgttgctcctctgaccattgcgtttgtcgtcttccctgactttgaggctgaagcttgtggccgatgatcaactgtacatagaatatcacctttttttgctataaggcatctaaagaacaaaggtcattgtaatgtaaagacgtgttcgttttctgatctgtgccccaatcgggccatctacgttttcccaacgaatagtctccaggtgatgtcatactgatcaatgcctcgtcattgtactttgtacatacagttcatcatctcagaaaaaaaatgttcagcatc

SEQ ID NO: 281556 - DNA, 423 bp, Zea mays
ggaccgtgggcgatttcgtgcgctcctccccttaccggcgagctcgtcggtctggccccgctctggtgaccgctgcggccatcgaagatgcggtggattgcggctcctcatctgtgagcgggacgggtgtgtggaagagggctcccgccggcgagaaggtcccctcccttctcaatttggcaccgcttaggggtcaagctctgggttgtggcgatgaagcggtggcggcgacgcggcagcagacatggtggttccggccctccatccgccttgacggcgcgtgctccggtgccagcgaggggccagtaaagcttggtttgagcgatttgggagcaaccatcctcaacctcgacgacgacgcatctgacctcggtggcagcgatgtctactggtacagtctctttcccttctctggcgcttgct

SEQ ID NO: 281557 - DNA, 684 bp, Zea mays
  unsure (1)..(684): unsure at all n locations
ctcaatgtctcctgcgattcctgtcctggtaaaggatgcacaacgccagcctctcccagttcagacgaaggatgtgcaaacccaaacccaagccccaaaggaatcacttgcagatccaattccagcaatcaggcctgcagtcaagattgatttgcctgctcaaggcaagaaggaagcttcagctggtgctaccagcgaagcgccatcttctgccactggcaataatggtgctatggaacgcggtacatcatcagacgttctcttggcaaggcgatcaagggctgctgtggacggggatggcgacaaggtggaagcaaagcacgaggccgaggctcaagcggtggcagaggcagccatcaggcagctggagatcaattgacttcagaaaatgcgcgccaccatcttctcccagattttgtaattagctgccttgcctcctgtgcacattccgttctgcttagtccgtgtatgtcttgttccggttagggctgtctgggcaagctgcattgtggtaggaacacctaggttttctgttgaggagaaaaaaacatggagtggtggtaggcggtttgcccagtgtttagttggagacggttattacttcgctggatatgcaattggtctgcttttacccccgaaaaaaacaccaaaaaaaaaaaaaaaaaaaaaaaaaaaaaaaanaaa

SEQ ID NO: 281558 - DNA, 662 bp, Zea mays
gattcatacggaggtggactgcgagtacctcaagcgatgctgcgagacgctgacggaggagaaccggcggctgcagaaggagctatccgagctccgcgcgctcaagacggtgcaccccttctacatgcacctcccggccaccaccctttccatgtgcccctcctgcgagcgcgtcgcctccaactccgcgccggcgcccgcgtcatcgccgtcccccgctactggcattgcggccccggcaccggagcagaggccctcgtcgttcgcggctctgttctcgtcccctctgaaccgcccgctggccgcccaggcgcaaccgcaaccgcaggcgccggccaactcgtgaggcgctctctactctatctccggcgacgcgaacggaggtggatctggctgtaaatacgatcacctttttttggcttcctttttcttttgttttcacttgatgcggttcttgaaatttttttttgtggattgccgatgggttggtttaccggtttattagagcgcatcatctggccgtcggattggactgcggacggccgggtgcagaaaggaagtgctgcgatagagttcattaacctcagtagcatcgatcatgttttgttaccttgctatctatcttggggtcaatataggccttgaaatcaaaagttcccctg

SEQ ID NO: 281559 - DNA, 542 bp, Zea mays
cactctctccgtccgcgaatccgtaaatggaaggggacgaaatgctcagggtgaagctcggcaggcagggccttgaggtgtccaagcttggcttcgggtgcatgggcctcactggagtgtacaacgcccctgttcctgaccaagctgggatcgacataatcaagcacgcgtttgaggccggcatcaccttcttcgacaccgctgatgcctatgggccacacaccaacgaggtcctgctcggaaaggcattgaaacattttcctcgtgagaaggtgcaaattgccaccaaatgtggccttgcaggatttgatgcatgtggcatgcgtgcgaagggcactccagattatgttcgagcttgttgtgaagcaagccttcagcgccttgctactgactacattgatatatactaccaacatcgcattgatcagtcagtgcctatagaggaaactatgggagagcttaagatgttggttgaagaagggaaagtgaggtatgttggcttatcagaggctagtgccgataccattcgacgggcacatgct

SEQ ID NO: 281560 - DNA, 626 bp, Zea mays
caaacactaagacgaaccaggcttccttcccctctctcaattaatctgcagtacctccaacctcactagtcgtagcaacagcccgctctctttgtaatcaccgcccccagacccatctgctggactgccgctcggtggggcaacacatcttggacggcggatctcaagagggcaagggagcaagccttcctgtgagacgtcgacctgctgctgtccctcttctcccgcgccgcacaagactggtggcagcagcacgcgccacgatcctcctcgaccctccggcctctcccctccctgcacctgcagagagcgccgcaagctagctgcagaggagcaaaacagcaggaggaggacgaaaggaagaagaggaggcgtgcggctgaatcctccctcgatcaccacacgcgctctgcccttccccgccaccgatctgccacctccgagcttgtccgccaacgccggatctgccggccacgtgatgcggctcaggcgacggacagagcctacgggcagcggcggcgccaaaacctagctctggataccatgtcggttttctggtaggggcgccttcccttctggtgcatgtataaaaaagttccaagggagagcagtttgctgaaaattta

SEQ ID NO: 281561 - DNA, 737 bp, Zea mays
gttcaattcctccttaagcaagctggcattgataagagaacaggcgacttgtatgggaaccgtgatctgttaaatattgctcgcaatatggctcgtgggcttaagggagttgagaatgtctacacccaacaccagcctcttttgttccaaacgatggaaggaattgttaaagggagattgcgagatgctgactatccacttgttggcaatcatttccagcagggcaggcctcaagatgttgtcatattcattgttggagggacaacttacgaggaagcaaggtcggtagccctttataatgcggcaaatcctggagtccgttttttccttggaggttccgtggttctaagttcaaagagatttcttgaagatttgggagaggcacaaaggatatcaaaatcaagcactataatatgagctgaatggttttatctcccatttgaagagtatcatagtatgatttgacagtgttgactcaattttgcatagaataaaatttgtgataaatctgtaacatagttctaggtgcataggatcaaatttcttgaagatatgtagctgctccagcttctaacaccttctcttggtgtattgtctgcaaaagcaagagaatatcagtgtacaaattgattgttagcgcttgtgaagtcctgctagcgtcacagataaacaaatggcaagggcaggtgcactaaacaaaagtttcctcctaatctttctttttgttgattgttctt

SEQ ID NO: 281562 - DNA, 1120 bp, Zea mays
tcttaggatgctcatgaattcatgaggtttgcaattgataagatgcaatctgcttgccttgatgaatatggaggtgagaaggctgtagatcttagcatccaagagacaaccattattcagcacatatttggtgggcggctgcaatcacaggttcaatgcaccacatgtggaatggtctcaaaccgctatgataatatgatggatttgactgttgaaattcaaggtgatgctgaatcattggaacggtgcttggatcagttcactgctgttgagtggcttgatggggataataagtacaaatgcgatggatgcaacgactatgtgaaagcacggaagcacctttcagttcagcaagctccaaatatacttactatcactctcaaaagattccagactggtagatttgggaaactaaataagagagttacattccctatggagttagatctgacaccatacatgagttgcactgatggaagtgacctgtatgatctctatgctgtagtcgttcatctggatatgctgaacgcatcattctttggacattatatatgctatatcaaaggttatcaaggaaggtggtataaaattgatgactgcaaggttatggttgttgatgaggaggaagtacatgctcaaggcgcttatatgcttttatatagcaggagaacagctcgtcctaggtcacttcttacagttgatgagtccgtgaaacagcaacaacagtgcaaatcgctcctttccaatgggcaaagccacatgatactagcagatacaacattgaactgtgaatcatctttgaagattccagaagatatgttacaacaggattgtgaatccaataatgaatccttgcatgaaatgggtattaaggaccaggggtcagacatggatctacgtacaagcattgaagatgacaaattcattagcaatggaaatctacgtttaccaggttcactagtatcacatgttcttgaagatactagagctccagattctgtattagaaggctctgtgcaacttggccctcctttagaaggtggtcctactacgatgagctctgtgcagtttggcaactgcacaagtgaagcatcttcggaacattcctttgcagagcaat

SEQ ID NO: 281563 - DNA, 588 bp, Zea mays
gtttatcagaagtcatgtgggaaaactgaagatgtcaagaacttcttcaggaagaaaaaggtcaaggtcaaatgctcagaagcctcctatctggcaagaagtggagagatcctctttctctgttggtgatcgtatggacatactaaatacatctgcaaatgatctaaagacgcatgagctagacgaggatcctgaggtggaaagtatggctaggatgtttagtagttcaaatacttcatctttattgttgccatcaagtgactctgcatattcttcaaattattgtggtgccaatgtgctacaagactcttatttgaagttaagatgcgaggtggtaggcgctagcattgtcaaaagcggctctggcatgcttgctgcgtattctatttccgtgaccgacgccaatggtaatagttggcccattaagaggaggtttcgtcattttgaagacctgcatcggccgtctaaaagagtatgctcagtacaatcttcatttacctccaaaacatttcctctcatcaggtttagaggtttctgttgttcgagagagatgcaagctgctcgacatatatctgaagaaccttctgc

SEQ ID NO: 281564 - DNA, 601 bp, Zea mays
aaagaataaagagagagcagtatcagtactggactcttctacgaggagatcagctattctagatgcccatgctgaaaaaataaagcttcagatagatgagttctcggcagagcttgaagtgatccaatcttccatagaaactcttcgccagaagaaactaaatatgcaaaggctagaaagcaaacatattgacctggataaggggtgcacatacagccatgccacactgtcaaattgcgcctcaaatgcttttggagatgatttatacggcttcagagaatttacagtgttggatatgcaatctgctacgtgtaaattctcagagagcttcaggatgtggtcgcaaggtcgtgggtgtgtttacaaaggagaaattatgaacagaactgtgatgatctataagctgcactgccatagcattgagagcgtgaggcagtttcagcaagaggtttatatcctcagcaatgtgaggcaccctcatctagtgacactggttggggcgtgcccggaagcgctgtgcctcgtttatgaatacctgccaaacgggagccttcacgaccgcctctttagcagacgcagcagccgtcacttgccgtggaga

SEQ ID NO: 281565 - DNA, 645 bp, Zea mays
ggttgatactgaatccctgctccaggccatcttccagtcgaagcgatggggcaccttggtgttcgtcctcctagagatagtcttttggtgcttggccgccggcttcctgcacatgaaaggcgtttacttgaaactgtagaaccaaatcgtggacagttctctgatggaacggaattgacgtcctgcaaacattggtggaaggcccggtatccctgttttttctgtaaatgcaacgcgattctggaaccatgggtgtagcggttgattacaggacgttgtggtcccaaggtcctccaactcatccgcctccatgcacaccaggaaaacatcttgctgaaagtcacaagcgtttcaccacgtgaagacccagtctgatggtctttcagttgtttgggaaaactgtttctgttttcctgcagaaatcatttctagtttctagtgattttggaaaccaggatgtttctgtttatcacttgtaatcttgggtaaatctcaaaaacgtagtgtattttgctaatgattccacgatgaagtgagtgagtggacatgtacacagtagacagtatgaaagtatgtatgaaccgtcgatcaccgtataatccatctactccaactcattgcagtgaaatgctgtgttgtacctcc

SEQ ID NO: 281566 - DNA, 542 bp, Zea mays
gctctccaagagcatctcagttgtactcaacagctagcaaccacagtgccaagcctcccagcagattctcctcttatgaagatatgtctaatagtgggacagttgttcggacccaaaatgaagacccagaaactccacgatcttcaaggtcaaggctggggatccaagaaaaaacatcaaatgctcctcttgaggatagtgccattaaccttgcagaggcaaaggctgctttgcaggctgggttaagaaagggaaatgctcgagaaagaccttttatcaacaggcatgaaaagggatcacatgagcatagatcttctggagtaaatagtcaagaggttcaaagcgaggatgtggacacgcagaaaggtcacaaattacggcaattacctgatgggcagtcagcctctcgtgctagttctgtagcttcacctgcaggctcatcattgctactcccttccctgaaagaggctactggtgacaagtttgatcggcctgctgttcatgcctctcttgattccttgatggatttagaacgtgatata

SEQ ID NO: 281567 - DNA, 369 bp, Zea mays
ttcccgctgcgacggagaaggcctgcgaatctgtgattgtggctagaaacctcgcgcgtgggtggctggctggctatctgtagaagtgcacagtgtagacaccagcccagcccccgtgcccactcccaccgctcttgctttatgctgtcaccacgtcgctttctttcagtccattccggtccagcccagcacgatagctcggggtccgcagcaagcggactgctactgcttggaggtgcatataaactccacgctaatctcgcttaagacgctggttcacgtgctgcgacgcgggccgtggcaccccggctgtccgttgttggaggcacacacagtgtcccagtgtggtgtgtgtctttggctctttgc

SEQ ID NO: 281568 - DNA, 455 bp, Zea mays
tttcccacgcgtccgcatttggctctgccctgctggtcaggcacaagctggagaggaagaagtatgtgttgaaaaagatccgtcttgcgcgtcagacagaccgcactcgccggtccgcccaccaagagatgcagctcattgctaatgtgaggaatccattcattgtggagcacaaggattcatgggtggataagggttgctacgtctgcattgttatagggtactgcgagggaggagacatggctgaagctattaaaagggctaatgatacccacttttctgaggagaagctttgccagtggctagtgcagcttctcatggcccttgactatttgcatgcacatcacattcttcaccgtgatgtgaagtgctcgaatatatttctcactagggaccaaaacataagactcggtgactttggtctcgcaaaaatattgaccgccgatgatttggca

SEQ ID NO: 281569 - DNA, 395 bp, Zea mays
tgcccacgcgtccgctctttcttccttctctctactttcttcctcaccaaattcggatcaaacaaattcgttaaataatctcagaaaacacaaggttaacgggatcgaagggattaaaacgaaaacgttccgatcctgtggccaggtctcggtgctaatcgtgtgttttttttggggggtgggattttgtgatctgttgttagggtttcggatctggaggattagttatcccaagttccgagtcagaccatgaatgagcagctggtgcgaccaccggcgccgctgccgttccaccagatgtgggcggcggtgccggcgatggagccttctttcaagccggtgcgggcggcgtggaagcgggcggcgcggacgccctggaagcgcaaggcccagcc

SEQ ID NO: 281570 - DNA, 543 bp, Zea mays
tttcgctctaataaatcttcctcccatctctctcgctcccaaccctcaagtccccaccaacccaaccctggtggcaccggccgcacacacgaaagcaagctagctagtcactattagagctatttggttgggagcggtttagctgagcaagatcgaactggcattgtcacacacatctcagcactcagctccttgggttcccctccatgagcagcagctgagcagccacacattgccgtcttccttgctgcacttgtagttacagctagatccattgatttttttggcaacaacaagagcaggagctactgagcaagaagtgcgcgtacgtgcttggtgagtgttacttatactagcttgcgatggagctggtgactatggtgacgctgacgctgctggcgtactcggcggcgatgctggcgcggctttggtggcgcgcgcgcgcggcgtcggtgctacctgctggctacgtgtgctacaaggcgacgacgacgtaagctgccgacgacctggcgcgagatcatcagcggacagctgctgggc

SEQ ID NO: 281571 - DNA, 829 bp, Zea mays
  unsure (1)..(829): unsure at all n locations
ggttctggttgcacaattcttctatttgtgcatactttgtccttagctgaaagctctgtcctctcaagtgttggtggcttcggaaatgctggtagtggtggaggtggagggggaaggattcatttncattggtctaacattcctactggagatgagtatgtgcctgttgcagctgttaagggatcaatacttgcacgtggaggagtcagcacagggctaggatattccggtggcaatggaacggtcacaggaaaagcttgcccaaagggtctttatggtacattttgcaaggaatgccctttgggaacatacaaaaatgttactggatcttctaaatctttatgctttccatgccctccgggtgaactccctcaccgtgctatatacacaaatgtccgaggaggtgctgctgaaactccatgtccctacagatgcatgtctgacagatatcgcatgcctcactgttatacagctctggaggagttaatatatacttttgggggaccttggctatttggtctttttctttcaggcctccttatcttgttagctcttgttttaagtgttgctcgtatgaaatttgttggcactgatgagttacctgggccagcaccaactcagcaagggtcccaaattgatcattcctttcccttcctagaatcactaaatgaggtcattgaaactaatagggctgaagagtcacacggtcatgtacacaggatgtatttcatgggtcccaacaccatcagtgaaccttggcatctcccacacagtccgccagaacaaataacagagatcgtatatgaagatgcatttaatagatttgtcg

SEQ ID NO: 281572 - DNA, 553 bp, Zea mays
ttttgtttttagcatcctatgtatactttcagtttccctggcatggtcgtggcaacagtggcgcaggagaaagaaattacaaaaactacgtgaatttgttcggtctgagtatgatcattcatgtttacggtcctgccgttcgcgtgcactttacgaggggctaaaggtagctgctactccagatttaatgctgggttatttagatttcttccttggtggggatgagaaaaggactgatcttcctcctcggcttcatcaaaggtttccaatggccctgatctttggaggtgatggaagctatatggctccattttcacttcatagcgacagagtggtcacaactcttataagtcaggctgtgccatcatctatatggcatcgtcttgtagctggattgaatgcccagttgcgtttggttcgtcgtggaaatctaaacacatcacttctccctgtgctcaaatggctagaaagtcatgcaaatcctgaattgaacacgtaccgtgtgcgtgttgaccttgcatggtttcaaactacagcattaggttaccctcag

SEQ ID NO: 281573 - DNA, 360 bp, Zea mays
tttcttgtttggctgcacgaactgatgaagaattctggttgtttgagaagatggatgaagaaaggaggcttagagaaaactacaaatctagacttatggatgggaatgaggttccagattgggtattcgccaacaatgatttacccaagagaaccgtggcagatgagttccagaatataatggtcggtgcgaagcgacgtagaaaggaggttgtctattcagactctttcggtgatcagtggatgaaatccgatgagggatttgaagacattcctaaggcgactcagaggtcgaagaagactgcttactcatctgacatccaagttgagtttagtgaaaggaggaaaagacctaggtctg

SEQ ID NO: 281574 - DNA, 431 bp, Zea mays
tttcttcccacgcgtccgatttttttccgccaaaggcaggattcctctgctcttcctgtttagggtttccccctctctctgctcctgccggatgcgatggcgattccgccgcggactccttccccgccgccatcgtggtcgcgctctgtaaccgagaccgttcgggggtcccaccagttcaccgtacggggctactccctcgccaagggcatgggccccggccgctacctcgccagcgacgtcttcgccgtcggaggataccactgggccgtctacctctaccccgacggcaagaacgccgaggacaactccaactacgtctccgttttcgtcgccctcgcttccgacggcattgacgttcgagccctttttgagcttacccttcttgaccagtccggccgcggctgccaacagggtcactcgcactttga

SEQ ID NO: 281575 - DNA, 462 bp, Zea mays
tttcttcccacgcgtccgggatgttaggatgaaaattgctcttggggctgctcgaggcttagcatacctgcatgaagattcaaaccctcatgtcatacaccgtgacttcaaggccagcaatatcttgttagaggaagatttcactcccaaagttactgattttggtttagcaagggaagcatccaatgcaactcaacctatatctaccagggtaatgggcactttcgcgttatggtgctccagaatatgcaatgacgggtcatcttcttgtgaagagcgacgtctacagttacgggtgttgtcttgctggaacttctatcaggacggaagcccgtcagcatctccgagtcgaaggatcccgagaaccttgtgacctgggcccgtcctctgctaagccacaaggagggcctggagaagttgatcgacccttctctggaagggaacttcaacttcgacaacgtg

SEQ ID NO: 281576 - DNA, 579 bp, Zea mays
tggtactggacctgttcggcctcatcggcgcttacgcgccgggagctgccgggacgtcagcacgtccatctacgccatggcccttgcaggcgccgtgctggtctacgtggtcatccatgtcgtcttcttgacgctggacgaaaaggacggcagctgcgcgagaaggaatgatgacgcttccttcgaggagagagagaaaaaggaggcgggcctggtggagaagaggcgcaaacgactgctcctattcgccatcttggccgcgaccatcacctaccaagccgggctgacaccgccgggcggctttctggtccaggacgataaccgtaccggccgccatgccggcgacgcggtcctgctcaacaactacccgcgccgttacacggctttcttctactgcaactcggtgagcttcatgctgcccatcgccctcatcatcctcctcgtgaaccccaacctgtaccgccctgccattcggagcaatgcgctgtctgtctgcacggcggccgggttgattggaatcatgggcggctacgccgacggctgcacgcagcatctgaagacatccatctatatcttcgt

SEQ ID NO: 281577 - DNA, 459 bp, Zea mays
  unsure (1)..(459): unsure at all n locations
tgatgggccaaattcatcggatacgacaaagaatgaattgcttcgagcactggatttgagactaactgcactgaaggaagagatcttggtcgtattgaaccgagcagttggatccaatttatcggcaagagaaatatctgatttatctgcttttgttcagcgatttggaacatcagagtcttgttggttgatgcggtgtacgttgttgatatcggattgtaagccctctgagctcccactacagcagaattctacaactgagaaagttgacaaggatgagaatgcacataaaccttgcatcagtcctcagactaatcttcagatgcccattgccaataatgtatctccagcaaagcttgcacaaattgagcgtgagagctcanacagaagtgatgatttccttgattcagggatgaaggtgaggccattgttgaaaggagccgtcctcttgtaagatct

SEQ ID NO: 281578 - DNA, 340 bp, Zea mays
tccacgcgtccgcttcgtctccctccctccatccaatccacacctgcgtccacgtccataccaagatcgtcgcggcctcgccgggcgacgccgagtcgccgtccgagaacaacagcaacggcaacgccgcctctaagaagcgcccgtcggggaaccgcgccgccgtcaggaagtaccgggagaagaagaaggcccacaccgcatcgctcgaggaggaggtggtgcacctccgggcgctcaaccagcagctcatgaaaaagctccagagccacgccgcgctcgaggcggaggcggccaggctccgctgcctgctcgtcgacatcaggggcaggatcgaggg

SEQ ID NO: 281579 - DNA, 1058 bp, Zea mays
cctggctctttgccccattcctgtttaatccttctgggttcgagtggcagaaaattgtggatgtctggactgactggaataagtggatcagtaaccgtggaggtattggggtgccgccagagaaaagttgggagtcatggtgggaaaaagagcaggagcctcttaggcattctggaaagcgtggcactgttcttgaaatagtgctttcgttgcgcttctttatttaccagtatggtcttgtttatcatttgaacatcaccactcacacgaagagcgttctggtttattgcatctcgtgggtcataatctttgtcattttgctcgtgatgaagactgtatcagttggcaggaggaaattcagtgcagagttccagcttgtgttccggctgatcaaggggctgatattcataacgtttatctctattatcataatcttgatagcaatcccacacatgacagttcaggacatctttgtttgcatccttgcgttcatgccaactggatggggtttgcttctgatagcacaaactatgaggtcagctatttcacatatggggctatggggatcggtcaaggcgcttgcccgaggctatgagatcatcatgggcttgctgttgttcaccccgatcgcattcctcgcttggttcccgtttgtttcggagttccagacaaggatgctgttcaaccaggccttcagtagaggtctgcagatttctcgtatcctaggcggacacaagaaagaccgggctgcacggaacaaggagtgagtagccgagcagcgtgagcctggtagtgctgacctacatacaattcaaccatgccccacgtggcattatacttggtactggctattatgccaggttgtatattgcaaggaaaggaattcatctctgctaacgtgccagattgtatgtgtggcagcaggtactcgatcggtgagccctcccatagcttttttattattatttatgggtaaagtcaaagaaactaaggcactcgagtaaccaacatatacgaagacaatcacagaaaaatgaatctaatatattaagttcaac

SEQ ID NO: 281580 - DNA, 520 bp, Zea mays
ttctctcgtccgcggacgcgtgggctcagtggtgacctatcttttgattttacccatggagaaatattggctgggtgactgccatgaaggcatgaaccttaaaaaaagtttgttttttcaattctaaatatcttgtgacttatttatattgagcatgtgtttacaaataatgttctcatcagctcatgtggtattttaagctcgcctctacatggacgccggcctcgcttccgcagtcaccatgctccggacctgcaccgatgtcgtgcacctcgcgcacgttctcgagcagtttcgccttgcctggtgcggcaagctcgttcgggacacccgcgccgtcgctccgtcaagggcctctgcttcgacctcttcatcattagggggtggaaacagagctttcaatgtatgctggaggtgagcgatggtgatcgatattatccatgcttggataaattatgacaatggtgatggccatgatatatgggccatatttggattaatcttttttcgagctttaggc

SEQ ID NO: 281581 - DNA, 420 bp, Zea mays
cgtactggtgcttggctaataagtatgcagggacgcgtgggatctcgacgagggcagacgtgtccagcttccgtgtagtgctgctggagctgataacagggacgacggccatcgacgacagccgcgtgggcgagggcgaggagacccggcacctggcgtactggctcacccagatacggaaggacgcggagcagctgcgcgcggcgatcgacccggccctggacgtgggcgacggcgagacaatggagagcatccgcgtgatcgcggagctggcggggcactgcacggcccgggagccgtcgcagcggccggacatggggcacgccgtgaaccgtcctgatgcccatggtggagaagtggaagcccgggaaggacgaaagccgggactacctggacattgacctgcacctgtcgatgctg

SEQ ID NO: 281582 - DNA, 534 bp, Zea mays
agtagttgctgctgtgctgaacccccccgtctgtccctgagaggcccgcggcgtctccgcttcgcctcaccacccaccacctcctcctcgccggtacccctcgccggagccagcgagcttccggcgaagaaatccggcgggcacaccacacgggggcggagcaggggggaaggggtccggcgccggaatgggggcaagcggccgggtgctcaacgccgtcgtcgctggtgtcgcgtcgctctagggttaggtaggtgtccgtagctttctccttcgctccccctccctcccctttgccgcccggcgtcgcattggggtcccgtgccgaccgccaggccgcgtgatccacccgtgctcgagctcggagaggctcccggttgcgtggcatggggccatctcttccgcctgctgccgctgactgggaattcggcaccatttcttcgctctgaggagtagtaggtggcagcagtcgccgatctggatgccatcttaagtcatggatccgaggcgccacctctcccagttcagcaatcc

SEQ ID NO: 281583 - DNA, 656 bp, Zea mays
tgcgtttcacgatgcatttagcagaatgtgccccctcagtgctggcggacatgagtgtggctgtttaccagtattagcaaaactggtgatggagcagtgtgtagcccgtttggatgttgccatgttcaatgccatccttcgtgaatcagcaagtgagataccaacagaccctatatctgacccaattgttgacccaaaagtcctaccaattccagctggtgatctaagctttgggtcaggcgcgcacatgaagaactctattggaaactggtccagatggctgacagataaggtgggcatagatcatgatgatggtgaggacataggagatgttgaagacgaaagaagagccgcagctgaaacgaaatcgtttcaacttctcaatgagctaagtgatctcctgatgctcccaaaggacatgctccttgaaaaatctatcaggaaagaggtttgtccctcaattggccttcagttagtgactaggatcctgtgcaacttcaccccagatgagttttgccctgatccggttccaagcacggtcttagaagagctgaattccgagagcttgctggagcgtcacgccaacaaagacgtgaccagggtgtttccgtgcaccgctgcccctatagtgtaccgcacaccttcaacgttggacg

SEQ ID NO: 281584 - DNA, 418 bp, Zea mays
cccacgcgttcgcggacgcgtgggcaaaagtcctaccaattccagttggtgatctaagctttgggtcaggcgcgcagctgaagaactctattggaaacgggtctagatggctgacagataatcttggcatagatcatgatgactttgaggacataggagatgttgaagacgaaagaagagttgcagctgaaacgatatcgtttcaacttctcaatgagctaagtgatcatctattttttagtttttcataattttcctttcatggcctccttacatgtttgatttcctatgatccatgagctgccaatcatgataacgcggtttcactatgcaggagatgaacaaggatgcagtcacaactgatgctatcggcagtatcagaacttgatggtgcttgtagactgttcatggtgcttgt

SEQ ID NO: 281585 - DNA, 584 bp, Zea mays
ctccgcgacacacgcctccctctcctctcccccaccctcctccccacgccatcggcgccgccatcatcggatccggcccaagatgcctccgccccacgcgcccgagtcgtcgaggcacactccttcccgcctccgtcggccacgcatatctccgcctcacctcggcgcccgagtcgtcgcacgcgttcgcggtggtgtccatcccggcaccggcctcacgcaccgtctacagctcccaactctgctcctctcagttctccctccgcatttcgccttctctcccttcctctccaagcagcgtcctcctcgcctagatccgtacaagcggcaaataacctctccggcggcgagacagatggagtcgacctccggcgaggatgctccgaagcacaacccgattccgtccgcgctcgtctccaacctacagtccgtgctcaccgcccgccgcttgtccgcagccgaggtcagcaccgccgccacagctagcgaggttgaggccttggcttaggaagcagaggcgttcgctgcccccacgggagatgggacgctggcgaggcccatcgtgctactgacctatgccgggg

SEQ ID NO: 281586 - DNA, 761 bp, Zea mays
atcaggaactgccagcttgctacagatagtcacacggcttgatgataactttcttagagcgtcagagagtgcgcatgatgtgtccactaaactggaggccacccggatgcattatcactccaaccatgctgacagccgaggacatatcgaccactctacaaaaattatgcacgttatcacatggaaccgctccttcaagaacttacctgaccatgaggacctgaacgataattttgagattgatgatagatttgaaactcatgctgcagttctagatagaatgcttgcttgggcgagaaaactgtatgacgaagtgaaggctggggagcttatgaaaaccgattatcagaagaaggtgtctctattgcagaagcaaaagaaacggggtgttaaacttgaaaccttggagaagacaaaagctgctgttagccaattgcacacaaggtacattgtagacatgcaatccatggattcaacagtttcagaaataaatcggcttcgggatagacagttattcccaaagttaatggaccttgttgatggaatggccaagatgtggagttctatgtaccgccatcatagaagtcagttcctgatcatttctggaataagaggtttcgagattcctcctattccaagggagacaactgattctcattacatccagacttgtgagctacgtgacattgttagggagtggcatacgcagtttgagaaattgatggacaatcagaaagcatacatcagagcactcaatgcat

SEQ ID NO: 281587 - DNA, 569 bp, Zea mays
tcaaacatgttgcagtgaaccccgagaaccaacgcatcggagttttctactgtggtgagcccgtccttgtgccacagctacggcagctgtcagcggacttcacccccaagacaaatactaagttcgagttccccaaggagaacttctaatggaggaactggagaaaagctctaggcgtggccctctaatggtttcagaatatgtgaattacgatggttgtaacatatatacgagtagaagaataagacgatgggagttgttttgttgtacatgtcaagagtagatgaattgtctttgcaagcatacaaccttaaaagttgtaacacatgtcagctggttttgacaggtctgtttgttttgtctgctcctgttggagtgttgggcatacactgcttctgtcttttaaagcaccaccactacattgaaagccctgaggaaggtattttacggcacaaatgagtcaggttcacttgtgaattgtgatcctcaactcctgatgctgagtaactggttgtgccttccgtaagtccgctcaaaatgtatattaacccctatgttgcttgatctaa

SEQ ID NO: 281588 - DNA, 935 bp, Zea mays
  unsure (1)..(935): unsure at all n locations
gttgaaagagctggtagttatgcatggactcataaaagttggagggtgaggnacgagtttgtacgtacggtggcatctgcagttgggctatttgcttctacggagatttccttgcaacgagttttgctttcacctgtcctgcaactaatgaatgattcgaaccaaagtgttcgagatgctgctatctcttgtattgaggagatgtacaagcacatgggatcacaatttcatgaagagttgcagcgccataatctgccttcatacatgctaaaagaaataaattcaaggttggataaaatagaaccaaaggttcgatcatctgatacaacaatgcagtataaggctgtagagtctagaggcaatgctgggatggagcctgttggcagtgggacaccttcaggttctgttaatgatatggaaaatgaggaatcaggttcaaaaggtaaaaggccattaggacgggactccacgaaagcatcaaggaagaaggcaatgtctagttcctcccagtctactaactacctttcaagaattcatgacattcaaatagcaagactgaagcaaagtgaagaaaaatcagagctgaaacaacagaatattgagttcatgaaggaagttgaactcaaaaagttggagtttcaatccaagaaaatagaaatgcagcaaactaaattgatgatggaagacaggatccgaaaggacgaagagctgaataaaatgtatgctatggatatggatgctttaccagaagagttgagagctgtatacatcgcgaggagaaaaggtttaatcgactatttcatcaagaatccagtgtgatgagtattattgtatttcataatatgttgcgaaccaattttcggcgtatcgtggtcgggtgtgttcggccatctgtgatttcagtttgttgaacatttgcttcattgtttgagaac

SEQ ID NO: 281589 - DNA, 611 bp, Zea mays
cggttgcgtggggaacagtcgggcggtcgggccaggcggagtgtgagcgtgtccgagatccacaggacgcatgacgctgccgatggcgaagccgaggaaaacccgcaccttggcttccagatccgcccgtagccgccgttcggcttccgtggcacacaccggcgccggcggtccccacggccgttctgatctcgctcgctgccctcctcatccgcgtgctggtttccgtgggcccctactccggtcagggtgcggcgcctaagatcggcgactatgaggcgcagcggcactggatggagctcacactccacctcacgcccgccgactggtaccgcaacacctccgacaatgaccttgcctactggggcctggactacccgcccctctccgcctaccagagcctcctccacggccgcatcatcaacgcctcactccccgaggccgtcgctctccgctcctcccgtggctacgaatctatggaatcgaagttgctgatgcggtggacggtgctgtcatcggatctgttggtgttcttcccatctgctttgtggtttgtgtgggcgtacatgaaacttggagtcggtattagtggagaggagagacgggagggg

SEQ ID NO: 281590 - DNA, 1085 bp, Zea mays
gaagccagagtaaagcgtagaagaattggtgaaatcatggattcatctgcaatagactcacctggcaaaaacaaggacaccatattgccaggaaacaataccccacctagttctcatcaaatatcagttgaagatacatggcaggaactagagcgaagcaatcttcatgccacacaaaaaggtctacacgttcaactcaagccagagatttcgaagttatataagttgctgcaactgccggagaaggtgaaatccttatgtgaggaatttcttgagtatattttgaagaatcaccaaatcagccaggagcctaagggcatactgcatgcattcaatttggctctgtgttggcgtgctgcttctctctcaaagcataagatcaatcacacagaatcactcgcacttgctgtaaaaaacttaaactatgagtgcaaagaagaacttgttgattctgtttatgggaagctaaagatccttaagaagaagtttgcacgtagagcaggggaagtgagcaagcaaaactatatggtttcagtgagcgacatatcaacttgtgaacaggccacttctggtagattgagaaatgatgagttagtccctagccaggtaactttaactgatggtaactttgagaatggttcacatcacgaggctacaggtgacttttggaccgaggagatggtttcgggagagaaagaactgctacctgacccagtaactcatgaaggggaacacttattgagggatgaacttctcagcaaaataatggacaaaagaattaaattagttgacaaagttttctctctgagaggaaggagtatctatgataagcattcaaatcaggtttcatttttagacatgcataggcaaaaggtagtggataaactcagaagagcatgcagtttagttgtggagcatctacgtagtagtcaaaatcacattgctcaagaggacagagatgggaaaattaaagctaataattgaatggtttactatgctgctgtatgcttttttggaacacatgaaatgccaacgtaacaagcttgatatgcagcattcgccttcaagatcaaggagtctcattg

SEQ ID NO: 281591 - DNA, 563 bp, Zea mays
ttttccgttcacgcgtccgagctgctgctggggctctggttgaattgatctcggctaaagccctctcggtctctcccgcggtcccgccccgtgccgtgcccgtgccctttctcccaatggccgtctccttcgacgaaccgtagcgccgtggacaaccagcaggtcgcttggttccagatccccactcagacacgtcacatcgcatggcggcgaacgcggcgcagcaggacccgcgcggccaacggcggctctgcggcgggggcgggggcggggccacggcgtgcgtgcgcccacgcgcctggtgctgctccttctccttctccggcgtgcccgacagccccgacctccgcccgctcccctcctcggccgcgtccccgccggcggggaggaagttgccgcccaagtccccctcggcggcgtcattctatggctcgccgacttcatacaggctagcgggcctcatcgacccgcgccgcatcctctcacccggccgcgtctcccctatcgatcacgacggcgcggtcccgccgcccctcccgctccctccgccgccgccgccggct

SEQ ID NO: 281592 - DNA, 511 bp, Zea mays
gtcccagacccagtcccagctgttgcagcctccgaacatccaaagctcctgcactgcacccctgtcagtcaggcctctagctgcagccaaaaaccgctggccttgaacatctccccatccgcctcccgcggcctgccacgcgacatgattgcgtcgcgggctgctgcggagctcagctgcccccgcacgccgctggcgacgccttctgcttgcccgcctctgcccgcccgtcttccctgatccctcctcccctttgcttccgcacgaagatctgggcgtgtcttcttccgacaaagctgttcaggcaggggagagtgcctgtttcgatggggaagaagggcaagtggttcggcgccgtcaagaaggtcttcagccctgaatccaaggagaagaaagaggagaggctaaggaggaagtcagcagcttgcaaccccgaccccgggagatctgaccccggctccctccttggaagtcaatccttttgggggcaccggctacaggtcctcccccc

SEQ ID NO: 281593 - DNA, 428 bp, Zea mays
tgagtggttcactgaaactaaggagctgagcgatggtgagccagtagaatttgatggctatatgaggattgcagttgacactgaggtattcttgagggggaagaggcatgtggagacattcaacgagcttacacgtgattgcaaggatggcgtgaatacatgctcagcttcttcctgaacatttggtgggctaaggtgagctgatactatgaaatattatgcttcagaggatattttcgactgtgttattggtgtctcttatgccacgcctagtcttgttgtacctaactagctggtcgccctttttgttatcccgctcttttgtgtttccaggttgcatcagcacattcgggtcctgccttgggcttgtgcggtttagttgcacctgcttttctgctgtcgtcttctgtatctcttctatatagctc

SEQ ID NO: 281594 - DNA, 605 bp, Zea mays
tctttacaattcaactctgagcccatggtaccggtacctgccacacctcatcctggtccgtatctagcttattttcagcctgccccgacaccggtatcatcagagctcccgtgtcgctgagagaacagtggatggcgctccatatcatgatcactggaacactctggctgggctatcagatggccggcgaccctgggcgtactatcctcaacccaacagtgataatggtatagctgagcagcaaggactccctctgggggcaatggcggctggaggggttgatagcgaaagccaacaacgaggatctctctccttattttatggaaacgggtctggaagacaaaggatcccaggtgttcctcctatggcaccacaatttacaagagcgcatggcaacataaacgatcagttccagcagacagctagcttatttgctgggtcacagcaatcaggaggtatgcgtccattgggagcagtagggccttccgtgccaccacctccggagaacacctccttctgtcggttcccgccagcttcatccgtccccagtacaatggaggccgaggatgtcaacagagcaaaccagttctatgcatgggagaggg

SEQ ID NO: 281595 - DNA, 559 bp, Zea mays
cgaaattttatcgccttcttcgcaagatccagggagaaaactaaacactgcgcgccatgaggtggtcagacagatcaagcactagctagcgcagctgcgcatcatgtttgttcttcctctctcttttgatttcatttcttgtcaatatatttgccgccgggcgtcatggttgtgatcgatggtcgctggccggatggaagagagcgtccttcagtccactcaggggcggtgctagggtcggattagctgccgactcattcacccacatgccaagcaaacggccatggaaacgagctttgcagatgagtgaatgaagcgggaggtaaaagcttcgatctcgcaccgtctttgcttggactgaagggtgctccctccgatcctttccttgtttactttacccatgcagcttcatcattcgtatctcaaggttttacttcatgatctgtatttattttgccaacctgctgtctcgaactcttgatctgtctttgcttgagctgcttattaattattatcttgcatatatattaggcatctgatgcatacatccatagcagct

SEQ ID NO: 281596 - DNA, 558 bp, Zea mays
tgtccctttttttttctttttttttttaatacgggatattggcaattctttatcaacaaaaactgcagtccaatgacgggacacgtgacagactctaaaccgaccgacgcactgaatgaagaagaagcagaccgccgaagcccacgcccacgaccaccactctctttttattaaaggcaagctagctaacctaatctaagcacgacgacctaacgagaggactcactccaccgtggggcttccggcctatttgctcagttggatgggggagcgaagaagatctccgagtcgagcctcttggaccggaacagcttctccatctccggcgtggtgttgaacgacgcctgcagcacctccgccgagatggccttccacaccgacgtcttcccggccaggtggctgaagatcgggttgggggtggtgatgatggagaaccactccatgccggacgcgtcggcgttcttggagacgacgtggaagcggggcacgatgaagaggaagccgccctcgacgcgcgtctccaggacgcgcaccccgtcgaggcccgaccacctggac

SEQ ID NO: 281597 - DNA, 541 bp, Zea mays
ttcgtgccggacaccagcgccgagggctcggggcgcattggtgtgcagctctcccccaacgtccgcgtcacgcgcgtgcgcccccagaacctggccgacgcgaccgtccttgccgtgcgcgagttcacgctcttgaccgggacggtgttcgacgggctcaggcagacattgctcaacttctctcagtccgccgacaaggtgtcaggccctgttgccatcattgcagtgggagcggaagtggccaggtccagcgcggatgggctgttccagtttgcggcggtgatcaatctcaacctcgcagccataaacttgttgcccttgccagcattggacggtggcaccttggcattgatccttcttgaggcagcccggggtgggcgcaagatcccccgagaagttgaacagggtattatgtcatcggggatactggtggtgctcatggttggcatgttcctcattgtacgtgacacactcaaccttgatttcatcaaggagatcttgtgatacttcgcgtgaaaaatcaattgattgcagttgtagt

SEQ ID NO: 281598 - DNA, 327 bp, Zea mays
gctatccctatctaggagacggagcggcgggccagcggctacgcgggcaaagagaggacgagagcgtgcaagaagagaaggcccgtgtcaggcggcggctataggtgcaaggataggcaacaagtgttcaaaaacacgtctgtggatcaattgacttgtatttcagcctttcagttgaggattaaagtggaggtttaagaagcttgagaattggcatcatctcaagaatacattgaagtgcaagatgccaaaaataaagagtctatctaatgcatgccgagtatcattttctccagaaagtcccatatctggagaggcgcttgagag

SEQ ID NO: 281599 - DNA, 494 bp, Zea mays
tccactcgtccgaaattttcgtgattcaaatggatggactgctcttcattgggctgcttattttggaagggaaaagatggttgctgcacttcttgctgctggtgcatcggcaacagcagttactgatcccactgcacaagacccagtgggtaaaacagcagctttcctggcttctgaacgagggcatacgggacttgcaggttatctttctgaagtgtcgctaactagctatcttgcatcactcactatagaagaaagtgatgtctcaaaaggatcagctgaagttgaagcagagagagctgtggaaggcatatctcagaggagatgcccaacggcatggtggcacagaagatgagctatcaatgaaggattctttggcggcagtgaggaatgcagctcaagcagcagctcgcatccagaatgctttccgtgccttctctttcaggaagagacagcagaagactgctcgacttagggatgtgtatggcatgacc

SEQ ID NO: 281600 - DNA, 408 bp, Zea mays
ccagctccagcctcctgtcctgctctcttcctcccctgactgcctgccgcgcaccactctactcgagtgactcgagtcgtcctcctcccaccacctcccgtccgttgcgttgctcctgcccgcgcctcctccatccaccacaccagtccgtcgttaaagctgcggcatcggcagcacacgccgacgggtacaaggagcactcattgcctccccatctcgtgtaggctctccccctcctccgcgctccgtccgtctctcatcaccgttccgccgccgccccacctctccctcctctcgccgcggcttccgaacccgccacggcgcggcggagatccaaccggacggatctggatcgacctactccgacaccgcgccccccggtcagattgatagataacaaggttgagc

SEQ ID NO: 281601 - DNA, 623 bp, Zea mays
cgacaatcagctgagaaagcatttattggtggtaaatcttgcaaaggacacacactacgatttatgtggttgacagcatctcctggctcaaataaccattataggcatcagaatacctcagttcatgtgaggccctctactatccctggccatactcaaagcatatcatctgagtcccccagccctgttgggaaagtatcatctcttgctacatctgttatggtagccattcctcataataaatccatctcaactgtggaaaatacaaagacttctccagcgggagtttccaaagtttcatgtggtagctcctctctatcatcaaatgataagtgtccttctgaatgtggttccacaaggaatgttatctcagattctgacgttccacaatgaggcttaatgctatctggacgaggtggtgttatgaatcttgatttggtggctcggctatttcataggtctacacctagtcaaaatcccatcacatttgaagttattggaagaccttttgaaaactttggtgtttaatcgtagggcagcgcggttaaggctgtaaaaagaaaaaaaagagaatgtttaaagaaatatgggttcataagcatactggaagtggaggctttctc

SEQ ID NO: 281602 - DNA, 423 bp, Zea mays
cacagcgaaaactaaaaacattcctccgcgccggcgcctggctgcgaagtctcccaccaacgcgcgccgatccggaccgaaggcctcctgcagtcctgctctccgtctccctcgcggcctcgccccgtggatctccgctccggccgacgggcgcgatggcggagccggagcggcgagcagcgcccgctgctagaggtagagcaatccgtcacgtccataccggaagatcatgaagccacatgttggggctgtgggctccggcttgtttttgcgggttactcgcctatctataagtgtggctggtgtggagccatcacgcaaagtaaccagaccacaaggaaacctgatagtgtatggttttcccactggaggcgcgtgcgggacagattctttgtcaccgtgctcatcctcttcatgctcttt

SEQ ID NO: 281603 - DNA, 614 bp, Zea mays
tttggttgtgtacctgccgaagaacgccttgctgcctgtgacgctgagatcgcgcgagtatgaggtgttcaccgtcgtccctctcaagcacctgccaaacggtgcctcctttgcggcgatcggccttctcggcatgttcaactccggtggcgcggtgagggagctgagattcggtggtgaggatgccgacgtcgagctcagagtgcggggctcgggcacggtcggagcttattcctcgaccaagccaacgtgtgtcgccgtcgattccaaggcggttggtttctcctacgatgccacctgtggcctcatcagcttcgagctcggcattcccgaccaagaaatgtacttgtggacggttacagtagggtactgaagttacacctgagaattgagatagattttctaatgcgtcagagaacgcccggtggtgtaggtattctgatttatccagtgttgtactttctactgttagttataaatattctggacccatcccgggattttatgccaaatctagataagtggcggtccttagattttaggagcccagaacgaaattttaaatagaagcccctgttaatattgtatattgattttccaaataaaaatcgaat

SEQ ID NO: 281604 - DNA, 585 bp, Zea mays
cggacgcgtggtcttacctgcttgagtactactctcccgttcaccacgttcactccgtatctctcgtgcctttttcctttcctggttgcgacgagccgacgactgggcggacgccgctgccgccctacgccaggtcttcgtcggccccttcgacgagcacacacaagattcagtcgggaatgttgaatgcatagtgtaatttctgcgcaaaaagatggcatcagacgagttcatcagccttgacgcaccttgtgaggctgatgcgaaagatgaagggggagacgttcaggttaaagctcctgatgtgagtgggatggagcctctggtatcggatctccaaccagaagggaaagctggtgctgtgggtagtaatcccaagacatctgctgggaacctggatcttgaagaggggcaagtggaagatatggacctcgcggatgatgacgtagtggttggaaaggatcagctattagatgcttccattcagcccgagatcagtgttgcagctgtgcagactgtgattggttttgaggtcaagctggacaagggggacgggactgaaaatgacataatttatgagtcaaa

SEQ ID NO: 281605 - DNA, 601 bp, Zea mays
gtaaaggtggagaagaagtccaagcgccagctcaagcgcgagcgtcagcaggaacaaaaatctacttctcacctttgtatcgaagtagggaaaagtggaaatgtggactcatgcaaatatggtacttcttgtcgtttcagccatgacataaatgcttatttgtctcagaaaccagctgaccttgaaggcacatgcccatttactgcactgggacatttgtgtcgatatggactaacttgtcgattccttagtacacataaggataaccttgctcctcaaaatcatccagagggaaattgtgagagaaatcctttgagcaaagaaattcaaaagctcttatggaagagcaaatataaatttcccaaggccagtgcccagatcaaacttcttggtcttaaggatggaaacaagaataaagcagaagcagtaaatgatgataatccagatgaaacatgtaacctaaatggtgatgacaaaccacttctttctagcattcctgaaaatgttgaacctgatcccacgttgtgcaaagaaatagataattcatgggggagaactttagttgcgaactcagctgaatctgaggaggccagggcatcaa

SEQ ID NO: 281606 - DNA, 400 bp, Zea mays
tgctgtccacgcgtccggcaaccaacggtgtggcgtctgtcctctctcctaaggttcttgcagccctatcctgtctatcctcatcttcctcctctccctgccatcttttgcaagatctctccttcgtcttctctttccccttttaaatccaccggaatccctcttttgtcacgagccatgccgccgtgcgcagcttatagcgtgcgaagcaccagcaaaagagagcgacgccgcctgcgccaaagcttcggattcccgtctattttaccccccaccctcgccgactcaccggcgcgagatccatccgcaggtgtcggcggcctgcatccccccttgaaagatggcgcctttctgatgctccccggggggttcgcgtcgtttcttgcttggcgcctaaagc

SEQ ID NO: 281607 - DNA, 416 bp, Zea mays
cccacgcgtccggaagctgagaaacaagctagccaacaccagatgtcagcattgctgtctccacgattgcttcgtgataccggctttcttgcagatgatgcactcaagtgtgaagggcctgcttgtttctttttcagctctctgattatgtcggtgttctgtgctgttgccgctgggttgagcctcctcgtcgttcaaaggaccagacaagtttatcctcgcctctacagttctgtccggacttgagattctccaattctccatggatgggaagctcaaatcctcgtattctatgtccgtttattcttgcatacatatgctcaaagataagtatgtgaataaattctcaaatcttttcctaagctggtattgtaaaaacagatattcttgaatggattgtcccttgtgacttgcgt

SEQ ID NO: 281608 - DNA, 330 bp, Zea mays
gtgctatgtcaatgatcttttgttacgtatggggggggtcaattgtgctgattctattgttgatgatgcaaaagttcgtggaataagtgggggtgagaagaagcgcctctcacttgcatgtgagttgattgctagcccttcagtcatctttgcagacgaaccaacaacaggccttgatgccttccaagctgagaaggtcatggagactcttcgtcaacttgctcaggatgggcacactgttatctgttcgatacaccatccaagaggttcagtctatggcatattttattgccatagtactattggcagatggagaaactgtatacattg

SEQ ID NO: 281609 - DNA, 719 bp, Zea mays
ctttattcagcgtcacagctttatctgttggggccaactgaagaaaagccgacctggagaatattgaatattcctggtcgtcctccccgtttcgcctggggccacagcacctgtgttgttggaggaacaaaggcgatagtgcttggtggacaaactggagaagagtggatgcttacagaaatacatgagctttctttggtcagccgctcagtttgagttctggaatggtttgtagtcatgttccttgcaaattagatgcggcttcttatgcaacctgaagtttgattgccgtcttcagaagaactagaagaatgaatgctgggcatactgaatcttctggcagctacctggcggacttggaagatgaaatggcatcgactggtttgctcgctttgtgtagaaaaggggtagtgatatgttcatttttattgccgtttgtttggccttttttaccagataattacaattcataagctactactgttgtggaatgagtagcaaattttatatgtattctcagaagttcaagacttgcaatatgttaggaaaacaaaagactgccctgtatatagtttaagcttttgttgtacggtacatggagaccttgatgctgctgtcttgcggcacaggcgcacaactgctgagatggcgtgatgtaaggtgatcaccgatcgaccatgtttttgtgcagaacttgtaatatgtagaaatttcatccg

SEQ ID NO: 281610 - DNA, 815 bp, Zea mays
acacagctttatctgttggatccaactgaagaaaagccgacctggagaattttgaatgttccagggcaccctccccgattcgcctggggccacagcacctgtgttgttggaggaacaaaagcgatagtgcttggtggacaaactggggaagagtggatgcttacagaaatacatgagctctctttggcaaacaactcagtctgagttcatggtggacaaaccggggaagagtggatgcttacagaaatacatgagctctctttggcaagcaactcagtctgagttcagggtggccaaaccggggaagagtggatgcttacagaaatacatgagctctctttggcaagcaactcagtctgagttcaggaatggttcttagtcatgctccttgcaaactaattgcggcttcttatgcgacctgaagcttgattgccttcaccttcagagtatcatctggcagctacatggctttacttgggagatgaaatggttttcactggtttgctcgctttatgtaggcagagggtagcgatatgttcatttttattgccgtttgcttggccttctttttaccagataattacagttcataagctactattgtggaatgagtaccagattttatatgtattctcagatgtttctgacttgcaatatgttaggaaaacaaaggactaccttgtacatagtttaagcttttgttgtacggtacatggagaccttgatgctgctgtcttgcggcacaggcgcacaactgctgagatggcgtgatgtaaggtgatcaccgatcgaccatgtttttgtgcagaacttgt

SEQ ID NO: 281611 - DNA, 682 bp, Zea mays
  unsure (1)..(682): unsure at all n locations
cccacgcgtccgggcggagggagcgagggacgtgcccgtggggaactcggtgctggccatgtacgtcaagtgcggagagttgggccgtgcgcgcgacgcgttcgacatgatggggcagcgggacctgtgcacgtggaactcgatgggcttcgggtgctgccgctccaacgaatgggaagaggcacggaggctgctcgacgatatgaggcgccaaggtacagagcctgggcttgtcacatggaacacgctggtttcgagctacgcgaggtctggggaacttgatgtggccatggagatgctggagcagatggaggagtccggtgttgctccggacgtcgtcacctggactagccttgtgtctggttttgtccacggtgataggggtggcgaagcactttggtgtttcgcgcgcatgcgccttgctggagtcgaaccaaacggcatgacaattgcgagtgccatctcagcttgtgctagtttgcggttgctgagtcagggcatggagctccattgccacgcaattaaggttgggagtgtgaacaatgtgctctcggngaactccttggttgacatgtatgcaaaatgtggagaaatcattgcagctangagagtatttgatgaaatacccgagaaggatatcttcttctggaactcgatggttgcagggtatgcacaagcgggc

SEQ ID NO: 281612 - DNA, 500 bp, Zea mays
gtttgcgtcggcgccagcggggcggaggggaaggaggcggggcttcagcttccccggcgccggccgccgcctgaagatcccttcttctcctgtagtcctgtcgtcgggcgggcgaggtccaagcatcatggggctcttaggtatgatgggcgactcttttggttgctcggcgactggggagcgacttgtgtctgctgcaagagatggagacatccaggaggccagggctctcttagaactcaatccccgccttgctcggtactccacgttcgggatccggaattcgcctctccattactcggcagcaaagggccaccatgggattgtctccctcctaagtcgagtccggtgttaatattaaccttagaaatggcagagggcagactgctctgatgcaagcttgtctatatggtcactggaaagttgtacagattctagttctttttaaagctaatattcacaggagagattggttaagcgcgcgaccgctattcattttg

SEQ ID NO: 281613 - DNA, 660 bp, Zea mays
gttgagctctttcccttcctcgcttggaaccaaatcaaaatcggagcggcggacaaaaacgatccgtagcctcgcttaccttcgattcagctcgaccagggcactaaccgggaagccaatgccgcgcgagtcgcgagatctgtagcgccaatcggcttcaccggcggcggggtgggcatggaagcgcagaacggctcctgcggaggggcgcccgtggtgctcaacgtgtacgacctgacgcccatgaacaactacctctactggttcggcctcggtattttccactccggaatcgaagtccacggcatggagtacggatatggagcacacgagtttccaacaagtggggtatttgaggtggaaccaaagagttgtcctggtttcacctacagaagatctgtgtggatgggcacaactgacttgtctagagcagagttccgctcgttcattgaaaaccttgcaggaaagtacaatggcaacacataccatttgatttcaaagaactgcaaccattttacagatgatgtctgtaagaacttgaccaggaaatcaatccctgggtgggtcaatcggctagcaagagtgggttcatttttcaactgtcttctaccagaaagcatccaagtttccacagtaagacacgtccctactcatcctgca

SEQ ID NO: 281614 - DNA, 898 bp, Zea mays
ttaacagtcactggtgaattctctgagggtcagatattaacagcatcatatgggtatatcggaggacatgaaggaaatagtttatacagctggcaccttcatgaggctgaagatgacgaaggcactccactttcagaggcaaccggtttgctacaatactgtgttacaaaggaagctgttggaaagtttgtttctttcaaatgcacccctgtcagagatgatgatattgttggtgaggcaagatcattcataggaaaggacagagttactccagggatgccgacattactttctcttgaagtaactggtgatgcaattgaaggaacaactatgtttgccagtaaaaggtattggggaggagaagaaggggacacaatgttccgctggatactgacaaattctgatggaaccgagaaagaaattgaaggagcaacaagttcatcatacaccttgaaatgcaatgacattggcttctacatatctgtcttgtgcaagcctgttagaaatgatggagttgatggttctttagtgtcgactgaagcgattggtcctattataccagggccaccaacatgtcaatctcttgaactagctggctctatggttgaaggtggccgtttgacctttcatgctgtgtatacaggaggtttgcggggaagttgcatccaagaatggttcagattacatgatgatgggcacaaggacaagttgactgctgatgaatgtctagaccttgatctagctgatatcgattgccggattgaacttatgtatacacctgtacgagaagacggagtgcacgggttaccaaggagtgttacttttgatacaatcttacctggggagcccaaggggggccaatcttattctacctgagtgttttgaggaccatgaaatt

SEQ ID NO: 281615 - DNA, 541 bp, Zea mays
  unsure (1)..(541): unsure at all n locations
cttttgtctaataattgaggcccatgataacttaagatctggcccaagactgttatccctgctagggttaatccactggctctcctatatagaagcgcggcgagagctcgcaccgccgccgccgccgctgtcgcatcacaggcctctcttccggtttccccccaaacccgtccgagaggcagtcatcccgccgcgatgagggccaagtggaagaagaagcggatgaggcggcttaagaggaagcgccgaaagatgaggcagaggtccaagtaggcagattcatggagtgtccccgcctggagtctctctgcgttcggttgttgtttactgagtaattttagtttttttactaagacagtctgttatggatcagaaattccttgcgtttgtccgtggtctagatattgcatcaagtgttctgcactttattctttagttgttagttgatgcgagtgcttgtcaatggttgtggacttcgaaattgctatatgtaggtagggcctgagcctgacgtgcatatatagggacactcgttaccnaa

SEQ ID NO: 281616 - DNA, 747 bp, Zea mays
cctcactagtgcaagccccccgcctgcccgacccgacctactggctcgaccgacgcatgcgtttcattcgtgcgatctgatgatgcatgctggaacagctcctgaactgcacaagtggtaggttggctgctggataataaggtcatccatccatcaacgctacaaatcaaggctctgctcggacattgcgtaatccaagagaccgtcaaggcaaggcaaagcaaagccaacaccagacgagtcgagaacaccgcagcagagcgcggcgtccaatggacatggacggcaactccccgcggcggcctccccgccggcctgagcgggaggggagctacggctacgacatcgagagcatggacggctccggggccgggggcccgccgccgtggagcgcgcaccacaacggctcctccgaggccctgctccgctacgacgaccgcggcgccgaccgcgggagcacgcaacagccgctgctgcggaagcgcaccgtgaacacgacctcgcagatcgctatcgtcggtgccaacgtctgcccaatcgagagcttggactacgaagtcgtggagattgaccttttcaagcaggactggcgatcaagaaagaagaagcagatatttcagtacatcgtactcaagtggagcttggtgctccttattggcctattaactggatttgtcggcttcttcaacaaatttgcagttgagaacattgctggattaaaattgctgctcacgagcgatcttatgc

SEQ ID NO: 281617 - DNA, 424 bp, Zea mays
gcgcttcttcactgatttctctattgtgcggaaggaagtgcaggattaaactgacaggttgactggaaagacaaagcagatatctccagttccaattcatctcagcatatactctccacatgtggtcaacttaacattgattgatctgccgaggcctaaccaaagttgcagttgaggggcagcctgaaagcattgttcaagatatcgaaagcatggtgcgttcatatgttgataagccgaattgtattatattggctatatctcctgccaatcaagatatagcgacatcagatgcaatcaagcttgcccgggaagtggatccaactggtgagaggacatttggtgtgttgacaaagcttgatttaatggacaagggaacaaatgcacttgacgttcttgaaggaagagcttacagactgcagca

SEQ ID NO: 281618 - DNA, 489 bp, Zea mays
ttccgttgccaggctgccacgccgtcgccgtctcgccgcctaaaacctccctcccccccctcgcaccactccgctcacctctcttcacgccgccgtagccggcgagtagcagcgggtacgtgcctttgcggtgtaccttattggctgagccttccctttgccgaggaagagcacagaagcagggaggtcggcatggcggaggtgcatctaggtctgccaggtccctgggcggcggattacagggagatggccgaccactacaccactaaagatcggtggagtccctgattggccaactggtgatatgggcttcaagcccgggactcttcagtgcagcttatgtgggaccaagctttgtcttgttgctcaggtacatgcgcctgtggcaaagctaaacattgaggagaggataatctatgtgcttgtatgcccgacaccagaatgtggacctaaacctcaaagttggaaggttctaagagttcaaaaatg

SEQ ID NO: 281619 - DNA, 1091 bp, Zea mays
ggacgcgtggcttggggatgcggaaaacgaaactggtgtgcacggtggggcccgcctgcgtcgaggcgctgccggcgctggcgcgcggcgggatggacgtggcgcggatcaacctctgccacggtggccgggagtggcatcgtgccgccatgcgctctgtgcggaggctcaacgaggagggaggattctgcgtgacgcttatggtcgacaccgagggttcccagctcctcgtcgcggaccacggaggcgccacctcagtcaaggccgaggatgggtcagagtggatatttacaaacaaaaaagctgatgaagcccatcagttcacaatgcatgtgaattttgataagttttctgaaggcattttggttggtgatgagcttgtaatagatggtggaatggcaacatttgaagttactgagaaaataggaaatgatttgcgctgtaagtgcacggacccaggtttgcttcttcctcgagccaaattgtcattctggaggaacggaaaaatagttcaaaggaactttggccttcctacattgtcaacaaaggattgggctgacatcgaatttgggatagctgaaggagttgattgcattgctctatcatttgtaaatgatgctaatgatatagagcagttgaaagcttacctctctagaagatcgttagagcacatcaaagtatttgcaaagattgagagtctagaatctctcaagaacctgaaagacatcatagaggcatctgatggagttatggtagcacgaggggatcttggagttcagattcctcttgaacagatcccagccattcaagaatcaattgttaaactatgtagacacctgaacaagcctgtgatagttgcttctcagcttctcgaatcaatggttgaatacccaacaccaactcgagcagaggtggccgatgtttccgaagcagtgcggcaatatgcagacgctgtgatgctatcagcagagtcagctataggtgcatatccccaaaaagcgctatctgtacttcgtgcagccagtgaaaggatggaatcatggagccgtgaggaaaacatgcagaaactttctttcacgggatcagcttgc

SEQ ID NO: 281620 - DNA, 630 bp, Zea mays
actgcaggcttcactaccaaaacatctcaaacataaatcagttaagctcatgcgaagctggacttaaagatcatataaagaaagctaagactttgctcgaagaacttgaatgtctagtcgagaatgtctatggcatcacattaacatccagtttaagtgctctggaagtttcagacagtcattgcctcgacaacatgccaagcaccgattgctacgccatggaggaggataaatgtgcagatcatttggacatggacgtatcgctcgttacggtgatggtcatggttcgcaacatgctgaagcttgactacacgatgcaggagaagattgtcactgcattgtccttgaaaacaccagcatcggagctcgagggatactgcctcatgtgggatctacgcccgtacatcgatgacgacgtgatgcgtcttgcgtggaacatgtgtccttgaagcattggggctttgagttgtttctgctgggatggatgtctggtctgttcattattttcttatgtatgacaacgtggttgtgtgtgttcatggtcgtcttctggagacgagaaacacatgggtgttgtttggttcacataaattggtaactaataatattagattatgtttgtttaagttc

SEQ ID NO: 281621 - DNA, 397 bp, Zea mays
gttatgactcgcttatctgaatttgtcccgtacttgtttcttgccctgtctataaaagtacagactattgtgatttttagctaattctatgtattcttttgttattacaggatttatagttgaagtatgagctctagacaacatacttgttcaattttaatgataaatacttccatacccttaatcagctagctattgtttcttttccttgtgccagtaagctcatccgaagctggacttaaagatcatatagagcaagctaagactttgctcgaagaacttgaatgtctagtcgagcatgtctatggcatcacattaacatccagtttaagtgctctggaagcttcagacagtcattgcctcgacaacatggcaagcatcgattgctatgccatgg

SEQ ID NO: 281622 - DNA, 1008 bp, Zea mays
atataactcatgtccataaaatttgcactagaaaatatgtcgacacaagcatctaaccggtcgtacagatatccagacataactcaactgccgtaccacaatggcaatccaatgcatgttgtgggcaatggtagttactgtgtgcaacaaaatcacgatgatgttaactacatttcctctgatgatcgatcacagagcagtagttctagagttcaagattttcaagcacagttttgcaccctagattcgtcttcggccaattgtgtttatcctgcacatagttctacctcttctcagagcataagtggaagccctctgtctcagcaggagagccactctgatcatgcatatggttcctctccaagtgcatcgtgcatcactcaggttcccacctggacacttaaggatctagaaaatgtgatgcttggacccgattctgacataggtagccctgacagttcctttctgcttgacactgccttgcatggaaataactggagagaacttttgggaattcaaactggggatttgaggcaggtaattgtagcatgtggtaaggctgttgacgagaatgctgtctatatggatgcattgatgtctgagttaagggagatggttgctgcctctggtgaaccgatgcatcgcctgggagcttacatgttggaaggcctcattgcgaggcttcctttcactggacatgccttgtataaatctctgaagtgcaaagagcctgtggctacgagttctgagctcttgtcctatatgcatcttctttatgagatctgtccattcttcaagttcggttacatgtctgccaatggtgccatagctgaagcggttaagggggaagacattattcacatcatcgattttcaaatcgctcagggtagtcagtggatgactatgatacaggcccttgcttcaaggcctgggatgcgaccatacctaatgatcactggcatagatgactacaattctgctcatgcccaggtggcggactgcatatgg

SEQ ID NO: 281623 - DNA, 496 bp, Zea mays
cctcagattacagattttggggaagatgctacaatgggtgaagttagcacgagtcaggcatggtgtgcaccaccacttgatctcttcaaggatttagagcgtcccctcgagaatggatctccaccatatcctggttaccagtcctgctatgtttcaacatcttgttcagaccattcaccttcaacctcgaactccgatggacaggaccggactggtaggattatcttcaaactatttggcaaggaacctagtacaatacctgggaaccttcgtgacgatatagtaaattggctcaaacacagtcctactgaaatggagggttacatctcgccccggttgccttgtactatccatgtacctatcaatgccggctattgcatgggatgagcttgaagaaaatctcctccagagagtcaactcattagttcaaagttctgatgatgccttctggagaaaaggaaggtttttagttcgaaccggctccaagttggtatct

SEQ ID NO: 281624 - DNA, 271 bp, Zea mays
ctcgaccgcgacgacgacaagagcgtgcgcttccagacgaggatcctggagcgctctgggcgcggcgaggacacgtgcctcccgcccgccaaccactacatcccgcccaaccccagcatggaggcctcgcgcgccgaggcgcagctcgtcatcttctccgccatcgacgaccttgttcgccgcacggggctcaagcccaaggacatcgacatcctcgtcgtcaactgcagcctcttttcaccgacgccctcgcttcttcgccatgatcatc

SEQ ID NO: 281625 - DNA, 321 bp, Zea mays
ccaagaacttgataccatgaaagacactgatcagagtgatagctctgcaaatgtcagatctgacgctgaagaaactgttgaagatgatgattctgtgtgtgtcagtgatgatgctcaaaatgatctgaagaataccaagtgcaaattggaagatgcttccaaagaatcttctactgctcgagaagctgaacggagtgatagttctgcaaatgtcattgctgatgctcaaaatggatccgaacctaccacaaatgagttggcagtcattacgatcagtaacgacaaggaaaatgagtccatgcttttcacatgcaactcaga

SEQ ID NO: 281626 - DNA, 294 bp, Zea mays
ctccctttttgcggcgatatgggaacacgatgggatggacagagttaacagcttggccagccttggggctctccgtatagcattcttttttattgcgcttttgagttgtacatataggggatactgtacatgtcgtcaaggtagcatacagggggaaggcgccgatgggccttggttttgtatcattgttgccaactcgatcagtcgacagtctagaaagctagatagggatttttggtacctcgtgctcaaatgtacacttattgtcagaaaacgatgggaaagttgtctgtt

SEQ ID NO: 281627 - DNA, 221 bp, Zea mays
acccagagcgacccgtcaccgtttccggtgatatcgagcttcaggtgatgcagaggtggtgaaaacatcttctcttctccaaagactgctgactgcaagttgcaaaagtttgtcttcagcttgctgtgttctttcttccctctctggcggagtacacgagaagtttgtagatataggcactaggcagctcctttcagctcttctatgtccagggatttgga

SEQ ID NO: 281628 - DNA, 514 bp, Zea mays
  unsure (1)..(514): unsure at all n locations
cgctcctcttctttggtgcaccattattggcatgcttattacatacacacactctgttatatcaggacaatatgccatgactacgacagcaccatttgggatattcgcatggtcaggagtttttcttgcaactgctggcttggtcatgttctataaatgtagcaggaaagatccaggttacatcaacataaatgcaaggggctcgcaaaatcaaagggacgatgaaccgctgctgaagatggagttagaaaatcctgcgcttctttctggcaactggtcacaactttgtataacctgcaaaatagtcagacctgttcgttcgaaacattgttctacatgtgatcgctgcgtggagcagtttgaccaccactgcccttgggtatctaattgcataggaaagaagaacaaatgggaattcttcatgttcctcactctagaagtttttgcaatgatcattactggctctgctgccattataagaattgtnagagatccaaattctccatcatccttt

SEQ ID NO: 281629 - DNA, 513 bp, Zea mays
acgaatcgttgacgtcccttgacctgggtttcaatgagattcgagacgacggagcattcgcattggcacaggcgctcaaggctaacgaggatctggcagtcacgtcgttaaatctcgcaaacaacttcttcacgaaattcggacaggtcgctctttctgaggcgcgggaccatgtgtacgagatgaccgaacgggagatagacatttatttttaggggggcaccggctcccctgtgcacacagttagcacaggacagggccgacgcttgtttgtcgagtaggttgaagaataaggtcgcgcggtagagcgatggtttatcctttgtataggaaaattttggtgggttagttaaatatttttagttactatgtaggttagccattcgatcaggtgtctatatgcaagttttgctggaaacgtcggtgtcgttttgaaccattcgtattattggttgaaaatggaatggatatgacgggcatccaaaaaaaaaaaaaaaaaaaaaaaaaaagaaa

SEQ ID NO: 281630 - DNA, 603 bp, Zea mays
tcgtttattctgaatctggtgtaagctttggtgagtagctttgctagtgagtatgttgccccatcagatggcctttttgctcccctggagtacttggcatctcagttccctggattttcagcagagagccttgcagagctttactacgcaaatgggtgtgatttcaaccatactattgaaatcctcacccagctagagatgcaagttgatgctacacccaatcacacactgaatctgccccacagcacaccgaacttcagcactggggatttccctgcacttccaacagctgaggaccaaaatggtttcaatcagggtaatgtggatgtacttggcatgttcaatgggcgcagttcatctgcgatgcctactggagctggtgattttgtttcagccgttcgcaaacttgcatcgcagaactctggccagtggaagtttaaaaaaggtcctgagtatggtaatggcatttcagctctttctgtacccaagcagtacagttctagcactaaacaatcgtctgggaacaagtttcaaagcatcagcagtggaagagttgccccatggcttgagactctagttctagatcgcgagcggccgctctag

SEQ ID NO: 281631 - DNA, 337 bp, Zea mays
tcgatccgttaccatccctagcttcccaagccccgactcttccatccctccctgcccttcccctgcccgccgatcgcttgccccactcccttgcttccgtggcgcacacgccgcgcacgcgtgctcgcctctcctggaaccgtctccgccgccctcccgcgtcggcgtcgcggcgcaagagggtaccctgaatttcgtcagtgccaagtgacgaccgcttttgcccatttgtgatagctgaatctctgtggttcaaaggcgattgatttgggtttgctgacgcacgcctaatgagctcccaagtctccacatcacacggtcttcatcccccggggaa

SEQ ID NO: 281632 - DNA, 886 bp, Zea mays
caagatcctagaccgccgccgccgcgcccagcgccacgcggcggtgcccgtccccacgccatactgtacgcgctagttgcaggctctactccgggagggatggcctaccacgaccctgacaagttgaagaagtacgatctggaggacctgaggaagaccccgaaccctttctacctcgagtcggacaagaaggctggcaacgggtacagttttgtgaggacaccgtcgccggcacccggcgtggacgagtcgccgttcatgacgtggggtgagatcgacggaacgccgctgaggctggaccccgacgagacgccgggcggcagcgagagagcgcatttcaagatgccaccacctcctgctcgcgacgtcaaggcgcacttgctttcgagggatgccgcccggaaaataaaggagcggtctaagcccttccataggccgcccctaccctcccctgcgaggggtgtcagcgcgagccctagaaccctttcgccagcagcgcaaaaattcgtgaggaacgccatctccaagtcgtcaaagtcctccagcgccattgacgaatctctccgtgcaagctacagaggctcgaccccgtctgcgagcactcccaagtcaaggttttcaagagatcctggcctcgcatcgcgttctccatccacaaggcagggttccacccctccctggtgagtgttagtaaaccacttaatgttatttcataaaatgggtaggtggcccatcctgtactgtaacaaattgtataatgatggaagacatgaaatgatgaagtgatgctaatttactctgtaaaataaaaataaaaaaaaaaaaaaaaaaaaaaaagggcggccgctcgcgatctagaaccccacgcgtccgcggacgcgtgggt

SEQ ID NO: 281633 - DNA, 504 bp, Zea mays
  unsure (1)..(504): unsure at all n locations
tccggccggaattccgttcgcccaccgaatactttcgcgtccgggacggggggagggggttaacttccatcgagccagttcattgctggttctgctagcaggaggttggatttcagaggcagaagctttcagccaggcgggctcagggcgcgggcacatcaatggctggcaaggaaatcctccacaaggtgaaggacaaggtgaaagatgcatttagttcatcaggaccagaaacagggaaaggcaagacaaagttatcaggcaagcgtgtcaagcatggttaccatctggtgaagggcaaatctaatcatccaatggaggattatctagtggcagagtaccggcaagttggtgaacatgatttgggattgtttgctatattcgatggtcacctgggccacactgttccagactttttgagctcccatctttttaataacatctngagtgagccagaattcttgagtgatccagaaactgctatccgaaacgcataccaactta

SEQ ID NO: 281634 - DNA, 495 bp, Zea mays
cctctctcctgtccccacttgacacatccatgtcccaatctcccccaacctcaggtcaaccgccgctacccaagatccagtctccgttctccctctcctctcgcttcatacacaccagggcggcagcggcagcggcaggggcccgccatcaccaacccacctcccttcaattataaacctataaaatatcatcattgacccaagctgaggcgactagtgggtattgatttttggtggggcagatcaaggagggggggagggggttaacttccaaggaaccagttcattgctggttctgctagcaggaggttggatttcagaggcagaagctttcagccaggcgggctcagggcgcgggcacatcaatggctggcaaggaaatcctccacaaggtgaaggacaaggtgaaagatgcatttagttcatcaggaccagaaacagggaaaggcaagacaaagttatcaggcaagcgtgtcaagcatggttaccatctgg

SEQ ID NO: 281635 - DNA, 395 bp, Zea mays
ctcttggattgttccctcgaccttggccacctaaagttgatacttcataaggtagcagattcttcaaagttttggagtatttccgcttaataggtcaagtgatcgcaaaagtcctgcaagatggcagacttttagatttgcctttatcaacagcgttttataagcttatacttggacaggaacttgatttgtttgacatagtgtcatttgattctgagtttgggaagacattgcaagaactgcaagttcttgttgaacgaaagcagttccttgaatccacttctggcaagaaccagctacaagttgcagatttgtgtttccatggcgcttctattgaagatttgtgtttagattttactcttccaggttatcctgattatgtgcttaaagagggt

SEQ ID NO: 281636 - DNA, 598 bp, Zea mays
gtgttccacaaaaacttgttagcctttttggaggttctgtgaatctacgggatgcttgtttaggttctgtcactgtagtcgttcagaataaccaagatgttgcttccagatttgtaacaacggttcatggaaaatgttttcgttcagtagttgggttaatacatgatcggaatccaagcacaagactacttgcttgccgatgcttgattgcacttgggcatgcttctcctggccattttcaggacaaacagattaagaccaagttgattatggttttacttgagctaatcgaagaacctggtcacatcggagatgaagctcccttggcattaaccaccatgattaaagatagcttcgaactgcagaaacaagctcttgcaacgaacgcagttgagaagctcagcaaccatctgctagcgaaaccattggagacaaggcaagcagtggccatattgcttgcgctatctgaactttgctcaaaacttgaagagtcaagatctcaaatgatgtcggttgaggtatcaaccttactccttgatgcattgaaacatgattgggctgatatccgcgttgcagcatgttcgtgtctgaagaatat

SEQ ID NO: 281637 - DNA, 870 bp, Zea mays
gcgtggtcgagatggtgacgggggcgctccggaggtcgctcatgctgtgcagcagcagcgccggcgccggcgtgcgcgagccggagcaggaggaggacggggcgactcccccgggtggtatgcagatagggggaccaacggatgtgcggcacgtctcgcacgtcaccttcgaccgcttcgttggcttcctcggcctccccgctgacctcgagcccgacgtgcctcgccccgtgccgagcgccagtgtgagcgtatttggagtttcaccaacttccatgcagtgctcgtatgatagaagaggaaacagtgtgccaactatactcttgactatgcaaaagaagttatattcacttgggggtcttcaggctgaagggatattcaggataaatgcagacaatagccaggaactatatgtgagggatcaactaaacagggggattgttccagatggtgctgatttgcactgccttgccggactgatgaaggcatggttccgggaacttccaagtggagtactggactcgttgactccagaacaagtgatgcactgcaacactggagaagagtgtagccatcttgcaagcaccctacctcctgtcgaagcagcattgcttgaatgggccatcagtctcatggcagatgtcgtggaaaacgaaagctacaacaagatgaacgctcgcaacatcgctatggttttcgcaccgaatatgaccaagatggcggaccccttgactgctttgatacatgccgttcaagtgatgaatttcctcaagacattgatcttgagaactgtaaaagaaagggaggaggctgcttaagtagccagggcgttcccatcgagctcttggtccccgagcgacaaatatgagc

SEQ ID NO: 281638 - DNA, 715 bp, Zea mays
gtgaaatggaaaaagaattatgtgcagaggcagaggacccttcagagttcatcactcatcgagccaaagattttgtgtcgagcatgaaggacattgaaacccggtttatgcgtgcagctgaagcaggaaatgaggtttccagaatgcttgaaaccaagaagatccgacttgacatatgtgctaaaataccaggttctccagtcaagctaccttctgcccgatttgtgtcagcacttcgagtgtgctgcaatcgtgatgttattctcaaccaggaaactgcgcacattgtttcaaaggttgtcacatggaagcgttctgtctcatctctttcatcatcatctaagagtgcacttatgacatcgataatgaaagatgatgtggatgacagtaatagtgattttgttgaggaattcgccatggtatccggaagccattcttctacgttggacaggctacacgcatgggagagaaaactatatgatgaaatcaaggcaagtgaaaatgttaggaaggcctatgatgagaaatgtaacctactccgacgccaatttgcacgaggcctaaatgcgcaggtgattgataagactagagctgctgtgaaggatctccattccagggtatctgttgtgattcaagccgttgatgcaatctccaaaagaattgagaagattagggatgaagaactgcagccaccgcttgtcgagctaattcaggg

SEQ ID NO: 281639 - DNA, 490 bp, Zea mays
tcctactcgtccgatttccggctatggcctagcctaccagccatgggggagtgcactggcacatacacatatgaaggcagtggtttcaaggccaccgctgctcagcagtatgacagctctcccttcctcagtggattgaagtcgatttcttctaagcccttccatcaagtctgctcacatttcatccggacagtagctggattccagttatgttatgcagcaaagacatggtttggtggatttgtgggcatgatgatatttggggcaagtgaagtcagccggaatgttgatttgggtgatgagaccaccacaatgatctgcaaattcgtcatgcgcgcatccgatgaatccatcacgagagagatcaaatccgacctccagggctggctggatgatatcaccgacggcgctgtggaatacatgcctgaggatgaagtgaagagtgtggcttccgagcagctgaagatctccatggagaggattgccctgc

SEQ ID NO: 281640 - DNA, 703 bp, Zea mays
ccccagccaggctgctctcaacgacgagggtgtcgacctgcccagatgggtgcagtcagttaaccgctcggagtggggttcactagtgtttgatatggagctcatgagacatcagactggtgaggagcccatggctcagctcgtgctgcttgctatggactgcacagcacaagtcccagaagcccggccgtcaatggcgcatgttgtcatgcggatagaggagatcaagaagtcaagcgtgaccccgaacattgaacaagttgatgatcaatcttcaagggctgaatcggaggcggcgccgaccaatccgtttgctacttgatatgagttgacctgagagagagaatctgctataactctagcctgcattcaatcgattcacacattcgatgaatcctatcttcgactgagtcgactgtttttttctgtgcatcttttagcctgttggatttaacggttaacctgatcgtcactaagcagcacgggtgttcggcagtcgcaccctgtgctgcggaaggtgattggtggtgtgtttagggaccagttttaaagtgtgagattgctcaattgctgtgctcattctagccttgatcaggttggttttagcttgtagctgctgctgctgcttgtcttccggctatccatgtgtaattactcaagcctcatctagcgtttggatttttttttcactttttgccggatt

SEQ ID NO: 281641 - DNA, 772 bp, Zea mays
gcgtgccgggtgaccgggagtttactgcacaaagggggaccattggtaggatcaaacaccgcaatcttgttccgctccttggctactgcaagtgtggcgaggagcggctgttggtttatgattacatgaggtttggcagcttggaagacgtgttgcatgaccgaaaaaagatcgggatcaagctaaattgggcagcaaggaaaaagatcgccattggggctgcaaggggattggcatacctccaccacaactgtataccgcacatcatacaccgagacatgaagtcaagcaatgtgcttatcgatgagcagttagaggcaagggtatctgattttggaatggcaaggatgatgagcgtggtggatacccacctgagcgtgtccactctcgccggcactccaggctacgtgccgccagagtactaccagagcttcagatgcactaccaagggcgatgtgtatagctatggtgttgtattgctcgagctgctcactgggaaaccgcctacagattcaaccgacttcggcgaggacaacaatctcgtaggatgggtcaaacaacactcaaagtcgaagctggcagatctgtttgaccctgtactcctggaggaagatccagccctggagctcgagctactggagcacctaaaagttgcttgtgcatgcttggacgacagaccgtcgaagcgtccgacaatgctgaaggtcatggcaatgttcaaggagatgcaggccagttcgacagtggactcaaagacttcggcgtgcacaga

SEQ ID NO: 281642 - DNA, 429 bp, Zea mays
ctctcgcgctcaggctgcacctgggaagctcgctgttgctgcacactcttcttgaacgtcgtcgtcgtcgggggtgcactaaactacactacacatcgtcgccgagctccaaatgccgtgccgtgtccgtgtgtgcgcgcttcaataaattctcggcgtccaacttttaatgagtgatgcacaatcgtgttcatttgtgagatgccctgatcgaatcgatccgtttgcgttttgccacgatcatcaaagaccaaaaggttagctggttgaaaacaaattggctttgtcatttgctaggagatactgcgacttgagtaccctgcgtgcattcttggtctcatcgaagtcgccttgtaatttgactcagagaaagaagaagaggaggaggaagcttccgtgctgacagtaccaacatcagcaagcaacctc

SEQ ID NO: 281643 - DNA, 498 bp, Zea mays
cacttgcctgtccgagtgaacgaacagagactgagcaatctgctgcagtccatactggttggtgggtgtgttggagctatgccagtcatcaggatgatacccacatcggtcctctggggttactttgcctacatggccatcgacagtctaccagggaatcagttctgggagaggatacagcttctgttcattacagaaagccgacgctacaaggttcttgaaggtccccatgcatcgtttgtggagtcagtggttcccaaaacagtaaccatcttcacgatcttccagttggtttacctcctaatatgcttcggcataacgtggataccgatagcccggatcctgttcccagtgcctttcttcctcatgatcgccatcaggcagtatctcctcccaaaatcttttgatcccgtcagtcttgtgggagctcgatgcagctgagtacgtaagaacttgacggggtcccccttgaacacaaactggaagatgaagcatctg

SEQ ID NO: 281644 - DNA, 468 bp, Zea mays
ttcggcggatcgaacaggtctacaggcgcgctcccgcacgccccgcgaaggcttttctcgacaagcttcagcagcggcgcagtcgaccagccgaccaccaggcaccagcccaccgccaaacgtaggatggcggcggagaccaaaccggctgcggccagcggggttgccggcgagatggaggtggaggcgtaccgccgccttttcccggtggccttcctggagcgccacctcggcgagtccgtccgcatcgatgcccgccgcctcagagaggcccgcaccaccaccgtcgccctcggcgccgtgtcctccgcgcatggttccgctctcgtccgcgttggcgacaccgccatgctcgcgtcggtcaagctcgaggtgatgtcgccctcggccgagtacccaaacgaaggatccgtcgctgttgagttccacatgccgtctatctgctccccgctggttaggccaggccga

SEQ ID NO: 281645 - DNA, 288 bp, Zea mays
tttcacgcgtacggctccaggtcccaggcggtgccgtctcgggcacaagccggccatgttcaaatccaagactgcaaactcgcttgtcaaatagacagactccaacacacacccggtagcgatcctcactgacatgatgtggggaccgcggatacaggagcactggtgggtggtcgacacggactgaacagaggagatgacgatagtactgaagcgcggcacctttcaagtccggcagacgctggacggaccccatattaacggaggaggccgcggggtcgagcaggt

SEQ ID NO: 281646 - DNA, 526 bp, Zea mays
gttagttgataaggcgctagcaaagcagttgcagccccatgagtacaactctgatatttttttgcctcatacacaaatatgaatatgtagcacattgttgtatatcttttctaatgctctgaataagatgtggtggtacagtgcagaataatatgttctgttttttattcaactattcaaatcttatttttattcggctattcaaatcatattttttttattagctgattgccggagagattgaaatcaaaggggttgagctgcaggagagttgcagtctgtcgttcttttccatggtagtaggcattttcattgggttcatacatttattctctgtcgatgtttacaagaaaatagtatctaaaaacaagatgcctctgttccatgagggtgtgattgagactgaaacggggggtaccagagtgaaggagtcggaggcagttttagtagagatagagctcgaactgatcgacgagcctcagattcaagagagccctccagttcgtgcattgttgcatgatgaggt

SEQ ID NO: 281647 - DNA, 660 bp, Zea mays
agcccatgtcctccgaggacctcttcgacggcctgcctccgcccgccgccgccaccgccccggccggaggcggagctggcgcggcctccctcttgctgcccccgccgccaccacctcctccttctctggcgcaagcaacggcacccaagcccgcgctgaagagctcactcaagcggagcaagccctccccctcctcagacgctactccctcttccactcctgcccccgcggctgccgcgcccgaatcccatgttcctgagaaacgtcttcggttcagaacaaccgttgatgcttcagaaacacaagtgattgaggctatgcagaagatagcttcacacatagggaacgcttcaaaattcagcaaggcatcaaaactagctttgcaactcatcgaggctggaagcgtcaagcctggaacaatcggtcatttctttgctatactagaagctgcgatgtcttcaccgggagtgtgcaacgagccttctgtacgagcagactaccacaaattgttcgatgctgctcagggtgtaacagagttactcaaccaagagcagaaaaatcgattcaacatatgggtgctgcatgcagtggtggctaacgatcttttcactgatgacagctttgtgttctcaaaggctgtaggaaagaacaaagatgcca

SEQ ID NO: 281648 - DNA, 464 bp, Zea mays
cgtgcgcccacgcgtccgcccacgcgtgcgtccacgcgtacgcccacgcgttcggtgagagacttctttaagatcaccacaccctaccgtcacccctccttctcattgtcctttctctctctctctctctctctgtgtctatctctctctccattgcactcgctctatactaggtcctaggtaactagcaatggagctattaaattgctgcttgaggtgcagcagcaaggcacactgctacaaacaagctgatcagctgatgcccggtggcttcaggactttgccaaggttagcgaggtcccgccccattttgcttctcccctgggattgcggttgcgtttgagtgcacttctgaggctttgattggcccctcccgctccgcacttaagctctccggctcgtccatggcgtcgcagccctcatgacttgctgtctcttggtagctgccgcttgtagctactcca

SEQ ID NO: 281649 - DNA, 380 bp, Zea mays
tgtccacgcgtccgcccacgcgtccgtccacgcgcccgtccgcgcgtccggcctcggcaacgcgctcgcgctgctctccatggcggccgggagctatttcaactcgcttgcgctcagcgctggcgggtcgatcacggcgcgcggcggggtacgcgggtggctcccggacgacctgaacaagggtcatatggactatttctcctggatgatggccgctcttggaacgctcaacctgctgcacttcgttgcactactgcaacagacgatacagaggcaacaacaacaacacttcttgacgtgtgctgtcatgctgtgtgccccatgtttctcaaaatcatagtttgataatactatattttgtaattatcataataatccta

SEQ ID NO: 281650 - DNA, 378 bp, Zea mays
ttgctcggcgctgccgccgccgccgtcgccagggaggcggacgctgttcctggacctcgacgagacgctcatccactcccagacggagccgccgccctcgcggttcgacttcaccgtgcgccccgtcataggtggccatgcggtcaccttctacgtcgtcaagcgcccgggtgtcgaggcgttcctccgcgcggcggcggatgccttcgaggtcgtcgtcttcaccgccgggctgcaggagtacgcctccctcgtgctcgaccgcctggatccagacggggagggtgttcgcgcaccgcctttaccgcggcgcctgccgcgacgccggtgacgggacgctcgttaaggatctggccgccaccggtcgggcgctggacc

SEQ ID NO: 281651 - DNA, 908 bp, Zea mays
tcaatactctctccctcgccgccggccacctccgcctcctcccacgcgccacctccgcctcctcccacgcgccacctccgcctcctcccacgcgccacctccgcgacaaaccactgaaggagggagaggactcgctcatatcgtccgatggaggaggactcgatcaaggggatgatctccgcgatatcctgggtgcccaggggcgccgccaagagcgtgcccgtcgttgccgacccgcccactcaggaggagatcgccgaggccatgaagaccttcgacctgggcagagactccgggagcgacgctgacgaggatgatgatgctgccaccatggaactcgacggtgcggcggaaacggtggaggaggttgatgaggctgcccgagccaaggccgtagccaaggcgctctgcaagggctctagcaaggcggacgacgtcgctgatgagctccgcgaactcaacatggacgcgtacgatgatgaagatgaagaggtcgatattttcggctctgggctgggggacttgtactatccgagcaacgcaatggacccatatctgaagaagaacaatgaggatgatgaggaggacgacgatgatgatgaggaaatcgaagataagatgatcatgcctactgattttgttattgtctgtgcacatagtgaggacgatatcttctctcttcaggtcaacattcttgaagaaacaaatgatggtgaacaaaatatctttgtgcatcatgacgttcctctcgctgattttccgctatgcacagcttggatggattttaatctgaaaggtggtgaaaaagggaattttgtagccgttggaaccatggatcctgccatagaaatatgggacttagatatggttgatgaagtgcaaccgcacatggtgctaggaggactttc

SEQ ID NO: 281652 - DNA, 513 bp, Zea mays
tcgcctacgcgtccgtgtctctctgtgtcgccaggagggcgccgtcgccaccaacgcaacgcgcgccgccgcagatctccgccaccgacgcgccggccatggagtacgagcgcattgagaagccgttccccgtccagcagggcggcgggttctcgcccaagcggctgcgcgcgatgctgctgggggtggacaagcgccgcaaggggcaggacggcgccgccgaggaggacgaggacggcggcggcggcggcgactacggcgccctgcccaaggcccacgccagatccggcgccggcgactgtggtggcggcgcgggcgccacgtgcgaagaatacaaggacgtggacgtggtgagcaccacctcagagttctcgtcctcgctggagacagcgggtgggcaccggccccgggacgctcaccccgtcgccacgggttctaggaccagggtgccgtccgaggaggactcgtgcgactcggagagcgtggcatccaacttcgagttccacaaggagc

SEQ ID NO: 281653 - DNA, 1111 bp, Zea mays
ttcacgcgtccgcccacgcgtccgggcgaaccaagggttctaccttctgggcctggacaacacgtcgccgacgttcgcgtccgccatccagaactcggtcccggccatcaccttcgccatggccgcggcgctgcggatcgagaaggtccggctggaccgccgcgacggcgtggccaaggtggcgggcacgctggcgtgcgtggcgggtgcgtccgtcatcacgctctacaagggccccaccatcttcggtcccagcggcagcggcggcggcggcggcctcgagctggcggcggtgggcggcgacaagaactggacctggggtgcgtgtacctgatcgggcactgcctgtcgtggtcgggctggctggtgctgcaggctcccgtgctgaagaagtacccggcgcggctgtccgtcacctcctacacctgcttcttcggtgtcatccagttcctcgtcatcgccgccttcatggagagggacgcggaggcctggaagttccactccggatccgagctcttcaccatcctatacgccgggttcatcgcgtccggggtggcgttcgcggtgcagatctggtgcatcgaccgcgggggcccggtgttcgtggcggtgtaccagccggtgcagacgctggtggtggctatcatggcgtcgctcaccatgggcgagaagttctacctgggcggcatcatcggcgccgtgctcatcatcgccggcctgtacctcgtgctctggggcaagagcgaggagagggcgcgcttcgccagggacgccgccaccctcgtctccggcaccggcgaccgcgaggggctccttccggccggcggcggtggcacccggagcgccagcaaggcggcagcgtcggccgccacgcagcctctcttgctgccgtgctccacctccaccgacaatgtctgatcggtcgacctatgaatccttcgtcgtcatccatggaccatggtgcgtggagataagagactgcatgcgtacgatccatgaggcgctgccatgcatgctgcgcgctctggtgcactcatggattggagcagtatgatccgatccagcagtaataattatcatcagctagtcttttttttgtggtttttccttg

SEQ ID NO: 281654 - DNA, 434 bp, Zea mays
tggaagggttgtcttggaatcagtcaagccctacttgcagagaaaatgaatcttgctggtctaacttttggattgtaagcaatggcagaaaaaacataataaggatgttgcagaaatcatcctgcttgacatcaggtcttcaaccctcttgattgaagccagcaatggctccaaaacactcagatctagcttcagttgagatattacagcacagttgagattgtcagcagtttcctttcctgtatcttcaaattttgtccactaggatttcatgttcagttgctagaaatttggctgtgaagatctgatctgtatgttaataactgttgcccatctgtctgaaatagttttctatacttgattcttaggatgttgtatatttgaaaagtgttcacaaaaagatattccggtatatgataccgcggagttgtccc

SEQ ID NO: 281655 - DNA, 555 bp, Zea mays
  unsure (1)..(555): unsure at all n locations
attcgaaagttttgttccagtatgcggcaaggcatgttcctctgagaattgaggatctggttgcctccattcaatcaaacaatatggaggttgaatccaccgatgttgaaatgcaagattaaggttgaagaggtaggctttcatgtcagcattttaacaaacgacatggtcgtctgaaaccatggttttcagggagtgcctcacggcctataaaaggtttaaacagcgcacgagttttttgtaagatgaacattctgaacattgccatccacgtgaatgtgactggtataggagtagcgcaactcaatgtgtgaagtgcccgtttgctctgagtttggcgatttcaatcgctgaaatttggccccaaggaaaaagtggtgtgtctacgtatcggatttctccgtgtttgatgatgaccctgactcccaatggggacatataaatctaagtgccctttaaaaaaaatatatttagcacatcaatgtggtagctgtgagtttctctcttggtttattgcagatgcaaaaacggntgcgtcagtcagttgtacatata

SEQ ID NO: 281656 - DNA, 485 bp, Zea mays
ttcacgcgtccgcccacgcgtccggcgcaggcgcaggcgcaggcgcaggcgcagggagacctcaatcatctggatttcggcgacatatactactgcagggagagaatccaaagccctccctcctttgggcttgtctctgcctctctctctcctcccttctcccacccacccctctctcttgctgtgggtgtgctgtggagaggagaaaggaagtagagcaagaacaagaactaataacaccaacaagagctgctgccaactcctgcacagcctgggctctcatcactgattgcccacctattaccttcctcttttgcgatttagaatcacccatatatctacctgctctcggtcctctgtgaactctctcgtcttctaggtttcccaggcctcaagataggcctctggaccaaagcttgaaagcagctgctgttcttgcctctttttttaattcttcattcgcggtcctggattttgggtcttag

SEQ ID NO: 281657 - DNA, 593 bp, Zea mays
cgccgcggccgccccgcgaagagaggtgacgcggcgtgcacacggccatagatggttactgctctcctgggctgtgaggctgtgaggctgtgaccaaacgctctacgctcccacttcccaccaactcccaaatcctccctgaaaataagaatacgagggtgagcgatcgagcggtcgagggggttgtgcttgtgcgtcagatcaaccgactggtggcgaggctgcgggaggagatggccggcgaagggaatggggatgaagggtggaggcggacggcatcgaggtcagcgccctgcagttcggctacgacgggcagccgccgctcttcgcgcgcttcaacctctgcgtcgcacccggctcccgctgcctcctcgtcggcgccaacggatcaggcaagaccacactcttgaagattcttgcgggaaagcatatggttggaggaagagatgtggtccgtgtcctcaatggttccgcttttcatgatacacagctagtgtgcaatggtgacctttcgacttgggtggttcttggagccgtctattggttcactggggatgttcacttgaggcgactttttgctggcacatgatttt

SEQ ID NO: 281658 - DNA, 580 bp, Zea mays
gttactagctggaatatgtgaaggagatgcaaccatggtatgtgatgcttttcttctcattcattgatttcaacatacatttctatcaataaaagtaggcaaagacattgtaacctatgaacaaatcttaatattttgaactatattcaggacacgtggagactaagtaacaaggtaacagtgtatcagtggtcatatggattaggtaccgctaggctatagtttctttcagttggttaagcgtgacgaacttttctttgcttgaatatgttgaattgttttctttgtccttcatcagcgataaccccttccttaaatgttaacttcgtactttctaagctgtaccttcatctagtatgtagttctgtgttcatggtttatatcaggagcaatgatggattttgtgaagtccattttcatcgttatatttgtcagtcatcatcttggatttatcttgagataaaatatttactgtgtatgtttgattagtttgttcaactaacctagatctgcttgttattaatatatgtggttcaccactgggtctggattagctattttggctactgctcttaatttc

SEQ ID NO: 281659 - DNA, 337 bp, Zea mays
tacactaaagaggaagtctgcaacaagcagattaaccctgagatccctacagaagatcaattttctaggggtcagaaacatgacactttactaatggatcgagtaccttctgtcaagaatccatttaatctagacgatgacaggaatgacgacttatttgaacttcccactgagagctgctttttggaggtaccaaatgttgttgaatcgagaaaacaagttgactctacatcccgaatggtggttccaccaatagtctctaaccaaattaggatggctgaagttcaacaatgccataactcaattgaacgcatattatcttcatcaagtgccagtg

SEQ ID NO: 281660 - DNA, 604 bp, Zea mays
tctttaagatgcaaaaagaattgttgaagaagaaggagctaatgctcatacagaaatagaaactgctaagggttctgtccaaagagttcagcaagcagttcaggagcatgagaagatgtcccaaaataccgggaagcaaaagcaagacatggaagaactaaagaaagaagttagggaagcccggaggatcaaaatgttgcatcagcccagcaaggcaatggatctggaaaatgaaatacgaattttacgtaacacattcgctgagaagtccaaggattgtgttagtcttttgaaagagttggaaacgcataaaaggttaaaagaaaatggtaccatcccttcattcgatctggagggtctccaatgcttaggatcaatgctacgtatagttggtctgagtggtactcacatggatctgtcaaatatttcaatccagtggttccggatacatccaaaagaaagcaacaaagagatcatttcaggcgccacaagaacagtatatgctctggagccacatgattgtgggcgctatttgcaagctgaattcgatgtcggccggtgaaaatgcagttgcaaagacagctgggccaggagaccctgatgc

SEQ ID NO: 281661 - DNA, 382 bp, Zea mays
ccctcgtttccgccgccaaccaactccccggcgcctccctcctccaccagaccaccacccacaaacccttcttattgataccatccacagtcccagcccgcgccagcctctgcctctgccccccagactaccccctgcctgcaggctcctgcaactgcaatgtcggcgctcgggacgctctccggcggggccgccggtgtctccggcctcatccgcctccgccgtcgggtggcccccgcactcactgcgccgtcgcaccacgccgctgggacgttgaagtgcgccgccttgcccggtgccggcccggtcgtctggagacgccagctccggccgtcgctcctcctgcccgccacactgctcgggtcgtcgtcggaaggcgcca

SEQ ID NO: 281662 - DNA, 440 bp, Zea mays
ctcggcacgtcattgtgcactgctgcaccgagcctagcgcgagcctccgtccgaaagtccaaatcttcagctctctccttgacgcatgcccggatcgatcggtccagctctacccaccggaggaggaggcagatcaacgggcagctgactaaggtggatccacggaggaggcatggcaagaggcccctacccgccgacgaggaggaggaagaggaggaggaggagctgcccccgccgccggcaaagtacgagcagctggatcaggaggagaagcatcacgttgtcgtctcgcagctgcaagcaggagctacctttagcggtggccgagggtcttcgtcgtcttccgtggccggcccttcgccggaggcgtacgcgcagtactactactcggcgcgcgccgaccacgacgcctccgccgtggcctccgcgctagcccacgt

SEQ ID NO: 281663 - DNA, 1321 bp, Zea mays
ctctttctctctcaatcctcacctctccggctctctttctcctccccagtccccaacggtgaggcccccgccgcgcagcccatcgacgcattgccgctgcaagcgcggacaccgagggctagaagcggcggcggtgccagggttcggcgctcggtcggcaatggcgaggcggcttatgctggcgctccctgtgctcctcttcttattgctcgtcgggcaatgccacggcggcaagattggcgtctgctacggccgcaacgccgacgaccttccggcgccagacaaggtggcgcagctaatccagcagcagtccatcaagtacgtgcgcatctacgacaccaacatcgacgtcatcaaggcattcgccaacaccggcgtcgagctcatggtcggcgtccccaactccgacctcctcgccttcgcgcagtaccagtccaacgtcgacacatggctcaagaacagcatcctcccatactacccggacaccatgatcacctacatcaccgtcggcgccgaggtcaccgagagccccgccaacgtctccgccctcgtcgtgccagccatgcgcaatgtgcacaccgcgctcaagaaggccggcctgcacaagaagatcaccatctccagcacccactcgctcgggatactgtcccggtcgttcccgccgtctgctggggcgttcaacagcagctacgcctacttcttgaagcctatgctccagttccttgtggagaatcaggcaccgttcatggtggatttgtacccctactatgcgtaccagaactcgcggagcaatgtgtccctcaactacgcgctgttctcgccagagtcccaggatgtgattgacccaaacactggactggtttacactaacatgttcgacgcccaggtcgattccatcttctttgcgctcatggctctgaacttcaagactttgaagatcatgatcactgagtcagggtggccaaacaaaggggcggtcaaggagactggagccacaccagacaatgctcagacctacaataccaatttgatacgccatgttgttaatgacagcggcacaccggcgaaaccaggggaagagattgatgtctacatattttcattgttcaatgagaacaggaaacctggcatcgagtcggagaggaactggggactgttttttcctgataagagctctatctacagccttgattggacgggccgaggcaatgtggatgtgatgactggagcaaacattacaagtgctaatggtacctggtgtattgcttcaactaatgcatcagaaactgatctgcagaatgccctcaactgggcatgtggt

SEQ ID NO: 281664 - DNA, 665 bp, Zea mays
gttgcaagtaataagatacgtaacaaaccatcctgacaacaggtgggttggtgtaggtgatgctacaggggattatccatttagtcaccacaagcttaccgttcaattttcagaggcgtctgctgcccaagataggaaattggagggattagtccataaggccatccgggagctttggaggccgaatcccagtcaattaattctcctacaaacaaggggaattggtgctttgcataaagagcttccaaaagcgtgtgctttgactggcagcagtgatccgtgctacatcgaagcatatcatttggcagatccaactgatggcagaattaccctacatctaaagattttaaatttgactgagctggaactcaacagggtggacatccgtgttggcctgtctggagcactgtattatatggatggtttctctcgcactgttcgtcaccttcggaatcttgtttcccaggatccagtccaaagtagtgtgactgttggagtttcacattttgagagatgctcgctctgggttcaagttttgtattacccgttttatggaagtagtggatcaacagactatgaaggagattatgcagaagaggattcacagatgatgaggcagaagcgcttcacatcggcctgaacttggggaaccggttgtttttcgg

SEQ ID NO: 281665 - DNA, 701 bp, Zea mays
gcaagagctatcctcttgctattactaaggttgaggagtctggagagcacactattctggggactggtgaactatatctggattccataatgaaggacctgagagagctttattcagaggtcgaagtgaaggtagcagatcctgttgttacattttgtgaaacagttgttgacacttcttctatgaaatgttttgctgaaacacctaacaagaggaacaaaattactatgcttgctgaaccattagagaagggcttagcagaagatattgagaatggtcttgttagccttgattcaagacagaaagaaattactgacttctttcgccaacgctaccagggggaatgtgcttgcagcaaggtcaatatgggcttttggacctgacaagcagggtcctaacattcttttggatgacacactttcaattgaggttgacaagaacttgctcaatgcagtgaaagattcaattgttcaagggttccagtggggtgctagagaaggtcctttgtgtgatgaaccaattaggaatgtaaaattcaagatcttaaatgcaaacatagctccagaaccattgcaccggggtgggggggcagataattcccacagcacgttggggttgtctaactttgcatttccttaatggcttactcttcgccctaatggaaccctgagtatttatgtttcagaatctatacactctat

SEQ ID NO: 281666 - DNA, 345 bp, Zea mays
attacaacaaaataatccatgtgaatttttttttaaaaaacaattgaataaatcaatgtctgatgtacaagatctgatgatggtacaaacgctacagctacgctgcgacgttttttacacaaggcgacagttttcaagaatgtgaattgaacaaagatacaacaagagccaccaccggcggcaacgcactggtgagaggccggaggaaacaatgtaatgatcaattgtgacacatatgtaccgactttttcctgaacgtggtgagagcacacaacgaggtcgttttgtcagaaaggtttactgcgcttgctgttgcttctcttgagctgtacttttaactttttt

SEQ ID NO: 281667 - DNA, 490 bp, Zea mays
tccacgcgtccgcccacgcgtccgcggaagccgatgctgagcccacctcggcctccgccgccgttgagggcgccgatcctgcgcagcgtcggcccaggtacaagcgccgcaaggtcgccatccttctcgggtactgcggcgcggggtatcagggcatgcagaagaatccgggcgcgcgcaccatcgagggggacctcgaggaggcgctctaccaggcgggcgccgtgcccgaggccgaccggtccgcgccgcgccgttacgattgggcacgtgctgcgcgcaccgacaagggcgtcagcgaccgcggcgcacgtggtgtccgggcgcttctacgtcgacccgccgggcttcatcgatcgcttgaacgcgcactcgcgccgcagatccgcgcctactgctacgtgctcgttaccaactcattcaacgcgaaaaagttctgcgaccgccggaggtacctgtatctgctccccgtatttgctcttgaccccag

SEQ ID NO: 281668 - DNA, 647 bp, Zea mays
aaggtattgaagaagtcccagatatagggccactacatgctcatttaggttcaaggaatgatgaggctcaagagaagtgaaacttaaatctttgacagttttgaaatggttggggacttgaggtggcagtcatggtatcttctgcttgtcagcattcgttctgatccacatgcagtatatgcctttatgatatggcccccgcacagcattttctcttgaagcttcccgtctccgtagtcgcagctgaaagagagtggaacgccttgatttgtaggatttcttgtcatgctggttaaagctatggtccgagtctctgtcattgccagcttcttttttttttcttcctctgcgtaatgcgtagtgagtggatggcctgcgttttaggcacgtcatcaaaccaattatctgctggaacgttggtactctcttgccaccatattgcaactagaagtcttgattggcatgttgccacacaaattcctactatgtttgatgtcttgtatcatgtcggagccccaattcctgctgtgtttgtgatgtaataatgccaattccaaccagcgacgtgagacccatttgcatggatccagtcgataataccttttgaatataaaataagggcaatctctttttggccctgtttgggg

SEQ ID NO: 281669 - DNA, 349 bp, Zea mays
gttggttcagccatgcctatcgccctcccactaaatctcatcgcgttcgcgacacctttctgcgaaaagatacggacatcaccgagcaccaagccaccatgggcggtgtttcccgtctatccagagagactgcagaagcgcaattagcctagagattgcaggagaacagaattcaatcaggcccgcttccatctccaccttcctcgactctctctctctctctctctaaccactgtactagaactatcattacctgagcaagattgcatctacctgtactgggctgaacattataccaccccttccccttcatgcccgggccaaatcgccattgccaggcaccacctag

SEQ ID NO: 281670 - DNA, 655 bp, Zea mays
gccaggcgtgctcgtcggcgaccacaagaagaaggccgtcgtcaaggagcttcgggacgcgctgcccgacgtcggcatgggggatagggagaccgacttcgacttcatgtccatctgcaaggaggcctacctggtgacgtcaaggaagtacagcccggtgcccaggaaccagctgctgagcccgctgatcgtgcacgacggccgcctcgtgcagcgcccgacgccgctcgtcgcgctcgtcaccttcctctggatgccgttcggcttcgcgctggcgctcatgcgcgtgtacatcaacctgccgctgcccgagcgcatcgtctactacacctacaagctcatgggcatcaggctcgtcgtcaagggcaccccgccgccgccgcccaagaagggccacccgggcgtcctcttcgtctgcaaccaccgcaccgtgctcgaccccgtcgaggtggccgtggcgctgcgccgcaaggtcagctgcgtcacctacagcatctccaagttctccgagctcatctcgcccatcaaggccgtcgcgctgtcgcgggagcgcgacaaggacgccgagaacatccgccgcctgctggaggagggcgacctggtcatctgccccgagggcaccacctgccgcgagcccttcctgctgcgcttcagg

SEQ ID NO: 281671 - DNA, 442 bp, Zea mays
ctctcagctgctcaacaccgcagacaagtccagtcctctccctcccctcaacctagcaccgccacttgcgcccaccacgccgccgcaccgccgctggtgaacgaatccgtccatcccgtacaccagccatgtcctgacacactgacacacacctggtggaggaggaggcgctacctccgtccgccggcggtgcaggggaggagccggccatcctcagggcggcgttgggctccggcaagctgcgcatcgaggggtcgctgagcttcaagcgggcgcagaccgcactgcaggtggagaccgagatcttcatctggaccgctgtcatgcccgtgccgggaccgggacccctacccaggggaacccccgagaggaacacactaccacgttttaccagttagccaccaccgtgctccattttctttctttttttcggtttcttcgt

SEQ ID NO: 281672 - DNA, 453 bp, Zea mays
  unsure (1)..(453): unsure at all n locations
cggacgcgtgggggccgccacatccatcaaggtcgcgcacctcacaaccctcgcgctcttctctccgactccaaaccccttcggtccgaagtccagcaaacacagacctagagccccaccacccatctccatctccatggatccggccctcgtggaccctgcccacctgcaggcccttatgctcgcctgcggccactcttgcacgctccgcctctcgccggcgctatcagtttccgccgttgagccggtcgacctcagcaagctccggactgcccttgcgcacagcttcgtcgtcgtatctgtcttctgcggtgctaggttcttcacacatgacagggaaagggaggggggagggacangagattcttgggcttggagatcggtctcgatcttcagggtgagcggcgccttgtcggattcgggcgcgccgtcttcgaccttgggctcaccgga

SEQ ID NO: 281673 - DNA, 735 bp, Zea mays
tcgtgccatcttctatttataatagccccgccttctctctgttacacgccatacaattctcacacgcgcgcgcccaacacactagcctgcaggatcgtcgagcgcgaggcggctgccccgccggccggttcgttcgctctatagcttgagaccgatcctagctaggccaagacgatatcggcggcgatgatgatggacgcggcgaggatcgtagagtacttcaagggcaagtgcatcctcgtcaccggctcaacagggtttcttggaaagatccttgtggagaagatactgcgggtgcagcctgacgtgcgcaagatttacctgcttgtacgcgcggtcgacgagccatcagcgaacagcgcgtccaacaagaggtgatagacacggagctgttcggcctgctgagagagaaacacggcaagggcttccagcagttcgtagaggccaaggtcgtcgctttggccggagacatcgtatacgacggcctggggctggaggcagccgtgctggacgcgctggccaaggacgtcgacgtcatcgtcaacatcgcagcaaccaccaacttctacgaaagatacgatgtttcgctggacgtgaacgtgctgggagtgaagcacctgtgcatgttcgccaagcagtgcgcgaggctcaggatgctcatgcacgtctccactgccttcgtctcgggcttcagggagggcctcatcctggagaagcccatcaagcccggcgagt

SEQ ID NO: 281674 - DNA, 533 bp, Zea mays
gttacccacccattttcgtcggcctcctcttccccccgcctcgccagcccgaattaggagctacgacgaatctaccgggccgagctcgccagctggcctccccgagggcgaggccctatcggctgccgttcccccattgacagggagctcagccccgccaccgccgcggctgcggcgtgtggacgtaaccggagctcctcgcagccgctgataagatccgaagggttcctaggctttttgtggcgggaggcgactggttccgtcgggtggtccggtgagcatggcggggcccaagtttgggtcgttcaaggcagaaaagggggactcagcggcggctgcaggcgcggcggcgcagaggagggacccataccaggtgctcggggtggggcgtaatgctactgagtcaggagatcaagagtgccttccgccgcatggcactcaagtaccatccagataagaattcagacgaccctgttgcctcagagaagtttcaagaggccacattctcctataatatcctgtcagatccagac

SEQ ID NO: 281675 - DNA, 355 bp, Zea mays
  unsure (1)..(355): unsure at all n locations
ntaatctaaacccatatcagatataaggttaacaggaagctattggtgctccactaagaaaatagccgcattttgttgacagtggcttcacagtttggtacataactcatgaagagcagtgttcttctgccacaaacatttgcggtgcaaacatttgaggcaccagctgacttcaaagtttagaaacagcaagttcttgtttcatctgttaacaaaatcctaatggattatgcagctatatataagctctacctgagcggatgtaactactaactactttcagatgagtaagggctttacatattcatttggttgtatacaaagttcctacccattttttggtcaattcatgact

SEQ ID NO: 281676 - DNA, 611 bp, Zea mays
tacgcatttaagccggggaggtggagcagtgagtgggagtagttcaggcactgggagaggagaggaagcaggacctgggagacctcgcctcgtccgtcctcctgcctacttccttgcttttggtaggtgctgcttgttttatcttgaaatgggctctcatgatggcgaggatgaagagttgccacccccccctccggtgccaccagatgtgattcccattaaagctgaagatgctgtgggtgaatcaccagcaaaccatatattaaagccaaagagattactgatggacaggcctggtataggaagaaaagggcagccgacccagctctattcaaatcactttaaagtcgctgtgaagagtacagaagacgtcttctttcactactatgtaaacctgaagtatgaggatgatcgacccgttgatggtaaagggatcggcagaaaggtgattgataaactgcagcagacatatcgtgcagagctttctaacaaggactttgcatatgatggagaaaagagcctgtttacagttggtggtcttccacaaaaaaagatgagttcaccgtgttttgaggacgattttctggaaggatgttgccattggagccctg

SEQ ID NO: 281677 - DNA, 491 bp, Zea mays
tttgtataggaagcaaagtgcccacgtcccgaaacacgaattggatgccctgcaagcttgaccattagacttactgctaatggcaagtaccgtttgacagagtttgtgccgaatcataaccatcagctggcaacagcctctacagttcatatgctgaaaacaaagaaaatcaggcgcaaagcacgggctgcgagagaaaacctggcagatgataccgtgagtacaccagaatttgagaatgaagacgaggcatatgaattttacagcatgtatgcggggaaaattgggttcagcgtgcgcagggctagcatgacggtgaataatcgagatggttttaaccagaagaatgtttgtttgttcaaaagaaggattccgtgagaagaaaagaggagcaaaaagagtaaagaaacctcgaccagaaacacgaactggctgtccggcatgtatggtcatcaggcttggaactaacgagaaattcaagtccagaattt

SEQ ID NO: 281678 - DNA, 322 bp, Zea mays
aacgccgccgcgacgggctgctagctagtctttggtgttgcaggtgttcgattcctgattccaaattccagactccaaactcggttcttcaatcgacagattccgatttacatcccaaagctcttcggattgaaatccagccgcgacccaagagataagagtatttgggattagtagatagggagggtagataggatagtagaatagaagaggagcactttcgctgatgattacggcggaggagaagagccccgaaagggaggaggacgaggaggatgcgaacccgcgcgcggaggcctttctggagatcatctgccgcgtc

SEQ ID NO: 281679 - DNA, 432 bp, Zea mays
  unsure (1)..(432): unsure at all n locations
ttnnncctttttttttttttttttttttttttttttgaaggttttttaggggagcgggggttacaccataaagcaagaactagatgaacgcccccggagatattaagaagcaacagtactagttaagcaagcgttttttggggggttacatcacaagactcgatccaagcgcaaacatgcggaggagacgaacgggaaacagaacagcaaacataggtcccaaatggtaattaaagggctatgagaaccaaaccaaatctaataaaagagaagagacggcatgggtggttgaacaaaactagctagctagtaacagagcatcgcggccgtctttttttttttttggngcaaatgacactacgctttctttttcttaccatgcgtattgggtgaggtttcctttctgccaacatttttttacccgctgccaac

SEQ ID NO: 281680 - DNA, 418 bp, Zea mays
ctcgttctaggcgcaggcgcgagcgcgacgtccggcgtccggcttcggcggaggagtggagcgatcccgatccccacaaggaattccatcgctgtcgtggcgttcggaggcgctcctcccggtcggcaagcaggatcaggtaccctcccgtcccggatccccccaaccgttccgtttcccgcggccgggctggcttagctctgcggcgctggctgccatttcgggccaaatttggcgcgcgaagcggcaggatttggattgaatggcacgcgttgtttccagtcgacgccctcttggcttgcctttggctgtaggaaatcgcacggaggtgaggatacacgggtgcggaacgagagctaggcgaacctgtctggtacctcagggcggagatggacaagaaggcgacgatggagagcaa

SEQ ID NO: 281681 - DNA, 559 bp, Zea mays
tcttttgtgcagattatgctgacggcgttctctgcgtgctgtgaagagctcgtcagccgatgggcgcagtcgcttggccccgacggctcgtgcgagctggacgtggacccggagcttcagaccctcaccggcgatgtcatctctcgcaccgcgttcggcagcagctacctcgaaggaagaaagattttccagctgcaggccgagcaagctgagcgcctcatgtccatcattgacaagttcgccgttccgggatacatgtccttgccaacgaaaaacaaccgaaggatgcgccaaatcaaaagcgagatcgactggattcttcggggcctgatcggtaaaagaatgcaagctatgaaacaaggtgagagcgacaaagatgacctgctgggcttgctgctggagtcaaacgcgagagagacaggcgatcagagcggccagcccggccaaggattgaccatggaagaagtcatggaggagtgcaagcttcactacttcgcgggaatggagacgacgtcggtgctgctcacgtggacgatggtcctgctaagcatgcacccgg

SEQ ID NO: 281682 - DNA, 513 bp, Zea mays
ttttgcctgaggccaacctcaaatgcatttaacaaagttatagatggctgggtgaaggttgatatgctcaacgaggcccatgggttctttgatatgatgcctgaaaaggacatagatgatgttacagtggtcattttctactttggaggacaacatgtgggctgggaaatgaagacagaatggttgtctaatggttggctatgtttggtatgcggtgcatctgatactcaagagcttcctctacatttcattaaacttgcaaaggatacgtacacatctgactgcatgttcaaaaaaatcggatatggcactgtgagtgaggctttggtttacatgctgtccttactatttgttcgaagagattattgcaacgaggaaccattttttaggaatgtgcttgagcattatcaatgcggcgttgagatgatacggcgggatttatttattggccattgcaaacattatttttaaagtgcttatccacttcaaccctgctttgatggcctataaatg

SEQ ID NO: 281683 - DNA, 450 bp, Zea mays
tggacgcgtgggtgctgatccaacaggtcatgcccaaaacatccacttcccctttgatattgaagcggacacttcaatcagtgttgcaactgagatggttgtgcagctcgatctcacagatcaagatgtaacggcgattgcagaaatgatagatgctgaaatacgttcgcatattcctgattgggcagcagaggagtcaattgacaaccaaggggatgaagctgctcactctgagacccatagttcagaaggtgatgagggaacttctgaactgcgtgatgagatcggtgcctcacataacggttttgttcaagaacagcttccctctggacggaagtactggtcagactcacccaggagagacggtgaaatatctcaatcggtggtggaacatcaaattggtgatagtagtgccaatggaaaaccaaagaggaacaaagtagatggcat

SEQ ID NO: 281684 - DNA, 679 bp, Zea mays
gctcccacgcgtccgcccacgcgtccggtaagctcccgtcctggacggggaagacctcgtgctgccgccagatctaaccaaaccccgcgccctcctcaccgtccggcgagctacggactcagcagatcaccgtcgctcgagttgtacctgaaggcgcgcccgtggaaccggccgcgagataagggcggcgggaaggcgggcgacgatgccggtggcagcgtcggccatctacttcctcaaccttcgcggggacgtcctcatcaaccgcctctaccgtgatgatgttgggggaaatatggttgatgcgttcagaatgcatatcatgcaaacaaaagaacttggcacatgccctgttcgtcaaataggaggctgctccttcctttatatgaggatcagtaatgtttacattgtgatccgagttagcagcaatgctaatgttgcatgtgctttcaaatttgttgtcgaggcggtggctctcttcaaggcctacttcggtggagcttttgatgaagacgctatcaggaataactttgttttgatatatgaacttcttgatgagatcatggattttggttatcctcaaaacctgtcacctgaaattttgaagttgtatataactcaagaaggtgttcggtcaccattttcctcaaagccctcagagaagcctgttccaaatgcg

SEQ ID NO: 281685 - DNA, 750 bp, Zea mays
tcttccaaggccggcctgccgaggcctctccgcgcaggcggcggcgttggcattgtctggccggcggcgttgccggaccacccattccacaagaagcaggacgctgtctggccggcggcgttgcctgaccacccattccacaagaagcaggacactggcgggcctgcggcggcattgccggaccacccattccacaagaagctgggcgctgtctggccggcggcgttgcccgaccatccattccacgagaagcaggacgctgtctggccggcggcgttgcctgaccacccattccacaagaagcaggacactggcgggcctgcggcggcattgccggaccacccattccacaagaagcagggcgctgtctggccggcgggcgttgcccgaccatccattccacaagaagcaggatcgctgtctggccggcgggcgtttgcctgaccatccattccacaagaagcaggacactggcgggcctgcggcggcattgccggaccactcattccacaagacgaagcagggcgctgtctggccggcggcgttgcccgaccacccattccacgagaagcacgacgctgtctggccagcggcgttgcccgaccacccgttccacaagaagcgagatgttgtctgggcagtctggccggcagcgttgcccgaccatccattccacaagaagcaggacactggcgggcctacggcagcattgccggaccactcattccacaagacgaagcagggcgctgt

SEQ ID NO: 281686 - DNA, 544 bp, Zea mays
  unsure (1)..(544): unsure at all n locations
nccacgcgtccgacacgcgtccgcggacgctgggccggctccccttcttcctccgcatgttcccacctcctgcgcggccccgggtcactgccaggtaggccacaccatgcagccgccgcagtcgctggtgtcccgcgcgcgcaccgcgatccactccgccgccgcccgcgtgctcaccgacatcaaggccgacctccgagatgccgaaggatccggcgggcgtagccgggcgccgtcgccgaggacgtctctggatcgggaggccgccgaagcgagcgccacggggcgggagccggacgtgaagcccgccgtcgccgcgtgatgaggtcctagaaattagccccccagagaacgaggattcctcaagcataccaactgaatcaacctgttcaacaaaactgacctttcctccagcttcaatagttaaacaactggtgtctgccattgaaaatgggaaaagtttcaagtcaatgagtgatatgaggtatactggagaacaattgctgatagatagggaggtttgagcttgtctgttgttaatcac

SEQ ID NO: 281687 - DNA, 591 bp, Zea mays
  unsure (1)..(591): unsure at all n locations
agctgttggagctgaagctgcacaccgtctgcgaggaggcccggtgccccaacctcggcgagtgctggtccggcggcgcgcccggcaccgccaccgccacaattatgatccttggggacacctgcacgcgcggatgcaggttctgtaacgtcaagacatctcgaacaccccctccaccggatcctgatgagccttccaatgttgctcaagctattgcctcatggggccttgaatatatagtaatcacgagtgttgaccgggatgatctacctgatcagggcagtggtcactttgctgaaacagtacagaagctaaaggctttgaagccagaaatgcttattgaagcgcttgtacctgatttccgtggagatccaagctgcgtagagaaggttgcgacttctggattgcatgtttttgcgcacaacattgaaactgtggaagagcttcaaaggaatgtcagagactaccgtgcaaatttcaagcaatctatagatgttctggaaatggcgaaagagtatgctcctcccggtacccttacaaagacatcgataatgctgggatgcggngagactccagatcaggttattagga

SEQ ID NO: 281688 - DNA, 464 bp, Zea mays
ggccaggaggtgctgcggtctgtcgacgcctgtaaacagctagctagaccgcgcgctatggccttgagagcggtcgtgtgtgcacagacgggcatgattttgtgaggggtgttataccagcgagcataataaagagggtcactgactggaaggagattaggagaaggactgcattgcagctctggtgaagtgcgagcaagatcttggagaggttgtggcatgtgggactgagggctgtaaacaaggcctccctccctggcagtgagaaatgttaaaggacggtagcaaggagaaatgttaaggcggagatgggtaagaagggaaattggttcactgcgctcaagaaggccttcacctcaagccccaaggagaagccaacaaatgtgcatcagctggtagcgcagtacccgtctactcacgcgcacggctgggagaagaagcgatggggaggctttcggcggtcg

SEQ ID NO: 281689 - DNA, 542 bp, Zea mays
ttgatcgcgagcggccgccctttttttttttttttaagtagaactaggcattatcttgagatacaaagatatgaccataacttgagagtacaccaaagaatcaagcattcattgtcaaaccagcatctattaattacagacttcacaaggggcttacaaaggcaacaaaattcctggggcaacaccaaacacccaaacctagctaacaatcaggcggtatgaattacatatgagcccattattaatcatgtcatagtgggagcaaccagaggagcagatgtaggaggaactgcaaagccaatgtctccggttacaggatgaaatgcggcattcctctcgagatgctcccacacaagtcttcttcgctcctcagatgcagcccgcttcttttcctcctcttgaaaattggtctgacaagccagcagcaatctctcatccatgtcaaagaacattttcctgacattcattgtaacatttagaactgactggttccagtgccaacgggcattcctctccagagctggatagatgattggcaggat

SEQ ID NO: 281690 - DNA, 494 bp, Zea mays
gtcttctctgctcacatgccgcgaggtgctccaggaacaagtgccgtccaccagatccaggctcggcatgttcgtgatcgaggacaagggcggcgccatcgcgctgatgctggcgtcgctcctgttcctgggcacctggccggccgtgctcaccctgctggagcgccggggccgcctgccgcagcacacgtacctggactactccatcaccaacctcctcgcggccgtgctcatcgcgctcaccttcggccagctcggggacagcaggcgcggcatgcccaacttcttcacgcagctcggccaggacaactggccctctgtgctgttcgccatggccgggggcgtcgtgctcagcgtcggcaacctctccacccagtacgcttgggcctatgtgggcctctccgtcactgaggtcatcagctccagcatggtggtggtcataggcaccacgctgaactacttcctggacatccgcatcaacagggcagagattc

SEQ ID NO: 281691 - DNA, 469 bp, Zea mays
cggcatcgtctcgcgagccgcgactcgtctcgtcatttccatcgaacgcccagatcccacattcccacctagctctgcgcgatccatccccggccgccacgccaaggaggccctcgcctgacctcggatcaaagcctcctccatccgccttcatcccggccggtggttcgggccgtcacgggaggggtccatcactggttactcggtggagagctcggggctcggctcccatctcacgattctcaccccacgcgcgcaccgggtcacctcgattcggcagcctcgcgagtccttgttgcgtgggtcactgcctcactgggttctgaggcaaggaaaagaaggcttcagtagtcaggtctgggtcaagccatgatggagagaacgctgctggaggtgctggccacggcggcgcaaggagggaccgaggggacgtcagtgctgagcatgctcaagtacgccgtgctgccca

SEQ ID NO: 281692 - DNA, 825 bp, Zea mays
ttgacgcgtgggcggacgcgtgggttcacacgtaccgccggcggagaaggaaggaattggtcgccgccgcctgcctctctcctcctcctcctccgtcagtggctgtggccacgccgtgctaagctaagctaagctaagctaagcttgcgcaagtgacaagttctttggttggttggaggcagagccagatggcatcgtcgtcgcggctggatctcccgccggggttccgcttccaccccaccgacgaggaggtggtgtcgcactacctgacccacaaggcgctggacagccgcttctcctgcgtcgtcatcgccgacgccgacctcaacaagatcgagccgtgggatctcccaagcaggcaaggctaagatgggcgagaaggagtggtacttcttctgccacaaggaccgcaagtacccgacggggatgcgcaccaaccgcgccaccgccagcgggtactggaaggccacgggcaaggacaaggagatcttccgcggcagtagtccccgccgcgtgctcgtcggcatgaagaagacgctcgtcttctacacgggccgcgcgccgccgtaggcaagacgccgtgggtcatgcacgagtaccgcctcgagggcagcctgccgcccaacctccaccgcggggccaaggacgaatgggctgtgtgtaaggtgatcaacaaagacttggcgggcaaggctgggcagcaacaaatggcgccgccgcacgccgtgtccgtgggcatggagcgcacagctcgctggccttcctcgacgacctggtgctcgacaacgccgacgacctgcccccgctcatcgactcgacaacgta

SEQ ID NO: 281693 - DNA, 501 bp, Zea mays
gcgcgctcgggttttattccgccggagctcggcagcctccgcatcctcaactacctcaacgtttcccacaacgcgctccaaggggagattccgcctgccatcgccggaatgcagagcctgacagccgtggacttctcctacaacaacctctcgggcgaggtcccgtccaccggtcagtttggctacttcaacgccacttccttcgcaggcaacgctggcctctgcggggcgttcctctccccgtgccgctccgtgggcgtggcgacttcggccctgggctccctctcttcgacgtccaaactcctgctcgtgctcggcctcctcgcgctgtccgtcgtcttcgcgggcgcggccgtgctgaaggcgcggtcgctgaagcggtccgccgaggcgcgcgcgtggcggctgacggcgttccagcggctggacttcgccgtggacgacgtgctggactgcctcaaggaggagaacgtgatcggcaagggcgggtccgggatcgtg

SEQ ID NO: 281694 - DNA, 312 bp, Zea mays
tccatgcgtccgcggacgcgtggggccgcccttttttttttttttttacagaactgaatttattcctcaaatgcaaacaaattacacaactgacgggaaaatgccgcatacgacagacatggatgagggtgaagaacatccatcatgtacttgttcactcgcgatgaatctataacacagacacgtgcggctgattttcactccgaataggtggagccgtgtgtccgcgttgaaacagaggcggcggcggcgtaacatcgcgcggagcgccgagcgtacctcgtccggtgtcggcggcgaagtccacgccgt

SEQ ID NO: 281695 - DNA, 519 bp, Zea mays
ctgaggtctcccataacgtggagaaatgtggggtttctgatcaagcttgtccgggcaaatgccaaagctgtggcattgatgcaaaacctttttgtgctggagtgaacgaagtctccttgttgactggcagtcacactgatgtggaggcctcaaaagagaaccgtggagcatgcagtttgaacaatgatcgtgctgatgctctagaagaagaggccaatgtttccacagctaggataggtcatgttgagagtgctgaccctggtggctctgtgggtgtagaaaaggaaattttcatggctgttaatgaggagtctgagggggagcaagctggggcaacactggaggatctgtttttctttaatggtgaagaggatgatgacagtgattgggaacctgctagtcgccttgctgtgaatagatggttttgcttgaactgcacaatgccaaatgtggacaagattacatattgcatgaattgccgtgagcttccaggatctgttgtagatggatatgatgtct

SEQ ID NO: 281696 - DNA, 222 bp, Zea mays
tttttcttgctttcatctatttttattgcgagggggaaaaatgatttgatggtcaccgatcgatccgtccttggagggtgttggtcgtgtgttgatcgccatgctgttctagaaaattattccgtctacgaggacgccgttcgacgagaagcgtctaaaaagagaggggagagagaatgaagacaatgagactagttcgatgataacgttgttgatgttgat

SEQ ID NO: 281697 - DNA, 557 bp, Zea mays
  unsure (1)..(557): unsure at all n locations
cttacgcgtggggagcatccgatggaagattgagaaagcccagattttctgctaccgtgaatataaagggaaccctgatctagaacagtccctcattggtgaagcatcatttccatcaccttatggttgggataaccctgaatttctacctgatgctattggatgggaaggagtaaagccagggaagggaacaaaagaaatgaaaccaaaagaaatagatcttcaatcaatgaatccagcaagtcaggatgaagaaaaacaattgatgcacttaaagcttatggggtggcgccactttcctgtgaatatagacaggttatcacatgttcgagttcttctcttgggtgctggaactcttggatgcgaagttgctcgccttcttatgacctggggtgtacggaaactaacggttgttgatagtggtggngttggtatgtctgaccctgccaagcaatcactctacatagataaggattgtggaggtccaagagtatctgcaataactccacatctgaaaaaaagatgtcctgcaatggaggttgaaagcattccactgg

SEQ ID NO: 281698 - DNA, 775 bp, Zea mays
cccacgcgtccgcacacgcgtccgcgggcgtgatcagttaatactaagggcaggcacacctctgcttcgcgctagtgatcaagcaagtgctttctgtactctgcagcaatggcaggcaaggcctcggtcgcgctgttcctcgccgtgaacctggtggtgttcgccatggccagcgcctgcggtggcaactgccccacgccgaccccgtccaccccgtcgacgccgaccccgacgccggcctcgttcggcaagtgcccccgcgacgcgctcaagctgggcgtgtgcgccaacgtgctgggactgatcaaggccaaggtgggcgtgccgcccacggagccatgctgcccgctgctgaagggactcgtcgacctcgaggccgccgtgtgcctctgcaccgccatcaagggagaggtcctcggaatcaagctcaacctgcccgtcgacctcagcctcatcctcaaccactgcggcaagaccgtgcccaccggattcaaatgcctctaagctagccgcgagcatgcggatatatatgtgttcttttggttgccattcgcctgcagacttcttgtcgtttgctacttattaagcgagtgctagctctgcatgcatgactacgtcctttgcatgttgatgagcagctttcgcttttgggtgtttgttttgtgtaagtgcttcgtcctttgcatcgacagtgtcccagaactatttggactgttattcttttatttgtacccagcaatctgctcgatgaaataaagcttattatatttattgg

SEQ ID NO: 281699 - DNA, 467 bp, Zea mays
tttctttcgtccgcccaggggcacggccactcgggcggggcgatttaagtaatgttgtctttgacactgacgaagctgatcagtctgctttgtgccttgtggtcaaggaggacactgctgtgcagcaatggcaggcaaggcatcgatgacgctgttcctggccgtgagcctagtgatgttctccatggccagcgcctgcggtggcaactgccccacgccgaccccggccaccccgtcgacgccgaccccgacgccggcctcgttcggcaagtgcccccgcgacgcgctcaagctgggcgtgtgcgccaatgttctgggactgatcaaggccaaggtgggcgtgccgcccacggagccatgctgcccgcttctgaagggactcgtcgacctctaggccgccgtgtgcctctgcaccggcatcaagggagaggtcctcggaatcaagctcaacctaccggtcgacctca

SEQ ID NO: 281700 - DNA, 316 bp, Zea mays
cggctcgacaatcgaggcatcgcaagcagagctcctcacgaagctcagtctgctttgtgccttgtggtcaaggaggacattgctgtgcagcaatggcaggcaacgcatcggtgacgctgttcctggccgtgagcctagtgatgttcgccatggccagcgcctgcggtggcaactgccccacgccgaccccgtccaccccgaccccgacgccggcctcgttcggcaagtgcccccgcgacgcgctcaagctgggcgtgtgcgccaatgttctggggctgatcaaggccaatgtgggcgtgccgcccacggagccatg

SEQ ID NO: 281701 - DNA, 515 bp, Zea mays
ctcttcttctgtttgttcctttggtgtttccctttggctccatggcaggctcttcatcatacagcgttctccctgaccagaccatggacaacgatgatgcacaaattggagttgctaaaactcagggaaagtattggggcattttcatctgctggcttcttggaaatggatgtctatttgggttcaatgggatgcttactattgaagattactacgtgtacctcttcccgaagtaccatccaacaaggattattactctcacctatcagccctttgttctcgccacaaccgccatattcacatatcacgaggccaaggtcaatactagggtgcgcaacctggcaggatacacgttgttcttcttgagctcatttggagtgatcatcgtaagcctgctaattactgcctacaaacacattacacatgcatggtcttcacttatttgttcttgcccggacatagctggatgttttgtcttcaagaagtggtggaatcgccccattcgttggtatctg

SEQ ID NO: 281702 - DNA, 634 bp, Zea mays
acgcgcgcggtctgcacttctccaatacagggcatcatcgtctcatgaaacagtccactcgcatgctcatggccgcgataaaaccattaaagaaaatgacagggcgatcctacttgaagaaggtgaatctaaaccgccatcgacaaaggcacccaacatgtctgccagagccaaattaatacggtgtattacgttggacgagtcctttcttgttggaaaccgcgccacactgagagccatagctgaattcggcattattcttgtttacttttacacctgtgatcggaccaacatatttgcagagagcaagaagaactacaaccgcgacatgtttctgtttctttacattcttcttgtcgtcgcatcaacgattacctcactcaagaagcaccctgaaaattcagtagtttcaggaaagaccgttttctatcttaatcgcaaccaaactgatgaatggagagggtggatgcaggtcttgtttctgatgtaccactatttcgctgcctcggaaatatacaatgcaatccgtgtgttcattgcttgctatgtctggatgactggatttgggaatttctcatactactacaagaagaaagatttcagtatcgcaagatttgctcagatgatgtggagg

SEQ ID NO: 281703 - DNA, 764 bp, Zea mays
ccctgatgccccgctgtgggaggggcacacatgcgcgcgactcaggaaactgacggcgtttttgacggcctgctacataaatcccctcgcctgcctcccttcccatgtccttacccgcaaaaatggcccgggtgccaggtgcgcaccgcagggagggcgcgacggattccgggcaagtgcatgcgagatccgatggtggcggctgcagcggcggccggcggcggctgccgacgcgggatgcggaggcggacgcggacgcggccggaaggacgcgctgctcctggagctgcggaaggcctgcgcggggccgctgcccagcgtgccgctactcggggagaaggtctactacttcccgcagggccacatcgagcaggtggaggcatcgacgaaccatcttgccgagcatcagggcacgcccctctacaacctgccatggaagataccctgcaagctcatgaacatggagctgaaggctgagccggatactgatgaggtgtacgcccaactcaccctgctccctgataagaagcaagatgagaatacatctgcaagagtggagaatgaggaggcagaggaggaggtggtgcctcatgtgccaccagccacaagtgaggggcttcgcatccattccttctgcaagacattgactgcctcagacacaagcacacatgggtggtttctcagtgctgcgccggcatgcagatgagtgcctcccaccactggatatgagtcaaccatccccaaatcaagaatggtgggcaagg

SEQ ID NO: 281704 - DNA, 601 bp, Zea mays
  unsure (1)..(601): unsure at all n locations
attttccttccttccctcccgtcgccgcctgaaaccgcgacagcaagggtcgtaggagcaaggacgacgacgagaaggctcggttcggctcttcccagtctctccgagggaggaaggagaggatcggagggtgcgatggcgatcgaccacgagtccccgttcaaggagctccgcctcaagaaccgcaggatcatgggcggcggcggccctgaccctgagccggaggaggaggaggaggtcgccacggcggcgtacgcggggcagtggccgcgctggctgcagccgctgctttcggcgcgcttcttcgcgcactgcaggacgcacggcgactcgcaccgcagcggcgagtgcaacatgttctgcctggactgctccgccgcgggcgcgggcgcgggcgcgcgcgccctgtgctcgctgtgcctggcgcaggcccaccgtgaccaccacaccatccagaatccggcgctccttctaccacgacgtcatccgggtgtccgacatccagcgcttcatggacattcgccgggtgcagacctacgtcatcaacagcgcccgcgtngtcttcctcaacgagcggncccagcagcagaggccctgatgc

SEQ ID NO: 281705 - DNA, 536 bp, Zea mays
cttttactccattcccctcggtgcgccgccgccagtccgccccgccccgccccgcccagcagacagcgcagccatgccgctccacctccacctgctgtcgtccccggccaccgctgccaagctcgcggcaggtctgcgcgcggcgcctctccgccggtgccacagcttggccccggcgccgcgccacacggatcgcgtggcccttgcgtcgtccctctcggcggtggcgcggtctgctggccccgccgtggcagcggcgcagaccaagcccagcgtttcaggaaagaaacaagtattgatatccttgtcggataaaacggacttggcttatcttggcaatggtcttcaggggtttggggtattccatcgtttccactggtggaacagcatccagcctggaagcagcaggagtcagtgtaacaaaagttgaagaaatcacacatttccctgaaatgcttgatggacgagtgaaaacattgcacccaagtatacatggtggtattcttgccaggagagaccaggagcatcatttgaag

SEQ ID NO: 281706 - DNA, 553 bp, Zea mays
gttctctgaatgtagtgtacagtccaaagaggatgacggaagggatggtgttaggggggatgatgatgcacacacttgcacaacatggtcattggcactcaagcagtgtgaggttcctcaagttttcttctgatggagcatacttgttttcaggaggtctggagggagctattgtcacgtggcacctagatactggaaagagaaggtataaaccacgtctggggtctcctcttttgttctttgtagattctccagattcttccatttcctgcgtgtcatgtacaaataaccaagtctatcttctaaaaatgcctaatatggaggtcatgagatctattgctggaatcaagctgccaattgcttcaccaaacttgggcggatctaatccggctgcgtatggatttgattatactaatagacttgttgctataccaactgaagattactgcatacagttctacaatttgtttgagaacgctgaggtttcagaggtgcaagtgtgtgagaggaatttccagcctattgatgatatcactatgtacatttccatggt

SEQ ID NO: 281707 - DNA, 479 bp, Zea mays
gctgtccgcccttttttttttttttttgagacgaatgtgttcaggtcaaccaatcagccatacatggaagatccatgtcaagatcacacacaagaaaaaggaacagaagctgggcagtacagcgggcagcagctagtagctgaggcgaccatctccgtcgtccgtggtgatgccgatggacggcgacgtcaccgagacgtccacgtcctcctcgggcgcgggggactgctccaccggcacgctctcgatcatcctcaccacgtcgcccatggagggccgctgctcgggcagcggcgccacgcacgccagcgccacgtgcagcagcgccaccatctcctcctcgatgtccctgtaccggagcagctccacgtagaacacctgcgaggtccactcctcccgcaccacggaccgcacccactccgggaggctcaggctcgtcgccgccgtgcccttcttgcgcgcgtagggctgcgggtgct

SEQ ID NO: 281708 - DNA, 576 bp, Zea mays
ccacgcgtccgcgttcccatcaaactaacaaccatggcgcaccaggatgccggtgtcggcggcaaagatcaccgcgagctgcaggcgcacacaccaccgacaccgaggagctgctggcagcccaccgcgagctttggagccatgccctgggctacgtcaagtccatggcgctcaaatgcgcattggaccttggcatccccgataccatccaacgctacggcggaggcgccaccgtaggcgaactcgccgccgccagcaacctccccgcatccagcctccccttcctgcgtcgactcatgcggacgctgacagccatgcgcatcttcgcggtccaccgtgatgacgatcccagcgacgaccctgctgatgatgcagccgccgttgtctcgtaccagctcacggcgacctcccgcctgctcgtcaacggtggctcctatttcagcatacgcccaaacatttccgcccttgtccatcagggtgccgtctcccccatgttcagcatgagcgagtggatgaagcagcaccaccaccacgcgcccgacatgactctccacgagatggtgcacggcgaaccgt

SEQ ID NO: 281709 - DNA, 483 bp, Zea mays
cccacgcgtccgcgcgaccatggctgaggaggtcacgccccacaacatccacatcctcctcatctgctacccgagccagggccacatcaaccctatgctccgcctcgcgaagcgcatcgcagccaagggcatcctcgtcacctgctcctcgtcctccgtcgtccgcgacgatctcgccgctgcctcgggggtgtcggctggcggcgacggcgtgcccttcggcgccggccgcctccggttcgacttcctagacgacccattcgacgggacacttctggacctggaggacttcctgcggcaccttgagaccgccgggcggctggctttggcggacctgctgagacgccaggcggaagcagggcggccggtgtcgtgcgtcatcggcaacccattcctgccgtgggtgaccgacgtcgcggccgacgctggcatcccttcggcggtgctgtgggtgcagtcctgcgcggtgatctcggtctacta

SEQ ID NO: 281710 - DNA, 425 bp, Zea mays
tgcttccgattcgagaagatctgcaaccagagagtgagaccggatcggacggaaatggagagagcaacagcggaccctcacttcctgctgcttccatggtcaaggagccatcagccacatcatccccatgaccgacatcggccgcctcctcgcctcccacggcgcggcggtcaccatcatcacgacgcccgccaacgcgctgctcgtgcagagccgcgtggaagacctcgccgcggcactgcaccgtccgcacgggcacggcgcggcagggacgatcacggtcaccgcgatcccgttcccagcggcggaggccggcctgcctgagggcagcgagaggctcgacctcctccggtccccagccgacgtgccacgcttcttccacgccaacagactgttccgcgaggcggtggcgcgctacttccgcg

SEQ ID NO: 281711 - DNA, 482 bp, Zea mays
atcaatcaggcggaggagagaaactcccggccatttccaagcacaagaagtgggaagagagaacaggagggcgctgagctctctgatcgctgttctgagtggtggcggctgcagctgcccgcgcggcgaagatggctgcgccatggcttcttgcttgcagcttgctgctgctctccctggcgacctttcacggagctgagggcgcgatcggcgtgaactacggcatgatcgccaacaacctgccggcgccggagcaggtcgtctccatgtacaaggccaagaatatcagctacgtgcgtctgttccacccggacacgaccgtgctgaacgcgctccgcggctccggcatcggtgtcatcctgggcacgctgaacgaggacctcccgcgcctggcgtccgacccgtccttcgtcgtgtcgagagtggccaccaacgtgcagaccttccccggcgctgtccagttccggtacatcaacgcgggc

SEQ ID NO: 281712 - DNA, 971 bp, Zea mays
gtgtcgcgtggtgtcggctgacgcgggaggaggcagacgcgcggacgaatcggaaggtggaggccgtgatcaaacgcgagagagccctcgcctacgcctactcccatcagctgctgaaggcgacaccgatggcggcccacgcgatcctggcggacctgcagtcggggcggagcccctgagtggtggacgcccatctagcgccgccacgagccgggggcctaccgccctgcggatcccgccattagaaagcccctgccggcgctcgccatcgcccaccgcgacatgacgacgacgcctgtggcgatgacggcggcgacgacaccggcccggtcggtggtctcggcctactctaagacaagggccacgaggcctgtgatcagggtgggagccccgccgccttcgaaccatagccacgtggggagcatccgcgacgacgagagcctgacgagctgcccggcattcggcggcgtgcccaactacatgacgcctacgatgtcggcgtccgccaaggcacgggcacgggcgcacctgcaggagcagcataagaacaaggcggcccaggagaagcccaggttctcgttcgggctgggccagagcatcgggagctgggccaagagcccgttctggaaggccgctgtgccgtcgtcgagggtggccacgccggcggcgtcaatggccggcgggcgacaccgatcgacgcggtcgatcaacgggcttagcacggactccaccgtgtccatgccagccaggctcggcacaaggtcctttaagtaaatacacatgtcggactcatcgttgcttacattgcattgcattcttcttatatctcttctcaacgcatttgtgcttggaagtggtacacatgtgattgatggtgtggcttgttgtgggataccatcgtgtttgctgatttaaaaaaaaaaaaaaaaaaaaaaaaaaaaaaaaaaaaaaaaagggcggccgcacaccga

SEQ ID NO: 281713 - DNA, 474 bp, Zea mays
tgagccaaccagggactgctcccagggcctgtgcagcatgtactgcccgcagtggtgctacttcgtcttcccgcccccgcccccggccttcgacatcgccggccccggcggcggcggcggcgacgacgactcctccggccccaccttctcgcccctcgtcatcgccatcatcggcctgctcgccagcgccttcctcctcgtcagctactacaccgtcatctccaagtactgtggcaccttcagctccctgcggaacatggtcttcggttcccgcaggggccgcggccgcggccgtggcggcggcggcggcggcggcggcggcggcgattcaggggctcaggtgccgtggggcgccatgccgccggacgggctggacgagaccctgatcaacaagatcacgatctgcaagtacaagcgcggcgacgggttcgtggacagcaccgactgctccgtctgccttcgcgagttccgaga

SEQ ID NO: 281714 - DNA, 564 bp, Zea mays
cggacggtgggcggacgcgtgggctcgctcacagcaaccggcggcgacatcactctcactactgcagctcagctcagctcagctcagcaagcgaattgttcgatcgatcgtcgtcgacgatggccgccgcctcctcctcgcagcaaccaccgcgcctgctagtactcgtggcggtctcgtgtctcctcctgcagagcgccatcaccagcagctcggcggagtcgtcgatgcagtgccacgaggaggaccaggaggcgctgctggccgtgaactccgcgctgggcagcccctaccacttcgcgtcgtggacgcccgacaccttttgctgcgactggtacgacgtggactgcgacaacgtcacgggccgcgtcgtcggcctcaccgtgttcggcgacggcaacctgacgggcgccatcccggacgccatcgccaacctgaccaacctccgcacgttggtcctgcgccacctcccgggcatctccggcggcatcccggtctatctcgcgcactcgccaacctcacccagctcaccatctcctccaccggcgtctccggcccggtgcc

SEQ ID NO: 281715 - DNA, 489 bp, Zea mays
cgcgattcgatcttctcggatcctactgcagatccacgcggcatctccaagccctagccccaaccccgaccgcccatgtccgccatcgcggcctcctcggccgccgccgccgcggcgtcgaaccccgatgaggaagaaaaccatgaggagtacatcccagtcgccaagcgccgggccatggaggccgagcgcctccgccagctccgcctctccaagtcggcgccggcctctgccgtctcatcactcccgatgccacctcccccgcctcttttgccagcgcagacctccgttcccgacgccgccgcgaagcccagccttctcgtcaaggccacgcagcttaagcgcgcggccccggaggtgaccgccacggagcagcgcatccagcaggagaaggaagtgattgaagatctctcagacaacaaatcgctcaggtcagtccgcgagatcgccaagggcatcatctacacggaaccgatccagaccgggtgg

SEQ ID NO: 281716 - DNA, 635 bp, Zea mays
gccttgcggaaccgcatcacgcacgccagcagcgctagccaagagcagccagcagatggaaaccacggcccacgccgccgcctccggcacgatccagaacgcccggcaccggacgagcgccctcaagctgtgctaccacctggcagtctccaacgcgatgtacctcctcctagcccccgcggccgcggcggcggcgcactggctctcccgccacagcgcggccgagctcgcgggctcggcccggtccgcggccgccgccaacccgcccctcgccgtggcgctcctggtcctgggcgcggtgctcgcgacggcgtacctgatgcagcgcccgcgcggcgtgtaccttgtggacttcgcgtgctacaagcccggcggcgagcacgtggtgacgcgggagacgttcatgcggcagtcggaggcggcgggggtgttcacgggcgacaacctggcgttccagcgcaagatcctggagcggtccgggctcgggcagggcacctacttccccaaggccgtgctcaactcgccgcccaacccgtgcatggcggatgcccgcgccgatgccgaggccgtcatgttcggcgccatcgaccaggtgctggcgaagacgggcgtccgcgccagggacatcggggtcg

SEQ ID NO: 281717 - DNA, 638 bp, Zea mays
ttctcgacgctgactcccacaccggccgccgcgcgagccccggcaccatctccgcacgagcagaaatgggggatgcgtgtttctcaacacagctaattgatggagatggggtcttcaacgtctccggattggagaacttcatgaaggatgtcagattgggtgaatgcgggctctcctatgctgttgtatcaataatgggcccgcaaagtagtgggaaaagtacacttttgaatcatctttttggcaccaattttagggagatggacgccttcagaggaaggtcacagactaccaaaggtatatggctagcgaaggcccagaatattgaaccgtgcacccttgtaatggatttggaaggaactgatggaagggagaggggagaggatgacacagcatttgagaagcaaagtgcattgtttgctttggccgtttcagacattgtgttgattaatatgtggtgtcatgacattggcagagaacaggctgcaaacaagcctcttttgaagactgttttccaggtcatgatgaggttgttcagtcctcgtaaaacaacattgttgtttgtcattcgtgacaaatcaaggacacccctagaaaatcttgaaccaattttaagggaagacattcagaagatatgg

SEQ ID NO: 281718 - DNA, 589 bp, Zea mays
  unsure (1)..(589): unsure at all n locations
acgggtaacttaatactatatatttaaatttaaatgaccgttctaggacttaaaaagggtagaaaaaatattttttacatcatatattggtttatagtataggagtgtatttacattgcgtgcgtgtatacgtacaataatacatatattggtttatagtattagtagtatatgtaccgggagaaattctcttcaactggctgcagagaaaaacaatcgctgatcattgattggtgcagaagtgtaaatctgaagcaacctgctttgcaacctgcaggaccgctttctgcaaccggctgtagagatttttttccccaaaaaaactgtacacgtcacgaccctagccctcagcctgccttcaacctgcggcatgcttggattgccagcgcatatgatctgcgcttgaggggggagacccaccattcctaccagtttcattcaccgtagcgtgcaaaccccggcaacctgcctgtcatcaaatcccatcgcctaactgaacctgaacctgaatctggtcgtaatcatgggtagccgatgtaactgtgcaccagtgtcttggncgggatcacaacggtcttgctaagcacga

SEQ ID NO: 281719 - DNA, 522 bp, Zea mays
gagtaggcgagacgttcatgggttagatctggcggtccggcggcgcggatctgagcgaggtttcggtggagagagcgggtggtggtcactatcttcgcctcatttcgagtagatggagcgtctcatggccaaatcgggcatgtatggcggattctgctactgtctgaagcagcgttgcctgcagatctgaaagtcacttggtctccttgcccagttgaccttactgaatggcattgctttccgcggtttgactgtcattacatccttttcggcgtctgatcaagaatttttagcacgagatgacgtgcttctagttgttgctgatatcttgtcctgcgttgagtaaacctgaagctggaaaggagcggatcacattcgtggtcttgctcttgttgacttctaggtctatcttggataccaagaggctggaaggggtcagatccagttcctgtggtcctagacacaagggcctcttgggggaaggcgccatgacctacttacccgaggaggtggtagagcaca

SEQ ID NO: 281720 - DNA, 481 bp, Zea mays
gtccgccctttctgcccgccgccggccacttcaagactactccccgccgcgttacctcctcctcgtcctcctggggttacccagctctgttcccctttcagggaacgccttgagaggcggggcgggtccttggtccggaggcgcggcgacggcgagtgatttttgttcgccagagggagagttttttttttcaccgggtttggtgggaagtaaggaggcggccgcgagtggcgagacgttcacgggttagatctggcggtacggcgtcgcggatctgagcgaggtttcggtggagcgatcaggaggtggtcactatcttcgcctcatttcgagtagtttgggcgcctgtagtttgcctgtttccttttcggtgtctgatcaagaagatgatgtgctcagagggcttctagttgctgctgatatcttgtcttgcgttgtttcacccggaagctggaaaggagcgcatcacttctgctctccc

SEQ ID NO: 281721 - DNA, 524 bp, Zea mays
  unsure (1)..(524): unsure at all n locations
gttatcacgactgcataattgtgctcgctcgccgggccccgggacgtgacacatcgcacggccgaagcagcttgccggctgccgcgtttcgcctcccgcctgccgtgccgcccgtgaccgcgagaaggccggcagctttgcatgaggaggaggaggatgggggcactgcacgtcgtcggcgagcccaggatcagcttccgccagcagcctgcagcagtcgtcgcgaagaacggcggccacggcgccgtcgtcgaggagatccacggcctgatccgcgtctacaaggacggacacgtggagcggctcccggcgatcccagccgtgccctgcacgtggggcggcacggcggccccggacgcgccgggcggcgtcgtcgcgagggacgtggtggtggaccccgcgacgggggtgtgggcgcggctgtacgcgccgacgtcggcggtggacggagccaggcgccccgtcgtggtgtacttccacngcngcgggttctgcgtcgggtccgcggtctggagctgctacca

SEQ ID NO: 281722 - DNA, 583 bp, Zea mays
  unsure (1)..(583): unsure at all n locations
cttctccacaccaccaatagcagtagcccgccccctggcagcagcaggaagcagcagcactgcggcagcagatgcttcgtcgtgtcccttctcctggtcctgctagctcttgtagcctcggacgtgtatctcagcttcccaaaccgacgacgggttcttccattgttcccccagcagcttttgtctcgcagacagcagcgaggcggcgagggcggctgtgacattttcaggggcgagtgggtgccggacccggacgcgccctactacaccaacgacacctgcaaggtgatccacgaacactacgactgncatggggtacggcaagccggacctgggctttgtcaactgaaggggcgcagcctgacggctgcgaccttccccgcttcaacccatggcgcttcctccacatgatgaggggcaagacccttgccttcgttggcgactccctcggcaggaaccacaaggactcgctcatctgcctcttgaccacggtcgcggagcctacgacgagctggccgagcagcaagcacaccgtgtactactacgccgactacaacttcaccgtggcccactactgggcgcc

SEQ ID NO: 281723 - DNA, 591 bp, Zea mays
gcgtaaaaagatatcaagacatgattcctgcacgtgtccccatgctcaaaacaacaaagaaccccccaaaaagacgtaacagaagtagaagttcgattcaatacaaaacatctagcattggggaacctttatttcctcattcattcaactggacgagcggggcaacatgctcttacagggggatcgagaacgacttcttcaacttctctacctccaaataagcgttagagtaaggcaggaactccgagaaatggctctgcatcagatcgttgatggcagttgcaagctttggaatgtccatgatctcctcgttggtcagcttccgaacaaacctagccgggcttccagcccagagttcaccagtcggaattcgccttcctgggggcaatacagagccagcctccaggattgagttggtctcaaccagcgaaccttccatgaggatagagtgctggccaatgatgcactcgggctcgatggtgcaagagcgcagcaggcagtaggcacccactgtcacgtaccggtccacaagggtctcagctggaagccctgtgggcgccgcccatgcggcatggaggacgcatcgctcct

SEQ ID NO: 281724 - DNA, 886 bp, Zea mays
cggacgcgtgggcggacgcgtgggcccccaccctcacgactgggccggccgtcgctaacgccttcggtgccccttcgccggcgacgagcaccaccagtcatcataccatcatatccagttctaaacaaccgaccaatcgatcagtggagagttactgatctgaaggatgagctccgtaaaaggaagcttcctgttaaaggtttgaaggaggaactcgtcaagcgactctctgactccattcagagtgaaagagaagctgacgaagctgatgaggatgtgggagtgaatgtggatgatcagttgcctgatgccaatgctattgaggaaaatacagttactgttacagaagttcatcaggaaactgtggttgatgtcactcatcaagttgaagttcctacaaccgaagttggtcaagaatccataatttctcccactagaggcccccccagtgttgatgttgaagaggcctcaacaaccaaagaaagtacccgaatcagttgctgaaggaaatatgtcatttgaagaagtgcaagtgcatactgaaattactaatgagcctgttcatgagaagaccacagacgttgacaccaatgatacagttgttgttaatgatgcaatcgatgtgaattcagacttggcccctgctgaagtcaagtttggtgctacggaagcaagcaaaattgaagaacaggattttcccccagcgcctgtagatgacttaacttcagattctactggtcctttgggtactgatgttgtcacagctgcaacttcaggtgcatggccgctagtggatactacgatgttttcataagctacaacatcagatgctggtcctatggatactgatgttgtcacagctcgcacagttagcgacgaaggggag

SEQ ID NO: 281725 - DNA, 579 bp, Zea mays
  unsure (1)..(579): unsure at all n locations
cccacgcgtccgcgccccaccactggtcaacgaatctttcctgcactgtcctgtccgccgccgctcaacctcatcggaactccactcctcctcacccccacagcaactcccacctcatggagaaagctgcgcacgttgccgccggcgcgacgcaagagcaggaatcgtctccgaacaggcttgacgacgcagcgaggcatcatggctctgctgaagcgattcctgaaagacttgcggtggtcacaggaggaaacaaaggagttggcctagaagtatgccgccagcttgcctctcaagggtgtgacagttatccttacagcaagggatgagaaacgaggaaaagatgctgccgagacccttcgccgtgaatgccaactcccaaatatcatattccatcagctcgatgtcagagatgacgttagtgccaccacattggcccggtatgtcgaaagaagatatgggaagctcgacatcttggtggacgatgcagctgattcgaggattgtagcagatgangaaggccctgagactcttgacgatgatgcagagacatggacatcctgcanggcagctaatctt

SEQ ID NO: 281726 - DNA, 878 bp, Zea mays
cccacgcgtccggggcacacatccagtatgggcctaagatcaccacatcacattcaagcctgtgcaatggtttcttgctatgctacctgctgcacgtacacaaagttctcttttgcaacatgtgaacaccagtacctaagtggacctgatgcaatacaccacctgcaaaggtgggttcattgtgaaccatggaaccaagatgcacgctacctgcttgtacttgccattttccaaaaagcacatgaagagaagtaccccaaacatacctgtgttattctgaagaagctcattatgcaagtgttgtccaatattagcaatccacatgagaaagaagctatgcagtatcaggtgttcctgctacttcttctgtcatcagaggtctgtttgcaatctttagactatgaaaactgcatcaccgaagctaaagaagctctaaaactcaccccgtcaagccgtgtggatactttttttgcaaagttgcaactgtgtcgggcctatgtggtgcatggggatcttttgaactccaggaatgagcacatgaaatgcttgagaaaccatacaaatactgaattggctgggtaatgctgaagcgacttgaatctgcatgttctttggagggctttgctgacgaaatagatataaaactgcatggatgtgttaaaaggaatggcagcgactcatcaaaatggacatcccttttcaatctggcgtgtgctcagtgctttctgtggggtggaaactttgaaagcgctgaaaaagctcttgctcaggcatgtagtcaagtagatccggatagctgcatcttgttccttaatggtgcaactgtatggaaatcgctcggaggtttgtagctcctcaatttatatcccgtgcagctt

SEQ ID NO: 281727 - DNA, 497 bp, Zea mays
cgccgcctccgtctgatgatgacgaggatgaggatgaacatgaagaggccgtggcagcggcgaagcgtcggcgggacggttataacggatcaaaatcttacagggaagcagatgatcaactattgcttcagttggaagagaaagatgtcatctcatctgctgctactatcttgtctgatctctgtggacctcaggaatggatttctataaacaagcttcatgaagtgatgtttgataagtacggcggtatgtggcaccacagcagggtgcgaaaatacctgacatccgaagacttttgcggaggctgaaactgacggcaggctatggcatggacttgcgttgctgctgagaaagtaccctgagcatttcgtgatcaacattaggaaaggtgggggcttgatcactgagttcgtctctttggtctcgctacagtcttgagaatttctcaaaacacactgcagcaaggcggtggtgttgcatagctgcgagtattcttt

SEQ ID NO: 281728 - DNA, 657 bp, Zea mays
cgctttgcgttcggagagagggggaggcataagaacattcggtagtgtgagaatcggaatcggagatggcttggaatggccgcttctgcgacgacgaggaggggagcggtcttgagctcagccttagcctcccgggctacttctccggatcgacaacccaagctgcagcaggtttcgaggacaaagcagacggcggctctgctgctgctgctgctgctgggcgagcaaagggaagcaatggcttcaaggccaggccggcggcagctgctccggtcgtgggatggccgccagtgcgcgcgttccggcggaacctcgcctcggcgtcctccaagccgtcccgcgatccgccaccaagccacagaggaaacgagtccgcgagcgtcggcgccggcggcaaggccgtcgacggcggcaacaagggcctgttcgtcaaggtcaacatggacggcgtccccatcggcccgaagctcgacctgcgcggcgcacgcggctacgacacgctctccgccgccgttgacagcctcttccgcggcctcttcgctgctcaagcggcggggccaggcggggagcagcaggctgtcgcgggtatcctgagcggcggcggcggcggcgagcacacgctggtgtacgaggacgacgagggcgaccagatgctgg

SEQ ID NO: 281729 - DNA, 726 bp, Zea mays
ggatggttcccaggctcccagcacagaatccacctccgccgtcaccaccgagcaacgcgcgccggcgcccttctatttctccagcccccgctccgccgccgccgctctcctcctccgcacccccgccctgtttcgccatcggcccatcgcggacctgcctgtgccacctgcagcagcagcagcagagataaagttggctggtagttggctgcccacaccgtctggttcccgttcccatgtcagagggccacgtttcccatgctcctcggtttgtgcctgcaatcgcttgctgcttagcctccgtgctgctgctttgatccagaggctgggaactccaaagaggaacagcgtccatggaggctggaggcgcaggaagtggtttgaatggggcggtgcaggcaaaggggactggggctgatggtggctctgccaaaccgctgccgccttgctgcgtcaaggccagagccgccgcgccggagtccgaggccaggtgccacgccaccgtcgtttcaggatggttcactgaaccgcgatcgcgctgtggtaggcctcgattgtcttgcttggtaacgtagatgatgatacagcagcacaatttattactgtttgacccctgattgttgcctctgcaggcaaagccagcaaagttcagtattacaataacccgatgtggccaggagaggccaattctttgaaagtggagaagatcttataccaggggaaatc

SEQ ID NO: 281730 - DNA, 377 bp, Zea mays
gctttcgcttgctgcttagcctccgtgctgctgctttgatccataggctgggaactccaaagaggaacagcgtccatggaggctggaggcgcaggaagtggtttgaatggggcggtgcaggcaaaggggactggggctgatggtggctctgccaaaccgctgccgccttgctgcgtcaaggccagagccgccgcgccggagtccgaggccaggtgccacgccaccgtcgtttcaggatggttcactgaaccgcgatcgcgctgtggcaaagccagcaaagttcagtattacaataacccgatgtggccaggagaggccaattctttgaaagtggagaagatcttataccaggggaaatcgctataccaagaagtctt

SEQ ID NO: 281731 - DNA, 483 bp, Zea mays
caaaccgtggaactggtagtaatcttgctcttcaatccatctatcatcattagcaacaacatccgcgttgagccggcaggccgtgtgcccgtccgacgaccgggtcccgacaggaaagtttaagcagtcagggcagggccgccgtggacgcgggaccgaagcagggccaccgccgctgcaccatgacgcgtctgctgctggcgtgcctggctctgctgctggcgcgggcggccgtggcgcgggagtacgcggccgtcttcagcttcggcgactccctgtcggacaccggcaacctgtgcgtggacggcatcccggactacttggccacggcgcacgcgccgtacggcatgacctacttcggctatcccacggggcgcgtctccgacggccgtgtcgtcatcgacttcatcgcgcatgagctggggctgccgttgttgccaccgttcaaggctaataacgcgacgttccgccgtggtgccaact

SEQ ID NO: 281732 - DNA, 896 bp, Zea mays
ccccgttccttcgccgccgccgcatcccgtcccgaaccctaaccccactccatcatggcggccgcccactacgatcgcgaggacggcctgcctccatcggcgccgccgcacgcggcggcggacgcgtacgaccccaactacgtgccggactccgtcaagaccttcgtggtgcacctgtaccgccacatccgggacaagaacgtgtacgagatccaccagatgtacgagggcggcttccagcgcctctccgaccgcctcttccgcgacgtgttctggccctccgcggaggccgtgtctccctactgcgacggcgaccacgtattcctcctcctctaccgcgagctctggtaccgtcacgcccacgcccgcctctccccgctcaccgccgcgcaccgcgccgagtcgtggaccaactactgcgacctctttagcgtcgtcctccacggcgtcgtcaacatgcagctgcctaaccagtggctctgggacatggtcgacgagttcgtctaccagtttcagagctgctgccagtaccgcgccaagctcaagaccaagacggaggacgagctcaaccagctcaagcagttcgacaaggcgtggaacgtgtacggggtcctcaactacctgcaggcgctggtcgagaagtccatgatcacacagatcctcgagagggagaaggagggcctggagcagttcaccgccaccgatggctacgactacgagggcgggagcaacgtgctcaaggtgctcggctactacagcatgattggcctcctcaggatacactgctctccttggggattaccacactggcctcaagtgcctcgctcccatcgacctcaaccagcaaggggtctacaccattgtcatcgggagccacatttccaccatctatcact

SEQ ID NO: 281733 - DNA, 604 bp, Zea mays
agaagaaagtgttctcttgcttgatccgccattcagaagccggccactaatccgagctaggcacgctcccatccgacgtcgtcccagctagcacagccatttctgtttcgtttcttccactgcagtcagaacccagaagcagaggccgccgttgcaagcatgccgccgatggaggccgccgaggacgtcgtcatcgtcggcgccggacttgccggactcgcggtggctctcggactgcacaggaaaggggtgaggagcctggtgctggagtcgtcgccgtcgctgcgcgcgtcggggttcgccttcaccacgtggacgaacgccttccgggcgctggacgccctcggggtgggcgacaagatcaggaggcagcaccagcaggcgcaggcgctacgcgtcatggctttttccaccggagaaatcgtacaggaagtggacctcacgcagcaggggaaacgagggcccaacgagatccgttgcgttcggcgggacctgctgcttgaggccttggaggaggagctacccagaggcgccattccgtactcgtccaagatcgtgtccatcgaggaggaggacggcaacggtgacaaggtcctgcacttac

SEQ ID NO: 281734 - DNA, 903 bp, Zea mays
cccacttgtttggctgcccatctggctacccgtgtggtcatggtgctggccatcgtggttggcgtattaatcggactagctatgattttggtgcgcaatatctgggggtatgcatacagtaatgagaaggaggtggtcaaatacatctccaaaatgatgccgatcctagccgtgtcattcttgttcgattgcgtgcagtgtgttctttcaggtgttgctaggggctgtggatggcaaaagattggggcttgtgttaatcttggtgcatactaccttataggaattccagctgccttctgtttcgcctttatgtaccatctaggtggaatgggactttggttgggaataatctgcgcactcgtcatacagatgctattgcttctcacaattaccttgtgcagcaactgggagaaagaagctttgaaggcaaaggacagagtatttagtacatccgtaccagctgacatgatgacatgatatttctgaagatatttttttgaaggaaatgcccatgaaactttgccaaggaacatactaagaattggttgttcagattcaaggcctttctccatgccatcagaatgatgcttgggtctagtaatagctcctgagcagtctgttttttacttttggtcaatactcaatacatggaagatgtttggtttgaagaaccacgccatcctagatgaggtggtatattataagttgatataacggctccatactagttattgaggaatgagacgatgattatctcatgtaataataatgcttttccccctctagttattgatgtaagacaattgaggcaaatgaacaaaatgtcacatttgattaaataagttgcattgtctttttaaaaaaaaaaaaaaaaaaaaaaaaaaaaaaaaaaaaaaaaaaaaa

SEQ ID NO: 281735 - DNA, 615 bp, Zea mays
gccctttggtagcaatggaggatctcagaggaatgtgagaggtcgccatgatcacaatcctatccatttgggacacaatccaggtgtagcttgcgcaacaagcagcactcatgggccaccacaccatgctaatgtaattggtcctcaaagtacagcagtgccacaaaatagagcatatttttctatacctccaagagtgactgccccaggcagcgatggaaactgtagcatggttttcagggaagggacatactactctgctccgcagaggaccaacataaatgccccccctgtcctagcacctcctggttcttctgatagtctacattttgtgcatggtgggtatgccccaagagcagcccctcctaacagcatcagcacatatcctgccccggcttttgcgactcctaacaactcagtgacagttacccatgagcctgatatcccttgctatcgacctgccgtccctggctatccgcctgctacctcagcagctgcagcagcagcaagtgttcatgctgaaggtgctgctgcatcttcgagacatctaggacatgtggctctaggttccagtggtagtgcaaggagcccaatgctgagggattgataccatgc

SEQ ID NO: 281736 - DNA, 486 bp, Zea mays
ggcgttttgtgtattattcaaaatatccccgtcctcccgtcccgtccccaaaaccctagggcgccgccgcctctggagcaagctcagggcaaagaccaagatgaaatcgaccctggtttacaccacctgaacaccgcccctcatacttgtcgacggtctacctgatggcagcaggctccggcggtggaggttttctgggcgacgtcaacgacccatggctgaagccgcggctgctccgcgcggtggtcaccgggcgccttccgcagcctggcgccgtcgccgagctctcgccgacggaggtcgcctccatcctcgaggtggtacgcactcacggcctactcacggaggatctcccgggccgcggcgcgctggtgaacccgaagctcgccgaggcgtggcgcgccgccgtggacgcctgggttgagcgtgtcgtggcgctggtggagagcgactcgacatacaggtgttggttgggtacttgctttc

SEQ ID NO: 281737 - DNA, 916 bp, Zea mays
ttctttcgctcatttgacaaactatgggaacatggtgagtgctcaggagcgctcaatacaacatactgcttacaaccctgaagttactttgaacttgtcaccaccacctacactttcaacaataccacacagttctgcttacattacagtctcaaggtggccacagtttgcccttacagacaaaccagcaactgtatcagccagagcagtcttatgtgccccaaaacaactatggtccattagttccagttagccattctaaccttcaaatcagcaacactaacaaccccacccttaccatcccacaagtgaaccctggacctccaacaaataatcagattgggaatttggcccagccacagcattctatgccactgcatgttgatagagcaagtcaggatttctcttctcaggggcaacaacaaaatcgtggtcctggtgctgcacaagctcccgaggaggataaaagcaagaagtatcaggcgacactccagttagctcaaaacctactgcttcagttacagcagcgtggatctggaaatcaatcctgagacctaattattgcttcaggtaccctcgtctcgtctcagctggtcgcaaacaactgaaaatatatatcccaactcgacggcttcgcctccactctacaatcgaaccggcccatggtgtgtcagctcgttggcctacacctacttgccccagttctcccttttcaaggacatacattaccagaaaacgatttctttttctcctttttattttatcgtgtatttgatatggataatccggcctgaattttgtactcgtttgttagtatggcctcgtgttatgttgttatttactctgaaaccatatgttattgtgtacggtgccgtggttccaacacaagggaagcttgttcagagacccgtttcac

SEQ ID NO: 281738 - DNA, 816 bp, Zea mays
ctacattatcagccgggccgcgtccatacggcacgtggtggtgcgcctccttcacacgtacgtactgtacgtacgcttccccgcccgtctcccccaccgcttccaggcaacatatatatctgattcgagagcaggcggagctgcggattagctgctggtccgatccagaagctcctagacgatgatggacgtggagtaccacgaggagtacgtgaggaacgcgaggggcgtgcagctcttcacctgcgtctggctgccggcgccgtcctccgcgcccaccaaagcgctcgtcttcctctgccatggctacgcgatggagtgcagcgacttcatgagagcatgtggcatgaagctggccacagcagggtatggcgtgtttggtatcgattatgagggccacggcaagtccatgggtgccaggtgctacatccacaagtttgagagcctcgtggccgactgcgacatgttcttcaagtccatctgtgacatggagggatacaggaacaagagccggtttctatacggcgagtccatgggcggaccgtggctctactgctgcacaggaaggatccgaccttctgggacggtgcagttcttgtggcgccaatgtgcaagatatcggagaaagtgaagccgcacccggtggtggtcaccctgctgactcaggtggaggagatcatccccaagtggaagatcgtccccaccaaggacgtcatcgactccgcattcaaggaccccgtcaagcgcgagaaggtcagggggatcacgctcatctaccaggacaagccccggctgaagacggcgctggagcttctc

SEQ ID NO: 281739 - DNA, 555 bp, Zea mays
gtccttttttttcgtgaacagagcagggcaggctcaccagccagcacgcgcggccacgccacacccgcggagacgcggcacgcctccactcctcggccctcccccgactccgaggcgagcacgccgcacgctccgcctcgcagtcgcggccccgtgctctcttcctttttctccgtccaccgtcttctccttcttcgctcggagggttcgatctggtaactctggtgagaagtgaagacttagcacagtctgtgctcgtcaagtgccctggcactctggcaggatgcggcggctcggtctttcggtggcactctggtagttgtgtccatgggggacaaggttaatccctggtgccactgccattggcataatcctgcatggaaatccgacactgaaagttgtgccggcgatctccacccacctgacgctgggcatcttaccgccgattcggtcgcgttggctccaattttggaattccctccaccgtacccctcacgcaagagacctctcgttttgtaccagaaggagaagcgtgctcctgtactcccagctcct

SEQ ID NO: 281740 - DNA, 573 bp, Zea mays
ggcggtctcttattctccgacggttccccgccgccacacatcctatagttctacgccgagccggtcccagagggggcacacttccgacgacgagagcgatggtctgagctacgccgattccgtgtttggtgagatcgagtcgaacatcagttttggtgatgagggtggggaatctgacacttctcttgatcgccacaccatggttgggagggaaattggcatacagcttgacaatgagagctacatgaacacagatacagatattgatcctatgaatgctggagtataccagtgggactcagacgatcctgaagacgttgaagatgaggagtcagaggagtctggtttggatgaaggagatgacaccatgcaggagcgccggcagcagtggcatgatatcgtcccgagtggattgaatgagcaggaatctgaaggtgctgcatggacttggagaacagttggaagccaagacataaacaggactgatctgagagtcgacatggaaggacgggaaatcaggagactctctattgggaaaccccgagattatgtggatgcagacagtttgaatgc

SEQ ID NO: 281741 - DNA, 505 bp, Zea mays
cccactcgtccgcgcctctcccttgacatggcggctgcgacggcggcaggggccgcgccacggccgccgccgtatccctaatcgcctgctacatcctcctccacaagagtagagccaaactctcgtggttccctacggttgggttctcccgcgcgagccgccggcgggtgcgacggaggggtctcgtggaggccatcggcaacacacctctcattcgcatcaacagcctctccgacgctacaggatgcgagattctggggaaggctgagttcctgaacccgggtggcagcgtgaaggaccgcgtggcggttaagatcatcgaggaggctctagaatctggagatctcgtatatggtggtactgtaacagaggggagtgctggaagcacagcaattagcttggctactgttgctcctgcctatggttgtaggtgtcatgttgtaatacccgatgatgctgccattgaaaagtctcacatattgaggcgcttggagctactgttgaa

SEQ ID NO: 281742 - DNA, 794 bp, Zea mays
cggatgtgttctttaaggacatatggccatcaaatgaagaaattgcagaggttgagcaatcaagtgtgctgcctgacatgttcaggagcacctatgaagcaatcacgcagggcaacccaatgtggaaccagctggcagttccaaaggcagaccgcttcccatgggaccccagctccacctacattcatgatcctccattcttcaaggatattacaccgactcccgcaggcccatgcagcatagagaatgcctattgcctgctgaagttcggcgactgaataacgaccgaccacatctcaccagctgggagcatccccagggacagccctgctggcaagtacctgcttgagcgcggtgtgcagccaaaggatttcaattcttatggaagccgtcggggcaacgatgaagtgatggcacgaggaacctttgcaaaggtcaggattgtgaataggctgttcaatggagaagttggaccgaagacgattcacgttcctacaaacgagaagcttttcgtgttcgatgctgcaatgagatacaaagctgatgggcatcacaccatagagttggctggagaggaatatggcagtggaagttctcgggattgggctggccaggggccaatgttactgggggttaaagccattattggccaaaagtttcgaggggattccacccgatctacctttgtaggaaatgggagtggtaccgctgtggttcaaaccctggtgaggattgctgatttttggggcttaccggttatgaacgcttcacgaatgggcttcctaccaatgtga

SEQ ID NO: 281743 - DNA, 773 bp, Zea mays
ccacgcgtccgatctcccatcacttcctagctagtccttcttactcaacacattattcgatcttgagtggaagcaagcaggcagacatggcggcggctactgcaccaaagacgatgccgtcgtccgttttcgccgccgcactgctgctcctagccgcggcggcgtgccaggccagcccttactaccctctggagctagggtactaccgttacacttgtccccaggctgaggctatcgtcaaggccagcatggagaaggccatcgcccagaaccctggcaatggcgccgccgtcatccgcatgctcttccatgactgcttcgtcgagggctgcgacgcttccgtgcttctcgacccgaccccgttcagcccgacgccggagaagctggccgcgcccaacaacccgagcctgcgcgggttcgagctgatcgacgccatcaaggacgccctcgaggccgcgtgcccaggggtcgtctcctgcgccgacatcatcgccttcgcggcgcgcgacgcgtcctgcttcctgagccagggcaaggtctccttcgacatgccgtcgggccgcctcgacggcaccttctccaacgcctccgagtcggtcaagttcctcgtcccgcccacgttcaacctcagcgacctcgcctccagctttgccgtcaagggcatgtcgctggaggacctggtcgtcctttccggcgcgcacaccgtcgggccgctcccactgcttcctccttcgtttacgaccgcctcgaacgtcccctccgacatcaaccct

SEQ ID NO: 281744 - DNA, 1006 bp, Zea mays
gtccgtgaccttcgacgtggacgcgcctctccgtgagcgcgtctttcacttcagcgctgacgcaattcgcgagctgaaagcgattgccaaccgccgtccgagcggtggccaagacgccgaggtgtacggcaagatggcgcaggaccccaagaatccccaagtgcgcggggagatctcgtcgttccagtcactgtgcgcgcagatatggctctcggtcacgcgtgcccggaaacgcctggcgcccgacgcgacgacgacgttccgaatggcggtgaactgccggcaccggctgcagccgcccatctcccctgtctactttggcaacgccatccagagcgctgcgacgatggcgacagtctccgagctggctcgcagcgatctaaggtgggcggcaggcaagctgaacgcgacccttgcggcctatggcgacggcacgatccggcgcgcggcggccgcgtggcaggccgcaccccggtgcttcccgctgggcaaccccgacggctcggtgatcacgatggggagctcgaaccggttcccgatgtacgtgggcaacgatttcggctggggccggcccctcgctgtgcggagcgggcgcgccaacaagttcgacggcaagatgtcggcgttcccgggacgagccggggacggcagcgtggacatcgaggtgtgcctgcctccggagaccatggcggcgctgctccacgacgccgagtttatgccctacgtgtcgtgcccgtcgcatctgctgtgatgtactccacccgtgcgggcgggcccgagtgggccatcgcccgtaacatcccatcaggcacctgttggactgttcggtcgtccactcgtccttgcctttcgggagtcaggaagtactagctagttggtgtcgacacattggatctgtctccctattttcgcagtcctgcgtgtaatcgtgtgttaccagctacttctagtagtacttggaaattggaacaaccaaaaacaagggcggccgctcgcgatctaaaac

SEQ ID NO: 281745 - DNA, 397 bp, Zea mays
actagtttttgatcgcgagcggccgccctttattatggagggttttttttttttcatgtaatacaggcgcaccaacgctagctgtcattcatttcaagaagcagaatacaacgtacgtttaccactattaggtacgtacttattaggccggatatttgtatctacattggttccacccctcaggttcaacgtgaattagcccgccctgcgtctgtacagacggggtcacgaccgtgtgcctaaatacatgacgcatggccccccttggcggccccaccgatttcaggccaaaacaagtcatcaaaacatatatactaaaaaagagaaggaaagacgcatgcatgcagggttgtggcactggcagcagcatcagtgtccgacggcaatagactcctcg

SEQ ID NO: 281746 - DNA, 446 bp, Zea mays
gggattgaagtgctcctttggctatgatgatgaggatgaccagatgttgctttctgatgatgacgatgatgattatgatgacgatgagttgcatgatgacctcggaggccggtgctgaggatcatggccctcacagtcacagagttcatgccaccgagaaactgaaacatgatcatgagggacattgtgggtctcatctgtcagaagttgcagccattgacatgaacagaatgaacttcgaaggatctggtggtccatcctctgagaagaatttaagttatatgcgtgttcaaatcgagaggcagcgtctgaaaataaaatctcagatgctgagaattgagcagaggcatttcaagtggctgaagttcagcaaggagaaggacagggagctgcagaaaatgaagctggagaatgaaaggatggcgctggaaaatgagcgattggag

SEQ ID NO: 281747 - DNA, 600 bp, Zea mays
cccactcgtttgatcactagaagatcatctacatgatcttgcacctaatcaacaacctctagattggaaaacacggatgaagatagctgctggtgcagcggctggtttggaatacctccatgataaggcaaatcctccagttatttaccgagacattaaaccatcaaacattctccttggcgaaggctatcatgcaaaattgtccgactttggacttgctaagcttggtcctgtaggcgacaagactcatgtgacaacacgcgtcatggggacacatggttattgtgctcctgaatatgccttaactggacagctgacagtgaagtctgacatctatagttttggcgtcgttttccttgagctaattacaggtcgaagaccacaagacagtgatcggcctcctgaggaacaagacctagttgcatgggctcgtccattgttcaaagaccaaaagaagtttcgcaggatggctgatccttcgttgtgtggccgcttcccaaaaggggtttattccaggcactgctattgcagcaatgtgtttgcaggagaaggcaaaaagccgacctcccatgagggaagttgccgcagctctctcttatt

SEQ ID NO: 281748 - DNA, 490 bp, Zea mays
agtcatcctccacccaccccacccaccgcctccgcctctctctctctctttcgtttgttcgtctcggcttccggtcgccgattcttctctgcgcaaaagattcctggtggtggtgcccgtaccttgctccacgcctcgctcgcgtcgcgtgcatggggctggacgtcggcggcatcgggatgggcctggatctgggtctggacctcgggctgttcgccgcgcggagcgccggagggatggcggccgcggccaagggtgcgccggcggagatcgagtcctgcatcaggagccttgaggaggagcgccggaagatcgaggtgttcaggcgcgagctcccgctctgcgtgcgtctcctcgccgatgtgatccacgaattgaaggatgaggccgccaagagaggcggtgactcggaggccaaggccgccgacggcgataagccggaaatggatgagcaccgctcaactgtggctcgacagcgacgcccaatccg

SEQ ID NO: 281749 - DNA, 531 bp, Zea mays
caacaagtgattcctcagcatcagatgcgctatggcagcagctcaatgtccaaagcatggataactctattagtttgagcggttcaaaggttaagaaaccacaaataaagcttagagatggttcagaggccaggacaccaatccattctcaaataccatcagcgtcaagaaaagttgcaaacggttcaaacagatctgttaggcagcctttaagcagaagcgacagcagaaggctttcatcaaatggaagacaatctggtgcaaagtagggacttacaatgatcgtgtgcattttttgcctttttctcagtgtttgtcacgagagattgtgaggatgttcttgagtacagcaatgagtgacaataaacccgattgattgtgtcagtgtggtgagttgtgatctcaacaactggtgtgtgaggccattaacctttttttttccttattggccttcaggctatgttgagttatagctagttctttgtatctggtcataatataaatttatataatgaaaagaaagcaaatcga

SEQ ID NO: 281750 - DNA, 438 bp, Zea mays
aatcatttttcttctgtgccaccagaacaccaacataggccgtatcactggggtaataactgtccaccgtgccctgagagatatcggtacaatggacatgatcgaggtcatcacagacatgatcgaaggcatcatgcgcacgacagacaacaccattatgatgatagaggataccgctatgatgatagaggatatcactatgatgatagaggccattactttgatgatagaagacatcagtttgatgacagagggcattactttcatgaaagaggttttaagggggaaatgcacaatgagggtggttgactagtcaggatttccttttccaccaggaccttcttcaattcctgaccattttgaagtttcaccaggcccaatgcactaatggcgaccatcagatccttcaccaggcattgtgcaggctggtctaggccg

SEQ ID NO: 281751 - DNA, 484 bp, Zea mays
aaccctttcggagacttcacaagagtatagctgtatctctatagctctatagcgccgatagatccatcctctctttccactcctactagctagctaacatatccacacatggcggccagttccaaggtcgtgtgcgcatgcattctcatcgttctcgtcatctcaagccacgccgacgcgaggcggctggtggcggcgacgtgcaacggaacggaaggcggagcatgcaagggtggcatcttcgtccaaggatatgcaggcctcagtgcaaggcagaaaatggcggccactgcaacgagcactgagcaggtcgtcggcggcggcggcgatggcatgccggcgaccaccacggactcccggcctacggctcccggcaacagccccggtattggcaacaaagggaagatcaacaactagtttaattgccgtgtgtgttcttgtacgcgttcttatctaagtaataagcatccaattaagctgagtg

SEQ ID NO: 281752 - DNA, 888 bp, Zea mays
cgcttttcctccaaagcgagcgagctaggcgttacgccggagctcgtttgggcggcggtggaggagagaggaaagggaggagatgaaggcggtggagccgaccgaacctggtgaggagcctccggcacgagtcgcggcggctgcgtctactcgtcctcgttatcggtttcttcctcgttactctcaccttcgtcgtcgtctccaagcccgacgcgctcctcttcaacctgaacggcaggctgtcggtggaccaggcgccgcgctcgctcttgatccgccagcgggttgacgccgacgaggggagatccgccgaaactctcgcctcagcctccggagatccaaaggtggtcgaagacgatacctacggcgaggaagccagcgccaaagccagagccaacgccaatgcccgagggaccactgccgaggaggaacggatgctcgctagtgagcccgagcagagaaaaagggcacaggaagccactacatctgagattttagctgcggaagacgaccggggaaggaaaagccagcaagagggacacagagagcaccagcagcacccgttgaccctcccaactgtttcgaattataccattcacgatgccactgacggcaccgacaatggcaatcaggcagcattggataatatggagcgggacaaaccattgtgtgatttctcaaacttcagagcaaatgtctgtgagatgagaggtaacatcagaatacacccaaatggcagttcggtcatatacatggaacctacgggttcaggttcaaagagaaacgaacaatggaagattaagccttaccctcgcaaaggtgatgaattatgcctcaatcatattacagaggtgacagtgaaatccagcatagtggcacccgagtgtt

SEQ ID NO: 281753 - DNA, 372 bp, Zea mays
gcgtccacaaggaggctcacgtcgcttgaagaggatgtgcgacataaaacatccaattcgtctacaaaagaaattaataaacaagccactcctaaaagatcattgactgaaccaaaacaacctaaaacaatgagagtgctacctgcaactatattcacctgaagatcgctgacaagagaaggcctatatctcaaccaagggcatcaatggtagggaaagtattgaagcaacctaatacacaaatcgagcctacaaagaaaagtacagtcgttgagcgatgtgatagccctggaaggagaacaatatctagtaaagaagagtgtcccatgacaaatcacctatgggcatcatataccagaacagatgttattg

SEQ ID NO: 281754 - DNA, 631 bp, Zea mays
attttgcgcttttcctattttatgtttcaatgtctgccattaagctcactaagttaacttatctttttttggtctttgggccatggggttgaagctacctatgaaatacttcctaggctctgccaaattagatttgaccatggtgttattgatgaatacttatactttgactcacccaacgaatttgggttgcctaatggacaaatggtgctggagcatgcaaaagttgttcaaaaaagtgtttatgaacatctacatgttatacacgagggacatctgagaataattttcacaccagaactgaagataatatcgtgggaattttgttcacgacgccatgaggagtacaccactcgcaagactatagcaccacaggttaataatcttctgcaagttgcccagaaattccaagctgttgtcagtgaaagtggatcagccgggatatcaaataatgatgcacaaaccatctgcaacatgtttgtcactgcatcacaacaactggcaaaaaatctagagcatcaaccttaaatgaacatgggctctctaaaagatatgtacgctgcctgcagatatcggaggtggtgaatcacatgaaggacttgatcgagttcagccacaagagcaagcttgg

SEQ ID NO: 281755 - DNA, 322 bp, Zea mays
cacacagctaaagccttgtgcaaaattatctcgattaagctgtcctcaaccatcatggctgccattatggcggcaggtctggtagtactggcactcctcgctgctgccgtcgccgctccggcgcacgccacggactacgcggtcggcgactcgtccgggtggagcagcggcgtggactacgccacctgggcgagcggcaagaccttcgctgctggggacaacctagtgttccagtacagcgcgatgcacacggtggcggaggtgagctccgcggactactgcgcgtgctcggccagcaactccatccagtcctacagcgacc

SEQ ID NO: 281756 - DNA, 519 bp, Zea mays
ttccatccaggcaaggaagaaatcgagcagcctatgagaggataagactgctcgtaccactcagaccgtcctcaagatcaccgtacgcaaggtcacccatacgcagctctacaccatattgacctgaaacgttatgctgctaacaaaaatgaaaccacatactgctatgatcttcccctggcatttgaaacagcgctgaatacatcatggaaatcaagtagctatggtgttagcgaagctaatgagcacaatcgattctatgctgaagtgaaagagcttatatttgctgattcggttggagcatggggcactccattggtttcagttgaacgtcctccaggcatcaatgatattggcatcggtgcttggaacatgaagctgtccaccccagaattcccacgtggcccggagattatagttgttgccaatgatgtgacatttaaagctgggtcctttggtccaagaaaagatgcattttttgatgcttttaccaattttgcctttgaaaggaaacttcct

SEQ ID NO: 281757 - DNA, 538 bp, Zea mays
tccacgcgtacgttttgccaatgttactgtccacacatgcaccattgatatttaccgagaagtggaagaccccaccacacatcagcttctctaccactctgccacaacctcggctggtcctttgcatggtgttgcattgaatgaaccatacaagcctttggatgctattgacctcaaacgttatgctgctaggaaaaatgaaaccacatactgctatgattttcccctggcatttgaaacagcgctgaagagatcatggaaatcaagtagctatggtgttagcgaagctaatgagcacaatcgattctatgctgaagtgaaagagcttatatttgctgattcggttggagcatggggcactccattggtttcagttgaacgtcctccaggcatcaatgatattggcatcgttgcttggaacatgaagctgtccacgccagaattcccacgtggcccggagattatgttgttgccaatgatgtgacatttaaagctgggtcctttggtccaagagaagatgcatttttttgatgctgta

SEQ ID NO: 281758 - DNA, 291 bp, Zea mays
cgccctgtaagagctgatcagcactcaacaagcgatcgatcaagcggaggcggaggaccagcagtgggagtagaatgggcggggatgcggcggcgatgaggccggtgctgcacctcatggtcgggctggtgctctacggcgtcgccgaggagatgaccgtcccggcgcttgtcgacaaggtcaccgccgcgctctgccccgccgtcgaccggtcctgcccggaggccctctacctcaccggcctgcaggcttcggttggagggatcttcaggacggtagggttcactctga

SEQ ID NO: 281759 - DNA, 512 bp, Zea mays
tgtttgatcggcctgctgttcatgccttccttgattccttgatggatttagaacgtgatatacctggatcatgcgaagtactggttggcagattgctacaccggctagggagctcaaaggattcctcattgcaaggtcttcaggagacggcgatgtcaattttcactaaggaacctgaacctccctctgaaaaagcaggcgacaagaagttagctaatatgccaccattggctgctcctaccgtgagcccactggcaaggttccttctcacaaggtggcaaaaccaagtttctcaagatcttaactctgtttgatccctgcgatgcagaaaagtgatttcatgttcgattcggtgtataattaatatttttcagtgtacataatgcaaactttagaactgtatttcatgcagtcggtctcaaccacctgttatttcatttgttttgttcatggcgaatactccctctgtccccaattaaaatttgttttacaaataatggatgtgtgtatat

SEQ ID NO: 281760 - DNA, 281 bp, Zea mays
cgcggacgagctagccgggtggaagctcgtggccggcgacgtgttccgggagcccagccacccggtgctcctctgcgttctcgtcggcgatggcgtgcgcatcctgggtatgggcgtggtcacatcgtcttcgccgcgtcgggttcatgtcgccgcgtgccgcgcgcgctggtcacgcatgctgtgcttgtacctcgcctagcgtggcgcggtaacgtccgggcgtctgaaaggtcggcaggcgacgccggtggagtcgtgcgtgcgcctcgtcgcttccg

SEQ ID NO: 281761 - DNA, 418 bp, Zea mays
cccacgcgtccgcccacgcgtccggcgatagcatagcttagcttgcttccccaatgccaatgtcatcgacagcacaaatggcttccctcgccgttctcatcatttccctcgtctgtgcggcgcttgcctccgacgccgccgcaggctccgcgtcgagctcacgcgcgtccacgccgaccccagcgtgaccgcgtcccagttcgtccgcggcgccctgcgccgcgacatgcaccggcacaacgccaggaagctagccctagccgcgtcgtccggcgccacggtgtccgcgccgacccaggtctcgcccaccgccggggagtacctgatggcgctggccatcggcacgccgtcgctgccgtaccaggccatcgcccacacgggcagcgacctcatctggacgcagtgcgcgccctgcacc

SEQ ID NO: 281762 - DNA, 310 bp, Zea mays
cagagcactgcctgttgtttcttcttcctcctctctcccctctcgatcgatcgatccaacaagctgagcttggtccttgctttctagctgcctggtacggtctagcgaccgatcgatcgatcgatcgaccatgtcgtccttgctatgtattagccgcaggaacaacaagaaggacagcgatggcgatggagagtacggtggcgagcagatcatcatcagcacgggcggcgcggccatgaggaagggcccgtggacggacgaggaggacgagcagctggtacggttcgtgcgcctgttcggcgaacgcgat

SEQ ID NO: 281763 - DNA, 714 bp, Zea mays
tttcaacagcagctatagtttccaagggaaagggatacatcacctgctgctctagctctgctatagcgctagcagcaatataatggcggccgtcggcgccccgggcagctctctgcacggagtcacggggcgcgagccggcgttcgccttctccacggagcacgaggaggcggcgagcaatggcggcaagttcgacctgccggtggactcggagcacaaggcgaagagcgtccggctcttctccgtggccaacccgcacatgcgcaccttccacctctcctggatctccttcttcacctgcttcgtgtccaccttcgccgccgcgccgctggtccccatcatccgcgacaacctcaacctcaccaaggccgacatcggcaacgcgggcgtggcctccgtgtcgggctccatcttctcccgcctcaccatgggcgccgtctgcgacctgctgggcccgcgctacggctgcgccttcctcatcatgctgtccgcgcccaccgtgttctgcatgtcgctcatcgacgacgccgcgggctacatcaccgtcaggttcctcatcggcttctccctcgccaccttcgtctcctgccagtactggatgagcaccatgttcagcagcaagatcatcggcaccgtcaacgggctcgccgccggatggggcaacatgggcggcggcgccacgcagctcatcatgccgctcgtctacgacgtcat

SEQ ID NO: 281764 - DNA, 394 bp, Zea mays
ccgtgcctccgaggtgcgcgtgctgctgcgcgacctgcactccgtgtccggctccggccgcgccgtcatgctcaaggactacctgtccacggtgagcctgaacgtgatcacgcgcatggtgctcggcaagaagtacctggacagggaggaggcggccgtcggggccgtgaccacccccgaggagttcaagtggatgctcgacgagctgtttctgctcaacggcgtgctcaacatcggcgactccatcccctggctcgactggatggacctgcaggggtacatcaagcggatgaagaagctcagcaagatgttcgaccggttcctggagcacgtcgtctaggagcaccaccagcggcggctgagcgagggcaagggcttcgtcgccaaggacatg

SEQ ID NO: 281765 - DNA, 587 bp, Zea mays
gtccaaaagaggaagaaatccatgaaatacttgcgaagaaccgactgggactcgtactgttttgttctatcaaagctggggctacgcgatgtgcccgagtacaaagctcctgattccaagagcaaagcaacccctaaggccaaatctaagaagagcaagagcaagaggagaaagataaaggcataggagcggtgaacaaacacaccctttgcatggctaggaaatgattcgagaagatagatccatccaatcttacagtgttttttttttgacaagaagctgtttgtaataaccatctctttggaggccacggtttttccttgttctgcttggagcggcaaccttcctgtaagttttgtaacaactgatttattatattattgcttttgagttctcccgctcgatatgccttattatgagggaagggaggaacagatacgacgatatgataccattacgtcatcatcagtttgtagctttgccagttttttttgtttgacgtaattttccagaattcttgtataagaatgcttgaacaatcttgctagctagcctagcgaaacaatcaagtagaaattcttctattt

SEQ ID NO: 281766 - DNA, 491 bp, Zea mays
ttcatgagtttttagaatctcagaaccctggatggggcataacatctctttctgtcactgcaagcaaaatatttgatatacctagtggaacaagctcaatcctgagatacattaaaggtccaagttctgctgcagctctgactatacctgattctccaagttctgctgcagctctggctatacctgattcttcatttggacctgaggatccatctcttgataatgatgtatttgtggagccaattcatgaagaagaatgccaaccatcaacctctgagaaagaagacgacaataatacacattctgcgtctgcattttcagctaaaaaatgccgagcaaatgaagaaaaaagaatatcaaagaaattgcctggagttcagggaacttcctcgatattgaagtttctttcacggggccaatctaccttacatgagaaaagaaaatctgatggactaatttgcagtcatcaaggtaccgggagttcttcggaa

SEQ ID NO: 281767 - DNA, 529 bp, Zea mays
ggatacattagctaagtttcgttctgatttgcaaccaaatctcgggaaggcttcatcccaggttgctgcgattaaaattaatgttgttgctgttgctccaatagttggagtttgtgacagcaacaatgacatgtacaaagaacctaaagatcaagaaaccatcactggtccagtggcttggtcaccacaggctgtgcatgctgatgttgatttagacaatcacaatgaaccaattaatcctcctattgatggtactcaatcaatgtttggcgaagtcccaagtacagcttttacaggaagagaaaagggaaaatcaaaatctgtatcttttgctctatcggatgcttctggggtagctacccctatagataccaattctgagatgggtaacatcggcgattcctgtagtgacaaattgactgatgaaaatttaagtaactcatctcggcatatcgctgataagcattctattaccaaggaccaattttaaatgagcaggaccatgagcgggagccactagatcatgctg

SEQ ID NO: 281768 - DNA, 456 bp, Zea mays
tctttctatcagcgctgagtgaaaagttgtatgtaatcaaaggaggatgtggagctgcaagttctgttaagatggtcaaccaacttcttgctggggttcatatagcttcagcagctgaagccatgtcatttgctgctcgactaaatttgagaacgagaagagtcttcgaaattatgcaacatgcaaggggttattcatggatgtttggaaatcgtgtgccacacatgctcgataatgattatacaccctattctgcagtggatatatttgtcaaggatcttggtatagtatcttgtgaaagttccaattcgaggatcccagttcacgtctcttgtattgcccaccagctgtttattcaggatctgcttctgggtggggtagatatgacgatctgccgttgtgaaggtctatgagacattaactggtgagaaagttgaaggggaggctccgatgctc

SEQ ID NO: 281769 - DNA, 373 bp, Zea mays
cccacgcgtccgaggaagtctccgtccccgcttctgattcactcccccacatcgccatatgtcgccggaggccggaccaatcatgcggcccgccgaccagctactcctcccgttcctcctcctggccgttgcctccgtcgctgccgccggcggctcgtgggagaatggatatgggagcatcctccgcctcccctcctcgtctccgcgccggttcccccgctccgcggccgtcgacctgatccacgcgctcaacctccaccccgccgacgcgtcccctcccctctccaccgccggcgtagagggcgccctcgcccccgcggggacccttgtagagaggcccattcgcattgtgttcttcgcgaacggaggcgcc

SEQ ID NO: 281770 - DNA, 652 bp, Zea mays
tgcgttccgtgaccgtccgcaaccgccagcgccgcctcttcaccaacaaccccagcggcagctggaactcctaccgcggcaagagcgtctggagccacgtccccttcgagcacccggccacgttcgacacgctcgccatggacccggacgacaaggaggacatcctcgacgagctccgcgcgttccgggacgctaaggcctactacacccgcgtcggcaaggcgtggaagcgcgggtacctcctgtacgggccccccgggaccggcaagtcggccatgatcgccgccatggccaacttcctcgactacgacgtctacgacctcgagctcacggccgtccactccaacaccgagctgcggaagctcttcatcgagaccaccggcaagtccatcatcgtcatcgaggacatcgactgctccctcgacctcaccggcgcgcgcgaggacgacaagaagcgggcgtcggccgaggcagacgacaagcccaaaaccccaacggatcccgacaaggacgagggaagcaaggtcacgctctcagggctgctcaacttcatcgacgggcctgtggtcggcgtgcggcggcgagcgcatcatcatcttcacaaaccaaccacaaggacaagctggacccgggctgatccgcgggggaggat

SEQ ID NO: 281771 - DNA, 453 bp, Zea mays
ggccactgttggcaacttcgcccgtttcacccccggaggaccgacagcgacgacgccactactgatgccactggccaaccgtgaggacaggacaacggtcgcctctggccgcggatcggcagattcagtcttatttggtgccatggatccagtcgccggtacggcgagcatcggggaccggtggaagtgcgcgcccgcgcgcccggcaagatcatcctcacaggcgagcacgccgtcgtccacggctccgccgccgtcgccgctgccatcgatctctacaccaactcctccctcctcctccgccccgcaggcccaggagagggtggcggcgctggctccagcgcggtagagctggacctcagggactcgggcctgaccttctcatggccgtgctcgcgcctccgcggggcgctgggggaagagatcagcgccaaccccggggctccggcgccg

SEQ ID NO: 281772 - DNA, 453 bp, Zea mays
gcttgttagggagctttccaggctccgtcgtcccgatgactgcgcagctataacctcgggggcgcggcagcatgcgtcttaacgaaggataaagacctgctaagatggccatggccatggccaggttcctctcgtggttgttcacatgcttcgcagctctcgccgtcctggaggccacggtccctgctcgttcatggcgcgctccgagtcccaccccgaggcacgaagcgaggaggttcgagcagaagacggacaggttctgggagtaccaggagcagagcaatacctgggtacaagtacgcgcgccgttcgacctcatgtcctgcatcaacggcacctgcacaaaggtaggatcgatcgggcggctggcgagggagcctggacgacacggtctttcttccgtccagagccaggaggaggaggaggaagacaccctgcgggatcagggagatg

SEQ ID NO: 281773 - DNA, 714 bp, Zea mays
ctctcattaattccagctccaacatctctctcctagctacatctctccactgtctgtttgcctgtcgaggccgggcgccagcagcaacaatggcgaggatgatcagccggccggccgtcctcctctcccccctggccatgatcgtcgtggccgccgccgtcatggcgctggcaccggcgccggtggccgcgaccaagtacaacatcaccaagattctggcgccctacaaggagtactccaagttcaacgacatgctgtccaagacgcgcctcgcgtacgacatcaaccggcgccagaccatcaccgtgctggccgtcgacaactccgccatgtcggcgctcgaccactactcgctgcagaccatccgccacatcctcgagctgcacgttctcgtcgactactacggcgacaagaagctcaagaagctcgcccatggctccaccgcttcctcctccatgttccaggctaccgggtcggcgtctggcatgtcggggtacgtgaacatcacccggaaggacggcaaggttagcttcatgacggaggacgccgacgacaccgcgaaccgtcccggtacgtcaagtccgtcaaggagttcccctacgacatcgccgtgctccaggtgagctccatcatctcgtccgccgaggccgaggcgccggtgccgcccccggcgcccgtggacctcgaggagctcctatccaagaggtactgcaa

SEQ ID NO: 281774 - DNA, 537 bp, Zea mays
cccacgcgtccgattgcccctagctcaccacacactcgagtgacgagcacacccaccgacgatcgccatggccggcggcagcagccttaagaacatggtcgtcgccttcctcgtcccgctcccttccatcctcttctacctctccttcgtccgcgccggcggggacaccggcgccagccgctcgcctcgtggtgcgcacgcaccctctggtcctggccaacgtcctcttcttcctcaacgtggacgtcctcttctggctcgtcggcctcctcctctccaaccactggctcatcgacctgtactggaccgtcatccctgtgatgctgctgcactactaccgcggccacccggcatccgtggcggacgcggcgaggtctgcggtggccgtagcgctcacgtgggcgtggagcgccaggctcacgcacaactacctcaggcgggagggatgggacttgggcaagcgggaggactggaggttcaacgagatgcgtgcccagtacggcaacacctggtggtggatgtcgtcttcgccgtcta

SEQ ID NO: 281775 - DNA, 430 bp, Zea mays
ttagatcgcgagcggccgcccttttttttttttttttttttttttttttttttttttttttttttttggcagcgggacagagcacattctttaaattcattttgcaggcaacaaaagagctgatatgaaacgaccgacacgacagcagcaccgccctttttgcagtctgcaccagcactctgcaaggggcgatcgtccttcgagatcgccgccgcggctcgctagctccccccggttgtacaggcgacgagagcttcattgtctgccgccttcttttacctcgcgtccgtttgtatggtcagcctccgagcggccttggtgaactcactgaaaggctcgtcgccggcgtgcttgagcgctccaaaagcgccgtcgcggaagaagacatggctcggcagctcggccctgtcgacgccgaacatgtcggcca

SEQ ID NO: 281776 - DNA, 464 bp, Zea mays
ttgcacaccctgtctctacagtctctctctctctctctctctgctgcgcccgcggctattaagcccgatctggatgagtcggtgagggagtgcgacgaggagagccggcgacatctaatcactggcgagggtcctcactttgagcgacagaaaggtggcgggcatgacggaactatatggcacgggcttagaaatcaattgaaaacgcggggttggcaatttgggcctggtgaaggtcctgatgtgggcactgcaattgtcgcagctgttatctttccctccttgatgcaacttgccaaggggatcagcgacgtggaccacccgagcgcagaaggcggcgtgcaccgagaggtacccgaggagggacgaggacgagggcaagaggcccgtttcggaggccgacatcgaaagggaggaagagtgcggcatctgcatggagatgaacggcaaggtggtgctgccca

SEQ ID NO: 281777 - DNA, 562 bp, Zea mays
gaactgcacacgaacaagcgggcgatccaggcatccagataacaggtatcccctcgacgcgcatgggcctcgacgagcctagcctccaccagctacgccgtcacgcgagctcacggcccgggggcctcggaagcacaaccaccacgcgtccacgccgaagccacgaggagagcctgtctctcctccggggattctatcgccggctgggctcagcggcgccacttggagcaggcggcacccgctccgtactgctgctgatttggtgagcgcgggcagccgcgggatgggagatctggtggcgtgatggtgagccccggcagtaaccggggcggcctgtcgcgcgtatcgacgcggggcggcgtcgccgggccggggagcccgcgcgcctctcctgccgcgaccgctttcgcggcgctacggcgcaggtggcggtgggcgcccccgggctcgtcgacgctggagcgcgcggcccgcgcgttcctgctggcctccgcagcgctcgtgctctcctgcgcgctctacctctacgtgctgcgctacgtcggccggggaggtcgcgcct

SEQ ID NO: 281778 - DNA, 328 bp, Zea mays
tctaatcacttgccaagaacaagagctctctacttgctttggactagcgtgatccgcgaggtcgctggctgcttgttgtgatcgaccaatgccgtccaaggcattcgcgctgttcctggccgtgaacctggtggtgctgggcgtagccaacgcctgcacgcccaactgctcgaccccctcgacgcccacgccgacgcccaccccgtcgtcgttcggcagctgcccccgcgacgcgctcaagttgggcgtgtgcgccaacgtgctgggcctcatcaaggctaaggtgggcgcgctgcccacggagacatgctgcccgctgatggagggg

SEQ ID NO: 281779 - DNA, 694 bp, Zea mays
caagtatctatcaccaccgacaccagtctcggcgtcctcacagatggaggagaaaagttggaatctctcttttacattggtttggaactctatagtgtggcttgtgcttctgaacttctccgttaagataatcacgtcgacggcacaggattatctcaaaaagcagcaggatatggagatggaacgcgtttctgattctccgcccccggaacaaaactaactagcggcgcaagtttatttcagctgctagctgcacagattctcctctgcatttttagcaactggttaagcgtctgcagacgattccaagttccaacgattatcaattagtattagtagctattcatctacacagtcaacgaaaacatgggcctggcaactggccgggtgatggctgtgacctcctatcatatcattgagcctgtagtgggcagttccctggaggagaattctactgttcttttttgtttttccggacatctacacggatagacagtagggattggttgtgtgaagcacggttggcttatgccgagatttagcactggtagatgtttctatttgttttggaaatgctatagaaacatgtgagcattcaacaatgatacgctctgttaagtttgttgtgtattttggtttgcaactggtgcccgaaagagcaaacagtggctccatcaatttcctttggcaagta

SEQ ID NO: 281780 - DNA, 918 bp, Zea mays
ttgaggtacagccaaggaacacgaagtacatgtcgctgggagacggacgcggcctgtgcatggaatgcctgggatctgcagtgatggacacgagcgagtgccagcctctgtaccattctatcagagactactacgaggggatggacatgagactggaccagcagatacccgtgctcttggttgagcggcaagcgctcaacgaagccatggaaggggagagtaaaggcccacaccacatgcctgagactaggggcctatgtctgtccgaggagcggactgtgagcagcatacttaggaggcccagaattggtggaaaccggttactagacatgagaactcggccacagaagctgacgaggagatgtgaagttactgcaatacttgtcctgtatggcctccccaggctactgacaggttccatcctcgcccatgagctgatgcacgggtggctgcgtctcaaaggttaccgaaacctaaacgcggaggtggaagaaggcatatgccaggtcatgtcttacttgtggctggaatcagagattcttccgtcgtcctcgaggcacgcgcagccttcgtcttcctacgcctcgtcctcctcctcgtcctactcttatccagcaacatcatccgagaaaggtggaatgtctcatacagagaagaagctgggcgagttcttcatgcaccagattgccaatgacacgtcgacggcctatggtgacgggttcagatctgcgtatgctgccgtcaacaagtatggccttcgccaaacactgagccatatacgcctaacaggaggcttccctgtataataagagtgaaaaaaacacaaaatgtccatgcatgatcatatcgatatcaaaaggttatatacatattgggatgaagttggctatggaacactggatgcatagtgattcaatt

SEQ ID NO: 281781 - DNA, 539 bp, Zea mays
ttcacgcgtccgcattcaccaccacctccgtcgccgtgctcgccttcaggctcctccgacgcctgccgcgccgactcagcgtgttccgcgcgccgcccgcggcactcgcgagggcgtggtcgttgacgtcgagcagactacagcacatcgcccgacacccgttcggtcaccgcacccggatggggcacacaggctgcgatggggccgtggccggcgaaaccgatatcggactaaccaagcccaacgccgtcgagccgcctcaggtcacctgttccgcgaaagacatcgaattctccgagtggaagggcgatattctcgctgtcgccgtcacggagaaggatctgtccaaggacgcggactccaaattcgagaatgccgtcttgaagaagctggacggccagctcggcggcctcctgtcggaggctgcggcggaggaagatttcaccgggaagacggggcaggcggcggtcctccgcctcgcggggcagggcttcaagagggtgggcctgatcggtcttggtcagagcgccccgtccacc

SEQ ID NO: 281782 - DNA, 565 bp, Zea mays
ttacgtcggcacggggtgcgtgttcaaccgccaggcgctgtacggctacgacccgccgcggcccgagaagcggcccaagatgacgtgcgactgctggccgtcgtggtgctgctgctgctgctgcttcggcggcggcaagcgcggcaaggcgcgcaaggacaagaagggcgacggcggcgaggagccgcgccggggcctgctcggcttctacaggaagcggagcaagaaggacaagctcggcggcgcgtcggtggccggcagcaagaagggcggcgggctgtacaagaagcaccagcgcgcgttcgagctggaggagatcgaggagggcgtggaggggtaccgacgagctggagcgctcctcgctcatgtcgcagaagagcttcgggaagcggttcggccagtcgcccgtgttcatcgcctccacgctcgtcgaggacggcggcctgccgcagggcgccgccgccgaccccgccgcgctcatcaaggaggccatccacgtcatcagctgcggatacgaggagaagaccgagtggggctaggagattgggtggatctatgggtcggt

SEQ ID NO: 281783 - DNA, 942 bp, Zea mays
actatggtatggttctcatcttgtgcggtgacatgtttccaccttctccaaggtcatcaaggtttttgttgtccttgaggtgaccgccaactccgtagccgagacggtaagcctggccccggagatcatccgtggaggtgaatccatccgatccatctttggcatcctcaacagagcaacaagaatcgagcctgacgatccagagtcagagagggtcaccaccatccgaggtgacattgagttgcggcatgtcgacttttcgtatccagcacgcccggacatccaaatcttcaaggacttcaacctgaaaatccaagctgggcgcagccaggcgctagtcggagccagcggctcagggaagagcaccgtcattgctctcatcgagcggttctacgacccgtgcggagggaaagtggccatcgatggcaaggacatccggacgctgaacttgaagtccctgcggcgcaagatcggcctggtgcagcaggagccagtcctcttcgcgtcgagcatcctggaaaacatcgcgtacggcaaggaaggcgcgagcgaggaggaggtggtcgacgcggcgaagacggcgaacgtgcacggcttcgtgagccagctgcccgacgggtacaggaccgcggtcggcgagcggggcatgcagctgtcgggcgggcagaagcagcggatcgccatcgccagggcggtgctcaaggacccgccccgcccgcggcgggacgaggcgacgagcgcgctggacgcggagtcggagtgcgtgctgcaggaggcgctggcgcggctgatgaaggggcggaccaccgtcctggtggcgcaccggctgtcgacgatccgaggggtggaccgcatcgcggtcgtgcaggacgggcgggtcgtggagcacggcagccactccgacctcctggcccggccggagggcgcgtactcgcggctgct

SEQ ID NO: 281784 - DNA, 564 bp, Zea mays
gtgggagagagggagcgagctggccggctaggccaggagaggagaggggagacacagacaacgagcgctcgctgggaagaggaagaggttcgtggggacgcagggatccagaggaagatgaggcggtgggtcttagccatcgccattcccattctcgccgctgcttcggcggcggcgctgttccttggggctgaggcccaggcggtccagcagggccaccagacagagaggatctcaggaagtgctggtgacgtgttggaagataaccctgttgggaggctcaaggtttacgtgtatgatctccccagtaaatacaacaagaagctggtgaagaaggatcctaggtgcctgaaccacatgtttgctgctgagatcttcatgcaccggttcctgttgtcaagtgctgtccgaacatttaatcctgaagaagcagattggttctacacttcccgtatacgccacatgtgatctgactccttcgggtcttccccttcccttcaaatctccacgcatgatgcgcacgcagattgagctgattgccacgaactggccttactggaacag

SEQ ID NO: 281785 - DNA, 537 bp, Zea mays
ccctcgccctcttgcttcccttcccccacaaccgcctccgcgccgtacagtcctcccactcctcatctcgcgattggcaaattctagggtttcgcggcggccacccggatccagctcggcttcgcgagcgcctctaaagcttcaggtcacgagagggcgctttgctctctccctgtcccgccctcaccgcggccgccgccacgacgacgacgacctgcggttgcgcctgtgcctgggttccgatcgtccggcgcctctccgttggccactggataccagctcatgatgtggaaatctcagctctaaatccgcttgggttgtgatatcgtgacagctgtgggtactgacataactggcactgtgcaagatgttttggcatgtgccgggactctccgctgcatcaccggttgatactattttggacaaggaaaatcttacgttggaatggcttcttgatgaggatgaaataatccaggagtgcaaagcactgaatacccgcttaatcaattttttgcgggacaaggttcaagtggaaca

SEQ ID NO: 281786 - DNA, 363 bp, Zea mays
ggcgcacgaactctgcgcttccacttctctctccaccgtccctttacccaaccaaccaccgcactggtacgctctcgactctcgacaccggcagcagcaggaggtggagctagggcatgtgatcggactccttgcctgcttcctgatctcaacctcttttcaccagcgcgagggcggcgcggtctcaagccgggatggggtatctgccggcgctgggcgggaaggcggcccacctggtgaacgacctcgccactgtcatcctgaaccccgtctccgagcgcgagcgccagccacaccaccccacccacctcccggaggccactgtaggagaagacacactattggttgacgatgatttctgac

SEQ ID NO: 281787 - DNA, 380 bp, Zea mays
aacaacccctcggtctaagctcgcctctgcctcacagccgccttccgatcgagctaccagtgcgtactcaaaactcaaaacgagaagcaagaactcagtagcaatatatggcgaagtcttgcaccttactgttcggcacagtactggtcgtgctcttgcttctagtgagccccatcgcttgctcccgcaagctcgccaagccaacaaacaagcacaggccgagacacaagccggcggcagtcagagcccgcagcaaccacactgccaccccctcggtgtccgacgcctacggctccggcggctggttgtccgccggcgcgacgtactacggggcaccctatggagacggcagagaccgcggcgcgtgcggctaccaaacc

SEQ ID NO: 281788 - DNA, 572 bp, Zea mays
ctgacgcgtgggatcgcgagcggccgccctttttttttttttttttttttttttttttttttttttttttttttttttttgggaagaatatactcccttcgttttgtttttgaagccatgatcaaaaaagtcgctagccaaaactagcgacatgttgtcacaagaccagcgttttgaattacaccgaaaactcaggattacataccgaaggcttatatcatttttttcatggaagattacggtcccagtaaaacactccgacacatgcctcgacaaggcacacaccattccccagaattatatactctccgaagatcgcctgcaggagagccaactcaagatgctatcatttggtgatgtccccccaagcaggaacatggtggcggcactgaagacggcgtggattgcccttgtaagttgttttttgcttgcattgacagcagtggttcagagtggatgcctgcgcttaccttcaagtttggatcatgaatcgtggtatgtggtgctccaagatggccaagagttctctgctttggctatccctttccacttgcctcgagccgctcgagctt

SEQ ID NO: 281789 - DNA, 938 bp, Zea mays
  unsure (1)..(938): unsure at all n locations
cacagcctacagcgcttctgctgctccagctcctcgtactaccgcgcccgcgcgctgctcgttccccggcctctgcttgcttggctcgtcgagcccagaggttggtggaaagggcggngcttattgccccagataggagatcggggacgcgggagggcgcgtcgcgctcgggccggtctcggttcagcgggatcacttgcccgtggccgtggtcgggcctccggcgcccatgtggtgagccaagccaggcttttgttgcccggggggcagagatcttgcacttgcagcagtgaagccggcggtgcggtccggtccggtccggagccgagcggcgcccaccgccatggccggcagcgacgaggtcaaccgcaacgagtgcaagggggcggtgccgatccacacatgggtcctcatctccaacttcaagttggcgtacaacatgctccggcgggccgacggcaccttcgaccgcgacctcgccgagttcctcgaccgccgggtgccgcccgacgcgcgggcccaggagggggtctcctcgtccgaccacgtcatcgacacgtccactggcctggaggtccgcatctaccgtgccgccgctaacaacggccgcgcgggcgcgggcgcggcggcggtcaccctgcccatcctggacttcctcggcggcgggccgtctccggacccgttcccggtgatcctcttcttccacggcggcagcttcgcccactcgtcctccggcacggccatctacgacaacctgtgccggcggttcgtgaagctgagcaagggcgtggtggtgtccgtgaactaccggcgcgcccccgagcaccggtacccgtgcgcctacgacgacggctggaccgcgctgaagtgggccatgtcgcagcccttcctccgcagcggcggngacgcccgggcccgcgtgttcctgtcgggcgaca

SEQ ID NO: 281790 - DNA, 467 bp, Zea mays
tccacgcgtccgcctgtgcccccgcctcacacaccacagcctacagcgcttctgctccagcgcccgcctcgcctcgcctcttctcctcgttctgccgcccgcgcgcgccagcctggtgctcgttccccttcttggctcgtcgagcccagaggttggtggcgtcagggatttgtattggagcggaggagaagggggctttgccccgtggagatcggggacgcgggagggcgcggcgctcgagccgagctcggttcagcgggatcacttggcgtggccggtccttcggggcccatgccgtgagcaaagccaggctttgttgcccgggggagagatcttgcgcttgcaagcggtgcccgcccaccgccatgggcggaagcgaccaggtcaaccgcaacgagtgcaagggtgcggtgccgatccacacatgggtgctcatctccaacttcaagttggctgacaacatgctc

SEQ ID NO: 281791 - DNA, 450 bp, Zea mays
tttgcgactcctcagcttcctcctctccttccttccttagctgtcccccttcccgccacctctgacccgtttcctgctcctgatcctgacgcacgtacgtctgggctgctgtactacgcgattctcgcggcggcgcccatggacccgtggatcgggcagccttccctgagcctggacctcaacgtcggccttccgacggcggcgaggccgcctgcgaccaccaccaccgccgaggtcttggtcgaggaggacttcctggccgtcaagaaagaccgagaggtgcaggtgcaggcgctcgaggcggagctccggcgagccggcgaggagaacaggcgcctcagcgacatgctcgggccggtggtggccaagtacgcggagctgcagggccaggtcacggtgggccggcgccggctggtgttcacggggggcaacagcgtcgtcggcggcggc

SEQ ID NO: 281792 - DNA, 458 bp, Zea mays
gttctagatcgcgagcggccgccctttttttttttttttttttttttttttttcggagagaagcgtaaattattatatatattctgttaatttatcacactactcgatctgaaccaccattaatacacactactctctcatctcatctcatctcatctcaccaccatgatctcagctcgttcctcgcctcgcctggataatatatatgagctagcaaattcacagagcgcgtatgtacgtgtgtcctcgccaaacgatatgagtcgcgggccgggatcaggaggaggagtcgagcatcttcttgtagtactcttggtcgtcgatcctccacagcgaaaaatcggagccgcagtactcccacggcggcgaggccggcggcggcggcaaggcggctgaggctgcggcggcgccgtagtaataacagtgaccaccaacagcagctccgccccagcaggcgt

SEQ ID NO: 281793 - DNA, 633 bp, Zea mays
ccctgcactgcagcgggatggcgtccccgccgccaccacgcgtgtgcgtaaccggtggcggcgggtacgtcgcctcatggctcgtcaagctcctgctctcccgccgctacgccgtgcacgccactgtccgcgacccaagtgatcccaagaacgcccacctgcaacagctggacggggcccgggagaggttgcgcctgttcaaggccgacgtgctcgaccgcgacgccctggcgaccgcggtcgtcgcgtgcgagggcgtcttccacgtcgcctcccctgtgcccgcggacaaagtcctcgatcccgagtccgaggtgctgtctcctgctgtcaagggcactctgaacgtcctccaggcctgctcggcaaacaacgttcagaaagttgtcgtggtttcgtccacggctgccgtttactttaacccgagctggccccaaggtagaaccaaagacgagagttgctggtcagacagagatttatgcattaagaacgagaactggtactgtgctgccaagacgattgctgaagaaactgcagtggagtatggagagaagaacgggctgattgttgtcacggtctgcccttgtatcgttttaggcccactcctgcagcctctgatccatgccagcagcg

SEQ ID NO: 281794 - DNA, 334 bp, Zea mays
ccggggctgtgcagcgcgtgcccctcatcgtccagcggctccctgtcgcccttctcgctgcgccggtgggactcgaagaagctgctggtgtggctggtcgtcctcctcaccctgctggtcctggcggtcctgggcgcgcggaaggcccacgaggcgcggcgcgaggcggcgcggcggcggtcgggggcctggaagaggacggcgtgccagaagctggacttctcggcggacgacgtggtggagcgtctcaaggaggacaacattatcggcaagggcggcgccgggatcgtgtaccacggcgtgacccgcggcggagcggagctggcgatcaagc

SEQ ID NO: 281795 - DNA, 423 bp, Zea mays
ctgcactgttgatggaaccaagctggtggtttctggtggatgtgcggactctggtgttcttctcagcgatacctacctcctagatgtgacaatggaaagacctgtttggagggagatacctgcatcttggtctccaccttcaaggctggggcactcgctatctgtctacggtggcaggaaaatcctgatgtttggtggccttgctaaaagtggtcctctacgacttagatctagtgatgtgttcactctagatttaagtgaagacaagccttgctggcggtgcataactggcagcaggatgccaggagctggtaatcctgctggggtcggcccaccacctcgcctcgaccatgttgtcgtgagccttcctggtgggagagttctgatatttggtggttctgtggcgggtcttcactctgcttc

SEQ ID NO: 281796 - DNA, 536 bp, Zea mays
gttcacagtgttgacgaggtgtacgccgggagtaaggcctgggcaccaaacaatggcattctgatcagtgggtgccagactaaccaaacatcagcggatgcaactacaccgcaggtgtctcctttggtgctctgagcaatgctatccaaaccattcttgcagacaagcacgggaaggtgacgaataaggatctcgtgatgaaagcacgtgagctgctgtccaagcaagggtacactcaacagcctggactatactgcagcgatgagcatgttcatgtcgctttcatatgctaaaacttggattgttacagcgattgctttcctccatccttttgtgttgatcggtgcaccagaggttgatgtttttcttcccatgtatgttacagctatattgtatcagtgtttgttgcttgaggatatgtttcaatggactatgtcaatattgaaataactttagagaaaaaaaaaaaaaaaaaaaagggcggcagctcgcgatctagacggacgcgtgggcggacgattgggcggacgagtggg

SEQ ID NO: 281797 - DNA, 639 bp, Zea mays
ctttcacccaaacaaactcccctcgctgaaactcgccgccgtctcctcgccttccgcctcagcacaggccccgtcgcggtctcctaggccacgcttccgcctctcctcgtcggctgcccgcctccgcccggcggccggagcaggctaggttaccagcgccccccacttcgcggtcgagctggaggacacgcgtagcaacgccgggttcttctgcggcgacctgtggtgtggcctcatggagcccaagggcgagtcaggccagacgcctattgaagaagcaatcgacagcttgaagactgatgctagcatgaaggcaaacaatgtcaacttgcctgctaagaaagacgcaagttcttctgatgcagtatcttgcatttcctccggcgatgcagctagtactgtgaaggatagagaaatgaaccaagaaacttcttttggcgaccaagggatgcattactatggatattattatcctggtgcataccggaggatgggatgcagaatggctactttgttggatataatgggtcagaggtgcacccagcagtggttcaaactgacaatggctcatatctgtgtcatcttccgggatatgaaaatggatatgcttcttatagcaggttgttcctggaggcattg

SEQ ID NO: 281798 - DNA, 437 bp, Zea mays
tttacaaatcgaaggcgaacaaccgcttacctctgatcgtcggagcctcggtgggtggagcggttcttgttgcaatagttcttgctcttgttaccatcgtcgcaaggaggaagaagagaccaaagcagaacgaagagaggagccagtcttttgtttcttgggacatgaagagcacgagcggcagcagcgtcccccagctgcgcggcgcgcgcacgttcaacttcgacgagctgaggaagatcaccagcaacttctcggaggcgaacgacatcggcaacggcggctacgggaaggtgtacagagggaccctgcctagcgggcagctggtggccgtgaagaggtgccagcaggggtccctgcaggggagcctcgaattcaggacggagatcgagctgctctcccgggtgcaccacaagaacgtggtcagcctagtgggc

SEQ ID NO: 281799 - DNA, 609 bp, Zea mays
attccgcagtcatgagatgcgagtcaggctaagtgacggtgagcctgaaaaaccactggtaattcatgtcggacgttttgggcgtgagaaaagtttggattttttgaagatggtaatggaaaggttgcctggagtaagaattgcatttattggagatggaccatataggggtgaactagagaagatgtttgaaggaatgccagcagtgttcacaggaatgatgcagggtgaagagctctcgcaggcggtacgccagcggcgatgttttcatcatgccatcggagtcagaaacgctcggccaagtggtcctagagtccatgtcgtcgggggtgcccgtcgtcgcggcccgtgcaggcgggatccccgacataatcccggaggaccaggagggcaggacgagcttcctgttcacccctggtgacctggacgactgcctcggcaaggtccagcagctgctgacgaacagggagtttagagaaaacatggggcggacggccagatccgagatggagaagtgcgactggcgggccagcgtccaagacgatccgcaacgagttctacaatgctgctatctggtacttgcgaaagaagcatgcggagctggtgaag

SEQ ID NO: 281800 - DNA, 600 bp, Zea mays
atcatgagttagttttggttcagggcatgaacctagttgatgagatatggggagatgcaaggccaaatcccccaaaagaaccaactagggtgcatgacatcaaatatgctggtattgatgtgccatcaaagttgtccttcattaggtcacaacttgctgaaaatgggtgtgatgctgtggtaatttcaatgctcgatgaagttgcttggttgttgaacatgagaggaagtgatgtcccacattcaccagtattttatagctacctcattgtggaggttagcactgctacactatttgtagacaacagcaaagtttctaaagatgttctggagcaccttgagcaagctggtgtgaaacttaagccatatgaagcaattatttctgaagtagaaagactggcagagaaaggtgcaaagctctggttggattcttcaagcgtgaatgccagccataattactgcatttaaatcaagttgtgacagacacatgaaaaagaaaggaaaagcaggtgaagaagttggagaaaaagaagcatcttcaaacgaccggataactggagatcctagtgtccacaatggagtcataagtgctgtatacaat

SEQ ID NO: 281801 - DNA, 460 bp, Zea mays
gttctagatcgcgagcggccgcccttttttttttttttttttttttttttttttttttggggaatttggtgcagcttgaaaatgcttactactccatgaggtcctctgtggacacctgggaaactaatgtaatcaaacgtccagataacgaggctttgagggtccgtgaaaatttccatcagcgtcacagtgattctgatgcaaagggagagaaaacagaccgtcttggatgcttttttgatggtttatgcaaatatgcccggcacaataggtttgaagtacgaggaattttgaagaatgcagatgtacttagctctccaaatgtcatctgttcattgagttttgatagggatgaagaatattttgctgctgctggaggttcaaagcaaataaaaatattcgaattggatgcactcttaagtgaccgcgttgatattcattacccactggtagaaatgcc

SEQ ID NO: 281802 - DNA, 673 bp, Zea mays
tgtaaattcagcttttcaatctggtggtaccaccttgaagagaagttcgttgaggaataacagtgcctctaatgttcacaatttcagtaaagctgatgtagtgcctgtcattgttcccagaactagctccggaggggagttggctactgattctagaagcgatgctgctgatgtggcacccgttcttccgaaggtaaccagaagggttgaacctgctaccgattctagaaaagaaagtaatgatgtggaacttgttgttcctagagcaagctcaagaatggaaatagccgatttagcacccatttctagttccaagtcaggcagaaggttggagtctgcccctgattcgaaagaagaaagtgctgatacagcacctgttgttgtttccaatcccagggctaatgtaagaatggaaatagtctctgattctgcgcccgctctttcaaagtcaaacagaaagctagattctggcactaactcaaagaaagaaagtgctgatgcagtcattgtacccagaacaaattctagaatggaaatgatttctgattctaggagagaaccctctgctggaagaatatcaccattcagaatccagtcaagatatgctgagccacggaagctagcccatgccagaactgattcaaacaaagttgatagcagaagtaaaattact

SEQ ID NO: 281803 - DNA, 468 bp, Zea mays
  unsure (1)..(468): unsure at all n locations
cctgttgctctgctgcacagcaatcgcctcgtttcatagtaaggaggaggaggttgaggaagtcaggaggaagatgatgcagcaggagccctggaacgccgccgccgccatggggctcctccgcccgaccaagtcggctccctgctcgcccatcaagccgccgccggcgaccatgctgcggactcacttccacgtcgcgcacaaggtgccggtcggcgacacgccctacgtgcgagccaagcgcgtccagctggtggacaaggatccggagaaggcgatcgcgctgttctggagtgcgatcaacgccggagaccgcgttgacagcgcgctcaaggacatggccatcgtgatgaagcagcagaaccgcgccgaggaggccatcgaggccatcaagtcgctgcgaagccgatgctccgaccaggcgcaggggtcccttgacaacatncttcttgatctctacaagagatg

SEQ ID NO: 281804 - DNA, 1313 bp, Zea mays
tccgtctcttgctcatcagcatcagctagccacccgaccaggcttcagaaaacaaaaaaatgaagctctcggcggcagtcctctgcgcgcttgtggctgttcaggcggcggtgcttctcgccaccgtgccgacggcgcaggccagcgagctggaggtcgggtactacagcaagaaatgcaagggcgtggagaacgtggtgaagtggcacgtcatcaaggcgatcaaggccaaccgccgcaccggcgccgctctcgtccgccttatcttccatgactgcttcgtcaggggttgcgacggttctgtccttctggacgcttcctacgacaaccctcacccggagaaggaggcgccggtgaacatcggcctcgccgccttcgacctcctggaggagatcaaggccgctgtcgagaagaggtgccccggcgtcgtctcctgctccgacatcctcatctacgccgcccgcgacgccgccagcgtcctcagcaacggccacgtccacttcgccgtccccgccggccgcctggacggcttcgtctccaaggccgaggaggcccaggcggactcccggactccaaccaagacgtgcagcagctcatcgacaacttcgccaggaagaacttcacggtggaggagctcgtcatcctcaccggggcgcactccatcggccagggccactgctcgtccttcaccggccgcctctccgagccatcgcagcagatcaccccggcgtaccgcgacctgctcaactacaagtgctcccaggggtccaacccgcccgtggacaacaacgtccgcgacgaggactacgacgtggtggcgaggttcatgccggggttcaccagccgggtgcgcaagatccccgacttcctggacaactccttctaccacaacaacctggccaagatcgtcaccttccactccgactggacgctgctcacgcacaaggaggcgttcggccacgtcgtggagtacgccgagaacgccacgctatgggacgaggacttctcggactcgctgctcaagctcagcaagctgcccatgccgaaaggaagcaagggagagatcaggaagaagtgcagcgtcgttaaccaccgcttatactaagcctgccagatgccgtggaaatcgaagaaagaggtcgtgccagcacaacacatatatatcaaccatcggagatcagaaagccataaggttgcgcttttttgtttcatccattcttttgattatcattcgtttgtgctacactcatctttttgtgtatttctcatgcatatctgtcaaactgcaataaaactttgttcctgatatgtgc

SEQ ID NO: 281805 - DNA, 333 bp, Zea mays
cccacgcgcgcgtccagttctcgagccagcagcatctgtctcttgcttcatcagctaggcgcccggccgcgcggaccaggctccaggagaccaaaaatgaagctctcggtggcagtcctctgcgcgcttctggctgtccaggcggcggtgctcctcgccaccgtgccgacgtcgcaggccagcgagctggaggtcgggtactacagcaagaaatgcaagggcgtggagaacgtggtgaagtggcacgtgatcaaggcgctcaaggccagccgccgcaccggcgccgctctcgtccgccttctcttccatgactgcttcgtcaggggatgcgat

SEQ ID NO: 281806 - DNA, 507 bp, Zea mays
tcgtacgcgtgggcgatcgcccacgcttccgtccatccagactccagagagataaaatctaattcctggacctggagtgcagaccgatcgccgccgccgccgcgttgtttcttgtctgcgcagctgtggtgatggtgcggtaaaagaaggctgctccatcgctccaacaaaaaaaaaggtcgggatcgcacgcggcaggcgacaagcagtttccaaagagaagggaagcctagaggaagggagctagagatgggggagggcagagcaggagacggcctcatcaagctgttcgggaagaccatccccgtgccggagacggccgccgtcggcgaggctgccaaggacatgcaacatagcggcggcagcggcagcggtacgactgatccgaaagggcaagagaacaacgttcaggactccacaggctcgcctacgcagaggaggtcgcggacaccgaagactcgtcggcagacaaacagcagggcgaggcgggcaacccaaaggagaagc

SEQ ID NO: 281807 - DNA, 515 bp, Zea mays
gcttccgaccagccttgcttcgcccgttccagcgacgcactactgcggcgaaatcccgctcccgcgtcccccatcctccggccgcctcgcttcggcctccctccggaaggtgtcttaaatcatggcgactggccaacttttctcaaaaactacccaagcattattctacaattacaagcaacttcccatccaacggatgcttgattttgacttcctctgtgggagagaaacaccttctgttgctggaataatcaatcctggttctgatggttttcagaaacttttctttggacaagaggaaattgctattccagttcatcccacagttgaagctgcatgcagtgcacacccaacagctgatgtatttatcaactttgcatccttccggagtgctgctgcttcctcaatgtcagctttgaagcagccaacataagggttggagccattatcgctgaagggtgttctgaattagatgcaaagcagctaattagttatgcacgcgctaataataaggt

SEQ ID NO: 281808 - DNA, 695 bp, Zea mays
ggcggcctcatgataatagcaacaggcaaaacccatctggtgccatatcaggccgtcaacttggagaggcagctcaccgacttgtcataaacagcttaaatgctcagggtagggggcaacatagtggcacatcaatgccatatcgaactataatgaatggcttgcatcatctggatgtagcgtcccctgtcagcgatcaaggcatgcgtccacaagtggggcagtctgccggacctcctggttggtatgttcctaggggtagtgtatcaaatggtcaaccaccagcttatgcatcatcaggatcaggtcattatcagtattgaaagtttcggggcattcacaatatgagcaaggtaaccatggaaggcaacactctcacccatatgcaagagatggcttccatgatacacgaggaagggttccacctgcatatgggtaccagcagagcaacatgtatccatcgggtcctggattgtatgggcaacctccatcagcatatcctggggttcatggtggaggctaccaaccccctccatatggcggaggccagcagtggcagcaacaatcatatagttcgtatgccgtgcgaggcccctacggaggcaggccaccacccacaagggctgattcagggtcacagcaaccacagaaccggtctggtgctttaacaaaagttacaaccgaggccttcatct

SEQ ID NO: 281809 - DNA, 527 bp, Zea mays
cccacgcgtccgctgaagtgcttgacgccttccgcttccacttccacggcagcacgagccttcttctccttctcgcttagcggctatagcgccagccaaaggagaaagtctgcgggcgagtgcgatagatagacacagagaaaccgatagatcatcaaaaaacgagcgaaaaaatcggtccataccccaggccggacgcgcgttagagtctccaaagcttatccttccatccactccccgcagccagcttctcttctcgctcccggttatattaataacgcggcggcgtgctctgcttcctccggtttgctctgccctgcttcctaaacacaaacgcgctctgcaccaagaactatatacaacgtagaaactagccgcgccgtcactcccttttgtggcaacctgcagcacgcacttgctgagacaggggtagccttgctataggctagctagtgtcacttgccgaggacaagcagcaggccggggagacatggcactgacagtgttcgagaccaccgagcagcagc

SEQ ID NO: 281810 - DNA, 811 bp, Zea mays
tgaagcagcacactctgcactctcggcaacaactgacggccggaggaagaaggcgcagacgacaagcagaagcttgtgccatcgatcaatggcggcggtgacaaagatctacgtcgtgtactactcgacgtacggccacgtggcgaggctggcggaggagatcaagaagggcgccgactccgtggacggcgtcgaggcaaccatctggcaggtggcggagacgctgccggaggaggcgctggcgaagatgcgcgcgccggcgaggagcgaggagcacccggtgatctcgggcaagcagctggtggacgcggacggcatcctgttcggcttcccggcgcggttcggcatgatggcggcgcagatgaaggcgctgttcgactccacgggcggcctctggcagcggcaggcgctggcgggcaagcccgcggggttcttcttcgcgctgggcacccagggcggcgggcaggaggagacggcgctcacggccgtgtcgcagctcacgcaccacggcatggggttcgtgcccgtgggctacacgttcggcgccggcatgttcgacatggacgaggtcaggtgctgcagcccgtacggggccggcacgttcgccggcgccgacgggaggagcaggctgcccagcgacgccgagctgcagatggccgcgcaccagggcagctatttcgccgccttcgccaagaagctcaaggcgggagcggccgtcgtggcctgagcctgcctgagtagtgctctctcctctctgcccatcgatgccagctgctcttgtctgcggaaataaaataaagcttcattacgt

SEQ ID NO: 281811 - DNA, 275 bp, Zea mays
cccacgcgtccgcccacgcgtccgcggacgcgtggggatgctctagtaaatgcgtgcgagtacgtacgagtcggagtactcactggcaatgttttcatgcgtgctgacttgaccaggtactactcgacgtacggccacgtggcgaggctggcggaggagatcaagaagggcgccgactccgtggacggcgtcgaggcaacgatctggcaggtggcggagacgctgccggaagaggcgctggcgaagatgcgcgcgccggcgaggagcgaggagca

SEQ ID NO: 281812 - DNA, 385 bp, Zea mays
gccacagtgaaacgaactctcttgagtaccacaaaaaagaacattggcgttctttgtagtagagcacagagcgaagccgtcaacgatggcttccgctccgctgccggcggccatcgagcccgggaagaaaggcaacgtcaagttcgccttcgcctgcgccatcctcgcctcaatgacctccatccttctcggctatgatatcggagtgatgagcggcgcgtcgttggacatcaagaaggacctgaaaatcagcgacgggaagctggagatcctgatgggcatcctcaacgtgtactcgctcatcggctcgttcgcggcagggcggacgtccgactggatcgggcgccgctacaccatcgtgttcgcggcggtgatcttcttcgcg

SEQ ID NO: 281813 - DNA, 468 bp, Zea mays
aggagaaaatagcagtcgagcaggaggacaagaatgccgagggtgggcctggacaagcaaacatctcagatatccctgcagcacacagggagttggacagtgaattcgcaaacatacatgtctctgaaacccctgaagatgttcccatctctaccgtgactgtccccgctgttacagatgaggagcccagcacggccactccagcagctgaagtttctaaaaagccagaagctgcgcagggattaatactataagtgatacagttttgcttcatacatggatgcaatgtaaatagacatgaaatgaggtagccattgaactcatttgtggtgttgtggttgacatcatcagatcgaaccctctttgaaggttgaaaatgattgggacccgaagaattttgcaatttgtacctggtactttttatcaaattatcagtcttacccggcagtgggaaactgggaaaatgga

SEQ ID NO: 281814 - DNA, 550 bp, Zea mays
ttcgcactctcacctgccttccttctgccagctgctgactcatctatcagctcgctcgcacgctgcagaacgaacgaagctgaaggcggcggcggcggctagccatggggagggcgccgtgctgcgacaaggcgagcgtgaagaaagggccgtggtcgcccgaggaggatgccaagctcaaggcctacatcgaggagcatggcaccggcggcaactggatcgcgctgccgcacaagatcgttgggctgaagagatgcggcagaaagctgcaggctgagatggctcaattatctgcgccccaacattaagcacggtgacttcacagaagaagaggagcatatcatttgcagcctctacattagcattggaagcaggtggtccatcattgcagcgcagctgccggggcgaacggacaacgacatcaagaactactggaacaccaagctgaagaagaagctcctcggcaagcgcgcgccgtcccggcgcgcgaggacgaaccaggatccctgctacctcgccgcgggagccgccagcagcagcagcagcagca

SEQ ID NO: 281815 - DNA, 776 bp, Zea mays
cttagaatatacaggcctgctgaatcgacaacaagtcggcatcttccttgcagccatgagctatgccaatcggttccaggctgcacaaacccaaagcagccttgcccatacaacattgactacttttcagaaaatactaccagctctggcttgctaattgaggatacactacacttgaactacagggaggaccatgtacccgtgaatgcttcagttattattggctgtggtcaaaagcaaagtggtgattatctggatggtattgcaccggatggactccttggccttggaatggcagatatttcagttcctagtttccttgcgagagctggactagttcagaattccttctcgatgtgctttaaggaagatagttctgggagaattttctttggagaccaaggagtgccctctcaacagtctacaccgtttgttcctctgtatggcaaacttcaaacttatgctgttaatgtcgacaaatcttgtattggacataaatgtcttgagggtactagcttcaaggctttagtcgatagtggaacatcatttacttctcttcctctcgacgtttacaaggctttcaaatggagtttgacaaacaaatgaatgctcaagggtgccttatgagacactacctggaaatattgtacaggctagtcctttgagatgctgatgtgccaccataacctgcattgtgggacagagctgcagctgtaatctattgcattatgcaacagggcactgcgggtctgtactggctgcatacagaccatgat

SEQ ID NO: 281816 - DNA, 549 bp, Zea mays
gcgtccacgcgtttgattagtcgggagaaacgcgcgtgacgtctgcccgcgtcgtatgcgccgcgctgccgtcgccacgacgacgacgacgaccaggatggcagccgaggagatgagacgggcctccgcctcaacggccacggcggagatgccggcgtcgccggcgccggcgcaagcggggtcgaggtgggcgcgggtgtggccgcgcgcgctccgctggatccccacctccacggaccgcatcatcgccgccgagaagcgactcctcacgatagtcaaaactggatatgtccaggaacgagtcaacattggctctgctccacctgggtcaaaagtaagatggtttaggtcagcaagtgatgaaccaaggttcattaatactgtaacatttgatagcaaggagaatgcccccaccctggttatggtccatggctatggagcttcacaggggttcttctttcgaactttgtgcccttgaagccgttagggtgatgcattgatcagttgtgggggggtcagcagaccgcttacagaaagtccgagaacgag

SEQ ID NO: 281817 - DNA, 463 bp, Zea mays
gtcgctttggcaaggtttattaaaaaatttggcactcatatagttgttggcctaaagatgggtgggaaagatgtaatttatttgaagcaacaacattcatcaaccttgcaagctgtcgacgttcaaaaacgattgaaggagatgtcagatagtagatttcttgatgcacatgtgcactatgacacgtgggggaacactcaggatttggtgatgatgctcaagcgaagaggtgggagggataaagaatctatatctcatagtgagtggcttaatactgttcaagcagagcctgatgttacctcaatgtcctttataccaatcacttcgctgttgaatggagttcctggaagtggatttttgatccatgcaattaatctgtatctccgacataaacctccaatcgaggaattacatcagtttttggagttccagcgtccaaggcagtgggcacctgtttacagtg

SEQ ID NO: 281818 - DNA, 1050 bp, Zea mays
ttcacgcgtccggagcgcctccttgagtgcaacaagcagaccagggtcttcctcaggtaatgttcctgggataagccgcgccacctcattgtcctcaagttcggttccttcaatgagccgttccagctcacgatcatctacacctacacgacagcctgcaattcgctcatcagctccagctattggtcgttctccttctgttggacggacttctagcatcaacagctttacgacttcgtccaggtctgcagccagtactggccggaactcagcaccttcatctgctccatcatctcgtccaagttctccgaacccacgaccccgagctccagtgcgacctcttgatatccccgatttcccaaatgaagctccaccaaatctaaggacaaaattacctgaaagaccaccatctgctggcagatcacggcctggaatggctttaggcataagatcaaccccaaatactgaaccttcagccgcctcagctcctatgaagaaggtctctgtgtctgctgttagtcgaagtaaattttctgatgcatcatcaaagacctctactcccacaaatgggcaccaaaatcgacaggctgaaaggtccactgttgacagccaagctaatagaccctcgagacctgccacgggtaccacagataatggatttgggaggtcgatatcaaagaggtcacttgacatggctatcaggcacatggacattcggcagaacttgggtggcattcgcggcacatccctgtttccccagagcatccgctcggctgctgccaaggtccgtccagctcgggcatcagacccagggcatggcatctcaaacggggaccagcgctacagtgacaatggaagcagcgtgaacggacacctctccggggactgcgaacggggttctctcacgtaatggtggcagctcaaccgattcgccagacagggggagcatcgggaccaaggagaccctgagcgaactggacatctatggtagctcgcgctatgaagcgatgcttctcagggagggacgtgcggaacacaaccgggctccgc

SEQ ID NO: 281819 - DNA, 560 bp, Zea mays
tagagcccttttacgaggacttcggatggatgcggcgagcatgcaaggggcttgaccggcatttgatcgaggatggactggcaaacacaatcctgacgctgcctcttgcaactcagcaggagatccttctggcatggcttaaccgcttcctcaactctggggtggattgcccaaacattcagagagggtttgaggtgtggtggcggcgcgccttctggaaaaggaactctgagccagaaccaccatcccgtttgaggattactgcgatctgcgagaactcttgatgacgacggttcatattcgacatggaatgtggcggttgctggcatacagctattgatggcccgctatacgttgcaggggacaagctgtttctcactttttttttgttatgtctgattaggcagttagtcaattacacatgtcatcttgatcctgtttcaatgcaatgtataccaggtacaatgtactactatgccgcaaccattttgattcgaagtgaagtagagtgactatttgtggtttgctatatagcataagcaaacaatggaaggattcag

SEQ ID NO: 281820 - DNA, 558 bp, Zea mays
cgcaaaccgcagccaagcaagcgttcgcctccctgtgatcgcgatggggtccaccgagaggcaggagccggaggcggcgccggagatcatcttccggtcgaagctcccggacgtcgccatcaccagcaccctcccgctgcaccgctactgcttcgagcggctccccgaggggggcgaggggccctgcctcatcgacggcggcacgggcgccgtgctcacgtacgccgaggtggaccgcctgacccggcgcctggccgcggcgctccggcgcgcgccgctggggctcgggcgcggctcggtggccatgaacctcatgctgaactcggcggagttcgtgctctccttcttcgccgcgtcgcgcgtgggcgccgcggtcaccaccgccaacccgatgtcgacgccgcacgagatcgccgggcagatcgcggcctccggcgccaccgttgtgttcaccgagtccatggccgcggacaagctccccgccatgggcgacaagctcacggtcgtcctcatcgacgcgcgccgcgacgggtgcctccacttctgggatgacgtcat

SEQ ID NO: 281821 - DNA, 759 bp, Zea mays
cccacgcatccggaaagagagatcagcgacttaacaacaataatggccaccgccatagttcccacggacgccgagctgctgcaggcgcaggccgacctgtggcgccacagcctctactacctgacatccatggcgctcaagtgcgcggtggagctccacatcccgaccgccatccacaacctaggcgggtctgccacgctgccggacctcgtggccgcgctgtccctgccagcggccaagctcccgttcctcgggcgcgtgatgcggctgctggtcacgtcgggcgtcttcgcgtcgtccgacgacgtgcagtaccggctgaacccgctgtcctggctgctggtggagggcgtggagtcggaggaccacacctaccagaagtacttcgtgctgggcaccgtctcccgccactacgtggaggccggcatgtccctggccgactggttcaagaaggaggaggacgaggaccgccagctgccgtcgccgttcgaggccctgcacggggtgcccctcgtccacgagagcaccaagctgctggacgaggagctggacagggtcgtggaggaaggcgtggccgcgcacgacaacctggccatcgggaccgtcatacgggagtgcggcgccgacgtcttcagcggcctccgctcgctcacctactgctgcggcaggcaggggaacgtcagcgccgccgccatcgtcaaggccttcccagacatcaagtgcaccgtgctcaaccttcccagggtcgtcgaggagacg

SEQ ID NO: 281822 - DNA, 661 bp, Zea mays
gttgttaaactgacttggtcctgataatcctccgcgttctaatgatgtgctgtcgctgcaccatgcgcgtgttgtcgtcagagcctagggctggtgaagcccctggaggagatgctgatggcggccagcgcgggggctgcaaatccgagccaaggctcgaatccgaacccgccgccgctggcggcgcccctgacggacgcgggtagcaccgagcggcgcgcgcggccgcagaaggagaaggcgctcaactgcccgcggtgcaactccaccaacaccaaattctgctactacaacaactacagcctccagcagccacgctacttctgcaagacgtgccgccgctactggacggagggcggatccctccgcaacgtccccgtgggcggcggctcccgcaagaacaagcgctcctcatcgtcggcgtcggcgtctgcctccacctccggctcggtcacgagctcgtccatggccagcacggcgggggccgggtccaagaacccgaagctggcgcacgagggcgcccacgacctcaacctggcgttcccgcaccacggtggcctgcacgcccccgagttcgcggcgttcccgagtctggagagcagcaacgtgtgcaacccgggcggcgggatgacgagcaacggtcggggcggcggcgcggggc

SEQ ID NO: 281823 - DNA, 579 bp, Zea mays
tttgtctctctctatctgctattctatcctgacctccgacggctgaacaagcgaaactgcgaaaagcagtaacagcaggtaggtatagtgatcctccttctccatggggaacgcgctcaagtgcttaacgggtccggaagaaggccaccacttccacgggcgcagagaccgctacccctactaccagcacgcagtcctacagtggtggcgagccacatccaccggccgctgctcatcagcagggtctagcagccccccatggcttcgtaaccttcgtccccgtcacgcaggctgctggtccaaacgccgggcaccagcagaggagcagtggggtccatgacagaagaccgccggcttctaagtatgaatccaacaccgaggacatcgacgaatcgcctgccgtgggcctgcgcagcgccaagagcttcgctcaggttatcccctctgttgtattctaggtgctcgcttcttggtatcccctgtacgttccttgttgtttctctctccttgtctcacctttccttctttttcttcctttctctctatttagttttctcccctactttatcttctatattc

SEQ ID NO: 281824 - DNA, 492 bp, Zea mays
tcccacgcgtccgcgcgtcctgcccgtccgtcgagggcatcgtgcgctggcacgtcgccgacgccctccgccgcgacatcggcatcgccgccggcctcatccgcatcttcttccacgactgcttcccgcagggctgcgacgcgtccgtcctcctgtctggttccaacagcgagcagaagcagggacccaaccagacgctccgtcccgaggcgctcaagctcatcgacgacatccgcgccgccgtccacgccgcctgcggccccaaggtgtcctgcgccgacatcaccacgctcgccacccgggacgccgtcgtcgcgtccgggggtcccttcttcgaggtgcctctcggccgccgcgacgggctatcgccggcgtccagcgaccaggtcttcacgctgccgggccccgacttcgacgtgcccacgctgctcgccgcgttcaagaaccggagcctggacacggcggacctcgtggcgctctccggggcgcaca

SEQ ID NO: 281825 - DNA, 710 bp, Zea mays
cccacgcgtcccaaattatatgcaatcgcaagcgagcagaatggcgaggtccagtggtagtagaccagtggccctcgtgctgctggcgctgtgcgcgccgccctctcgtcggccacggtgaccgtgaatgagcccatcgccaatggcctctcctggagcttctacgacgtttcctgcccgtcggtggagggcatcgtgcgctggcacgtcgccgaggccctccgccgcgacatcggcatcgccgcggggctcatccgcatcttcttccacgactgcttcccgcagggctgcgacgcgtccgtcctcctgtctggttccaacagcgagcagatcgaggtacccaaccagacgctgcgtcccgaggcgctcaagctcatcgacgacatccgcgccgccgtccacgccgtctgcgggcccacggtgtcctgcgccgacatcaccacgctcgccaccagggacgccgtcgtcgcggtaagtcgatcaccttgcatcgagtagactgtctcgtacttgggagtctactagctagtgtgtacgtcgtcgtccgatcacaccctatatatatatatatctggccttccagtccggcggccccttcttcgaggttcctctcgggcggcgcgacggtctggcgccggcgtcaagcgacctggtgggcaccctgccggcgcccttttttgacgtgccgacgctgatcgagtcgttcaaga

SEQ ID NO: 281826 - DNA, 459 bp, Zea mays
ctcacgcgtccgcttcactcccaatccgaatccagatccgcgaatgctggggcgggcggcggcactgtccgcgccacggtggcgcggcggggtgccagaccttcgcgccgcgctgcggtcggggggcaacctcctcttcgcgctcttcgtggcggccgtgctcgcattcacgctcctcgcggcgttccacagccccgacgatccgctcctccacccgtcctctcaccagctcaccgatttcctcacctccgccacctccacctccaccttcctcactgacgactccgtgctgcgcaccggggagggcttcaactcctcgtccaccggcgccgccggcgaggtcgccgctgggggtgtcgaagtcgtcgcggaggccgtcccgttcatcaagctctccgaagttggcgccgaagccgagaagacggagcccgagacagagcgggccgtcaccgtcgacac

SEQ ID NO: 281827 - DNA, 490 bp, Zea mays
cgaaagggcagttgaggaactaattgaagaggcagatgaaagtatttccgtctcatcaactgtgctgaaggaggaggaaaacacctcacttgttgaaggaagcagtggagacccggaggaagatcatctggagtctgcagctactaatcttcagcctaggagctggcactggtgcattgcaagggaagagctgctgaaccagaaggatctggtgaaactgctagctgttatccgtggacatctagttagaaagcaggcttcagaatctttacaatgcttgcttgcgattattaaaattcaagggttgatcagggctcatcaagcacaacattcaccaggaatgattcaggtgactattgaattccttcttcaggcattattgagaaattgcttcgcaatggatttgctctcaagctcatggacaacacaccaacttcaaaatccattcgcataaaatgtgatccttcagaatctgatgctacatggggat

SEQ ID NO: 281828 - DNA, 841 bp, Zea mays
gcagagcaaaggttttgagtcaaagcagaagattttttccgaggagtttgaacttgttactcaagctctttttacagatccaagtgaccaaagtggatggttctatcacctctggcttttagctcaaacatctagtccagataacccacagctgattgcttcatggccttctaatgctgcaaagctcagtttctcttttatcaaggaaaaggctgagcagcacacactgtcatccgtctggtcaaggactgtacccattgttctttattttaatgagcctgtcaaaggattaaatcaatcaagtgttaacttaaagtctgatttggagttcagtaaggatattatatggaggcccctcacaatggcagactctgggtattctaactgttgggccacagatctccagattataaatgaatgtagcagtttgcaggaatattctgttgaagtgagcataccctgctcgaatggcattgtatctagaagtggctctaactacaattgtcctgtgcattttacatttggcattgaattgatcagcaacgatccagtacagggtttagatatgtttgataagccagttgcctggaattgctcagaatcattccagcctcatgggaaccgtgatcctatcccttttgatctgctaaagattactagtgccttgatcgagcatgactcaaattggcattttgaaagactatctgaggaaatagatcttttcagagagttacctgatgacaacaggttaggctctaaatccattctgaatctgtttgttcataattataaccccattttcataacatactctcttttcagcaagtttgggaagttgaca

SEQ ID NO: 281829 - DNA, 884 bp, Zea mays
tgcacgcggtcgcccacgcgtccgctatctctcttctcccctcgatcaacagcaacagcggcggtcagaagcttccgtcgcgacagctcccgacctcctgccggtcttcccctctcctagtcggcgcgaatcccgaggcggaggaggaagaggggagcggagtgggggtgggccccatcagccatgagtctcacggggtccgccctggaggcggcgctacaggcggtggggcgcggcctcgacgcagctggagaccaccggctgctctactgcaagggaggtggaaggctcgtcgcgctcgaggaggaccgtgcgcgggacctcccgctccccgacggcggcgtcctcccgagcgtgccccccgatgtcgaggtcgagcagtgccgcagagaccccgagcgcatccgccccttcccctctggcccaagctctgccgcagcggatgggccctttgtctgcagcttcgataagatggctgagtatttcaacaggaagtcatgtttgtccgagacagtaccgctgggttccttcaactctctcttcagcttcaccggttcatggaagaatgatgctgcggccacgaaggcccttgcgattgatggctattctctgcctctgtttcgagtgaaaattaggagttctgaactgacgctgcttgagagcgttaagcacgcgatcccaaatgtttgggatccatcagcattggcaaggtcagtagctttattgagaactacggtacccatattaggatttctgttacggttggtggtaaggacgaagtatacatcaggcagcattcatcgtcccaattgtcatgcgtagacctcataaattatgtgatgcgaatcgggacggcaagatctcagatgtggaaaccaatcaat

SEQ ID NO: 281830 - DNA, 541 bp, Zea mays
gtttttgatcgcgagcggccgccctttttttgggtgttttttttatttttaaaggggggacaccattgttccagcagtaaaagaagatgaaaaaacagcgcgtgacgatgaacatgatatatactccgcacgtcaacatattgatcgctgaccggtaaccacccgggcgtcgtcacatgaagacccaaccggcccatccaatccaatacgaatcgccttcgcctacacgcatacacgtacacccggcacggcgcggcacacgtcacaacttgttgcactccgcgggcgcgaacgagagcgtgtccccggcgacgtcgtacacgaactggaagttctgctgctggaagttgccgataatggagaggccccgcgacgccatgaccgtgaggcagagcgcgccggaggcggagtcgagcaccatgtagttctcggcggggaggtcgaggtcggcgccgccgtccaagtggagcaccagcttgggcacctgcacctgcacgtcctggtcgacggccccggcggggccctggaagcagaggtccag

SEQ ID NO: 281831 - DNA, 593 bp, Zea mays
ttcttcacgcgtccggcacctagaacctctagatggtagtgcagttcatgatggtggaggagttgctgcagataatcaatcagggccacttgctggggcatgttcagagactaagaaggcattgagtaccgcactagcacctgtcccatgcgacagcgaggaaaaggaggatgactcggaattttgtgtgattacgatagatgatctgttccctgaagatgcaaagcagccagaaactgtggataccaaggcaaagcaaccacaaaccacgggtctgaaggcaaatcagccagaaaacgcagatcccaaggtaatgcaacaagaaaccatggatcccaaatcaaagcagtcagatacagtagaggttgagatagttgatccgaaagataaagacatgctagagtttgatcaatatgttgcttctcaaggagggcacttaaacacggatgatctgaataaaagcaagtgtaccaacagtgtttcccaagcccaaggtcttgttggcagccagcaaaaactgattcctgcggatgggaaaggtagccctgtaactgtggttgggaaaggcaagcctgtaactgctggagtggcag

SEQ ID NO: 281832 - DNA, 500 bp, Zea mays
tcttcacgcgtccggttcccaagcagttggcattggcaatccgccagacgcaagcgtccccctccgctcctctcaaccggcacggcgccaggtccgcggcgaaatcggtggacggcatgccgcggcgcgaggcggcgaggcttctccgccgcctgggcccgatcgctgtccagtcgccgaagcgaggcttttcaggcatgcctcataatcaatatgaatccacaaaccacgctgtgaattcttatagaagattccactggattcccagtgtacagcaccctctgtgtggacctacaagtagtgggggaatatatgaaggtcaacgcagtgctaacaaggcttgtgaagttcagaagcgcacatttggttctgctgcaacacagtttcagaggaatccagcctattcagtgctgaactctgatgacattgcttacttcaagagcatcttgggagaaaatggtgtagttcaggatgaagacagagttgcagttgcaaatgaa

SEQ ID NO: 281833 - DNA, 581 bp, Zea mays
tctccgtcctccgacctccgagatttgaaaccgtgctgcgattcccccactcataagattgaccactcgtcctcccccctgcccgtcatcatgctcaatctctctccagtttcccccagttcccgtttccatctccatccttccccccgggagcaggagctgcagccaggagtcgagtcggcgtcgtcacgggagatatcagcttcgctatcaccggatcccccctctgctccctccgcacctcccatctgcgctctctgttttcttccgcgcaccccggctgttggtgtcccgtccggcagcgttgctggtggctgaatccgagcctttgaggggtctgctgccgccgccgccgccgctgtcaccgctcttgagatctctttattgatctggagagattaaagagggattcttgccttcctactggagcaagagaaaggggagaacgtgtttcttcaggcgtggttgaacagtgaggaccggagaacaatgcgagggtcgggatttaagatgttctggctttaagggcagttcttctgtagcatgggacgggcgattcgaccaccggagctcagatctga

SEQ ID NO: 281834 - DNA, 557 bp, Zea mays
  unsure (1)..(557): unsure at all n locations
ttttcttgtcctgtcgcactgcttgtgccgggccagcttgttgccttccgcgcccggctgcgccagccaggctcgtccggccctcgcgccgcttacttctattttgcccggccccatagaattcgaaccgcaaatgagacaggcgctactgcagccgtgggaaaggaaacgcaaaacaacgccaacgccgtcttctcttcctggaggcgggcctgggaaggaggtggagcgcagctggctccgctagggtttcccctgttctcggtggaggcgccgcgcctccgggacacgggctgcgtcaggtgactgctgcaggctcgttgatgcaagggaggtcaagccgtctgtgattctcttcctgaagttctatcccgatgccgtccatcacgcactacgtgctggatcgcctcctagagacacggtcgcctgttcatgtccagaaggtggttcccaagcctncgtcccctcttctgacatggccacatccgtgccagtgtctactgccaggacacggtcgtcgcttgcatcactctatgccacgcctgagacaccaccct

SEQ ID NO: 281835 - DNA, 272 bp, Zea mays
tcgagaccgtccaccgcgacgcgctctcttgcccgtgcccccgtcctccccttccccctccacctccgcggcgcccgcggcaacctcgccacgccacatcgcgtgcgagcaccaaccgtcgccggccctctaattaagctgcccgcgcggcgcgatccggtgtccaccgctgccccgccggaggaggaggaggaaggggggcggggggtggagcacacggggccgcttgaggccaaagccgccggcgccggtctcctccggcgcaggccggc

SEQ ID NO: 281836 - DNA, 560 bp, Zea mays
ttaggctccgcatgtgccgtcgtgggtaagcacccgagcgccgctggatctggtgactgtgctcgacgtgagcgggagcatgtcgggccacaagcttgcgctcctgaagcgcgccatgaggttcgtgatcgaaaaccttgaccccagcgaccggctctccgtcgtcgccttctcctcgtcggcctggaggctgttcccgctccagaggatgaccgcctccggacagcagcagtcgctgcaggctgtcaactccctcgccgccgatggcggcaccaacatcgccgaggggctgcggaaggctgccagggtggtggaggacaggcaggccaggaacccggtgtgcagcatcatgctcctctccgacggcgtggactcccacaacctcccgccgcgggacggctcggcgccggactacgggccgctcgtcccgcgctccatccttcccgggagcgagcaccacgtgccgatccatgcctttggcttcggcatggaccacgactccagggcgatgcacgccgtcgcccagatgtccagcggcaccttctccttcatcgacatgg

SEQ ID NO: 281837 - DNA, 328 bp, Zea mays
atggaactaaactcagacaccctcctcttcctaactactatcatctcagcggctatccttgttgtgtgctcacttagccgccgcattccttcaccaggccccaggaagaagcggcctccaggcccatggcgtctccccttgatcggaaacctcctccacctagccacctcgcagccgcacgtcgcgctacgggatctggccaggaagcacggacccgtcatgtacctgcgtctgggccagatcgacgccgtcgtgatctcctcgcccgcggcggcacaggaggtgctccgggacaaggacgtcgccttcgcgtcggggccgaacctgc

SEQ ID NO: 281838 - DNA, 1005 bp, Zea mays
cttccgcgcctcgttccgtcccttctcggccgtcgtgcagctctcgctctcggccgcctccgccgcgggcttcctctgcctctcctcctccttccgccgcgtcggcctccgccgcctgctccacctcgacaagctccgcagcaagagcgaccgcgtccgggccagctacacggcgcgcctcgccttctccgcccgcccccccgccccccccgccgcgccgtgcttcgccgccgaggccgcctacaaggcctggtggtacgccacctccgccgaccgcgtccccttcttcgccaacgacgtcctcagcgacgtcctcgtctgctccctcgagatggcctcctggatgtaccgcagcgccatctacctcctcacctgcgtcctcttccgcctcatctgccacctccaggggctcaggctcgaggacttcgccggctccctgctcgaggaagtcgaggagggccgggccggcgtcgatgccgtgctaagagagcacctcgacattcgcaagcagctcaaggtcatcagccatcgcttccgtaagttcatcgtcgctgcgctgctcatcgccacggccggccagttcgcctccgtgctcctcaccacgcgacgcgactctgtcgacgacctcctcaacaccggcgagctcgcgctgtgttcagttgtgctcatgtccgggctcatcataatcctgagcagcgccgccaagatcacccaccaggcgcaggccctcaccggtcacaccaccaagtggcatgcctgctgcaccatcgagcccgtgctggaggaaggggagcccgggtccaaccagaactccatgatcgaccaagaacccgagagtgacagtgacacagaggacagcgaggagaccggcgacgaagatctcctggagaacaccaagattcatatgccgcacgcgcatgtcatcttcttccagaagagacaggcactagtgacatacttggaaaacaacagagccgggatcaccgtgttcggtttcacgctgga

SEQ ID NO: 281839 - DNA, 339 bp, Zea mays
cccacgcgtccggaagctagctaacaattaagcagctcgatcgagcacacacacacttgatcactactaatataaacacattgcgcaaaggccgccatggcttaccgcgcctttgctacgctgcttgcagtgctagcatttgtgggcttcgcttcagttccccgtggtctggcaactgacccgacccagctccaggacttctgcgttgctgataacaagaaccctgtgctggtgaacggggtggtgtgcaagaacccgaacgtggtgaaggcaaccgacttcttcttcaggatagtgccgatggcgccaaacgggcagggctccgccgtgacgccggtg

SEQ ID NO: 281840 - DNA, 348 bp, Zea mays
aggacacgctcgacgagaacgaggtcaagttttaccgggcgctcctgacgcccaccacctcacccgatcttcgccttctttcccgcagtcaccaaacggctcttccgcagccggtgggaggccaacgtcgcggtgcggcggaggcaggacgatctgttcgtccctctcatccacgccaaggccacgcgcgggaacgacgacggcgacaccagcgccagcacgccgagtacttcgtggcgaggatggtgcgggacttggagtggcgcccgccggtggacggcgtggcggtggaaatggcggaagctggcacttcacgtcgtcatgaagcagccgctccgtgcacgcatc

SEQ ID NO: 281841 - DNA, 356 bp, Zea mays
  unsure (1)..(356): unsure at all n locations
cttgccttctaccaagggtgtncgtcacatctaacaccattggtggatagatgctgatgactccttccttggaacaatctcctatttaaaagcctgtgtgcataccaggcactcaggcagcacaaaggtcgacgagttaggaaggatggcctttctggtgccgtttctgctgggtctttcctctgtcctcgccgcgtggatctactctgaattcctgggattcagggcatcatcgtctcatgaaaaagtccactcggatgttcacgtcggcgataaaaccatcaaagaaaatgacagggttggtcctactttgaagaaggggaattttaaaccgcccattgaccaaggcacccaac

SEQ ID NO: 281842 - DNA, 449 bp, Zea mays
atttgagaccaacatggatcaagtggagccaatcaagagcggtgtacgcggcaaaatttgcaacatcgttgtacctgccaacgagtcagaacaccgttccaccaaacaggcaggcagaatggctagtgtaccgagaggtcccagagtctcggctgcctacgcaggacgaaattccggagccggatcatcattctccaccagagatcagcttccaactgtgcattcctgatactactcagaaatggcttgacctatccaagtcgctttccaatgcagttagacgacagagaaggcatgactatgatgtcataatgctgaaggaccccaagaagagactatggcctgttgtttaccacgacagtctgttatttgtgggattcaccgcgggctggaaacatttcgtggtatcaaacgacttttgggctggggatgattgctaactttgttta

SEQ ID NO: 281843 - DNA, 458 bp, Zea mays
tagacctctccttcaactccctcgacggcgccatcccggagacgctcgccgacctccccgccctctccagcatcgacctcagccgcaaccgcctctcgggccccgtcccgccgctgctcctaagcaagtacgtcgacgaccaggcggcgtacctcatgctgtcgcacaacaacctctccggcagcatccccgccgggttcgcctccgtcagcttcgcgtacctggacctgtcgcgcaacgccttcgccggcgacgcgtcgggcgtgttcggcaaggggaagccgctgcagcacttggacctctcccgcaacggcttcgccttcagcctcacggccgtggacctgccggagcagctggcgtacctggacctgagccacaacgccatccgcggccgcatcccggcgcaggtggccgacctagccgggctgaagttgattaacgtcagctacaacaagatg

SEQ ID NO: 281844 - DNA, 416 bp, Zea mays
cgtttttgagaaatcggagcagagatacacaataatggaggcggcaggtggagggcagcacgaaacacgacgacgtgcaggtgcaggcctcgccctcctgggcgtcgtctactcatcgctgctcctgaacgccatcttcgtcgcgcaccacttcctctcgccgtcccggctgctgctccgtgacgacgggtgcgggtgcgggctcacctggtctctgcaggcggccagggaggccgaggcggtggccgccgtggagtgctcgggccacgggcaggtgttcgtccgatggcgtcgccggcgaggacgggcggcccgggtgcgagtgcaacagctgcttcggcgggccggactgctcccttcgcacgcccaactgcaccggcgacgccgacagcgggaccccgttggtcctggagccg

SEQ ID NO: 281845 - DNA, 458 bp, Zea mays
  unsure (1)..(458): unsure at all n locations
ggcagcactataccatctgccgagtgaatatttaatgggcttggatttgcgggtcgaatctcccactcttnctcaccatttatatttcttatcttattttcttgatggtctaccatatcatatttcttggcctttggtatttgggttttgtttatcgtatggcagagaaaaaaccagagatgctttactataatacaaaactgtgcagctataagcatagcttgctgtgtgttttaacagccactgtggtaacaggactgtttcaagagacaaatctattgatcgtagaactgctagctggattgtattctcactttggacaaagcatgatgacaacacactgatttcaaggctattgcgtatgcataaatttaaagaacagatttgctcctcctggtttgctccagttggttctgctagtgattaccctcttctctctaaatgggccatttatggag

SEQ ID NO: 281846 - DNA, 378 bp, Zea mays
caccgcgccacccagctataaattgcgtcccctccctgccgacttcttcccgcacccacacatccgacgccgaggaagtaggaagcacgaccagcatatgtcacagagggccagcgtcccacactcctcctgcatagccttcgcgctccattcccatctcctggtctccagtgagatgtgccccagctcctattggcagcaatagctattctccgccttcctttttttcttcttcttcttcctttcctcccgtctggatttcgtttccgtttgatcgagctggctctcagcttccgtttttagttttgttggcatctttgctctcggatccgtctcttcctaacctctgaaacccaaaaggagaagaagaaaccgggc

SEQ ID NO: 281847 - DNA, 995 bp, Zea mays
tggtttagcctaacatagcattcctactgcagtgcggtctaactgtttctaatgttctagagttcccattgctgataggcatgaggcccgagagtgtcagggaaagggtggcatgcgctgagaagcttggtgtgccgcgcaatacagggatgttcaagagtgccctgtgggccgtctattgcgttggtcccaactccattggtgcaaaattggatgtcatcaaggcgactcttggatgctctgaggcggagctgacccttgtggtgcgcaagtcacctccaattctgaggatgtcagaaggcaagctgagtcgcgcattgaagctcctgaaggtggatgttgggttgaagcttcagtacatcttgcttaggccagcaatacttgcctttagcatgcagaggccgctgatgcccaggcattatttcatcaagattctgaaggcgaaggggcttgtgaaggaaaacgttgacttttataatgctctttgtttaactgaaaagagatttgcccagaagtttattgatccttacaaccaaagtattgcagggcttgcagatgcttatgctgctgcttgtgctgggaaaatgcctcatgaagattaggcgcattagcagcagcatgctagggatcatggtgaagcaaaggcagagatagtcggttcaggtcttctctgcatgtactttgaacagcccctcgccaaactattgtgcagttccttgatgcataccaatgcttgcaacagatgctgcctttgtgtgttgaaatgaaattagttcttccttaagaccggtgttgtgacctatcatttcaggtaagccattggctattttcagatgggtataatgatatgttactctgttctttctgtgtttcaggtctaaatattgtctgtacttgaagtcttgaattaattatgtattgaacttgtcacacagttaattatttgatttaatcaaatatttctatctgaagtatgattcttatttcaatattat

SEQ ID NO: 281848 - DNA, 385 bp, Zea mays
cttctcccctccctccctccctcccccccgctcctcctctgtcttccactcatcctcacacaacctagaagagcagacgaggcagctagcttcacgttcttggtctccgttgatcctctcctcccacccagaccccgctcggcctcttctctcttgccgcgagagagagagagagagagagagagagatacaggggagccagctacctccggccgccgccaggcaggcagagagggagggcgcgcccggcattatggcggcggggcagcagcaggcgagcggcggcgccaagcacgggtgcgtgtgcgggttccccgtgtgcgcgtgcgccggcgccgcggcggtggcgtccgccgcgtcctccgccgacatggaccgcgtggcc

SEQ ID NO: 281849 - DNA, 728 bp, Zea mays
ttattccggaggcgtccccaaacttgacggagcctcggacgctagagtcaagctcggtgaagaactcccgtcggccggtcatgtgatgagtgacgccggtgtcgaggcaccatccttcgatcatgtccttgttggagccgtcgccgaggaaagcgcgtgctttcgactcatcaaggtggaggagtgccgctgcggccggtgccgctggagatggctcgatgcttgcatgtgccaggagcagggcctcctcctccgcctccgcctgtgcgacattggcctggccacgtcgtggctgccgacagtccctggcccagtggccaagcttgccgcagttgtggcagccgtcgtctcgtgccggcttcttgttgccgacggcgccgccttgggcacctctacgagcaccaccctcagcatgtcctcgcgccccggcctgggcgcctccacgcggcttgcgcggcttgccgcgtttgcggcctcgtgtcgaggaggaggactcccccttcttcttgtcaccctggcaggcctcccactgttcccgagtgagatgtagcttcccgccgatagtgataggcccagagagagcctgtggttcgtcgccgtcgaccaccttgaggcgaccaatcgcctcttcgatcgtcatcgtggagaggtctagcagagactcgatcgagcgagcaatctgcctgtacttctcggggatgcaacggaagagcttctcaacagctctt

SEQ ID NO: 281850 - DNA, 487 bp, Zea mays
cccacgcgttcgcccacgcgtccgcgctgatctcgtttggcccgacgatgggaacgccgctttctgtcagacgataggagcgtttgccaagggcatgctggagctggaccacgcggtgcagaagatggtgctggagagcctgggcgtccggaaggagcgcgtcgactcgcacctcgcgtcgctcgtctacgacgtccggctgtcccgctacggggccctggcgcctgtgaccgccggcgacgacgacgaagcgacgacgtacatggtcgcgcacagggactgcagcatggtgaccaccatcacgcagcacgaggtggagggtctgcaggtgcgtggcagggacggcgcctggatcaccgtggcccctgagcccggcacgttcgctgttgtcgccggcgagatgttcacggtggtgacgaacgggagggtgcctgcctgcgtccaccgcgtgaggacgcccagcaaccgcgagaggctgtcggtgctg

SEQ ID NO: 281851 - DNA, 496 bp, Zea mays
gtgtgattgatcccttctggcccttttgcatgtttgagcttcgaggaaaatgcaatgacgaagagtgccagtggcagcattttgagcatcatgattggagaaagctagagcttacaaaacactctatgatctctgtttcaggccagatcccttatggtttgtctcagtatattcttccagtgccagtgtatcgtgttggttcaaatcttattaaagctgatctgaacttgacacagtcagtgttggctagcagtttatggcaatattggcaaagggggttttgtgcttcctttcctttacctttatctgttcaaagagttcttccatcagatgcaccattctttcaggctggtgatggccggattgctgattttgataggaacagacaactactaaaatttcgaatgctggatagcaggaagggggctgctgatattgaattcttcttggaggcagcccttgatttatattgtggaaaagtaaacaagcctgacag

SEQ ID NO: 281852 - DNA, 719 bp, Zea mays
gcctgctgttcacatggcacctgaagatgttcgatggatggttggagcatggagggagagaatcattgtatgcagcggtaagtatggcctcgctcatggcctggtgaaggcattcatggattgtggcgccaaagcagtcatctcatcgtccatcgagcctccggattcccagacaatagtctatcatgggatggatgtcaatggaagcctagagaatgggaaggttgtcatcggggatgaagaagccgatgaatcggaacctgaacctgttagccctgtaagtgactgggaggacagcgacgtggagaaaggtggcaaccatgacatggatgatgaggagtacctggctcagttcatgtgcctgatgtacgataaattgttccgtgagggtgtgactgtggatacagctctgcagcaagctctccgctcgcatcccaagttaaagtacagctgccacttacctcacgttttgtagttagggacattgacaaaccatacaggagtatagcaaaacgggcatggacaacaggaaatgaataaggattgggtggattcatagtggggttatagaggtttatatcgtgttcgttgtgcaggcgtagtgacaaagggtaccccctttttaaatctttgggcgaaaaagcctatgtaaacctgtgtgctcatgagcagagtagttaagctgacgaataaaagcatgatgaagggccttgtaatcc

SEQ ID NO: 281853 - DNA, 689 bp, Zea mays
tcttatatcgcgagcggccgcccttttttttttttttgtttagcctcgtaagaaaataaaataatgatggaaagtttagcttaggttcaaaagttccaagtaccgctgatacattttactaactttcttctatccctcttctacgtactactaacctccctcaggaacaagatggagtccaggaaattttttcagctctgatccaaccatatactcctgatgattcggtacatttggaaagccaggaacgacaagagattcaattccaaaatcatggacagttgtgcaagttcataatgaaaatagccgcacatatagcagtcaacaactcagctcattctgaagaaaccaatggacacaaaaccttgggtaagcacctacctgaccaaaactctaatttgtcttatgcaggaacatatacttcagcacaagttctggaagatctctcatcacacacaaccagtcaggaatgtagtcttcaggaggaccaccaatccaatgtaccccatcaacgagccatctaccaacaacaaggtacgtatttttcccacgcaggaccaaactcacaacagaggtagacaaccaatcagcgcatacacttcgatacactttgggccggagcggccacggcgctacttaatcccaattcccaatcccggcatcactgtctgtgcctgaatcaatatgct

SEQ ID NO: 281854 - DNA, 638 bp, Zea mays
ggaagttcgtcaacttcccggagatcgtcggagcggtccagaacgctgggttcgaggtcatcccgatcgagccgcgtagagacctcagcgtggaggacttcgcccggaccgtcgactcgtgcgacgtgctcatgggcgcgcacggggccggcctcaccaacttcttcttcctccgtaccaacgcggtgatgctgcaggtggtgccgtgggggcacatggagcacccttccatggcgttctacggcgggccggccaaggagatgaggctgcgagatgtcgagtacagcatagcggacgtggagagcacgctctacgacaagtacggcaaggacaacccggtggttagcgacccagagtccatacacaagcaagggtggcagcttgggatgaggtattactggatagagcaggacatcaggctcaacgtcacaaggtttgctcccacgctgcagaaggtgcttcagatgatcagggaatagaggaaaatgagatcaatggaacatatgttacattacatttattattcatgcttagagatgaataggattaatcttgtttttttacatttggtatattggcctatacatggaacaattatccatatgcgtcaatcttaatccgtggtttctgttggattt

SEQ ID NO: 281855 - DNA, 542 bp, Zea mays
gttctagatcgcgagcggccgccctttttttttttgttgttttatgttgttttttttttttgggaagcaacaatataatatattattattgctggtactcgattggaagagagactcacatatatatatatagtacattatgcattgagcttattaatcagtctatatgcctagctagcaggcacagataaccatgcattattattcactgccacaccacactggctatagttgcttctcagtctcagctcgatccaatgctggaagtgtactttaccttgcctggaactgtactttaccttgctggaacgtacacaagaacaagcatgacactttcatgatcgatagatggatggatcgatcgatcaatagtaacggtggccgcatgccggcagcggcgtgccgcagaggcacttgttgtgctggtagctgtaggcgtcgaacttggccatgctccctcccgtgggcaccacgccgcacatcttgttgtagctgacgttgaacagctgcagcccggcgaggtaggccacctgcgccgggat

SEQ ID NO: 281856 - DNA, 470 bp, Zea mays
gaactacattgacaggaggagccgcgaccgcgaacgggagatggaggagagggagaaggataggcagcggaggagtcggagccggtccgagcggcgccgtgatgacgaagagcgtgatcgctaccgtgaacgcgatgtcagacgtaggaaagaggaagttgctgaacctgaagttgatccagaaagagatcagaggactgtgtttgcttaccagttatctttgaaggcagatgaaagagatgtatatgagttcttttctagggctggaaaggtccgggatgttcgcctgattatggatcgaaattcacgacgttctaaaggtgtcgggtatattgaattctatgatgctatgtctgttccaatggcgatagctctttctggtcagttgcttcttggtcaacaagtgatggttaagccttcagaggctgaaaagaatttagttcagtcaaatgcttcaagtggactgcttc

SEQ ID NO: 281857 - DNA, 578 bp, Zea mays
tctgtccattatattaatttcaattagccctaataaacttggtccactaatgaatgagcaaacctgctgatgttaagctatgtatgtgctcctgtaggagacttttatcttgttaaagaaaagaagaaaaaccatgcttggttaatcgggtttatttcaaattttcaagaacccgaaaaagaaagctcgttgtcggtgtccagggaaaaaaaaagatgaagaaaaactggtttgggtacgtacggtgacggataatgaatcacatcgcacatatatatgccctggtggttgcaaatttatgccgacaccgagtggtagctgtacttaaccagtaagtactgctgcttgcagctcagatggcccggccgcccggccggccggattccgccgtgatctctctctgcttgtccctcgccccaccaccacaccacaccgtagaggtaggtccatggccaaccaacaaccaatcaaccgaagcagcagcgcctgaaccgctggcactttaattctgacgacgacgacgacgacgccttgattagcctgcaaatactactgcatgcatctgccgcatgccgccg

SEQ ID NO: 281858 - DNA, 479 bp, Zea mays
gctattaatgctggcttaattttttactgctggatagggatctttggggaccagaggggctgactatttggacaggtagcatgcttggatgctctaggcgtcgccatgtacacttgtattgtatgggttgtcaactgtcaaatggcgctctctgtgaactacttcaccataatccagcacatattcatatggggcagcattgcagtatggtacctcttcctcatagtttatggttccatgaacccgaggttctcaactacagcctacatggtcttcatcgaacagctggccccagccctctcattttgcttggtgacactttttgttgtgctggcaacacttgtcccctacttcacgtatgccgcgatccagatccggtttttcccaatgttccacaacaagattcagtggaagcggtacttggggaaggctgaagacccagaagtggcaaggcagttgtcatcacgacacggacgtcg

SEQ ID NO: 281859 - DNA, 406 bp, Zea mays
cccacgcgtccgctctctttctctacgaagcatttgcatctttctctgggaagccagcttataatgattggttcttgtcactctataatgtcttcttcacctcccttcctgtcattgctttgggagtctttgaccaggatgtgtctgccaggctatgcatacagtatccacagctataccaagaaggagtgcagaatatattattcagttggcgtcggatacttggctggatgtttaatggtgttatgaatgctgtcttaatctttttcttctgcatcactgccttcgaggaccaggcattccgtcgcgacggtcaagttgcgggcttggatgctcttggtgtcgtcatgtacacttgtattgtatgggttgttaactgtcaaatggcgctctctgtgaactactt

SEQ ID NO: 281860 - DNA, 496 bp, Zea mays
gttctagatcgcgagcggccgcccttttttttgggttttttttttttttttaatataatttgacaaaaaaatttcctgccattgtgtggttgtcgtgtgaatgtctgaatgagcaaccataccgtccgtctcttcacacacacctcagcaaacaatggaggcgcaacgtaaagaacaaaacagatggaccccagcccaaacggcggagagaagagaataccgcaactactgcatcctggttggctcccacgttgtcgtggccacatgacgcgacggctgacgatccatccaccaattgcactcgctcgcacgacaagaccaggtcaacaacggcaccgccgcccagagcagggcagcagccaagccaaccactcgctggctatcctattcctcgcctcgatcggttagtaatttctagtcaacgtacgcagcgcaggcgctcctgatctcgccgttgtcacccgtgagcacctcgatgcggcccatgttggtgatg

SEQ ID NO: 281861 - DNA, 351 bp, Zea mays
cggacgcgtgggcgcatactagagaggaggttgagcggagtaggcggcggccagcaatgaaggtacagtgcgacgtgtgcacggccgacgcggcctccgtcttctgctgcgccgacgaggccgcgctgtgcgacgcatgcgaccgccgtgtccaccgcgccaacaagctcgcggggaagcaccgccgcttctccctcctgcacccgtgttcttcctcttcctcctccgccgcgcacaagccgccgctctgcgacatctgccaggagcggaggggcttcttgttctgcaaggaggacagggcgatcctgtgccgggagtgcgacgcgccggtgcacagcgccagcgacatga

SEQ ID NO: 281862 - DNA, 635 bp, Zea mays
ttgttgtcgacgctggagaccgaccgcgtgtacacgcacgcgtacccgctgatcgcgctgtatcggtccggggtgaagaagatgggggagctccgtctggccgtgcgcttcacctgcctgtcgctcatgaacatggtgcacctgtacacgcagccgctgctcccccggatgcactacctgcacccgttcacggtgacgcagctggacgcgctgcggtaccaggcgatgggcatcgtggcggcgcggctggggcgcgcggagccgccgctgcaccgggaggtggtggagtacatgctggacgtggagtcgcacatgtggagcatgcggcggagcaaggccaacttcttccgcgccgtctcgctcttctcgggcgtcgccggcgccgcgcggtggttcggcgacgtgtgccgctgggggaacgtggcgacgacggcgctggtgcacgtgctgctgctcatcctggtgtggtacccggagctgatcctccccaccgtgttcctctacatgttcctcatcgggctctggaactaccggcgccggccgcgccacccgccgcacatggacaccaagatgtcgtgggcggaggcggcgcacccggacgagctggacgaggagttcgacacgttacagacgtc

SEQ ID NO: 281863 - DNA, 628 bp, Zea mays
catctatcatctttatggatgagccaacctcagggcttgatgcccgagcagctgcaattgtgatgcggacggtgaggaacactgtcgatactggtagaactgtggtctgcacgatacatcagcctagcattgacatatttgaagcatttgatgagcttttcctcatgaagcgtggtggagaagagatctatgctggtccacttggacatcattcttcagatctaatcaagtattttgagtcacttcatggggtcagcaaaattaaagatggctacaatccagcaacatggatgtgggaagtgaccacaacttctcaggaacagattctaggtgttgatttcagtgacatatacaagaaatctgaactctaccagaggaacaaggccttgataaaggaattgagccaaccagcaccaggttcaactgacctgcatttccctagcaagtatgcgcagtcttccattacacaatgcgtggcttgcctatggaagcagaacctgtcatactggaggaaccctccttacaataccgttaggttctttttcactaccatcattgctctcctccttggcaccatcttttgggacctcggcggcaaaacgtatacatcacaagacttgatgaatgc

SEQ ID NO: 281864 - DNA, 479 bp, Zea mays
gcactggatcatcactttaggtggctcctccaatataggattagtccatttttctgcagatggggtgatagcatgcgcattctagcatacacatgcccttggcctgccgatcatccgaaggctaatgaatattactctgacccaagattagcagcatatgctgtaccctatgcacctatcctatcgtgtacggatgctgcaaaaaattccctgaggagagaggttgaaatcttaaaatcgaagcctcattggtccaaagcttacttctatttgtgggatgagccattaaatgtggaacagtatgacatgatatgcaacatctctaatgagctacggtcatatgcacctgatgtgcgaattttgacaacttactattgtggtccaagtggctctgaactggctccctctacatttgaagcttttgcaaaagttccaaatgttctgcgtccgcacacgcaaatcttttgcacaagtgaatg

SEQ ID NO: 281865 - DNA, 486 bp, Zea mays
gttactgcaaacgtcgcagcactatcaaggacggccgataagcccttcagacatcctacagtctcaggggacaagctgcgtatcttgcggattgacaagagagaaagtgcatagcacctaggattaggaagctgggatcatatcatcaatggagatggcaggcgccgcaggaacggaagcatggttgccgtacgtgaccacggtggcgtcctgcgccgtcggcgtcttcttcctgctctacttctacgcgccacactggcggatcagggacgtgccggggccgccggccttgcccgtcgtggggcacctcccgctgctcgcccgacacggacctgacgtcttcggcctcctcgccaagaaatatggcccgatcttcaggttccatttggggagggcagcttgggtgatcgtcgctgacccagagctctgaggggagggttggcgtcaggcagttcaagctcatcctcacaggagcttgccgcgccc

SEQ ID NO: 281866 - DNA, 507 bp, Zea mays
cgagaccttcttcgactcctgcgtcctgcagggctggaaggactcggtcgccgcgctgcaggccgcgtggcggatctccggctggaacgagagccgcatcgtacagccctgcatcgactccatcgtcgagaagatcctcctgccaccgtccaaggtcacgtggtcctacacgtacacgaggccagggtacaacagcacgaggaaaccccaccagtccgtccccaaggactggtggacggaggacatctccgacctggacatcgaggtcttccgctccgtcatctccaccgtgcgcgcgtcgcggctgctcccaccgccgctcatcggcgaggcgctgcacgtctacgcgtgcaagcacctcgtcgacccgctccacgttgccagcgacgcaggactgaccgccaacggcgtcctccaccagccgccgcagagctcagacgacggcgaggagaagctggtggccatgcacgttcgcgtgctcgagttcatcgtaccatgggtccgggc

SEQ ID NO: 281867 - DNA, 683 bp, Zea mays
gccgagtggcaaacccctagctactacctcgctgcagaagctttctttcccctagatctcccatcccatccccatgtccggccgcgctgccgatccggcggccttggcggcgaaggggaagctaggggagctaatgtgggagcaccgggtgcaggcggccgtagcggtggcgctggtggccgcggccgccgtctcgatctccgtcgtggggcccaggctcagcgccctggtgtccttcttctggccgctgctcctctccacgggcttcttcctggtggcggtcgccgtgctgctccggatctcgccgccgcccgcgggcgacgacgacgagtccggcaaggagctcgtcgacttcgtcgcctggtgccgcccggagcacctcgtcccggacgcggcggccgtggaggctccgctggagccggagacctgacggaatgccggaggaggagtcggagaggaggccgacggcagccgagctgtgccatggcgatggcgatggcgatggcggggctccgttgccggggtgaccacttccagtggcacgggtgggggcaaccactgtgtgggcgtgtccaggccggcgcgcggccttggctctgtagcctaggactcctccattccattgtctccctctgctccggtgtaagataccgtggatggattacaataatgaatcatgtcgt

SEQ ID NO: 281868 - DNA, 694 bp, Zea mays
cttccccagtgagtcaatatttttatgtaaggaccccaaggtacacgaatcgagggaagtttctgaagctgtctgacttccttgcaatcgtgatggacagggatttgtctggtgccatgatcatcatcgagaatgctgcgttcatagcaaagtcactagggatcgacatggttgactccgtaaccgccgccttaagtgccgccggcttcagtaaccagaccaccaaggaagttctgatccggtcaacagacagcgccgtcctcgtcaaactgaagcagcagaaaacgagatgcaagctcgtgtacaccctccccctaggcatcggggacgcttccaaaccctcgctgaaggacatcaaggcgttcgcggaagccgtagtcgtcgacaggacctccgtcttcgctctgagctacgatttcatcatgggacagaacaggatcgtgcgagacctgcaggcggcggggctggctgtgtacgcgcaggtgttccggaacgagtacgtagcgcacccgtttgatttcttgggggatccgaccgtggagatcaactactatgttcagacgtttaatctgtccggcatgatcactgatttccccaagacagtcagaagatacaaagagaacacctgtacagctctggggaaggatatgcccaagtacatgcggccagttgaggctggctccttgcagatttc

SEQ ID NO: 281869 - DNA, 525 bp, Zea mays
ctctcgtctgcagtctccacccacacacacgcgtaacctgctacaccaccttgcgcaaggataatcagctctcagctccacttgacatggaaggagacacaggctgccgatctgagaaagaggtcgctgtggtcacaggaggcaacaggggaattgggctagagatatgcaggcaactggcttccagtggagtcaccgtagtgttgacagcaagggacgcggagaggggcgcggaggcagccagcacgcttgggctacccaacgtcgtcttccatcagctggatgtcggcgatccgtcgagcgctgcacgcttagctggttttatcgaggagaagtttggcaggctggatatattggtcaacaatgcagcaattactggaacgacaagtaacgtcgacgatccagaagcttttcgtcaagagctcgcaggcatggatctcatgcagaggatcgaagcaatcaacaggcacagcacagaaccgtacgagcaagcacagaagtgcttgcggacgaactaccacggga

SEQ ID NO: 281870 - DNA, 745 bp, Zea mays
cacaaaagaacaaagataaccgatccaaagttaaatttcatcaaacaacgggatctcgtagctatatggttcatgtagaaaatttgggagataaaaacattggtcaagagcccgatgcattagatttgttcaaggagtgtcattacagcaggaaaaagaaatgttacacatctaccgtgcaacaagctataactcaaatggataacaagcggtctgcaactacagaaggtgaaaaatcaatgtctgcaactgaagttgttgctaatgtgcttgctgaaaatacaaagaagaatttgttccttcaaaatgtggggatacaaaatgttggtcctaggtctagtctgagaaatattgaagcccagttgggagtggagaagagggcaaacagtgaccttaaatctattgttgatgctcaacatgaacaattggatgcattgttaaagcaaatgcaagaaactgaagaaaataggatcagggagcaagaggaagtgaagaagaagcaagctgagatggaaacaaagatgcaacttgtgttgagtcagattcattcaagattgagatagtatttatgtcatgttgacaactttttttgttgttgcaacaactttctttcttttttatggaaccaactataatgttttggatatgatgtggtgttctggttggatagtctttattgtttgggattgtccatgtgaagttctacccgcatatttcaatataaatacaaccattttgtcattat

SEQ ID NO: 281871 - DNA, 665 bp, Zea mays
gaaaaatcaacaaccccgccgccgcgctgaggaaggtccggttcgacccctccctccgcgcgcgcgccgacgaggcgctctttggtaaggggctgggcgcggcagccgttgatgaggaggatgaggaccgctcacgggacgtggcgctcgcgctgctcgatgcggcgctggaggcgcctgacgaggatgaagaggatctcggggaggtcagggaagaagaccagatgtcgctttccgttggcattgtcggcgcgcccaatgccggcaagtcctcgctcacaaataccatggttgggacaaaagtggctgcagtctcccgcaagacaaatactacgactcatgaaattttgggggtgctaacaaaagggaacacacagatatgcttttttgacaccccagggctcatgttagggcaccatggatttccttatagggatgtcacagttcgtgtggagagtgcctggagctcaattaacctctatgatttactaatagtcatgttcgatgtcaataggcatcttaatctgcctgattcacgtgttataaagttaatcaaacgttttggtacagaggtgaacccaaaccagcggcgaatattgtgcatgaataaggttgacctggtggaagcaagaaggacctccttaaagttgcaaaagaatttgaag

SEQ ID NO: 281872 - DNA, 628 bp, Zea mays
tttgacgagatacctggttcttcctgtgcaagcttaccgatttttgcatgcaattgatcatttgttttcttatgcagttatatcctttcttttccttaaaatagcctgtagttttgctgccaacttagtctctttgtctccattgtagatcagggccaaggtagccacatttggatttggaggaccaactgaggttacttctggtggcaacgccttgaagttttatgcatctgttcgcttgaacatcaggcgtattggtttggtaaagaaaggccaaaagacagtagctagtcatattgctgtgaagattgtcaaaaacaagcatgccccacccttcaagactgcacagattgagcttgaatttgcaaaggggatatgctcgacttctgagctttttgaacttggattgaagcacaagcttatacgaaagagtgccggttcgtcttatagatctaatggtaaggctcttactggtaaaagtaaccttaaatcttaccttactgaaaacaagagtgatgtcaatgatctggagatggaactaaagagattgatgggaactgatgcgtttatagagcaggaggcatgagacagttcccagagtgatttttctgagagagtgtcacacctg

SEQ ID NO: 281873 - DNA, 531 bp, Zea mays
cctcagctcacggcctcacccgtccacccacccacccgcctcgcctccatccacagcgaccacgcccatcttcgctctgtccgctcacccccacctctccgcccccgtctccgtccgcacccgtccgcctccgacttccccgtggcccagccggatccggagccgaactcgaccttgttcaggaaggagagcccgaaccgcggcgggcgggagggctctttttagcttgccccgcctgaggccagccgccccatgggccagtcgcctgagcgcgctacgtatcagctcatcgaccggcgggaagggcttgggtaaatcattattgaaagcatctcccttttacatgtaaccttgcatacaatatctgttaagatgagttcactaaataaagttgtttcaaatagtggagatgcatgttcagtcttagctagttaagtcacatcattaaatcccaatgcagcggagtttgtaccgtcatttgttaaaccattttttgaaatggtacagttctagataagttagattcagggg

SEQ ID NO: 281874 - DNA, 548 bp, Zea mays
gggtgacgtcgatcgcgggcgagttctggttcggcttctcgtggctgctggaccagctgccgaagctgaacccgatcaaccgcgtgccggacctggcggcgctgcggcagcggttcgaccgcgcgggcgggggcgccggcggagggacgtcgctgctgccggggctggacgtgttcgtgacgacggcggacccgttcaaggagccgatcctgagcacggccaactccgtgctgtccatcctggccgccgactaccccgtggagcgcaacacgtgctacctctccgacgactccgggatgctgctcacctacgacgccatggcggaggccgccaggttcgccaccgtctgggtgcccttctgccgcaagcacggcatcgagccgcgcggccccgagagctacttcgacctcaagtcccacccttacatgggccgctcccaggaggacttcgtcaacgaccgccgccgcgtgcgctaggactacgactagttcaaggcgcgcatcaacggcctcgaccacgacatcaagcagaggttcgacgcgtacaac

SEQ ID NO: 281875 - DNA, 605 bp, Zea mays
ttggacgcgtgggctttttttagatatttattcctatcattcatgccggtcactggtcccttgttattctttccactgccaaacaagagacatatatccttgactcctacccaaggcacagtggggtggccaaggatgttttaactcatctgcagacgtatttggataataaacacaactttgacatgtctaactacactgaccatgtgccacctgttcagcatcaagaaaacaattacgattgcggcttccatggtggattgtatattgaagaattcatgaaggagaagatgtatgaaatcaacaataaaatggtgttgaaattcagaaagcagctttgcatgaatctcttgttccatcctttgaacagaataaatcttgtggaattcagaaagaagctgggtattacattgaaaagaacacttcctggtatacttgatcttactattgaaggtgagaggagtgaatctgaggctgcagtgataattgaaatagagaacagagatgataagactctagaggatgaacatatttcagttgagaaagagtaaggtaaaaaagaagagcatgtactatcaactgacacaaagaatgacgaagcttta

SEQ ID NO: 281876 - DNA, 789 bp, Zea mays
gggtcccgaggctataacccggactcctcgccctcgtacctcgttgctggcgaagagcgtcatcaatggcgagtggaggttcactacacagccgccggatcttggagcatcattcgcggtcttggcgcgtctacgcaactgtatcctaagggcgtcgaagaggagagacggtacgccggtggcgacaaggtacgatagatttgaactggagtgtggaggtatcgtcggccagtgccatcagcgatgggtggaggtttccgtcgagtcgaggaaggagcgcttcgtgtaaagatgttgcttgtttattgttattatcttatcggaagtgccgtcaaggaagatgacgatggtggagggatcgacgatagcgagcacatcttctacacgctgtagtgggcgcactgcagcacttcttcccgccgaccaagctgcaacactactgccttgttgtcgtcaccgccaagccctctgccgcctccattgttcgccctgccaacccaggtatgcgaatctccaatccatgtgaggattcagagctagactagatgtagcttctgacctatatgattagttatatatgtattgcaattgatcagtgcaggcaccgcggatgtgttgtcgtatgtggggagcagacagtcaacttgcatctaggtctaaataaaatagtagtgattaaatctttgaatctgtagatcaaaccatctcaagtaattttagttttgttatgaaaatttttagctcagatgaaataattgcattttggatattaaagattaacatacatct

SEQ ID NO: 281877 - DNA, 1055 bp, Zea mays
cggacgccgtggggaacggactcaccttgcttggttggtggtacgagcctgggacgcagactcccgacgctgtcgcggcagccgcacggatgaacgacttccacatcggatggttcatgcatcctatggtgttcggggactaccctccggtgatgaggaggaacgtcgggtccaggctgccgaccttcacggacgaggaggcggcgcgagtgagggggtctttcgacttcgtcggattcaaccactacatcgtcgtctacgtcaaggctgaccttggccgcctagacgaccaagtgcgagactacatgggcgatgcagccgtgaagtatgacatgccgtttctcaagtcacgcaaccagttcccgttcggcgccttgacgagcgacttcatgacgtccaccccctgggctctcaagaaaatgctgaggcatctccgggtgacatacaagaaccctgcagtcatgatccatgaaaacggagctgccggacagcctgatccatccggcgtgaacagctacgacgacgagttcaggtcacagttcctgcaggactacatcgaggccacgcttcagtccatcaggaacggatcgaacgtgcaaggctacttcgtgtggtcgttcctggacgtgttcgagtacctgttcggctaccgcctccggttcggcgtctacggcgtcgagttcaactcgacggcacggacaaggtaccagaggcactcggccaagtggtacgccagcttcctccggggcggcgagctgaggccagtcgctctgcctgacggagcatattcgcagtgagcagttacactgtacgctccggctccaggggagggggatatctggcgatcagcgctctcggcgaggtggagagaaaatagagagtttgtaagcaaggatagtcggggtggtatatatagcagtgcttagatacggttttcttgggtaaatgtggtacgagttgaataagttgtggcatgtttggttagaggttagaggattggctctacccgaaaccagctgattcagatggtcgtttctatatatttggttaggggg

SEQ ID NO: 281878 - DNA, 634 bp, Zea mays
ggggactctatcgtgattgctaagtctttctcgcacatgcttaacttggccaacttggctgaggaagtccagatagcctacaggaggagaatcaagctcaagaagggagactttgctgatgagaactcggcaatcacagaatctgacattgaggaaacacttaagaggcttgttgttgacctgaagaagtcacctgctgaggtatttgatgccctcaagagccagactgttgatctggttttgactgcacatccaacacagtctgtgaggaggtcactgctccagaaacactcgaggatacgcaactgtttggttcaactctactcaaaagatatcactccggatgataagcaggaacttgatgaggctctgcacagagagatccaagctgcctttagaactgatgagatccgaagaacacaggccactccccaagatgaaatgcgtgctggtatgagctacttccacgaaacaatttggaagggtgttccaaagttcttgcgccgggttgatactgcattgaagaacattgggattaacgagcgtgttccttacaatgcacctcttattcaattctcttattggatgggggaagatcgtgatggaaattccagagtgacaccagaggttacca

SEQ ID NO: 281879 - DNA, 205 bp, Zea mays
ctctctcttaggcgtgagccatgatgagcaacaccggtcttatttgagcgataggggagttctacatcgctgtaatagttggtgccattcaaagaatgggacattagagggacaatgacaaagagtgtgccaaagtgagtatatgaaacagtcgaatctgaccccacgtacaagggcgagctgaatcttactgatacacaacctg

SEQ ID NO: 281880 - DNA, 440 bp, Zea mays
ttttgcgtgggtgtcgatggattacttggctgctgctgtacccgtgaccttggctctgggagtgggagctatcttgttggtcttacgatggacgtactgccgccgccgaacaagcgccgaagaagcaagactgcccccggggtcaaggggcctcctgttcctgggggagacgctccactacctggcagcgtcctccaccccgggggtattgccaccattcttccagcgacggttggagaggtatggccccatcttccggacgaacctggtcggggaggatctcgtcgtgtcgctggacgcggagctgaacgcgcacgtgctgaagcaggaggagcgcggcttccagatctggtacccgccctccttcatgcgcgtcttcggcgccgacaacatcaccggcaagctcggcgtgctccaccgccacatgaggacccttgtgc

SEQ ID NO: 281881 - DNA, 442 bp, Zea mays
tgtacgcgtggggtgtgtggatgaaaactgaacagacccaaatgggcctctgtaccacaagggcatgtaccacatgttcttccagtacaacccgcacggcccgacgttcggcaccgggaagctctcctggggccactccgtctccggcgacctggtgaactgggcgttcctgggcaccgcgctggacccgacgtcgccgttcgacgccgagggctgctggtcgggctccgccaccacgctggcggacggccgccccgccatcctctacaccgggcgcgacgcaagcggcgtgcaggtgcagaacgtggcgttccccaagaacccgtcggacccgctgctccgggagtggcgcaagccgcccggctgcaacccggtggtcccgcagccgggcgacgtgacgggcaacaacttccgggaccccacccggcgtggctggggcgcg

SEQ ID NO: 281882 - DNA, 497 bp, Zea mays
cccacgcgttcgggactcctccccgagaccaatgccgcggcggagacggacgtcctcctcgacgcctgggacttcaagggccggacggccccgcgcgccaccaccggccgctggggcgccgccgccatgatcctagtggcggagctgaacgagcggctgacgacgctgggcatcgccgtgaacctggtgacgtacctgacgggcaccatgcacctgggcaacgccgagtccgccaacgtcgtcaccaacttcatgggcatctccttcatgctctgcctcctcggcggctttcgtcgccgactccttcctcggccgctacctcaccatcgccatcttcaccgccgtccaggcctcgggcgtgacgatcctgacgatctcgacggcggcgccggggctaaggtcggcgtcctgctccgcgaccggcggaggcgtcgtcggggagtgcgcgcgggcgtcgggggcgcactgggggtgctgtacctggcgctgtacctgac

SEQ ID NO: 281883 - DNA, 500 bp, Zea mays
  unsure (1)..(500): unsure at all n locations
agaaaaggacagaagatccaagcaaggcgcccttggcgaaggctgagacggatccacctgcgataggaagctccacatccaattctgagattctgttgccagatgctggaacatccggggttccagccccagagccaagtgcagctccaccaaagaagaaaaaagtgagttacagagatgtcgttagtgaacttctgaaagattggtgagcgagcttggtcagtggggatagcctgcggtctatgttttactcccgtaatcgctatctttgtaaataggacagcgccatctaagtaaccatgtttgtagggtcaccttggctgcttgtcgtgccctgccctctggagctcacttgttttgcctgttgagaattttgactgttaaccctagcaacactgacgttgagttggaccaatatgcacgcggaatgctaggattctacaaagtggaagtggaagcctggtgtccgctctctgcaatnggttatggatctttgcact

SEQ ID NO: 281884 - DNA, 642 bp, Zea mays
cccacgcgtccgacaagagacacaaacctagcgcaacaagcaatcgaaaaagagatttggctacaaccaattaaccattggccagcagtgtacgtgggaacgatggccctcatgcaggagagtagtagccaggatttgctccaagctcacgacgagctcttgcaccattccctgtgcttcgccaaatcgctcgcgctcgccgtggcgctagacctccgcatccccgacgcgatccaccaccacggggccggcggcgccacccttctccagatcctcgccgagactgcgctccacccaagcaagcttcgcgcccttcgccgcctcatgcgcgtgctcaccgtcacgggcatcttcagcgtcgtcgagcaaccaccagcaggtggtggtgatgattcaaccgtccacacgtcggacgacgaagctgtcgtcgtctacaggttgacggcagcctcccgcttcctcgtcagcgacgacgtgagcacggcgaccttggctccctttgtgagtctggcgctccagcctatcgctgcctgtccgcacgccctgggtatctccgcgtggttccggcaggagcagcacgagccgtccccgtatggcctggcggtccggcataccccaacgatctggggacatgcttacgac

SEQ ID NO: 281885 - DNA, 322 bp, Zea mays
cccacgcgtccgcggacggtggccggagaattagctatagccagccgtgtgtcgaacacgacacgcgataatggcactcatgcaggagagcagccaggacttgctcgaagcgcacgacgagctcttccaccactgcctgtgcttcgccaaatcgctcgcgctcgccgtggcgcaggacctccgcatccccgacgcgatccaccaccacggcggcggcgccaccctcccccagatcctcgccgagaccgcgctccacccaagcaagcttcgcgccctacgccgcctcatgcgcgtgctcaccgtctcgggcgtcttcaccgtc

SEQ ID NO: 281886 - DNA, 304 bp, Zea mays
aaccaattagccattggccagcacagcagtgtataggcatagctacgtacgtgggaagtgggaacgatggcactcatcatgcaggagagtagtagccatgatttgctccaagctcacgacgagctcttgcaccattccctgtgcttcgccaaatcgctcgcgctcgccgtggcgctggacctccgcatccccgacgcgatccaccaccacggcgccggcggcgcacccttctccagatcctcgccgagactgcgctccacccaagcaagcttcgcgcccttcgccgcctcatgcgcgtgctcac

SEQ ID NO: 281887 - DNA, 508 bp, Zea mays
  unsure (1)..(508): unsure at all n locations
tttacgcgtgggtcggcacaccggcaacgggaaaggaagggataccgacgccgagcacgcgccgagcaacgtctcgaaaaggccatgcaggacggcggcgaggtgctgttcctggacggcgtcggggaggtcgccgtcaccatcggccgcaacggcctctctgcacgccccctccacccggaactgatctcttcatgttggtcgtccattacactgcagcctaaattagacagcaaaatcaacttttcagatgtttatgccatagagatgcttgataagggtcctatctgtgggccttggaatacaaagactgctattcaaggcaagaaaaatattgagatgcaccggtttgtcgtacatgggattaccagaagaaggaaacacccttctccgtgggtaccttgtgaatatatttttggtcacaaagacttgaagatctgcaaagattggttttagcatctcatttcgtgcataaacaatgaangtggtagaccaaagaacttaatgg

SEQ ID NO: 281888 - DNA, 507 bp, Zea mays
ggatccaaggacatcgacatggagaagatatcttctcagatatcttcagtaacattaggtggcaacgataagattcagagtatggcaggaaatcagcaaccagatgtaatgccatgcacatctattgatgtgcccatggatcagaattttggcagagaccgatctcatctcaatcttaacgagcttttattgccttcagaaaataaggatagtagtctttcttgtcaatatagttctgataagcgtcttgcttggagtttgaagatgcaaaattgtagcgttactcctttaaatgatacaatagactctgcaatgctcactgacaaaccttatagtatactgctggaaggttcagagaaaccatcatatccaccatttgttgaatttcctagtacatgggatacctcattgtggaatgatacaaaaaataacgctgcatcgacgattgacactataacttcttcacagatgcagacagggttttcttcaatcgataacactttatgc

SEQ ID NO: 281889 - DNA, 376 bp, Zea mays
attacactacctagcttcttcgtccgcgtacagcgtactagtgccctgctatcgttagctagagctcactgctcaccaccaggagccgtttattgcatcaaagtatttattccgagtgtgccatccagtgtcgtatttggtttccgttgtgatggagatgaaccgtatgtatacattaatacatgcatgtctatagcagaatgcaaatatgcatatgtgtggtgtgtgcttgctgctgagatttgtgtgcaagggcagagctgtgtggtgctatactattttgttgagacagtgaataattatattatgtatatggagtggaattgttaagatgggttgcgaaaacctttgaataatacgtacacagtgcatacac

SEQ ID NO: 281890 - DNA, 430 bp, Zea mays
  unsure (1)..(430): unsure at all n locations
agcaacctcgtccccaaacaagcaaccaccgcctccccgatctcgtcgagaggaagcccaatcccgaaaccgccgccctattccaatggcgcccaaggccgagaagaagcccgccgccaagaagcctgcggaggaggagccggcggcggagaaggccacggcggggaagaagcccaaggctgagaagcggctccccgcgggcaagtccgcaggcaaggagggtggcgagaagaaggggaagaagaaggcaaagaagtcggtggagacgtacaagatctacatcttcaaggtgctgaagcaggtgcacccggacattggcatctcgtccaaggccatgtccatcatgaactccttcatcaacgacatcttcgagaagctggcggcggaggcggacaagctggcgcggtacaacaggangcctaccattacg

SEQ ID NO: 281891 - DNA, 927 bp, Zea mays
cgtatcgcgtgggtttggaaagcacatatctcttccaaatgtagaatatgtaaaggtgaaatctgtgaggctcaaagcaggcccaaatacacacgacggatgtggtatcgatggcgaactactccatgtcaaggggcaagttcgctgtagtttgttgcctcaacaatgtcaattgatgggcaggccagtgaaaaaccctgtacagtagctgtaaatacactatgcggactgtctgcagctctgaggtcagcccagaatcttgcacctgtggtgtgtacaagcggcgaaccatggattttcgtctgcatccacatgtcagtaattatattcagaagtgagaacatgaacatcctagctggcactcagctccagagatgtacatcttgtggttgacgagcagaaggtgctgagtgggtgctgtttcatccatatgtaaagccaaagcctatctcggacagcagcttgttgcgcacctcttgcttttgcctttttctcgtccgatagaatgcatctactatacagccatcctgatgagtgtacttggttgctccagaacatagtgtccacctccaccagccgggtgtctttggaggttccctgatgccggccacttgatactcattgtagggacaacaccccagtgcccgtgtccttgatcagtctgttgtgtttgcgaagtgtgaataagatataggactgtttgattcccggtacagcgcagggtttcagcagaaagggctggatggatgatgttttgtggcgatgctgcctcgttgagtctttaaaacgggtgtaactcttcttcttttgtgagtcgtgatgatgtatgaaccgtgtactgatttgtaaaccttgcctggcaggcatacaactgtttctgaggtgtggtattctctgccggggaataagcagcgtagcttctccttt

SEQ ID NO: 281892 - DNA, 732 bp, Zea mays
atttcgagtggccgccctttttttttttttttttttttttgggcctgccacaccatgctgggtgccgcgcgcccctggttacaaaggatatgcatcgagacacaacagcgagagggaggagacatataactgagtaaactctgatagtggcgggcgcatttggttgtctccatctgatcagcaagcagagccgacagagcacctgagaacgccggcgtccttggtcagcgacttcacttggttggagctggctgccgcgaaggcctggtgcttgttgtaattcggccgcaccctgctacccgtctgcttgaagacagcgccgttcaggaaggagtccccgatggaggccccagtccccattccctcccccgcgaccggcatcccttctcgtcaccttcttgttatctgctgcggcggaggccacgaacaggttgccctggctcttgactcttggtcccatgcttcctccaatggcgtagtctttccatcccaagtatacattgttcacaacgtgagcgtagccatgcctgatcctcggcatgcgctggttgacgctcggcccgaaccggttgaacgcgacggtgacgcgcatccgtcggtcctcggcgtggccgtcgtcgtggccgagcagcatgaccttgtcgtggttgaagaaccagttgttggagatggtcacgtcggtggatccgaccgtcacgtccagcagcccggacgcgtgggcgaacgcgtggg

SEQ ID NO: 281893 - DNA, 802 bp, Zea mays
cgcccccacggcccacgccatcctccgcaccggctggaccagccccacgccggacaaccggggctcgccgcgccgccacgctcccaagccggaactccgaactcgccgcgccgtcctcactgtggcaccagagctgctcgatctgccccgccctcgcccctcgcccccttgccggaggggcgcgaactcgcaaaaattattgggtgtgcatttatacacccatgtcctttgctgaccctgtctggtagcagattaaggtttggttgcggaaaatattagtggggttgtccaccatgacgagtccgccaagggtgagcatggagatcaccgacgacatgctcaagagcatggaggtcggcctagctttccgggactattatggtagaattagctctatggattttcacagcaaggctaccaactatcttgtgacagctagcgacgatgaatcaatccgcctatacgacactcaaaatgcagtatgtttgaagactattaatagcaaaaaatatggggtcgaactagtgtgcttcactgataacccaaatattgtcttatattcatcaaaaaatggctgggatgaatctctgcgtctactctcactgaatgataatcggtttcttagatattttaaaggtcaccttgacagggttgtctgcatctcattttgctctgagaaagaaaatattctctctggttcacttgaccggactgacatgtataggatcaacggactgaaaaattacacggcttactgcgtgtgccagggaggcctgcagtttcatatgatgatcagggcatg

SEQ ID NO: 281894 - DNA, 650 bp, Zea mays
gactttgcagaaatcacaatcttctgcctccaatctttctgatagaattgacttagcatggactggttctggtcagcttgttaacgattcatcaagtagcatggaggcagtttcattcatacctgctagtctgaaggataatcctgcataccagaaggttatagcacccattagaatcaaatcgtttgattctgctataagttccagaaatgttgatgattcaaatgctagtataagaagatcttattctcaaaggcccccaaaggctattgagagaactggtaagggtctgtcaccaacattcttgaacaagctctcacttcctggtatgattcatggcgagagtcggttgctgctgtcacaaaatgattcaggtgttattgttccaatttatgatgatgaaccatctagcatgatagcccatgccatgactgttccagaatatcacagcttcttgttgccacttctgtatcagaataatgaatctaatttattgaattatggttctgatcagcctcaacctataactagaaatgattctaagtataaccatttcactatttcttttgaggatgaagactcaaatttcgttgatgaaagcaaaatttctgtgacatgttatcttgcacagcagtttgatgcaatcagga

SEQ ID NO: 281895 - DNA, 930 bp, Zea mays
tttattgagtttcatggttccttactgaaggttagtcctggatgcatttacagccactcagggctaccatttcctgcagtaagagctaaagtttcttggccacgtaaggcaagcaggggagttgcacttgtaacatgtgctagtggtgaagctgaatttattgtgaaggactgctttgcccttggagttggtggaaggtatgtcaactgtgaggttagtaataagtgggcaaactgtgtctttgtcacagggattccattgcatgtaacagagccagaattgtatgatgcttttcatagtacaacaactaggagaatccttgacatccacttgcttagaggacagcccacagctagctcgtccgtttctgaatgtacagaagcactgatgagagcgatatcactattcatgccaaataggaactttccttgccaaaaattccgtgttcaagtgttccctccagaagagaaagacttaatgatgaaagctaccataacctttgatggaagttttcacagagaggctgcaagagcactggaccatcttcaaggaagtgttcttccttgttgtctaccttggcagataatccagtgcgagcatgtatttcatagtactgtctcctgtccgatgcgcatttacaatgttatcagccaagatgttggtgctctacttgagagcttccgtagccaaaaaggcgtggcatacaatttggagaagaatgagactggaaatttccgtgttaagcttactgcaaatgccacaaaaacaatagcagcatttgagaaggcctcttgagcttctgatgaagggaaaaataataaaccatcctgatctgatgttcagcacagttcaattgctatggtcccgtgatggtatggcacaattgagctccgttgaacgggagaccggcacttatattctgtatgacag

SEQ ID NO: 281896 - DNA, 568 bp, Zea mays
gttctatatcgcgagcggccgcccttttttttttttttttgatcgaaaccatgtagtacatgttttgcttgcatcaaacagaagaagcgtgcagcttcgagcaacgtgtcaatacaaaagcataagcatctatatatcacagaatcacaccgaaatacgtatatatagcctgtaactctcatggagttgtccggaactacgaactgccgcttaagcaaaaagcgactggtgatcccacgacggagcgcgcgcggaggcgccggcccgtcaactcgtcactgccaacggcgagaacaccgcccttgcaaggacgtgcgtcttcttcctgccgagcccgaacccgacaatatggttgacgtacacgtccccgtccttcaccgtagccgacgacccgatccggtggaccggcccgacgtactgcccggtgacactcgccgtctcccagtcgtcggagctctccaccagccggttcggcaggccggcgacaaccagcctcgtcggggagagcagctcaaggccgtcccctcgcctcagcgacccccgcaccttgacgacgcgcacggtctct

SEQ ID NO: 281897 - DNA, 556 bp, Zea mays
cggacgcgtgggtgcaagtcttctcttgcttgcgcgtaaacacaacacagcatacatgcgttccacaaacctactctctccgtaacacatcatccaccaaagaacttatatatccacaaggatccagtccatcttggttattcgtccccacgatggcgtccaagaaccaagttgatctcgagtcccagaagcccacgccgacgcacgccgtcgttgcatcggctcccgcagctgccgtgccggcttcttctggtacaggctccgtcgttgctggcatctccgacgctgcgccggagacccagccactcctggctgagccgaacggccacagccaggaggaggggctgggagacggtgggggtaccgacgacgagacaacgcagctggagcgagcaatggcgcaggcgttccggagcaccgccgagctggccaagcacctccccaccggcgcggtgctcgcgttcgaggtgctgtcgccggtgttcaccaacggtggcaaatgcgacgacgtgaaccgcgtcatgacgtcctggcttgtggggctctgcgccgcggc

SEQ ID NO: 281898 - DNA, 484 bp, Zea mays
  unsure (1)..(484): unsure at all n locations
cccattcgtccggtgaaaagaaaaagggaaacaaaccaagctagctagagaaaagaagaagctggtactagctagctagctagcttagctatgggcaccatcgtggacgctgacgtcgggttcgcggtgaagaggacgagcaggtcgctggtgccgcctgcgtcggcgacgccgcgggagacgctgcggctgtcggtgatcgaccgcgtggcggggctgcgccacctggtgcggtcgctgcacgtgttcgccgcgggcggcgacaagaagcggcagcaggcgacggcgacgccggccaaggcgctgcgggaggcgctggggaaggcgctggtggactactacccgttcgggnggcggtcgtggtgggtggacgcggagggcggcggggagacgcgggttggcgtgcaccggcgagggcgcctggttcgtggaggccaacgccgcgtgctcgctcgaggaggcccgccacctcgaccaccccatg

SEQ ID NO: 281899 - DNA, 555 bp, Zea mays
gatgtcttcagaagtatgaaggaggacgtcaaggaaactctgcaatgtatcacttcccggctctctgttactctggacttttggacttcgtacgagaaaatagtatacatgtccgtcaaatgccattggattgatgaaaactgggtctcacagaatgctctacttgatgtgtgtagaatcccatacccatccactggttctgaggtttttcaagctctaatggatgtcttggtgatgtataacatcgattcaagaatccttgcttgcacacacaataacagccaacactcaatacatgcttgtcatgagctcgcacggcagcttaagacccgtaacctcccattctgttacattccttgtgctgctagaacactgaagaccatcattgaagcaggactggaaaatgtgaaaccaattttgtccaagatccgcgagtttattctttacatccattcaaaccaggagctgatggaggattttaagcactggactgaagtttatcaagaaggttcatggaaactcccctttgaccattcagcaaattggaacagtgat

SEQ ID NO: 281900 - DNA, 474 bp, Zea mays
tggaaataacgaagaccgtctccggcgtcctatactttggctacatgctcattgcctcctacgccttctttgtgctcaccggcaccattggcttctacgcctgcttctggttcaccaggctcatctactcttcggtcaagatcgactagagagtaacagctgcaacactgctccgtgggttttcgaaatcagagatcaagagagaatactaggtaacgaaccatcagaatttgagagggtagtgtgcgttatttttataaggtggaacttcaaacgtagggtgcttattcagtgctttagggtttttacagtttgattctggaacactaagtcagtttacttcgaagtcagtattttcagtgtgtatcccttacagaagaggtgtctgatggtataattcaactacttaacaatttacccgtgtgttaaattaagtgaaatttaaatgaacccacccgtttgattcagcaaaaa

SEQ ID NO: 281901 - DNA, 742 bp, Zea mays
tttttcgcgtgggccattgcatccatttccgggggacggagtggaggaggagggcgtcgcctgcgttgcttcgcgtgggaagcgtagcgtgcttcgtttaggcctctcgccaatatccgagggttaatctagagaggcctttggctttgccagacgcgcctgtacgcgcctttctgggaggcagccgcttgctctcgcctccaatggccgagatctgctgcgaagaagccaagtccacgccggcgaccgccgtggctgcggcttcagtctccgccacggccgctgcggccgccgccgtggcagtggcctcctcggcgttagagaggaggcgacgcaggctggagatgaggaggttccgcgtcgcgagcgatcccgaggagctggtcgcggaggacgtccgcgctgccaagcggcagaggctggcgcgcacgctgtccggctcctgccccgacgcgggctcggactccgacagcccggccctgcccaggtacggggtcacctccgtctgcggccgacggcgcgagatggaggacacggtctccatcaggccggacttcctgcccggcaccagcaagcaccacttcttcggcgtcttcgacggccacggctgctcccacgtagcgaccgatgtgccaggacaacatgacgaggtggtcgcggacgagcacatgaaggctggtcctggcgaggagacggcgtggaagggcgtgatggagaggagcttctcgcgattggatgagca

SEQ ID NO: 281902 - DNA, 543 bp, Zea mays
ccacgcgtccggatttatggagtatcaggttcaaacaagcggtgttgctcgccgggacgacgtaagccccggccgtgtcggacgttcatcggcaggatccaggtcggctggcaggtccgccggacgcgtccggggcagccccagggctccgccaaccccgtgtggaacgaggagttcatgttcgtggcggcagatccgttcgacgagccgctcgtggtgacggtggacgagcgcgtggcggcggggcgcgacgagcccgtgggccgggtgatcatccccgtccagttgccgtcgtacgtgccccgcaacgacgtggccaagtcggtggaggccaagtggttcaacctgtcccgcgcgctgacggcggacgaggccgcggcgggcgtgaccgccgccaaggcgctgtcggagaagacaaccttctccagcaagatccacctgcggctgagcctggagacggcgtaccacgtgctggacgagtcgacgcactacagcagcgacctgcagccgtcggccaagaagctgcgcaagtcccctatcggc

SEQ ID NO: 281903 - DNA, 457 bp, Zea mays
tgcttatcagtctcccgtgccacctcagcccgctgcctgcgaggctgcgaccttctcccttcactcccctcgccgacggagcaaacggcgatcggaagtcgagcgccgtcacctgagggacagatggcggcggcggaggggcaggtgaggcgggacatgtgggggcaggagtatcggacgtcatccgccgactgcgcggcggcgctcgacgcctactacgccgccttcatgtccttcggccgcggccgcgtggcggccgtcctccgcgccgccgcggccgacccgacctgcgccctcgccgccgcgcacgccgcgcaatcagtcgcccccagggaccccgcgggggccgccgccttcctcaacgccgccgcggacaacctcgggaaagcaacggagtacgagagggccgttttcgggacgctctccgtgctggtgggcgagaagagggacgaggagg

SEQ ID NO: 281904 - DNA, 453 bp, Zea mays
gtgtcgtgtcggaccccaccacaaccctcttctccgtttcgtttcccgaccaggcctcgccggctcaccgcccccgccgcgcccgccatggacttctcggaacaggacgtcaacgtcttcggcgaggactacgacgtccacgacggcggcgccgaggccgaggccgaggccgaggccgacggcggcggggactcgtcgggctcctcctccccatcatcgtcctcgtcgtcctctgccgccgcgtcctcctcatcctcaagtggcggctcaagcctcagcagcagcggcggcgctgccggtgagggcgaggatggcgccgatgtgggggatggggagggaatacgattcgtccaacctcatagccacaaggaggcgccggcgccgccggctatctggacgatgagaggagggaatatgagaaccagaaggtagaggaggagagaggatttgttc

SEQ ID NO: 281905 - DNA, 365 bp, Zea mays
tcggttttagatcgcgagcggccgccctttttttttttttttttttttttttaacggcaaccggtacaattaagcccccaaatgacaggcacaaagccgagacgagatctaaccacagaaaatgctagctgcccgtctcgtgtatgtgcatacaatacatgtatgacaagcgcaggtcaaactgaaaggaggggcaggaaatcaactgcaagcactactagttcatcatgcatggtttttagttcacacacatcttaggcaaaccataatatgaaatcatcgtccagctcagatcttccttccacgcgcagcccttagcagttcagccagcaccgaggggcagcttgccaccagatgctcgtagc

SEQ ID NO: 281906 - DNA, 430 bp, Zea mays
tcgcttgcacttgggtgttacagaagctggagagggtgaagatggaaggatgaaatctgctattggcattgggacactgctaatggatggtttgggtgatacaatccgtgtctccctcacagaaccaccagaagaagagattgatccttgccaaaggttggcaaatcttgggacgcaggctgcaaaccttcaaattggggtggccccatttgaagaaaagcacaggcgttattttgatttccagcgtaggagtggtcaattgcctttgcagaaggagggtgaggaagttgactacagaaatgtcctgcatcgtgatggtatctgtactgatggcagtttccctggatcagttgaaggctcctgatctcctttataggtctcttgcagcaaagcttgcggttggcatgcctttcaaggatctggctactgt

SEQ ID NO: 281907 - DNA, 506 bp, Zea mays
cccacgcgtccgattctcgcgatgggagcggaggaagcagagggtactcccccgccgctgcccgccaccggcgagcccgcaaccacggcaagggcgcagcaaatatctgcagcacaattcctctcctggaagcagcgcaaggatgcagaggtagccgcaaggaaagctgaagcagctgagaagcgagctgatgatatcgcttcgggagcggcgcagatgaacggccgcgagctgttccaacatgagccctgggtgttcgacaacaacatttactgagatcgtgtcgggctactgttcctgcattagtccaagctccagcggtggtttcattttgtactgctatatcagctttgcgaaactgtggattttatttcaccgtttctaagattattctctcaataggtaattgaacttgtttcaaatacgttttgccaaatctttgtgcagtcaccgtcgaatgatatctagtatcgctattctttttctaaaactcttacaaacaaaga

SEQ ID NO: 281908 - DNA, 336 bp, Zea mays
tgatgatatcgcttcgggagcggtgcagatgaacggccgcgagctgttccaacatgagccctgggtgttcgacaacaacatttactgagatcgtgtgggcctactgttcgtgcattagtccagctccagcggtggcttcatttcgtactgctatatcagctttgcgacactgtgtctctcattagggattctatcacaccgcttctcaaaggattattctctcaatgggtaattgaacttgtttcagatgcgttgtgccagatctatgtgcagtcaccgtcgaatgatatctagtatcgctattcgttttctaaaactcttacaacaaagagtatt

SEQ ID NO: 281909 - DNA, 493 bp, Zea mays
cggacgcgtgggcgcgagcggccgcccttttttttttttttttttttggaacgcaaatgctaagagactgattcaaacccacgatgactgctgttcatgctgatacaaataaggcacaccaaaatgtttcagctcggaacatcaaattaatttacaatggctgagaggcaaactgatcactgaatccgaatctaaaaaggaaaaacaaggaagtttgtgggcatggatgaatctctcacagacgaggcttcatggtgttagggattgtccaatgaacttgcaattgctcggaatttgtaatcgtccactcactatgtctttgtcagaacaatatcacgcatcaagctatctggagctggcatgccgtgaaatgctcaaactggcccatagcttggcgtataaacatctccagaccactaacaactgtggctccacattctgcagcttctcggagaagtctggtctcttttggtgtgtagaccgcatcaaacac

SEQ ID NO: 281910 - DNA, 481 bp, Zea mays
atctcgagcggccgcccttttttttttttttttttttaacattatcagttatttatcacattacaaatacgtgaaccaaacagcaccctaatcctatcgattccccttccttccctccctcgctcctggtaaccaacatggagtagaaggaagacaagtagaatcaacaagacagacaactcaaccttagcctatgcaccaacaggtggttgcggatcagccacttgacggaggggagctcggaactgctgcgtgtctgtctgggcggactggaactggaatttcagctcaaacaacagcttcctccccaatttgcattgccatttctttgcacacaagagtatcaattcaaggatatgcatctttgcctcctcactcagccatgacaagtcaaacacctatggtactagtgctgctgtatattagtacaaagcaaggcaatggaatgccaccagccaatcgttgattcaatcaacatctt

SEQ ID NO: 281911 - DNA, 516 bp, Zea mays
atctagtcgtccgtcaccacagctgatattgaggcgacgcgccggccgtccagatcaaccaaaaaagaaaaaaagaaaaaacagtagccatgtcgcggctcctcctcctcggggccgccgtgctgctgctcgcgtcggccgccacggcgcaggactgcctgtccgcgacgttcagcggcgggcggaccttcgggcggtgcaacaacctgccgtcgctgagcgccagcctgcactggacgtaccacccggagaacggcaccgcggacgtggcgttccgcgcgccgtcggacgccagcggctgggtcgcctggggcatcaaccccgaccgcggcggcagcatgggcggcagcagcgtcttcgtggcctcgccctcgcaggacggcagcggcgcggtgtccatcctcatgacccacctggagagcacgtcgcccagcctaaccaacaacacgctcaagttcaaggtgcccgtcggccccgccgccgagtactccaacggcgcctacaccatattcggca

SEQ ID NO: 281912 - DNA, 597 bp, Zea mays
cagagccaccctgccgtcgtaggcgcacgcgccgtagataggaagcttattaagctagcgcgtgtcgctgcgccatcctgccatggaggatcaggcgctggcgccgctgctgcagccgctcccgctcggcgaaacgggggccatcaaggggcgcgcgaggcgggcggcgctggagtggtgggtggagtcgaagaagctatggcacatcgtgggcccggccatcttccaacggatcgcgctgtacggggtcaacgtcgtcacgcagtccttcatcggccacctcggcgacctcgagctcgccgccttctccattgctgccaccgtcgtcgggggcttcaacttcggtttcctgctgggaatggcgagcgcgctggagacgctgtgcgggcaggcgttcggcgccaagaagcaccacatgctgggggtgtacctgcagcgctcctggatcgtgctcctcatcttcgccgccgcgctgacgccgacgtacatcttcatggaggacctgctgctgctgatcgggcagtccccggagctgtcgcggttggcggggcagatgagcgtgtggctgctcccgcagcacttcgcaatggcgatgct

SEQ ID NO: 281913 - DNA, 850 bp, Zea mays
tggaagagaccaaaacgaaatctgaaaataaatatattgcttggtggaggtgctatgataagtacagatggtgttgatggtgaagtaatacaccttacaatgccttctgaatctgaagtgtcaagcttagttgcaaccagcgaatttgagcacaagaaacgaatggagatgattcagcctatacctgatatagaggagccatcggggcaggaaggtgctgagctatcaaaaatacctgttgatttgaaaagtggagactggttccttaagattgtaccatggattggaggccgtattatctcgatggcccacattccttctgattcccagtggcttcacagcagaattgagataaatggttatgaagaatacagtggggctgaatataggtctgctggttgcacagaagagtacaaagtcatcaggaggcaccttgaacaatctggagaggaggaatctatttgatggaaggagacattgtgggggttctggttctccagcgccagatatccattttgaaggacaacccaaagattgttcagatcgactccagcattcaggcaagaagtgtaggagctggttctggtgggttttcaaggttggtctgtttacgagttcatcctacattcaccctgctgcacccaactgaggtagtagttgctttcacggccatcaatggttcaaagcaagagatctccccggaggcaggagaaataacattcgagggagacctcaaacccaacggagaatggatgctagtggacaagtgtgtcgggctgagcttggtgaaccggtttaatcccagggaggttagcaaatgctttgtgcactggggaactggtgatgtgaa

SEQ ID NO: 281914 - DNA, 551 bp, Zea mays
agccgagcgagaaagcgaaggggccaaaaaagccgcaccggcttccttcccccacccgaagagatggaactgttctacgaactgctcctcacggcggcggtcaccctcctcgctgccctcctgctcgccacgctcttcgcagccaatgattcccatcgccggaccgatcgcgccgcagccgcgatcgccgaggaggtggcggaggaggagaggatcatcgaggtcgacgaggtgatgcgtagcgaagggatggcggcggtggcgccgtcggaggcggatgggtgggttgaggcggaagaaggcgccggcggtggtcgtcgcggaggtgaaggagccggagagcttgcccgaggaggaggggggttcccgtgaaggctgttcgggaggtgcgccttgctgcggaagtggaggagggggaggactgtggtggccggcgtgaagcggcctgatttgacctccgcaactgttgtggcggcggtgggtgctgaagcgagccagctggtgtcgggcgctgaggttgtgcctagggaggtttccattgtgatctggtt

SEQ ID NO: 281915 - DNA, 377 bp, Zea mays
tcggttttagatcgcgagcggccgccctttttttttttttttaggatttgcatcaaattgcaaatgaattgtaagccagatcaccaatgcatcagtcgccgccccttgtgtttttttctacagaacaggcgcccgattgcaactgatttcgtctcaattaagttcattcagtacacgtaggaattctacgcttaactttttggtgctttcatgacaccgaaacccaatgagaatatacaatacagtttatagtaaatatcatttttgatgtcatcggtcttcgcatgaagtatgcagacacgagcaacccaagagctcaatcatctaggcttaatctggtcctcctgggcttgttatacacggtccgcacactagca

SEQ ID NO: 281916 - DNA, 609 bp, Zea mays
tttttcgcgagcggccgccctttcttttttttgttttttttttcttctcgacacaaatgaatcacatccttgacgcgatgtcgcatggtctcctgatttgggcctctcacgagaagactgaacactgaccatcttcatatattgaccatcaggcaaccatgttattcactactatcaggctatcctggtctactaattttatccaggtaatgatttgcatacaacaatagcatcatgaaaatacacatcaatatatcgaccgaaatgaacagacaataactggctgtatctcctgttcacaaacaacacacacaactgaaacttaaataactaccgaattataaacacttctgactgataggagccgatgccgaaaacccattcttctagcatcctacttgatagctacgtatatatgccagaactggatggatggatggatggatggccattgtcttcatatgaaagaaaacaacttgaagtatacaaccaggtagagtgaaagagagaacaccgcacaaatatgcctgccagaacagaagggcggatgcttccttgacgccatagcctctgagactggcgatcgcctcgagccgaatcggctcgagg

SEQ ID NO: 281917 - DNA, 570 bp, Zea mays
ggtaaacaatcacatcattatttgaccacataaactctaaataccataacaatataaagtctatcacttactaaattaaataaaattaaacacatgagtttcatcagaccgtgccggctcaagcccaacctatctgtgtgggctgtgccggggctcgacgggccagaatttgaggctcggtttaggcccgccttcggaccgtactaactcggtccatattatttcgtgtcggtccgtgctttaacctattgtttttgggttgtgtttgtgctgaccaaaaagcatgtcccgtatttttccagcactagctaagaggtagttgtcggtgtctgacctgctgcagctaagggtggtaatggatcacgatccaaatactttttcacaaaataaaatagtctcaattaaatgttggtttcaaaaataaatagaaatatggtccgattatctgattcgattcttaaatcttatggtttaaaatttagagaccattgtcaactgcagctggctcggcgttggcggcctccagggagcggatgaagcccaggagctcgcgctggggcgttgttggtg

SEQ ID NO: 281918 - DNA, 535 bp, Zea mays
gacatgagtggcggcggcggcggcggcggggaggaccggatcagcatcctcccggacggcgttatcggcgagatcgtcacccgccttcccaccgccgatgccgtccgcgttcaggtcctctctcgccgttggcggcacatatggatctcctgtccgttgaacctcgatctcggttccccaaactactacaccgactacaagcgcgtcgtgtccggaatcctcgcggcccaccctggcccctgccgccgcctcaaagttgactggccgtacgacgacggcgagtcgtacaaccactggctccagtctcccgccttggtcggtcttcaggagctcgggatcgagccagagtactcttccttgtggctagacaagaaaacactgccgcggggagacaacacgagagcactgccagagcgggcattattccagttcgctcccacgctgcgcctcctaaggattggctaccataccttcccctctgtcggtgccgtggcggcgctccggttgccacacctcgagctcatctcgttctgct

SEQ ID NO: 281919 - DNA, 476 bp, Zea mays
tttgcgataccccgtcgcgaacacattttcataagaaccccctagagattgaataattaacccgcagtccacttgatggttggctgagtctgggcgagttttatagagttgtccctgtgcttttctgtaatagtgcgcatgatccagaggatagagaaagaggataaatgattatggaaatagatttctagtataaaatttattgcagaaattgtttaattcttagaaaattcatatgaagttcaaattaatctattccagttgcaataattttgttttaatattgttcatcatctagtacctttgtttagccataaaaattgaattaatgttattcacttgatttagtctatactaagcacttaataacttcgaaaattcataactcctccgttttaactccgatttaatccgttcaagttccgttagtctcgtagcaacgcgtagattattatacacagtttattcttatgttg

SEQ ID NO: 281920 - DNA, 389 bp, Zea mays
ttcttacttcggattaaggcgacccaccgagcacctcgatacggcggagtcgtgggaagccagggaggtgaggacgacgtggcgaagtcgtgaggacaagaaaattccaccgctgtggcagccatgtcagtgcaggaagtacctggggaagcacctgctctcgcgcaagagcgaggaggccctgaataccggcggtccgcgccaaggcccctgacccggcgcttttcatcgtcggccacatgaggcgggaggcgcccaccgtgatcacgagggtgcgggcgcgccagatccttgacgggcgtagcgcacccgccgttgagggtcgagttgcacaccaacaaggccgtgcaccgagcatctacggctagcgtgggcgcgctcgagggcgc

SEQ ID NO: 281921 - DNA, 480 bp, Zea mays
tttcacgcgtccgctgttgcaataattttgtaggcgagaattgggagagtctggaggctgccagccggtctagtggctcggccaaggcgagcggtggtcccagcgccgttctttccgcctggtgccggagtttcagtctctcaaggctgtgctcggagtttctgcgctctaggggccgggaggtgtgtgctggtgtgaatttggctttcttttgatccaattggtgcttaatttcagcctgtcgaaagaggcttctagcttgcaggttcatcgccgttggcgccgaacttgcctgccgtacagtctttctagtgccaaagttgaattttgaggaactgtgaagccgctttaagcaattacctttgccgaactttcctctaaaggcttgaccttttgggttccggagttcattgctgatcgacgggtcttggagtttttgtctactacctgcgttatgaacaggacatttctgcataagaa

SEQ ID NO: 281922 - DNA, 451 bp, Zea mays
ttttctagatcgcgagcggccgccctttttttttttttttttttttttttatttacccaagttatggtttccactttcagtgaaactcaaaagaaagcagcggcaacggcaacacagagcagtctgcaggcaaaccttgtatcctagagtatcattcatttacaggtctttctaaacctgttcatatattacaggcagttgtgtcgagtttgagaaacacactgcttgttcataacatcatggcatcgcatccatgtacttcttgcagccggcctcagatgtctgcattgattccaaatatgcggaccttgggcatgttcggcaattttgccacgaccagcacgaaaactgcaatcgggttgagaaaaaacatcggctgcttgtagtcggtcaagtgcgacgcaatcagatacagcaccacaggtcccacagttaaaaacttcctgttccg

SEQ ID NO: 281923 - DNA, 521 bp, Zea mays
ctgtcgcctcctgacggcaccagcaccggcggcggcgacgcggcgaaggcgatggcggcggcggaggacgagtcgtcggcctcgcactccagctccaaggccagcagggggtggtcggcgagggacgagagggccatcccacctcgtcccgctgctcaccttcctctgcttcctcctgctcttcctctgctcccacgacccgtcccccgccgatatgtcgagcttcgctggaggcggcggcggaggaggaggagcgagatctgggaaccggaggttaaggatgctttagtgtgcgtattacctacccattggagtattattatccgcgatgcggatgttgtacttgtccagcagtaaccaagtatgggaccaaagtatgtcaccatacaaaacactcttgctgtggtaatactaccaacctacatcagcatgttcctgattaccatttgagctggattcgaaatacctggcacgtccaacaggcagcagtacatggcaatggcattccacaattcagaaac

SEQ ID NO: 281924 - DNA, 526 bp, Zea mays
gtcttcaattcatttgcgcgggtggttgagtgtttgtcatcgttccgatcgcaggcggccgcataacccttcttcctcctcgatcgatcggctctagctctcctgatcccatctcctcctcgaccacgaggaagccaaacccttctttgtctctagctagtgtgcctctgctgcacgtacacgcactctctctcggctagctagctgctgctctgcgttctttcaattcagctcagctcagctccttctatatattttggcttagcttcgtcctgcggcccgaccggtcaatccatcgtcgagtccagcgcctgctcctgcctcctgcacgctgaacctgtagccgcagaatatgcctccagccgtcctccaagagccatgaataacaccagcaatagcaccaagaagcacagcctcctcgcgccccaggccaccgtggacatgtctcgcctgcaccaggcctacgaccgcggctagctaataggccgggttgatagtcttttgatcggctgtggtcgctagcttg

SEQ ID NO: 281925 - DNA, 393 bp, Zea mays
tttcggccgccctttttttttttttttttttttaagggaaaccattacggcaaatttattgcgaccgtagaccgaatcaaccaatttcacaaatgcgacaaagccatagacacaaagcactcaaaatcccccctgcccgttctgaaaagcgaaagttgacacgacgcaacgcatcctgatcccggaatcacacaacacaaacgctcacgtagctgccacggcgtaaacagcagccgcggcgagcccgagcacaagagccgccggccccccgagcgacgcaccaccagatggcaggaaaggcgtcgccttcgatccgccgcccgacgacccgttgttgcactggctgacgggtggggtctggacgtcgcaagccgcggggaggcctagcgcgcg

SEQ ID NO: 281926 - DNA, 478 bp, Zea mays
  unsure (1)..(478): unsure at all n locations
aggttttgaagttggttctggctgttgtgctctcggggttcttctctgttcttggggggctttgcttggcagcggcatgtcgaagggggaggaagaggtgtgatgagctgcctgtggttaaccaggtgtcgccgttcgatcgagcctgctgtatcagggccattttctttccagaccgattcaactccgcccgcgcctccggtgaaggttgcaacttcggtgccggttgtcatctttgagaagcccttgctgagcctcacatttgctgacctcttggcggcgacatcaaacttcgacaggggcaccttgttggcagaaggcaggtttgggccagtgtacaggggattccttcctgggggaattcaagctgctgcgaacgtgttggtccatggatcagcaatcggagaccaagatgctgcaagggagctcgagcggctgggacggatcagacatccanacttagttcccttgactggtt

SEQ ID NO: 281927 - DNA, 494 bp, Zea mays
ctcaccagctatccagatcattggctcattgctgcttccattccattcccccttccctcggcatcggccgcgcccgcccgtgtcgggcggaggcggacgcgcgcgggaatgggacgccacgcggcctccggcggcggcgtgcagcagaagctgcgcaagggcctctggtcgcccgaggaagacgagaagctctacaaccacatcattcgctacggggtcgggtgctggagctccgtgcccaagctcgcagggctgcagagatgcggcaagagctgccggcttcggtggatcaactacctacgccccgacctgaagcggggcagcttctcgcagcaggaggaggacgcgatcgtcggcctccaccagatcctgaggaacaggtggtcgcagatcgcgtcgcacttgccgggccggacggacaacgagatcaagaacttctggaacagctgcctcaagaagagctgcgtcagagcggcatcgacaccagcacccac

SEQ ID NO: 281928 - DNA, 450 bp, Zea mays
tctagatcgcgagcggccgcccttttttttttttgttggcggtaggatgcgctgggcactgcactgcaccacgcctacgttttacaacctgcaaaccacggcgcgctccgcaaatcaacatgagcagagcccaccgaggctgcaaagccaggcaacggacgacgtactccacgattaatcgggtaggacacactaataagcagacagacgagaccagaccagatgagatcgttacaaacgacgacggtggaaaatattttttttgcttgcagtagtaggatcattagtcctagctaacccgggcttgtggtagattcacggctggctcttggttgcggcggcggcggcgtactcccggcggtcagcaccgccacgccgacacggagaccagctcgccgcgctgccagtagaggcagagcgcgccgccgcgcttctcgacgcggaacccca

SEQ ID NO: 281929 - DNA, 491 bp, Zea mays
  unsure (1)..(491): unsure at all n locations
agccgctgtatccagcagcagccagaattcaggccaccaatgtctgaaattgtacaagacctagctagacttgtaaatgccaccggtgaggaatcagagtaacccccaaaaaaagcatggagccatggaaggcatacaatacaaacgtcgcgaccaagttacgtgctgtacaatttttttgggaagataattgtcttgcttggtctggggagaatactgtgaagatgtattttcctcagagagcattgcacactaatgtcagattggaatttcatttagacctggtggggaggngagggtgcagccatctgtgcacctgattgttgatcaaatccatgtaatatttttgcagacatgatattatatatagcgacagtggncggagcctccgccaagcgccaaggcccggcctgatcgggcacgtgtccaggcttncgccgaggaacacttgggtgggctctcgatcggcctagcaacggatgtttggatgg

SEQ ID NO: 281930 - DNA, 555 bp, Zea mays
tttcattcaacagacgccgccgccgtcgccgccgcccctcatccctgtcccgtcccgtcccgcgcgcggccgccgcatccgtccgggcctcctcgtctccccagccccgctgccgccgggttcatcagcagaagctgcttgctccgccgccgccgccctcttcctcctctactggttgtgtctcccaaatatcttgcctttttgttgcattggactcttctgtggttagaatggcagcacccaagcccatttctcgtcttatttctcacgtcattcttgatttggatggcaccctcttaaacacagattctgttgtaagtaaggtagtaaaaccatttattctaaagaatggaaaaacgtgggatagcaagaaagctcacaagctagttgggaagacaccttatgaagctgcagctgttgctttagaagactatggactcccttactctacagaagagttcctctcgatgattactccgatgttcagtgagcagtggtgcatcttaaaaccacttccaggagctaatcgactgataaaacatttaaagactaacg

SEQ ID NO: 281931 - DNA, 496 bp, Zea mays
ccttcacgtgcccacatcggactaggaacaaccgaacaggaacccattcccaattcccctctccggccttcgccgccgccaaggcacgaagccagagcgcgacgacataaatcgtgggagcgcccgcctttgaatcggtttcccccacgccatgccctccccctgcgtctcgcaccaacagcaggtccgtctccgtctccgcgctgccagccgccttcccgccccagacacggcctcgttcgcgccgcccgcgccccggcggcttcggatggcgcacgcggcgatgagcgccaaggcgcccctcggcgtggcgccgacggaggagggggccgggacgccggggcagcaggccgtgctggggtagatggggaggattgcccgcgtgtggtgcgcccgccacgggctcgtatcggagatcgcgccaccagagatcaggaacggtccctgcggttggcctggttcacgctccattctcgctgttccagcgccgtttccg

SEQ ID NO: 281932 - DNA, 657 bp, Zea mays
ttttcgcgtggggcagcaccaactttcctagctgatttgcatatcgcgtggaagagggagaaagagagatcagcgaccgagcatggacaagagggcgtcgtccacctccttgctcgtgctcatcagcatcctactcgctctggcagaccccgtcgcagcggggatgaaggccacgttcgcggcgggggtgggcgtcgccgccgacacggcggtgctgcggcatctgatgacgaccaggctggaggacggcgtggcgcccgagctcacggtggatgtggagcttcaccgccgcgtcctggccggcggcttcgtgaaatcaaacgtgctgaatccagacaaggcggcctgcataaagtcgtgcccagcgcgcgggcggccgtacaccggccggggctgcagtaacatataccagtgcccccactgagctagcagctccacaagtgattgctctgcccacgggtactacacgcatgcgtgattgttgatcggttgtgttgtgcatctgctggttggttcgaccatcgagatcttggttgctagctagtagcatgtcttgaaataattatgggattatttacttgattgtgtcagctaattgattctgttattgaagtaaaaagaaaaaaaaaaggggggccgccgattattggcctcgtc

SEQ ID NO: 281933 - DNA, 485 bp, Zea mays
gttctagatcgcgagcggccgccctttgttttgttctttttttaagggaaaaaccacatatatatcatgcatccatcggcgactttcacagttacgacacacacacacacacacgactacacagtccattatttacagactaaaataccttaattagctagctgtgtgtgcttatggctggagtagcacgcagaggaatggtgaacgcttgcgcctccacactcctcctgcaggctgcagctggctacgcccctgctttcttcctgacgatcttctgcagttgctcgcagaatgccgggcactcctccttcatcggtctttgacttctctgaagatggaggctgtagaatgtcttgttctcaaaggcggaggagtaggttgatgagctgacgagatgaaggccttcgttctctagcaccttgatgcacttggagagagggagagctgtagcggccacatcgcttggcaggctgacctgaaccatg

SEQ ID NO: 281934 - DNA, 551 bp, Zea mays
  unsure (1)..(551): unsure at all n locations
agatcgagatcctggacgacggctacaagtggaggaagtacggcaagaagtccgtcaagaacagccccaacccaaggaactactaccggtgctcgacggaagggtgcaacgtgaagaagcgggtggagcgggacaaggacgaccccagctacgtggtgacgacgtacgaggggatgcacaaccacgtcagccccagtacggtgtactacgccagccaggacgccgcctccggccgcttcttcgtcgccggcacgcagccaccgggctccctcaactgatccccggcggcccatcgcgacgtacggtccgctccaccctaccaccgcacctatctggtttcgactcccagatggcaggctggcagctagctagtcggcggtatacactagtaagtagtagtaggataggccggccgacacccgatgngtgatcggctgggggtttcggttctccgaggttggatttctcgtttgggtttctagcacacccctccgctcctccctttttccccgtccttttcctgctccgatcatgaaagggccggcggctgg

SEQ ID NO: 281935 - DNA, 526 bp, Zea mays
  unsure (1)..(526): unsure at all n locations
ggatgacacagtgatggaggaaccagatgacattgatgaagagaatggtcggaaaaagaagagcatgatgaagaagaagagaaagagggaagcagagggtaagcggaagcccaggtccaacttccaggaatatcttgagatggagatgggtggacctgtgagcatggaggaggatctagagatggagaggaagcttgcaaaaaagctcaagttgaagaaaggaaagttgggaggtcctgatgatggtatggatgacctttttgcggaccttgggtttggtggtgactttggttcagatgatggtgaaacaaaagcatatgattggaatgtgtnnggaggacactaatttagacaagagaaaaggtaaaaagaaaaataaggagaaaaaggatgacacagtgatggaggaaccagatgacattgatgaagagaatggtcggaaaaagaagaaaaaaaagaagaaggatggttggagaaagccaaagaaagagcctgatggcatgatgaagaagaagagaaagaggga

SEQ ID NO: 281936 - DNA, 474 bp, Zea mays
  unsure (1)..(474): unsure at all n locations
cccacgcgtccgcatcatcaagtcaaggaacacttaacctgaagaaaaccactattgcagcagcagtatagtcaacggtgtagcagtagctgcattgcgttattggggtagtagtgtggcagtgttggactgctggtcatcaggtcatggcttcttcttcttttacttccttgtcagtgatggtgctcttgtgcctagcggcggcggcggtggcctcggcgcaactgtcgccgacattctactccaggtcgtgtcccagagctctggccaccatcaaggccgccgtgacggccgcggttgcgcaggaggctcgcatgggggcctccctgctcaggctccacttccatgactgctttgtccaaggttgcgagggttcggtgctgctgaatgacacggccaccttcaccggcgagcagaccgctaatcggacgtcngctccatccagaggcttcggcgtcgtcgacaacatcaagg

SEQ ID NO: 281937 - DNA, 457 bp, Zea mays
ggcggccctggctagtggtacaatgggaaagctgcatggttgtgtgttaattgcgggcactggatgcattgcttatggagttacagaagatggaaaagtagcaagagcagctggtgctgggcctgttttgggcgactggggtagtggatatggcattgctgcacaggccctgacagcagttataaaagcatacgatggtcgtgggccacaaactagacttacaagagatatccttgagaagcttgatctttcttcaccagatgaaatcatagggtggacatatgcggatccatcttgggctcgtattgcagcacttgtacccagttgtggtatcttctgctgaagatggtgatgaagtagctaacaaaatcttgcatgattcagtccaagagttggctgacactgtatagcggttggtcagcgtcttagattgtgtggcgaagatggaaaggacatg

SEQ ID NO: 281938 - DNA, 510 bp, Zea mays
  unsure (1)..(510): unsure at all n locations
cgtttctcctggctaaactacctctcgctccctccggctccgatccagggtgcgagctgagcttgggctagtttagtctccccaagctcgtggcgcagagcagactcgttggtggaggtggattagtagccaaggctttgcagctaggtagggttttgtagctagttcctcgcaggctcagctctctcatactagctagcgtcggtcagtcgggcgagcaggccaatggtcatggcgaacccggacatgctgccgccggggttccgtttccacccgacggacgaggagctgatcctccactacctccgcaaccgcgccgccaacgcgccgtgcccggtcgccatcatgcccgacgtcgacatctacaagttcgatccatgggacctgccatccagggctgcgtacggngacaaggagtggtacttcttcagcccccgcgaccgcaagtacccgaacgggatccggccgaaccgcgcggcggtgtccggctactggaaggccaccgggacc

SEQ ID NO: 281939 - DNA, 471 bp, Zea mays
ttcacggccacacctgccctccattccatccagcacctagaaaaaactaatcgcaattagttgacgcataatattttgagggaggagaaggggggaattgactagttgaccaatcgcgagtggcgatgatgatgcagttgggggccaggagtttggtgaggaggttctcccgtctcgccgcggcgggggccccggccgagacgacgtcggctggcgtgccgcgaatgccggcgttcgaccacgtcccgctgccctacgacgggccgagcgccgccgacatcgcccgcaagcgcgccgagtacctcagcccgtccctcttccacttctactccaagcctctgaacttcgtggagggcaagaggcagtacttgtacgacgagcacggccggcgctacctggacgcgttcgccggcatcgccaccgtgtgctgcggccactgccaccccgacgtcgtggacgcgatcaccaggc

SEQ ID NO: 281940 - DNA, 483 bp, Zea mays
tttctttaaatcgagcgccgcttcctctccgccgctttctctccccttcactcgagcgccgcttcctctccccttccatcgagcgcagcgcctgcgccgccgccaccactccgcaccgccgccagttccccacttcctccccacacccgaatcggattgaagccagaaggcaaggtgaagagtgggcttgggtaacggttgcaaagagatatccccaacagttgcagtcactcgcatccagtcggctcagctatggaggaggactcatcaccgatggagccgattaggctgcgcgcggccgaggcggcggctggggagctgaagaggctgcgcgaggccgggcagtctcagtacatgtaccggtctatcgccgacgccagggttgtcggcggccgggtctgcctcttcgccgtcgtctccgagatcggcgctaccgtccacagcccgggaccggatttcactgttaccgtgagggtaatagat

SEQ ID NO: 281941 - DNA, 743 bp, Zea mays
cggctcgcgcactcactcagctcgtcttcttcttcctccgctcggcctctcgttgcggccagggaaagagctagctagctagcgtgtgctcgatcgatggcgaaaacgacgatgagcgcggccaagaacctcgtgaggctcctcgtcctcgtgcaggtgtccttaggccttctgggcggcgtcgcggcgctcagcttcgactactacggcatgacctgcccgttcgcggagatgatggtgcgcacgtcgtctacgacgccctcatgaaggaccccaccctggccggcagcctcctccggctgcacttccacgactgcttcgtgcagggctgcgacgcgtcggtgctgatcgactcggcggacggcaacacggcggagaaggacgcgcaggcgaacctgaccctgcggcgcttcgaggtgatcgaccgcatcaaggagctgctggagtcgcagtgccccggcgtcgtctcgtgcgccgacgtcctggcgctggcggcgcgcgacgccgtgctcctggcccggggcccctactacggcgtgcccctggggcggcgcgacggcacgcggtcggtggactccgacaccttcacggcgctcccgccggccttcttcaacgtgaccatgctcatgaagctcttcggctcgcacgggttcacggtccaggacatggggccgcttgccggcggccacacctgggcgtcgcgcactgcgccaacttcagggccgcctcgccgagacggacac

SEQ ID NO: 281942 - DNA, 591 bp, Zea mays
tggcgaggtccgggacggtgggcgccctcggcgcattttcccgcggtcgacgcgcatcacgtcgtccaactacaaccacgctgatggggctggaggtacggagtccagatggtggcggcaaacatgcagggccacgtggaggaagctgtggctgacgcaaggcatgttccgggcgaacggcggctgcggctacgtgaagaaacccgacgcgctgatgcgcagcatagccgttggacttcgacccgagagccgagctgccggtgaagacgaggctgagggtgacggtgtacatgggggacggctggcggttcgacttccggaagacgcacttcgaccggtgctcgccgccggacttctacgcccggggggggtcgccggggtgccggcggacacgaggatggagcagacgcgggtggcgatggacagctgggtcccggcgtgggaccacgagttcgggccgttcccgctggcgatgccggagctggcgctgctgcggggggaggtgcacgagtcggacaaccaccagaaggacgagttcggcggccagacctgcctcccgtgtgggagctccgccggggatccgctccgtag

SEQ ID NO: 281943 - DNA, 493 bp, Zea mays
cgtcagcacgtcctagtgtcccacacaccgggctccacgcagccacgggcatgtgggccctcaacctgaaggccggtgggtcttgcctcacgccgaggcatccccagccggcagcgcggtcgtcgcttgccgccgggatcggctcgctggctgtggggatgaggtggatgcggcagcctgtgcggtggccgaggttggcggtgagcgcgtcggggaggaagggcaacaacggccgagaggacggcgacgagcccaagaacaaggccgcctcttctggaaaaagtgatgcatctactcccagtggagatgcttccaacgaaacaaaccaaaatcagggtgaaccaaaatcaagtgacacgatgtatatacctagcaacttgtcatattggagagatgtgagagcaagctttgtgattccaaagttggtaagaccaaactttctggtctttgctatatcatccgtactataaagtttggcaaaagattttgacag

SEQ ID NO: 281944 - DNA, 433 bp, Zea mays
cggaagcagagcaagggatggatagcaagtcggtgggaatcgtcggcgcaggcgtgagcggcctagcagcctgcaagcacgccctcgacaaggggttcaggccggtggtgttcgaggccgacgggagcgttggcggagtgtgggcgcacaccctggagtccacgaggctccaggcgccgacgacggcgttccggttctcggacctggcgtggccgccggagagcgcgagggaggcgtacccaggccaccgcagggtcatggagtacataagggtcgtacgcgcgtgcgttcgacctcctcaagcacatcaggttcaacagccaggtgctgggcgtcgagtacctcggtgcgaccgaggaaagaggtcatgggctgggatcagtggtccggcgatgggacggcgttcggagccgtgaaaggtggcgggatggcg

SEQ ID NO: 281945 - DNA, 513 bp, Zea mays
tccgtgtgtacaactataacacaatggacaaggtcaaggtttttgaagctcacactgattacattagatgtgtggctgttcatccaacccagccctttgtgatatcatcgtccgatgacatgctgattaagctgtgggattgggataaaggctgggtgtgtactcaaatattcgaagggcattctcactatgtgatgcaagttacatttaacccaaaagataccaacacctttgctagtgcttccctggatcgcacaataaagatatggagtcttggttcccctgatccaaatttcacactagatggccattcgaaaggtgtgaactgtgttgattactttactggtggtgaccgaccatacttaattactggctctgatgatcagactgcaaaggtttgggactaccaaacaaagagctgcgttcaaacacttgaaggacatgcacataatgtttctgctgtatgtttccacccagagctacctataataattactggttcagaggatggga

SEQ ID NO: 281946 - DNA, 444 bp, Zea mays
tctagggccacggatccaaccgccacgccaccggttccgaagagcagcgggtcgccgggagcaaccccatgacttcgatcggtcgtgacctgaccctcaattgcctcctccggctatctcggtccgactacggctcggtggcctccctcagccgggacttccgctccatggtccgcagcggggagatctaccggctgcggcgccagaacggggtggccgagcattgggtctacttctcctgcaacgttctcgaatgggatgcctacgacccataccgggagcgctggatccatgtgcccaagatgccgcctgatgactgcttcaagtgctccgacaaggaatcgcttgcggtgggcactgagctgcttgtgttcgggatggcgcgtattgtcttccgatacagcatcctgaccaactcatggagcagggctgatccgatgaact

SEQ ID NO: 281947 - DNA, 475 bp, Zea mays
cctttgtgtccgttcaaatgacagcgaaagcagaaagggtactgttttagaagctgagctccaagtagatgataatctggtccaagaagatgaattcgttgttgccaaggaggacaagaagccagcggttgccacagatgcttctgttcaagtagattgggtgaagacagacgaagctaaccctcaaaagtccaagttgcatgaggaaatggaagttctagacgaacttcttggaaaagacaacatggagaacagcggtatttcgagcactgatgagaattatgctgaaaaagctggaggagatgatatcttgtttgaggatggcgttctgattgagaatgggttagccactgcttatgaacatgatttgctttggggttggaaggccctgcagcagctgctgatgagcctgggtttcaaaatggatacaacatgaaaaggcataatctattgccatatatctaatgttcgtatg

SEQ ID NO: 281948 - DNA, 692 bp, Zea mays
cctccggcatggcttcctttctgcgcatagtggcggcatctgatgcatagttcgacggtccctcgcgttgctccggtatgtcgtgttcctctcatatttcttcgtctatttgttggcctattgtagaattgctttgcttggttccccttctctttatacagcacgtgggagagcgccgcagctgctgcggctcgcggctggatgtggcggccatggcgtggcgacctgtggcaaatggcggcatgaacaagaagctgatttgaggagtcgtcgctggactgggagaagtacatgaaggacaataacaaaattctcggagaatttgagtgccttgacaaatcaccatttagatactttcttggggaactatatggtggcaattcactgggaagcacaattgcagtgggcaatgagaagaagcggcagcgggtgtacaacactatgtttcatgtcccatggagatgtgaacggggaaattcagagtcgtgttcgcctcaattcctgcacccatctttgcagctctatattgttcaacaaaagatttgggaactgggatagctgaagatgcctctactgaagatgatgatttcagtggcgacctaccaccagagtttgaaaatatcatgatattcaatggtgttgaaaccgagagtgacattgctcctccagtgctcgaggaaaacaaggatgct

SEQ ID NO: 281949 - DNA, 765 bp, Zea mays
acagacacgcgtccgcggacgcgtggcgaccgtgggaagctgtcagcaagtgcacagcatgcgcacagaattcagagcttacaaccgcagaatatcactgtcgaaactgtggtgatattttttgcgataagtgcacccagggaagaactcctctgactacagatgcagatgctcaaccagttcgagtttgtgacagatgcatggctgaagtaacgcaaagacttaacaatgcaagggaagtggctaatcgacctattgttcacagccacgaggatcttgccaaaaaacttcaggaagccatggatataaataaaaggtcgtcttcaggaacaaggtcttcagatgtttctggcaagcggatgcgggaggtcgcatgcccaacctgcacggtccatcttcaggtcgaggttccagcttctggttcggagacgatagagtgcggcgtatgtcagaaccctttcctcgtcagcgcccgttgaaccgagttcagcggcttcaggcgccgtgcggcggagtcttctcggattcgcaagcgaagagtcggtcctgttcaatcgagcctggcgcttgaattccggctatccctgtctgtctgtaccctaattctgcacggaagtctgtcactgcaagttgttagtaagttatatggatgagtaatgagttgagtcgtttgcaagttgttagtacagttgtgagttgctttgagaagcaagcagggtcatgtgtttgtactgccaacaactaactttgctgttgttccatgag

SEQ ID NO: 281950 - DNA, 393 bp, Zea mays
gtacgcgtccggattattcctttcttctcagcgacaccgcttgataccttgcgatcccaagatggcatcgccgccgatacccacacagtaatcctctcctcgctcccctgtcccctctctccccgccgccgacgccgagcctactctgtccatttccggactcgccgtccctcgcgggccggttcggtccgagcctgcgccccagccgcgccgggatccgcgagagaaccgcttgccctccgtgctttgcgggcggtccggtgactggctttgggattcctgtgccggggggctcgtgagcgcaatggggctgtttgggtgaactagggcttgcttctgtgaattctgtgagggtgagcggagctgtgggagggaggatgcaagggaaggcac

SEQ ID NO: 281951 - DNA, 855 bp, Zea mays
gttttcttgcttccatggccctcggcttctccagctgccggtgcttgccctctgccatggccgcgccggattgaagcccctgccatggcacttcgcttcctctgcgacgttctcctccctctaatctttctgctcgccggcagtaatatccagtcgcgccctgggattttgcccgaagctatgcacgcccggtcgatctccctgctccagcgctgcgcccgactccagccagctctgctcctctttctctctgctcggcgtccttcctctgcccgctgagtccctccatcgcctggccgcgcccagcttctttgctccgtgcgcgcgcctgctcctatgcggcgcggaacttcctctgcgtccaggtccctcagctcgcgtccatgccgcggcgtcctggtccctacttgaccgtgtcactctgcgctcgcgtcgctgtctggttccgagcgcctgggtcttctttcccctgcgctcggtcatagtcgctgcgagccgtgaaactccctgtgtcgagctcggatccctgcgcagcggagcttttcccctagccaagatcgtcattgcgcgcagattttctttgctgctcgccgcgctcgattcgtcgtgcgctgggcgctgtccggcgccggtattcgccgaccccgcctcaccatgggtgtgtgtcatcaatctcgccctgttctgtccactcgatgtcgcgtgcttctgtgccgtttgctacgcttgggcacatccgtgccattcgtgttcgacatgtccctggcacggttgtttacagctgctcggataaacttcttctgttcggcgtgttcgccatcgaccgcccccggtgcttgacgaatggctggaacc

SEQ ID NO: 281952 - DNA, 820 bp, Zea mays
ctcacgcgtccgcccacgcgtccgcccacgcgtccggacgcatctcgaactgtagggaattcgtgatctcaattccgtgctctcgagataggtcatcccctttcacctctgtcccgagagccaatccgcctacagatcaagccttacaaaaccccacttaccacgataccacctcgaccctaaccggctaatcgacctgagatcgatctcgagtgacgaaattgacgacaggaagtaagatccggcaagatgttcttcttcttcgtaggcggcgtagagcagggggccgggcgggtgctcaaggaagcggcggggcggtgcctccggtgcggcggcgccgcggacctggtggagacggagaaggtcctcaagctcttcttcgtccccgtctggcggtggccggggaaggaccccgcgttcctctgtcgcgagtgcggcctcctcgcaccgggctccctcggcgcggagtcgggaccctcgctgctgctccgggaggcaaggtgcggcgcgtgcagccgcgctgtcgatccgcagttccggttctgccccttctgcggctccgccctctgaagtgattgccggtggcgaactggcgatggcgactacatgtctacatagcagaggtgacgccttttgccaatttggttttactagtttgtacactcaggttttactcgtttaaaaactatgtatattatcgcaaaaaataaaggaaaaaccccccccccatttcattttgttgtcagattgcctagatgttagctaaatagcattgccgagtgattagtggcttcgagcgttgtacttgtacatttgtgat

SEQ ID NO: 281953 - DNA, 559 bp, Zea mays
tcctcgcttccgcccacgcgtccgtccacgcgtccgtccactccaaattcctctctcctcgcgctctccctcgccgccacccgccatgctcgcaactccatgagaacgccctggctgctctccccacgcttgcccacgccgcatcctctccctccccggcgcccctacgtcgcggttcgcggtggctcccgctgccgcgctcgccacacggagtagcgagggtgctacttaccaccttaccagcgttggagaccgaggtggcggctttgccggacaagggtgatcctccgcgggcgtcgccgccgcaaagcagatggacgcagagaggatgaatgccctggaacagatgttcaagcgactggccctcgccgacgacactggtccaaaccggcgaagacaggtctatccacgttgacttaatttcttcgcgttgctcaatcgtcaatcaacgacttccattctcctcgctagctccgcctgtcgagagttccatttcatccctacggtcgtccactgaagcttccagaatccagacgaggctagtccatgatgccaggat

SEQ ID NO: 281954 - DNA, 479 bp, Zea mays
cggctcgagctctcccctcctcacacaggcacacacgcactttctgtcagcttcctcccctgacgccgataagccagcccgtgagccaacagtggtgccagcggagcggcccgagcggcgaggatgcacggcgcggcgaggaagctcatgtgggggaccagcccggaccggcccgacgaccacgacgtggtcatcgtgctcgcctcgctgctctgcgcgctcatcaccgtcctcggcatcggcctcgtggcgcggtgcgcgtgcgcccgcgggcccagcgcgcaggcggtggccgccgccaacaggggcgtcaagaagtcggtgctgcgcaagatccccaccgtgccctacgccgccgcctgcagccaaggggaaggggacgacgcggaccagtgcgccatctgcctgcggagttcgaggagggcgagcccacgcgcgtgctgcccagtgcgacacgccttcacgccgctgcgtgacag

SEQ ID NO: 281955 - DNA, 518 bp, Zea mays
ggtttgtcctctccacgtggcgctttcggcccgtgaaggccgtgtgcatgggggcgactttatgcctttcatgctggatggtggagtgggactcggcaagaagccggccaacaacgctgacgctagtacctgtgcccctcgcagctgcaaaaatatggagaagcctggtgcctctgcgcagcgcagctggctgtgatgccagaagtccgtggcccgcccgcccttccccatctcggtgtgctctgctcgattcaagtatctcccctgccctctggtgtggtgtgaaactgaaatctattatgcgtggactgtcggtgtgtagactggttggtcaggacatgtttggtagtgtggacgttgtggtttgtttgtgctttgttgcatcagtcaatcagtctggtcgaacatacctggtagcaagagtagtgtgtgaatggcctgtaaaaggaacccatcatcatgatgtatgtatatatctaaataataaaagcaggaagcctgcatcagtcggtgtaatt

SEQ ID NO: 281956 - DNA, 474 bp, Zea mays
ccctcgcgtccgccaggactgatcggcattacgatgggcagaattcaggcaacgagaggcgatatgagaatcacaatgcgagaaatggtcgacagcttgataggcagccttcggataatgaaaggaaccatgataggcctgatggcagacatggcggcagggatgacgataggcaggctgataggtccgagtcaagagagctgcgttagaactggtttctgtttctcacattcgtttccttgtatgtgcagtagcaaactagcatagtagcttccgtgcatgttttgaactttatgctctgtagcgatctgcatacatgtgcagatcaccgtgtataacatttgtagtttaatgctgtgtgcatcctagttccgaatttgtaatttacttgaataaatcgtcttgtctgatttctgatgcaaagcaggggctacacgcccaggttcttggaaaaaaaaaaaaaaaaaaagactc

SEQ ID NO: 281957 - DNA, 463 bp, Zea mays
cccacgcgttcgcggacgcgtggttcaaaccatgcatgcaagtattataatagaaaaaacaatgccgctactaatcatgggcttagtcattatcctactcctaacagcaatcgcaagtacagagcaaagtcgttttttatgggcggaacagtgctcacggccacatgagaggggaggtggcaggctgcttccgttttgcgcaacatgtcacaagcacaaacagcatgggatactaggagcctagaaggaaaaaaaccctctcccttgccttgctcaatcaaagaggacaagaaccaccaaggaggctaccttttttgtgggtgggatgagatgagataatctaatcctaaatcagcatcaacatcatcatcagatcccaagagcataaagtacaggggaggaagcttgcatttctaggcatggcgcatggcggcatgttttggtggggctatttcttagatgg

SEQ ID NO: 281958 - DNA, 295 bp, Zea mays
tggccgcgagcttatctctccacgtcactcccggctgcgggtccaagaagaagaagttcaagcaggcggggaagagcagagcagcagtgaccagtgagctgcttgtccaagaatcgctcccactcccggctgtcgggagagcgcaacccagctagccgcctccgcttcttggaggtcgatggccgcgaaggggttgacgcaggtcgggaggaagagggcagcgagtgcccctcctatttgccctgagaatcccgcccgggaaccctatccggcctgcgcgagatggacgaggact

SEQ ID NO: 281959 - DNA, 601 bp, Zea mays
tggatggtggcggtggcagcaccggctcggcgaggctggatgcggtgaagaaggccgtcaagtttatcatcgggcagatccatgacaacgaccgtctcgccgtcgtcgggccgtcgcccaaccgccggctagtcatcgggtttccgagcactcacgaggctcgacagaacgcagaaaaatccgtcgacgacctggagccccgtggcgagttcgcgtccggcgccggcttggaggaggccgtcaagatcctcggggagttaccggcgacggcgagcgggagcagccgcgcgcgcttcgtcatcctggtgaccgacacggcggtgacggagggcagccgcggcagattccgcaagctgcggcgcgagctcctccccccggtgcacacgttcggcgctcggcgcggggcacgaccccagggcgctgctctccatcgccagggagtcccagggcacctactccttcgtcgacgaccagaacacggacggcatcacgggcgccatcgccatctgcctcagcgggctcaagacgtggtcgccgtccgcacgcgcgtacgcgttgaggcgcccgtcgggagcggggtcacgatcgagaggatcgagtc

SEQ ID NO: 281960 - DNA, 985 bp, Zea mays
ttgaactgcctatacaaacttatcactaaggtgctcactaatagaatggaaccttttgcccagaaacttataaatgaacatcagactgcttttttaaaaggtcggagcatcatgagtggaattgtgacactccatgaggttatgcatgaaactaagaggaaaaatgaaacagggatctttttaaagctagattttgagaaagcttatgataaagtcaattggaactttatgtttcactgtttagagaaaagaggtttctgtgaaaaatggatgaattggatggagaaagttgtcaatgatggcactgtcagagttaagatcaatgacaaagttggtaattatattaaaagtcataagggagtgagacagggtgaccctctatcacctattctctttaactttgttgctgacagtttggctagaatccttattaaggcacaagagaataatgctattactggtttatgcagtcacattatccctaatggtctcataattttacaatatgctgatgacactatcatttgtattggagatgactttgaaaaagctagaaatctgaaattgctcctatatatgtatgagctgatgtctggtttgaaaataaactttctcaagagtgagatttttgtaataaatggtgatgaggaaacaacaacaaattttgctgatcttttcaaatgccagattggtactttgcctatgaaatacttaggtgtccctgtgagccccaatagacttcgcattgcagactggattgggcttgaagaaaaatttgataagagacttgaaacatggaaaggaaattgcctatccatggctgggagaattacccttattgatgcttgcttgactaattcacctatttatcatatgtccatgtatcttcttccaaaaactactattaaaaagctagatgcccaaagaagatgatttctttgcaaggtggtggagaaaaaaaaagtatcactgggtaaattggaac

SEQ ID NO: 281961 - DNA, 535 bp, Zea mays
  unsure (1)..(535): unsure at all n locations
tgcagatgctgcttcggacgaggcagcagtgcatggttagccaggttgctggtttgtacgctgtgagagtcttccatgatcttccaagacantgcagataaccctgtgccgatactaatggggagcatgtgacacttccagaggataacagaacattttcaggtggagatgggacacatttacccaccattatcaaatctccagaagcacgtggctggacattttttggttgggacattatgaagcataaaatgaagcaaaaaagttacaggaacaaggtgctacagaggtccgcagctgttctgggatatgcagcacatgtaagtttttcctacgaggtatttctcctgtgcagtataacaaacatccctacttatgtcacctttggaacgcatgaatttctctagagtcatgtagaattttcacacaaataaattctttttcacaggaaaaatggtcgaaacagaaaaaaaatcccttaatccaaatggggccttagttggtcttattgtcatggtcatgctgaaaggaaaaa

SEQ ID NO: 281962 - DNA, 288 bp, Zea mays
agcaagcgcgaaataaccaccgtttgcttgcagctcgcgaatctgcggcccccgttccccgacccgacacggcacaccactcgctccagtccgccttcatccaacggttcccctcctatttgccctcggaatcccgcccgcgaaccctagccggcctccgcgagatggacgaggactgggagctcctcctcgcgtcccccaaggcggcgccggccgagccgtacgccggcggcggaggagacggggatgtcgacgccggcgccatcaagcacgactacttcgacctcg

SEQ ID NO: 281963 - DNA, 848 bp, Zea mays
cccacgcgtccgctccctgtctgctttaggcatttaattctaccagaaaaatatgctccaccaactgaattgcttgatctgcagcctcttcctgttagtgcattgagaaatgcaagatatgagggcctctatagtgcttttaagcatttcaatcccatccagactcaagtattcactgtcttgtataacagcgatgacagcgtgttggtcgctgcaccaacaggcagtgggaagacgatatgtgcagagtttgctatactaaggaaccaccagaaggcattgtctggcgagagcaacatgcgggttgtttatatagctcccattgaagctctcgcaaaagaaagatacagggactgggagcggaaatttggagagtttgccaaggtagttgagctcactggtgaaacggcagctgatttgaagtttctggataaaggtgaaatcataatcagtactcctgaaaagtgggatgcattgtctcgccggtggtatcagcgaaagcacatccaacaggtcagcttattcatagttgatgaacttcatctacttggatctgataagggacatgttttggaagtcattgtatctaggatgaggcgtatttccagtcatattggcagtaacatacggatcgtagcactttcagcatcacttgctaatgctaaagatcttggtgaatggattggtgccacctctcatggccttttcaacttccctccagcagtgagacctgtgccactggaaattcacatccagggtgtggatatagcgaactttgaggcaaggatgcaagcaatgacaaagcctacctacactgccatcacacagcatgcaaagaacaataaacc

SEQ ID NO: 281964 - DNA, 659 bp, Zea mays
catgttttaagaaaggggccacacacttgttgatgagataagaatcctcatggtgcatgggctattgcatttattgggctttgaccatgaagtcagcaaggtggctgaagaagagatggagaaggaagaagaacatattttaaatactcttgaatggagaggaaagggattaattaagagtgcttatgatattgctactgattcactcacagaggctgatagcaatatagagaaagtgatcctacaagagaaacatcaacataaactaagccatatcatctgtgatatagatggtactatcatggatcatgaaggtggcctgcatgaaaaatcaataggatctttgagagaggcaattgcaacaggagtaaatgttatcatggttactggaaagagtcgggcttccactattagaaccttcaagcttcttgatttccgcgaaaaaggtgattttatttcagagacttcgcctggtgtatttttgcagggttcacttatctatggaagggatggcaaaaaagttcatagagcagaattggatttagatgtctgcaaggaggcatttctgtactccttgaagcatagaattcctcttgttgcgtactgtgaggaacaatgtctaacattgtttgaacacccatttgttgaattgttgcaca

SEQ ID NO: 281965 - DNA, 562 bp, Zea mays
cggattggctactttatggcaagtggagactagaggaccttctctctcatttcgtggctgggcggatttcttttccccaaagcatagatggcctgaagatatagcttggcatccagatggtgagacaatttttgctgtatacactgctgataatggtgattctcaggtttcaatgacaaaccttatatcaggacaaaggaaagttactttcctacccgagaagcctcacacaaaaggcatcataaacgacataagtttcatgccctggtctgatgtatgctttgtaactggaggaagcgaccatggcgttatactttgggaagacaaagatgatttatggaaacccaagagagtgcataaggatttccattcatccgctgtcatgggtgttgctggaatgcaacagaaaaaaacaattttatcagttggctgtgacaagaggataataggatttgatctctctgctggaaggacagagttcaagaacctacttgatagcaaatgcatgagcgtattagcaaatccatgcgatttcaacctatacatgggtgcagacagggat

SEQ ID NO: 281966 - DNA, 382 bp, Zea mays
cccacgctgttctttcacgcgtccgctccagtcaaagcaagccgctgcttggccggccgggaaggctcggtcgcagcgccgaggaatggcggccaagccggtcaccgtcggcgacctcatccaccgcgtcgcctctgcctgcctctcgcaaccgcctgccgtgcaaccacaccttccgcgactccggggacagcgactttgacgacgacgacgacgaccccttcgccgacgccgtctccagcagcgagaaatgccggcggtccccgcccgctgcggaggtcgcggaagaggaggacgaggacgagaagctcaagatctgggaggagagggagcaggagaaggagaggctggccgccgcgtccaagggcgccgagcgcgcccg

SEQ ID NO: 281967 - DNA, 672 bp, Zea mays
atcgagtcaggtgagagggcggagcagatctcgccggccggggccatgggtgctgccggcgcgatccggcgggcggcggcgtcggtggtcgacagggcgtgcgcggggacgcggggcttccgccgcgcgctggcgcggttcgcgccgcggccgtcggcgttcggccccgccgcggacgcggaggccgcggcggtgcgcgccgtgcggaacctccggaccttccggttccactacgccgtcctgcagtgggtgctgctgctggcgtccctggcgccgcggcaccgggcctccgtcgtcttcctcatggcggcgtgcaagggcctcctcgtctacggcggcctcctcaaggcgttccccaactcggcgctgctccggaggctcctccaccgccgcctcgtggccgtcgggttcgtcgcgctcgtgctcgccgacatcgtcgccgcgggcgccgtcggcaacctcctggccgcgctcgccgcgggcgtccccgtcatggttctccacgcgttcttccgcgtccgcgacgatctcgaggcgccctcgccggacccggaggccgcggccgagaacggccaggaggacgaggcctccgctgtcggccagaagaaggacgacggcgacgtcgaggctgcgcccacgctgcagtccatggcatgggctccaagaccaccc

SEQ ID NO: 281968 - DNA, 1141 bp, Zea mays
tttccgtttttgatatgtgcatgcttaaactgcattgtctcagtcttgttctagatacaccagcagtcaaccgtatacatggaatctgtagtatagctatttgtcactaccttgtcacttgggagcattgaattaaataccagtgttttatatatcaggttctgttctccaaccttgggcatgcccacccatccatactgagtactgacaccgcttgcatttggtctagatatgtgtggaagttcttgatccctcacccccttctatttttatttttttctttccagactttctatgctacaagatctgaacaatataaagtaccaccttaagaaaacaagtatattattttgattttgcataccagattttttgtgctgcaagattgtacatttgttaattctgaatgtgttgcctgcaggaggacccgactatgattgaatcctacaataacaagagaacatctggctgatctggtggtgaaggagttacatctacgctaaccatggaggaaccgactatgattgaatcctacaataacaagagaacagttggctgatctggtggcgaaggagttacatctacgctaaccatggtatgtaataattgtgcttattttttcatcgcgatttattgtggaggatgaacacgatgttgtctggttttggttgcaaaaggattaaccgcatgagtgcccaatttactcacaatactttgtggtaacagaaaccattgccttgactgattgttataaaagatgtttagctgttgttgattagcacttgactaaaatattattttgttgattttgggcagctcaaggtcattggtgatggtggttatccaaacggccactatgacaaggatgatcatcaatgaggccttgtgtcgataattataataacaactttgtgaaacatggttttgccccatctttgcagcatcatattgtcctatagtattgtaattgataagtgtttgagcatgaagcaggttaggtggtgttctacacctacgaattacgcaatcacatatagattgtttctatgggtttttagccatgtactgtagtgaatctttattactggcatacaacatctcacaacagttctaataatgagcaataaactgatatgtattt

SEQ ID NO: 281969 - DNA, 849 bp, Zea mays
ttttatttccttgatggaaatgtaatttatttgaatcgagaaagagggcacatcattgacctgattctccaagggaagaagcaatttgacatggatcctcccgccggctctctatcggtactaaagtgaggtgccctgcaatttagctctgactctagggatcacaccaagtatttggtcagatacaccagcagtcaaccgtatacatggaatctgtcgcatagctatttgtcactaccttgtcacttgggagcattgaattaaatatcagtgttttatatatcagactttctatgctacaagatctaaattgttctgaacaatatgaagtaccaccttaagaaaacaagaggacccgactatgattgaatcctacaataacaagagaacaactggctgatctggtggccaaagagttacatttacgctaaccatggaggaaccgactatgattgaatcctacaataacaagagaacagttggctgatctggtggcgaaggagttacatctacgctaaccatgctcaaggtcattggtgatggtggttatccaaacggcccactatgacaaggatgatcatcaatgaggccttgtgtcgataattataataacaactttgtgaaacatggttttgccccatctttgcagcatcatattgtcctatagtattgtaattgataagtgtttgagcatgaagcaggttaggtggtgttctacacctaccaattacgcaatcacatatagattgtttctatgggtttttagccatgtactgtagtgaatctttattactggcatacaacatctcacaacagttctaataatgaccaataacctgatatgtattt

SEQ ID NO: 281970 - DNA, 609 bp, Zea mays
cggacgcttgggttctaaacatccacctgtggtgttgaatgagccgaatccggtgaaagtctctaccgagccaaagacacatactggtggtgttatcatcagcagctctattgttcctactgaaggtactattgtaactgttggaagtataactgttggtggaatttcacttaaacctatgaatcaggagcgggttaaatcaccagatggaacaaataatactgaaagtagccaaccaagacctcagcaaacgagaaaatctggaaagcatcagcatgttcttcggcctgttgagaagccacaggggaatgatggtgtcttgtgtgcaccagttaagccaccagtgccgaatgagcactctgatggagccatgccgactgcagcagtagctgacctcactaaaccagtagggaaagccataaatgatggggagaatgtgacaagaacaaagagggctgaaatggaaagatacgttcctaagcctatgtccaaagaactgcaacaacaaaatccaagtgatgataaggaagcagttgataagcccagtggtgctaaatcacatgctgcagccgaacccaagaaaactagcaaagcacatgggggtaaatc

SEQ ID NO: 281971 - DNA, 450 bp, Zea mays
ctcgtagtgcccctcgcattcctgttctcagcccgctctcctctctgctcggtctccccagtacttgcctcgcctggacacgccgttctgttgttaccacttgccagtcacgatctcttccttcctggagtttgcgtgttgggagtccgtggatcatggctgaaactgcacgcgttctcgtctccttgctctggcacatcattgtgtggagctgctgaacgccactatctctagctcctgtatcgtcgtgccggcgctcggctccccaacttcgctgttgcctactggacctgctgctctctctgcaacagctcgtcggctccctagaaattccccagccgtcgcctgccttctcgcggacgttctccctcgtcgcgtccgcagcgctaccgcgacttcaacatcgcccaggtgccccctactcggtttcaggccattgcaccaaacgcg

SEQ ID NO: 281972 - DNA, 497 bp, Zea mays
cctacgcgtccgcccacgcgtccgccctcgcggccgctttgatgaccacaaatggaagaactttactattgaccacctgatgttagggcaacatctgttctcatctactggaataggctgaatcaagacggatgcaagatgcaaaaatcaatctgaccctgaactgttgcttcatatgcaagtggctataagcctaaaacatacgcatgcatatctgcatattggcttttttctatgcttgagaaatggattccagtctgaggtaagacgcctgagatcatcacctttttttcaacatggctttttggtaattgttttgctaatcttctattacaattttggtacatgtctaatttaacaattctgtattggaatagtccttagtccttataatatttgatgtttagagaattgtattttgctgtttcatttcggctagcttttggtgcctgtcttttcttagaatatatgagtttggtgtggggttaaaacactta

SEQ ID NO: 281973 - DNA, 732 bp, Zea mays
gtcggcgtcggcgtcgtccacggacggcagcgggcagtcgtcgccggcgccggcgcagctgctggaggagtggcgggaggcctgcgccaacgcgttcgaggccatggacaaggagctcaagctccaggccaacgtggactgcaacttcagcggcaccaccgccgtgtgcgccatcaagcaggggaaggacctcatcgtcgccaacctcggcgactccagggccgtgctggcgaccatgtcggacacgggctacctcaaggccgtgcagttcaccaccgaccagaagcccaacgtgccccaggaggctgagcgtatcaagcgctgcaacggccgcgtgttcgcgctcaaggacgagccgtcggtgctgcgcgtgtggctgcccgacgaggactgcccgggcctggccatggcgcggtcgctgggcgaccaccgcctcaagcggcacggcgtggtgtcggagccggaggtggcgcaccgccgcgtcgcgccgggggacttgttcctcttcctggccacggacggcgtgtgggacgtgctcagcaacgaggaggtggtgtccatcgtctgcgccacgccaaggaagcagcacgcctccaaggccgtcgcccaggccgcggcgcagcgctggcggaccaggtacccggcgtcccgcgtcgacgactgctccgccgcctgcctcttcttgcgggaccaggactgggccaccagcgtcgccgccgcgcccaagaagaa

SEQ ID NO: 281974 - DNA, 751 bp, Zea mays
tttctcgcgtccgcccacgcgtccgcccacgcgtgcgccccaagcaaccctagctctcccatcccctcacgccaggaaacgtgttcttcctccaggagcccccgatccgcaccgccgacggcgtcatctgcgccgccacgacatccctccgcctgcccaggaggcccggcaccgctcgattaccgcacggcgacaccacgctacccttcgcgaccacctcgccgctgccatcgccaaatcgtgctccaagacggtacgaagagctcgcgagacacaagagggatcacgacgcaagagagaagaagaggaatggaagatgcggaagcggcgaagaaaagtagcgccttttaaaaaggaggcccacacggataagcaatgtcgagagatgtctttaccagataagcaatggcacgatacatgaagactggaggtatgcaatgactgagttgcaatctctcgtgacagaaagtcgctcgacatagatgtcatttggagcaatgggttttcctatcctcctcaatattttgaaagaagaccgtgaggatgtagagcttgtgagaggtgccctggagacctttgtgagtgcattgactcctattgagacgtcacaagggccaaatactccgcttcaaccagcgttagtgaattctaatacgctatctcgagaaactgagaatatttctcttattttaattttactgtgaattctgcaacagggatgtccccatcgtccacgtcgacatgcacaact

SEQ ID NO: 281975 - DNA, 604 bp, Zea mays
cggacgcgggggcggacgcgagggaggggactcttttgcctactccgctggcttgttgccacagactgagccatgccgtgcgtgcgacgaccagtggaaaccgctctcgagcgcggcgctgcagcaggcacaggcgaggtcccgctcatccagatcacaccagcccatcgacgacagcaacaccttctcgggcgccgccgccgcgacgcagtcctcgcacatgtctccggcgtccacgagctagcggtgggtcccgaagaggctgccgatgccgaggcgggagcagagcgcgcacggcggcgagagatcgaagaagccggcgaaccgagctatgaggattaggattttggttttaaggggcttttttcccgctcccgcttccttataaaaaaattatttcaatggctgtttccttagagctagtttgacaactccattttcccaagaaaaaatgaactaatttcccttgaaaaatgaaaatcccccctatattatttctctatgtgtcgcactacattataaatatcaagcaattgtaatggtgcttcttgcctttaaattgcgtattaattcttgcagcagttaagtctacatgcacatttgg

SEQ ID NO: 281976 - DNA, 634 bp, Zea mays
tttctacgcgtccgctcgcgccgtacatcctgcctcctcccgcgcgcgcgcgcgcgtgcacgctagctagctgccggtcgcctcgccaccatggtgttcgacgcgagcggcagcaggtcggcggcggcggcgtcggggaaccctctccgcgtgatcctgacgcgcgggttcgcgcggcaggtgctcgcggggcggtggttgacggtgttcgcgagcctgctcatcatggcgtcctccggcgcgacgtacatcttcgggagctactccggcacgctcaagtcgtcgctcgggtacgaccagcgcacgctcaacaccgtgtccttcttcaaggacctcggcgccaacctgggcgtcttctcggggctcatcaacgaggtgaccccgccgtgggtggtgctggccatgggcgccgccatgaacctgtccgggtacctcatggtgtacctggccgtgtccgggcgcaccgcgccgccgccgctgtggctcgtgtgcctctacttcttcgtgggcgccaactcgcagtcgttcgccaacaccggcgcgctcgtgacctgcgtcaagaacttcctcgacagccgcggggtggtgctcggcatcctcaagggcttcgtcggcctcagcggcgccgtgtaca

SEQ ID NO: 281977 - DNA, 515 bp, Zea mays
gttagtatcttgggacttgaagaccaatattgagaagattgaagcagctgccaagaagaaagatgaagggaatgtgtggttcaagatgggcaagtacgccaaggcctccaagagatacgagaaggctgcaaaatacatcgagtatgacagctctttcaatgaggatgagaagaagcaatctaaagctctgaaagtcagttccaagctcaacaatgcagcctgcaagctgaaaatgaaggaatgcagtgatgcagagaaactttgcacaaaggttctggaacttgagagcacaaatgttaaggccttgtacagaagggcccaagcatacatcgagcttgtcgacctagagctagcagagttggatgtgaagaaagcactggaaattgatcctgataacagggatgtgaagctggtgtacaagaccctgaaggagagaatgagggagtacaacagacgggatgccatgttctacggcaacatgttcgcgaaatggaggaagcttgaacagctgcaga

SEQ ID NO: 281978 - DNA, 550 bp, Zea mays
gatttactttggtgatcttacgtgtctggcatatagacaccgtacttactcaaaggtgattgagtttgttcagttaaaagaccgcttgcatcactgcatgcaatatctttctgcaaaatcagattctgttatgctacatatcacgcagaaggcggactctcttgatgaagtggactctattctagaaagtgttagccatggcacaaagctggttgagctatctaatgaggatagcatggtggacttaaccttcaacgaagatcttgatgcacggccttggtggacgccaacaagcagcgttaattttctttcagaaccatttgatgaaagttcaacacctgcaagctatagggccaaaatgtgcaagcacaaatctaatgagaaggacggtttgaagctgaaagatgtagagagaaaatctcttgttcctcgacttgtttatctttccacacatggttgtgtgccttttctcagggagagtgaatcaaatggtgcttcctctgatgtaactgcttctggggagatgaaaactctgcttgataaatatgct

SEQ ID NO: 281979 - DNA, 448 bp, Zea mays
ataacaactctcgatctctcggaaaaaggtgaggcccaacacctctgcttcgcaccagtaccacaacgccacgacacgccggcgaggtggacgagcggcggcgatggcgggcggcgaccgggagcgagacgcggacgaggagacgaggaatcagatgatgcagaaccttttcggggaccagtcggaggacgaggacgatgcggacgacgacgacgtcgccgagatggtcgatgaggacgacggccaccagccgcagtcgcccccgcagtcgcccccgcagcgccaccaggagctggacgacgatgcctacgacgatgaggaggaggacgcctgtagccacgcgcccgcccgcgcaagcggataccactccgaggaagtggatggtgaggcagagaatggaggggaagggcgaaggcgaaagcgaagggcaagttgtattcgacgagga

SEQ ID NO: 281980 - DNA, 374 bp, Zea mays
ccttctcgtccgggacctcttaccggctgctcaccgaattcgcttttgtgaacttgcgtccaaaagctcatcttttgtgatggttgatccgcgggaggcaatgcagaatggttatcagcgcactttgaccgttctttcgagaatacgaaactcactatgcaaggatggtgtagctgaccaaggtagcctcaaggtaatgcttttatgtggctctgacttgctcgagtcattcaccactccaggtgtttggatcctagaccaggtcagaaccatatgccaggactttggtgtcgtatgcatacggcgagaaggaaaggatgttggaaaattgatagacaacagcgatatattgcaagaatgcagggataacatta

SEQ ID NO: 281981 - DNA, 394 bp, Zea mays
gacacctcgtgccgccgcagcgcttgctttcgtcccccttacgccactcccacttggccacttcagacaccatctccctgaacctagtggctaacctcctcaccgccatgggcacccctctcctcatcccccttctcgtcaccctccagctgttcactacctcctcccccgcggtcgcgtcgtcacacatctccgccatcatctcgcagtcgggcctcgacttcgccaaggacctgctcgtatcccatgccggtgcgaccctcacgcccatgaacgtgccggacatcgagaggaccatgagcatacccctcgtgggcaccgtccgcatggccgcatctgagattgtgctccacgagctcgccgtcaccaactccaccgtagctgtgggggacgc

SEQ ID NO: 281982 - DNA, 404 bp, Zea mays
  unsure (1)..(404): unsure at all n locations
gttcgtcctgcgaatccagtccgtcgacttccccgacgccgccgtggcagcagtcgccgccgacgaagtcggcatccagcagcggcggcgttaccacctctcgtccgctctccagccaccctcccccctctaccaccacatcgtccatacttactctcgagctccccggcgcaaaccccgtcgcgcccagccgaagccctaggatcctccacacccgcggagtcatccacctctaccactcgtcgtgctccactggcacctactccttctacgcctgggnggtcgcagccacctgttcctcctcatccgggccggccaccccgcagcccgcctccgactcgcacctgcccgtatgtcgcggcacgcgcctcctggtgctcgccgttccgacgcgcgtttcgccg

SEQ ID NO: 281983 - DNA, 679 bp, Zea mays
cccacgtttccggaatgaaatgggcaaacgcggtctgacaccaaagttgcaatcctacaaaagcttgcttgctgcatctgcaaaagctgagctgagggagcaagctggccagatttttgaggaagtagcgatctaagacttatcaattgaatagatcaatctatcatatgatgatgaaaatttacaggaatgctggcaaccactccagagctgtgaacttgctagcagtaatgaaagaggatggcatagagccaacaattgccactatgcatattctcatgacttcttacgggactgctggacaacctcgtgaagctgagaatgtactgaacaacttgaaatcttccagtttggaagtcagcacgttaccatacagtactgtctttgatgcttacctgaaaaacggtgactacaatcttggaatcacaaaactgctggaaatgaaaagagatggtgtagaaccagatcatcaagtttggacatgtttcatcagggcagctagtttgtgtgagcaaactgctgatgctattcttcttctaaagtctctacaggattgtggatttgaccttcccattaggcttctgactgaaaggacaccatcactgttaagtgagattgccaattatctggaagagcttgaagcattagaagattctgctgctttgaactttgtaaatgc

SEQ ID NO: 281984 - DNA, 380 bp, Zea mays
attacattcaacatggctgtcatcctatatcatcttcatgactatgaatctgcactatctgttttggacccactgtaccgaaacattgaaccaatggacgagccaaccgctcttcatgtatgctttctattattggatattccattagctttgcaagatgcaacaaaggctgtggatatagtacagtacttggaaaggtcgtttggagtagctaacacaatgaacccgaatgaaaatgcaagcatagctcagcagcaattagctcaagcgaagcctcctgtgaaaattagcatgcctccagattccgattcaaatgcttatgctggtggatatgagaacctttcgtcaggaattttccagatgagcaaatagattttgaa

SEQ ID NO: 281985 - DNA, 1023 bp, Zea mays
cactagtacgctacgcacctttccttcgtgtaataactccagctacttcctgtctagtgtctccgtcgctgccagccagccacagcaagctccgcacgaccgccggtccgccgcctaccagagcgagctcatctctcagccgcgccgggcggcctcctcgtcacgccggcgcagccgcgcttcgttccaccgtagtttgcccggccgtgctggggcaaaaaaaggtccgggcccacgtgttcccagacggagcgagaggacgtcgatccgtcaggccatcagggaccagaccagacaaagccaaaggggccgcggatcggtaggcggccggcgcggatcggaggaagaagggaggaggaggccatccagttggagtacttggagaggtagcaggacgacgatgcttggacgccgtcccctcttcgtgctcttcggctcctccatcgtgcagtacagcttcagcaacggcggatggggcgccgcgcttgccgatatttacgcccgcaaggctgatgtcctgctaagaggatatattggctggaacacaaggcgggctgttcaagtgatggacaaagtgttccctaaggattcagcagtgcagccgtctctggtaatagtttactttggtggaaacgactcaattgatgctcattgttccggtctcgggcctcatgtgccgctagatgagtacatagggaacatgagaaagattgcagaacacctaaagagcctctccgagaagacacgggtccttttcctgagctgcccacctctgaatgaggagatgcttcgaaactcaaccagtactatactgagtgagatcgtccggaccaacgaaacctgccgtctgtactctgacgcgtgcgtagctttgtgcaaggagatgcacctgaaggtggttgatctctggcatgccatgcagaagagggaggactggaagactgcgtgctccacggatgggctgcatctgcctgaagaagggagcaacattgtggtggaagagatcctgaaggtgttgaaaga

SEQ ID NO: 281986 - DNA, 420 bp, Zea mays
tgttagcgccgccctttttttttttttttttgttgttttttttttttttttttgggaaatcgaacaacttttgcaattctttttaataattaattattaaaataatattttaaaacaatcagcttggttgcacacttcattttgttcatatgtacagatggacacaaacttcaacataaacctaaaaaataaaaatttcaaaaagaagcaacctgtgtatctaccacgaaacagccttttcacgacaaacattggcacgtccgtctcaggttgacctcagttgacctctgcgcagatgatctccagctccgcccaccacagcggcgaaaccttgggggtggccgcgtcgggtgacatggcagtgatctccctcaggcgcttggcgacctccgctatggtcagccgcctcctgggctcccg

SEQ ID NO: 281987 - DNA, 443 bp, Zea mays
cttctttaaattcgaggacaacggcaaggcgacgtgggacatctagagggagaggctggatccggagcctcactcggaggcgcgcgcacggggaccgggcgtggtaggtcgccgtcgtcggtaaggaggcccggtcggtcgggggcggggcagcccatgcatgcatgcatggtgtccgatggatggatggatctgcgagcttccccccttgctttggatggagacgtagtaattgcttgcttgtgctttgtaccaagtgagatgagtgagtgcctccttttacctactataggctactatacgtacagttaatagcagctagctgttggtgtggattgctatgcgttagtacttgttaaaagaaagaaagagatatgtatatgtatatggtgcatgcaagaccggcaaattaaataaagtaatgcaatgcaaatacagaatgg

SEQ ID NO: 281988 - DNA, 429 bp, Zea mays
ttacttcttcctccggacgccagtctgcgagcgccgagcgcccgagcgcagccaggtgtcgcccgcccgcccgcctccggcaaatgtgacttgcagacgaaggtcgctgcagtggcccgtgctcgatggtggcaaggtgcgcgcacgccgacgccggcgggttccgcatctggccgatcttctccgccgcctcgctgcggaggaaggtgctagaggttctcgcgtgcggcggcggtggcggtggcggtgacggaggcggttcctgccgtggacggacggcctaccggtcgccacagcggattccgaggccgagaccgcggtcggacaggctcgcggagctgctcagggccgagcagccgtccgagtgcagcgacgaggctgaggccgaggccgaggcggcggccaagaaggtggaggcgttggaagagc

SEQ ID NO: 281989 - DNA, 727 bp, Zea mays
ttctacgcgtccgtgttaataccaccaacttcagagttaagtacacttggctggagcattctacagtgaatgatgatgaggaaaaatggattgataataaacttcctgtggcttgtgggaactttacgttaggaaacacagaggagtcacaagatcccctcatgttttctcacatggtttcgtgggttaaaggaagaaaaaggggttcttatgtaatatatccaaatataggtgaggtttgggctctttataagggctggagtatgcagtgggtctcagatgcagacagtcatagatcctacgagtatgaagtggtggaggtcctttcaaacttcacagtggaagctggtgtgactgttatccccttggtcaaggttaaaggttttgtgagtctgtttgcaccagcaaaggacaaaccatcatttgttataccatcaagtgaactacttcgcttttcccacagcatcccatttttcagaacagtgggaaacgagaaggttggtgtcccttgtgggtttcttgaactagataccgtatcgcttcctagtaacctggacgtagcatttccacctgttgatcttgattcatgtgtggctaccaatagaacaatgggcagcgagtctgttgatttgactgacaatactacacccagccatggaaatggacgaagtgctcataagggcaaccatagaaatgcatgcaagtggagaaaacaatccgttcaaac

SEQ ID NO: 281990 - DNA, 576 bp, Zea mays
aatatcccaagttgtatccagtgatccaggcactaatggaggaacaaacacgctagctcaatcacgagtcactttgcctttccagcctcttgcactttgctttaaccatgtaaactattacgtcgacatgcctgcagaaatgaaggaacaaggattcacagaaagccgtttacaactactctctgatatcagtggcacttttaggccaggggttctaacagcactagttggtgtgagtggagctggaaagaccactttaatggatgtcctggcaggaaggaaaactagtggagccattgaaggagatattaccctgtccggataccccaaaaaacaagaaacttttgcccggattagtggttattgtgaacaaaccgatatccattctccgaatgttactgtatttgaatccatcacctactctgcctggttgcgtctttcctcggatattgatgatggtacgaaaaagatgtttgtggaggaagtgatggcccttgtagagcttgatgtgttgcgcgacgctcttgtgggtctccctggagttagtgggttatcaactgagcaaagaaaaaggct

SEQ ID NO: 281991 - DNA, 332 bp, Zea mays
ggccgagcggctcccatggtgagctcgccggggtgcccctgctccagcttcctccctgctcgaccagaccatcggcctccctcctgcttggagctcgtcgccatggccgttgccttctccctgctcgcgttctgcgcgcgtcccttagcccttgcgctcggcgcccagtccctggccgagctcgccctgatgccgcaccctcaagctcccagccgcggtatagcctgcacgcgtcctccctgcccagtcggtctccaatctcccagccgagccgctttttcttcatcttcctgtgcgtcacggagctcggatcgcgtccgtcttctctgctt

SEQ ID NO: 281992 - DNA, 525 bp, Zea mays
tgttacgcgtccgcggacgcgtgggccgagcggctcccatggcgagctcgccgggatgcccctgctccagcttcctccctgctcggccagaccatcggcctccctctgcttggagctcgtcgccatggccgttgccttttccctgctcgcgtcctgcgcgcgtcctttagcccttgctcctctggctcggcgcccatctccatggctccctgcgtgtccattcgtcacgctctcctgctccctgttccccttgcgtcccgtggatccttctctgcgcgcgtgtcaccgtccgccgtcgatcccctcgcgcaggccatgagctgtttgttcgccatagtcgagccgttctcagttgctcgccgccgaagctcccctgatggctgcgtcctgctcgcctttgcgtcgcgcgcatagcgttatgttattcttgcgcgcgcgaagctctttgctcgtcaacgctccagcccggatttcgctttgtcgccagctcggctctacatctcccatggctggctgctttagctc

SEQ ID NO: 281993 - DNA, 609 bp, Zea mays
cccacttcgtcaagcaacaacaccggctaaaaattaaaggaggcagcgcgtagcagttggtcgccaccgtcacgtactcacgctcacgttggaggttggactccgcccccgtgctgctcttcgccttgcctttctccgccggagaccccgccgcctcagctgccgcaggaggaggaggcaaccatggcggggaggtacgaccgcaatccgttcgaggaggatgacgtcaacccctttgcgggaggaagtgtacctcctgcttctaattctcggatgtcagcacttcctcatgaaccagctggcttctacaatgatcgtggtgcaacagtggacatacctcttgattcaacgaaggacctaagtaaaaaggagaaagaactgcaggcaaaggaagctgagctaaacaaacgggaaagggagctgaaaagaaaggaggaagctgcagccagagctggtattgtcattgaagataagaattggccaccctttatgcccattcttcatcatgacatttcgaacgagataccaattcacctgcaaaggatgcagtacctggcgttttcttcactattgggattgacagcttgcctcttttggaacatcattgca

SEQ ID NO: 281994 - DNA, 654 bp, Zea mays
tttgtgtgtggcttcaagccaactataatatcttatggttgccttattaatctgtatgttaaggttgggaaggttcccaaagccatagctattagcaaagaaatggaatcacatggcatcaaacataataacaaaacttactctatgctgatcaatggatttatccatttgcatgactttgcaaatgcttttagcattttcgaggacatgataaaatcaggtttgcagcctgatcgtgccatatacaatttgctggtagaagcattttgtaagatgggaaatatggatcgagctattcgcatattcgaaagaatgcagaaggaacgaatgcaaccatcaaatagaacattcagacctatcatagaaggatttgcagttgctggagatatgaaaagggctttcgatacccttgacctaatgcggcgaagcggttgtgctcctactgtaatgacttacaatgctctcattcatgggctagttagaaagcaccaggttgaaaaggccgtttctgtacttgacaagatgtctattgctggcattgcaccaaatgagcatacatacacgatcattatgagaggttatgctgctagtggagatattgggaaggcctttgagtatttcaccaaaatcaaagagagtggcgtaaagcttgat

SEQ ID NO: 281995 - DNA, 381 bp, Zea mays
ggctcttggactaatcaaaccattcacctggctaaaaaaaatccccgatcttactaccctgctcctcctctctctcacggtctcacctctagtttccaggatgacaaaatatgagatcagattcgattcgtgagcctgtagaacaaggatgctcctccaatccatactaaattgaacccacgcagcagacatccgcgcgcagtacgtccccttcgcgaacaccgccatcctcaccacgccgccgagtcgggcggcgcatgcgccatggcgttcctattcggcgcattcctgggcctggtggtgggcgtggccgtcgtgatggcgttcgcgcgattcgagaacagccgcgccgagcaacgccgtgagctggctgctacagct

SEQ ID NO: 281996 - DNA, 538 bp, Zea mays
cttatgcgtgggcggacgcgtgggcggacgcgtgggcgaccgatccgtctccactccaggttcacttcgcctctccctcgccctctctctctctccttgcttctttccctctcccctccaggctccaggtgccctaccgccggaccggcgcctgcctcatgaaggccaaggcatccgccgccgccgccgaggatgacgccgaacccaagaagatccggtcctcacgcagtaagcaccgccgacgcggtcacagccgctcctcctctaggtccgaatctccgccccgcaagcgctccaagaagaacagcaagagaattcctgacaagaagagcaagaggagcaagggcagccgcggcagtagccttagacgtcggcaccatagtcttagccatagccgtagccttagtagcagcccttcctcagtagcccgacgcagcagctcctcatgtagcagcagcagcgcctctgagaggtcggtgagcccgccacccaggagcaggtccagagatgtaaggagggaaaagggcatagggagggg

SEQ ID NO: 281997 - DNA, 143 bp, Zea mays
gctagtacgggtctactggactgcgtgggtaaaaaaaaattaatcatctcttctaatcaccgagtggactgctagagaccagacgacttgcttgtgttgtcatcatcaaccaataatcaatgaatcaagctgcaagtatatat

SEQ ID NO: 281998 - DNA, 812 bp, Zea mays
gttcaggtgggccatacagacccgttggcccccctggtagtttccctgtcgaaccatttggttattatggtcagttcccacccaactctgaagttgcagcaaggcagggcccagggcatggtggatatcaggctaaaaatggagatgtgtatcatcctacgcctcctaattcctatattatgaatcagcctgttattccagtcagaccagtttatcagggtccagtgccgtatgatgggtattatggccctcgagcacatttcaataatgccaatgttagagatcctcattttgttggaggtcctggaatattaaatcaattccctaatcagaatgacaggtttcaccctggacatgctcaaaacagaccaggcagacatgaaacagttccaagggagcagctggaatctgataaaatacatgtgtttcatcgaggaaaccctgggagtttgcatgataatcctgatcgtctaggaggttcccgtgaatttgaaaggaatgcgcagccagcaccgccacttcttccacatcctgatggaaaccggactgatgtgaacatgagggcagatacaagggacacctttagtgagaccgaaagaaccgcggtgcttacaaaatcggtgcctaaccagagaggttcggttggtacagaccatttgtctgtttatgacaacgcacgttcccatcacagagaaacttgtgatggcactctgcgcatgaagttcaaggaggatagctcagttgtacttgaccagcatcctgtcattaagaagaatgcagctttaatagagaaaattgagagtttgaacaac

SEQ ID NO: 281999 - DNA, 391 bp, Zea mays
gtttctagtgaccatttgaggagctgcttgagtatagccaactgtgctgctcgcgtttgatcaaggatgctcgctgaggctgacccatacgaggatgagcacataatgcttgaacttgtgtgccgccacttcatttcatcattactggacgagggggcatttgaggtgtttctgagtgcactttcttggtcggggagggcattgcagcggactccagaaatcagctttcagggggcttttgtgctggttcaaaggacctacctctctttgccggctggtgtacaagcacatcttttactgctcatgtcaagatgcacgagtggtcaaaatcttaactcgcatatgctagcgtttggatatgccatgaatctctatgtcagatatttaccgg

SEQ ID NO: 282000 - DNA, 401 bp, Zea mays
cccacgcgtttttttttcctcctctctgctttctcgcttttcctcctctctgcctttctttgctacccccggcgtcaggcgtcaggaactccgcttccacacgaatatgtcgtctattgtcagcttgctcactggctccgcttgcttggtgagatgtgttttcccctttatccttcgtcgtgcgcttccattcggtggatatctttttccatattcctttgtggattagatccaggcttctctagtcgagatcctcttgctttttaccgggatgaaaattgggaccgaaaaggcctgcatttttcttcgatagctttggcatgtgcagacatataaggaagtgctctacctcattgaactctattttggagattgagactgaaaaggcaattatttctttt

SEQ ID NO: 282001 - DNA, 634 bp, Zea mays
ccaacgtggagaagctggaggatgcgccacaggatctggcgctagagaggtacaaaatgttcctgaagcagtacaaggaatgggtggaggcaaaccgagataggttggagcaggagtcctaccagtttgatcaggattacttccctggcagacgaaaaagaggtaaggactacagtgaggatatgcgtgaacttccattctactatcccggacagatatgttacgggcaagtaacgactgttcacctctaccagggagcctttgtgaacattggttgtgtccatgaggggtgggtaccgataaaaggaaatgactggtactggatccgacatcacatcaagcctggcatgaaagtttacgtggagattctggccaaacgagacccttaccgcttccgcttcccacttgagatgcgatttgtatatcctaacattgatcacctaatatttaacagattcgactacccaccaatatttcaccgtaaggaggatactaacctagagcagttgtggcgtgaagccggacggccacccattcctaggaaaaaacctttaaaagatatggacaaggaacttttggtatcagacgatccttttggttgacacgctttgggcatgggcataatgcagagcag

SEQ ID NO: 282002 - DNA, 535 bp, Zea mays
acggcgtgctgcagagcgaattttcccccatcttgacttctcagtgcagcctcctgctcaggaactgcaggccagggatttgcacgatgcaatttggacattccgtcatatatatcgaggtcagcctaaaaggcatttgctgactactggctggtgcctatttgtcagtggaaagagactccttgctggtgattcagtcctgtttattagggacggaagacagcaactcctcttggggataaggcgggcaaataggcagcccgttaacctctcatcatctgttttgtctagcgacagtatgcatattggaattcttgctgctgcagcccatgcagcaggcaataacagccaattcacagtattgtataacccaagggctagtgcttcagaatttgttattccttttgccaagcaccagaaggccgtctatagcaaccaactatcacttggcatgcggtctagaatgatgttcgaaactgaagaatctgcaacatgaaggtacatgggaacaataactggtatacgtgatatggat

SEQ ID NO: 282003 - DNA, 381 bp, Zea mays
catatctagcgctctccctaagcaccacccagcaccaggcgccatgcccgcccgccatcttcgttgcgccaaatcgaggaatccgtctccgctatggaaggagatcgcctctgctgcgccccagttctaggttggcatcatcgtccgcgtcctgcctctcggtccttcgcccacgttgtccatggaaggagatcgagaatcacggtcctcggccaggctctaaatggatggagatcgaggaatccgactccgctgcgccctggcaccctctacgaccggcgactgtgcattacctgccccgccgcgagacaatcgcaatggtccccctgccccgcgctagtcgcgaggaccccctccaccgggattctagggtcttcgcga

SEQ ID NO: 282004 - DNA, 562 bp, Zea mays
gctacttcggatgcgatcaacgccctgggcacatacaggttcaggtcaaagaagccccgtaacggggaggcaaacgaaggtagcggtggagtctttgctcctggaacggacaaggaacgcgctgtttctgctgaagacgccgtttgctgtatctgcttggcgaggtacgtggataacgatgatctccggttgctcccttgcgggcacttcttccacaaggactgtgtcgacaaatggctcaagataaatgcgctgtgcccactctgcaaagctgagatcgacgtcgtcccgaggaccgctcctccagccattggctttgggcgccgcgacagccacaggagggtaggaaacgacattgaatcacaacggcttccatgatgtatagtgagacagcaacttgccttgggcgtgtgtgtgtgtggcttccagaagagcaccttgtaaattatatagtgagagatagaaagagattatgtcatggaccaacgagtccttacatgatccagcaggtaatcgcctgactgaaaatatgtcgttgttgtcaaaaaaaaaaaaaaaagaa

SEQ ID NO: 282005 - DNA, 508 bp, Zea mays
  unsure (1)..(508): unsure at all n locations
cccacgcgtccgcaggattagcagcttcgattagcagcttctccgtgctgctgcgtctcctcctcatcgtcctctccagtgtccagctcggccatggcgttcaccgtctccttctcccccgccaacgttcagatgctccaggctaggagtggccacggccacgccacctttggaagctgttccgccgtgccaagagccgggccaaggctgcgctccacggccgtccgggtcagcagcgagcaggaggcggcggcggccgtcagggcgccgtccgggaggaccatcgaggagtgcgaggccgacgccgtcgctgggaagttccctgctcccccgccgctggttaggccgaaggcccctgaaggaacgccggagatcaggccccttgacatggcaaagcgcccccgtcgcaaccgcaaatcacctgctcttagggctgcattccggagacgagcatctcgcctgctaactttgtgcttccatttgttatnccatgaggagaagaagatgc

SEQ ID NO: 282006 - DNA, 539 bp, Zea mays
gccaggaggtgcgcacggcacgactaatctccacactccccactagcttttcttcccagtttgctccgattttgattccatgaaaacaatgagcaggcgcaacagccgtaccatctatgtaggcaatctccctggggacatccgtgagagggaggttgaggatctcttctacaagtatggccgtattttggatattgacttgaaaatacctccgagacctcctggatacgcattcgttgagtttgaggatccacgtgatgctgatgatgcaatttatggccgtgatgggtataactttgatggctacaggttgagggttgaattagctcatggtggcagaggccagtcttattcttatgatcgttcaagcagctatagcagtgcatgccgtggaggtgtttctaggcgctctgatttccgtgttatggtcactggtttaccctcatcggcatcgtggcaagatctgaaggaccacatgcggcgcgctggtgatgtctggttctctgatgtataccgggaggctggagaaactattggaa

SEQ ID NO: 282007 - DNA, 495 bp, Zea mays
  unsure (1)..(495): unsure at all n locations
tcttcctttcacgcgtccgcgcggcgtcgcctggcgaaccccgaaccttctcgaggtcgaggcccctcccctttcgccaggagaaaacaatgagcaggcgcaacagccgtaccatctatgtaggcaatctccctggggacatccgtgagagggaggttgaggatctcttctacaagtatggccgtattttggatattgacttgaaaatacctccgagacctcctggatacgcattcgttgagtttgaggatccacgtgatgctgatgatgcaatttatggccgtgatgggtataactttgatggctacaggttgagggttgaattagctcatggtggcagaggccagtcttattcttatgatcgttcaagcagctatagcagtgcatgccgtggaggtgtttctaggcgctctgatttccgtgttatggtcactggtttaccctcatcngcattgtggcaagatctgtaggaccacatgcggcgcgctggtgatg

SEQ ID NO: 282008 - DNA, 743 bp, Zea mays
ctgtgtcgcgtgggctcagctctctcttatcttcaagacatgtccacccatctctcttcacggaaatccatcctcccccgccccgcccctccccacgccacccccggccgatctagacggggacgggccggttgaataattccatgtgtacgctggtgatgagccgacgagacatggccctccttgccgtcttccacagctttcttgaactgcatgccgccggctggtggatgctgcgcgcgcttgaattccggtcgatcccaagaggcgcagttcaataaagctgtgggaaactgcagagagaggccaccagccgatccgatcgatcggatcgcggcaccagatctcgaccaccgccggaactgggcgggcgcgaagcagatgatgcggcgattaattaaccggcgtagcagcggctggggatctacctgcatcacgtcgatccacccgcggtagatcgatgggaccgtcacaacaaggacaaggtacggattaggtttcttgaactggtaggaatggatggtggttacttatgaatgcatgtgttgaattccgtccatgagacacacatataaagagagtcatggtccgtagggctggttaatttcgtcgtatcagcttctttcccgtgcgatttaccctcaacctaggtgcatactacaagaaaagggttgttgttaattaccagtgtctgaaattgtggcttttctagaaaaaaaaaaaaaaaaaaaaaaaaaaaagaa

SEQ ID NO: 282009 - DNA, 546 bp, Zea mays
  unsure (1)..(546): unsure at all n locations
ttgcggacgcgtgggttcaggaggaatttacagagtctctagggtttatcattcagaaaaccgaagacggctgcataagtaaatacagcatcacaaaatatgaagatccatcagacacattctgcgtgacttataatgcttccaataagatggcaaactgtagttgcaagtactttgaattctccggtattctgtgccgccatattcttggagtatacataatagttgatccacgaacacttccaactgtatattttatgaaacgttggacaaggaaggcaagagatgatgatgctttgttagaagataataacaacaatactcatgatgaggatgcttctcagtccaccacaagccgctacaataccctatgtgctgatgccatcagatgtgctgagaaaggagctggatcggaggcagtatataaggcagcaaaagatatcttacagaaggcatatgaagagattattgcttatgaaagaaatactggccagngatctcaaagggnatgtataaacatcaacgaggatgtcacgatggatgatg

SEQ ID NO: 282010 - DNA, 499 bp, Zea mays
ctcgtctcccaccagccgtcacctccggcttgcccggatgtgctttgcggagggggcaacccgcgcgcctcggtgggctccaactccgccgctgtcctcgaagctactccgcggcctctcctgcgctccaccagagggccggtcgcacccaccgctcggagggggtacccgcgccttccgatgcccgcgcgtgccggctcctgccctacttccgccgcggtggaatccgacgcctcctcgtgctgcttttcgtctgatacgtcgtccacgtccactgacttccctgaggccgatggggcgctcgggatggccccagccgcgtcgtgcgagtgcccgacgctgctgggcccagcgtcctgccgcgggggacgcctctcgtcagagctccgctcgttggtgccggagtcgggcgggtcctcgcgggcgtccaacccactatgctaccgctcgctcaactcggcactgtcgatctcgatggcgatgcccgggaaaccgactc

SEQ ID NO: 282011 - DNA, 475 bp, Zea mays
cctttgttatctgcccgcaacccgccgccccacgacgctgatggcccagcgctggcgctcgagggcccggtgggactcagacctggacgaagatggttccccgccttttcggaagccgcgcaggggcgggagcgacgaggtggggaacgaggacctcagcctggagatcatcgcgcgcgcgcagcggaagcggcgttgggcgtcctgcggtggagtcaccgggttcgccaacctgctctcagtgtcctccggcgacgatgaggacgccgtggtggagctcgctgaggcggatgagccccggaggaatcagaagaagaggcagcactggaagcaaaggaaaaggcaacggaaggaggcgaccgctgctgctgcggctgccgtggacgaggaagagaaggaggttggtaccacccaggaggagcaaattgggacagcagaatcggtgctaactgaagatggggctgatgtccctaca

SEQ ID NO: 282012 - DNA, 517 bp, Zea mays
attccatcgtcgcctgatctgttccttgcgtcaaacaccaaccgacctctttaccctcaccgtcgctctcaggccagaggccggtgcccctctcctcctcacagcgcccttctcaagcatcagcagtgggctcgtcgttgtcccccaaccctggcgtgcatcgccatccctcatcctcatctcttcctctgcttcttcgttcctcacgagctcagccagggagctcccttcctctcgcgcccatctcctccctcccaagacgcgctcgccctggactccatgtgtcgccccagcttcatcttcctcagctcgcctaggccatggacatcggcgagctcaccctaggtcccacctggactaaccctgctcctctccatccatggctgcgctcgacttccacctcaagccacgccctgggatcgtcttccagcgtccccttcacacccttgactctagctcgccagcaccctccgttcggccggccatggccacctcgccgaggccccgaccacgacgt

SEQ ID NO: 282013 - DNA, 309 bp, Zea mays
agtgtagagggtttctggatagaaaggaaatgagagcacaaggcaacgcatacgagcatgtactagtgggggtgtgcgttggatcgattgcttatttatgacaagctaagcttggtcgtacagtacttagcttgtatagttaagcacaccaccgtatactactagcctactagctaggacggtatacggtagacggtatagctagctagatcctcgatggatcgatcggcggtgagttgcccgtaccccgtgatgagtcgtcgtcgctcgccggatcatgccggcaggaacaactcgacgcgggcagcg

SEQ ID NO: 282014 - DNA, 754 bp, Zea mays
gcttttcgtttcgttgacttactgaacactggtagtgactatattgccgaggtagaaacgctacagacataccaaatgcagacagacagtgaaagaaatgaagtcaaggacatgtcaaatagacttgaagcatgtgaactttggactgctctaagtaagaactcatctgatgcaatgtatccaattgttagcaaggaatctttgctgcaagaaatgttcttcagtgcaaagacaacatcagggcgcctacatttggctaaggagttattgaagcttcctacagatgttcttaaatcatttgctgggtctaaagaaggactaagtacgctaaacttttggatacttgattcacttgggaaaaatgctactcaactactgcggcactgtgtgcgtttgcttgtgcttgtttccactgatctggtagctgtacgtttatcaggaattgggaagactgttaaggaaaaggtttgtgtgcacacaagccgagatattcgtgctatagctcggcagttggtcagtgtgtggattgaagtttttcgtatagaaaaggatagcaacggcggactcaaattgctgcgttcaatgccatcaattgaatcgagtaagaccaagagtaaggatctgcaatcaggaaagcctaccttacgtgtgccaaatggaaccttggacaacaataaagtagtgtcccagcgccagcgtacaaaattcccaagtcgtcaatcaccaccaaagattaacaagaaagtatgataac

SEQ ID NO: 282015 - DNA, 475 bp, Zea mays
gatctggttgccgccatggactaaagctccctccaggcccatggcagctccctgtcatcggcagcatccaccatctccgtggctttctcgcgcaccacgctctgagggacctatcgctccgctatgggcctctcatgttcctcaagctgggcgagctcccagtggtcgtagcatccacgccggaggctgcgaaagaggtgatgaagacccacgacgccatcttctcgaccaggccactgagctcaaccattaggacggtctccaaggatggcctaggcatcgtctgggctccgtacggcgaccactggcggcagctccgcaagatctgcaccatgcagctgctcggcgcgcggcgcgtccagtccctgcggcccgcgcgcgaggaggaggcgttccggctggtccgagccgtcatgtcctcgtccaccgcggcaggaggagctgcgccgccgccgctcgtggacctcggcaagct

SEQ ID NO: 282016 - DNA, 542 bp, Zea mays
ggacggtgggcacgtgggcctgacgctagaggggaaaagagcttgaccgcgtcgagaagtgtcttaatagacaagtaggccgcgggcccgcggcaccatacaacccagcagaaaggcgaggagacgaaccgaagattggccaaatctcgcttgcgtttctggggtggtgtctctgactctctggctccgtccccggcaccggcgggcggtggcgtgatggcggactgggaggggatcccgccgcgggagcggcggcagatggaggagatcctgcagctcgacatggaggagctcaacgtggaggtcgtcgacgacaacgaagaagacgaggaggaagatgagggtgacggcaacgaggaggactacgacgtcgatgccttcctcagagataacaatggagatggagtggctagcacctctggaccattcacattcaataggtctctagcttcactgcacacataccttggcgaggttgatgacactcggggtagagttactcttttagatggtggcacaatccttaacttgccaatgtttta

SEQ ID NO: 282017 - DNA, 691 bp, Zea mays
ccctctcgtccgggatgatgtctataattttatgcgctcgcaaaagaggcgtcgagttctaagttcagacgttactcaagattttgatgcaatgagaaagcagctagtgtcagattctgcaacaatatttaggtcaaaagttccggagtcactgatggaaaatctcattaaacgcctgagatcatactttgagggcaaacattcaccacatgagtagtttttcatgcagttcttcagaagctacttaagacaatttaggtgtcaattggatcttggtggtctactccctaacgcatcgggcggcttattttgaggacatttttgttttctttgctgaggttgagacgaggagttccaagctgtatcttttgtggtttccctgatgttataggcaacgcaccagccatccccaccgcttctctgtctagaatgtagaagatacttccttttctccttttgtaagatactatagctggcagattaaagcaagagtttatggtgtttttgaccctttacaaatgtatttttgccccgatcagtctcagttttggtcaatgttctgttacgggcagattcgatagcaacattttcctagtttttctggtgtaatctccggaagcaaattgacttgagaatacaatcttttatcattctgatggtcaattgatgtttgatcatgagaaataatcat

SEQ ID NO: 282018 - DNA, 548 bp, Zea mays
gtctctgtctgtctctgtctctgtctctctctctctctggtcccctctcgctctcagacgaccggtgggccgccgccgccgacgccgccgccgccctaagccaggtgctgaggctcttgttggtctcttcgccggcgaggagcacccagcaggatcagtacaaagacgatatcaaatatgaagagaaacaggctcttcacttgcaggtggacaccgaggaaatcggagtgcaaagctttgatctttatctgccacggatacggagccgagtgcagcatatccatgggagacacggtcgctcgattagtacaccatgtatacgctgttcacggaatcgaccacgagggccacgacaaatcttcaggctcgaaaggctacttgtcgagcttcggcgacgtcgtcagagactgctcggaccatttcaagagtgtctgtgcgaaataggagaacacgctgaagaagaggttcctctacggcttcttcatgggaggaaccgtggtgcttcagctccacaggaaggatcctctctactgggacggtgtcctgct

SEQ ID NO: 282019 - DNA, 587 bp, Zea mays
tctttctcctcgcgttgcgtgtatagactgtgggggggaggcgtggggaaggggggggagcagaaagaaagagagagagagagagagagtgttcccctcagcagccgttcaccgagaatggccgtcgcctccggcgaacgcccggcgtacgggcagtagcacgctgggactggtggttggtttaggccggtggtgtgttggtgcggttggctctgggttggttacttgtgcgagcgagattttgtggatgtaggcagtcgctgcgcctcatccctcatgcgatcgatgccgttccagctcaagaccggtcaccaccaccacggcgccgccatggaagggaagccgccgccgccgccgacgacgcagcagcctgcgccgacgccgagggtgtcgaggctcccgaggctgctcgggcgggtgtcttcatcggagaagttcgccgcggatgggaaggacagggacaaggacgagaagctgccgccgccgccgccgccgttgccgcccgcgaccgacgatgcggacgcccccgggtcacttgggatggaccccatggtgctcagtttcatggaagaggaaaccgccgtcga

SEQ ID NO: 282020 - DNA, 515 bp, Zea mays
ccctcgcttccgcggacgcgtgggggcgtccaccccagagcaatcatgactcgtctctgtccccttcacctcctcctcatcgctgccgcggcggcgtctgccagcggtgccgacgaggcgcacgtctccatcgcggtcgcggagaagggcctggccttcgccaaggacgtgcttatcagcgaggccgtgcggtcgctgacccctcttcgcctccccggggtggagaaggccgtccgcgtgcccttccttggcggcatccgcgttgccgcctccaacatcacgctattccacctagacgtcggggacaactccactatcttccccggagactcgggccttctcgtcgtcgcctccggcatcaccgccaacatcagtatgcattggagctactgctatgattcgtggttgtttcccatagagatcaccgacagcggaacggcctcaatcctggttcaaggaatggaagttgggataaccatggttataaagaacatgaatgggagtttggctctgtc

SEQ ID NO: 282021 - DNA, 518 bp, Zea mays
tgctaatcagtaaatggcatgctatgagttctgtcgtgaataactctctgggagcaatggcttggttttgtggtgggcgtttgaacaaaatctttaggattaacaagactttgtaggttgaattagaccttgcaaaattatgattttgtcttagtggtgtcactaagcatttgccaatgcccagaaaattatgattttgtcttattatatcgacaccatgcatattccaatcttctgtcatgcctcaccactttggagtctctatccagtctggtatggcccttctggaacctgcgcttaatgatgtacaaaaaaggttggccaacatgtgggcgtcactactgttattacgtggctaggtccgctctctctccgtataatggttatcatgaatgaaattggaagacatgttctaccttctaccgctcttgctagatggcccattgtattataattcgatttggatcacgttagttcattgatgagatattatgacttgttcacactgcatttttaca

SEQ ID NO: 282022 - DNA, 532 bp, Zea mays
ccgatccacacggggatcaccccgggggtgttttaaggacacctgtggatactgtatggcctcgaatactttgattacatatctcttacccattgtaatgatactcatctccctttgatgtgtgtactttttagagagaaaattaccttagagtctcattgcttcagtttatggtccaatttacaatggcttcactgtaaatgggaaaacaactcggtaggaatgcttttttgaattataaattattgctatttcatacgatgcttataggtatgtgatgagccctccaatctgagaagtagagcctggtaaagcactccaagctgcttctttcatcgggaaatttataggtgacacttgtgtcatacattggactatggagtcaaacaaattacatattatccttcaacatttttcaccagtgggaactgtagttattgcgtagaatagatggtatattaatcgttgagagccaatgtttacattaactgttatgcagaagacaatttatgttttattttatatctaactg

SEQ ID NO: 282023 - DNA, 535 bp, Zea mays
taatttgattttaggctggtcaatttgttatcgaatattgtggagaagtaatatcatggaaggaagccaaacggagagctcaagcttatgaaacccagtgtctgcagatattctctcgcttctcatatttgaattgtggcaaactggcacttttttagctagctataacatctagcttctgtaactgcaggtttaaaggatgcctatatcatttacctcaatgctgatgagtcaattgatgcaacaagaaaagggaaccttgcgagattcatcaaccattcatgccaaccgaattgtgagacaaggaaatggaatgtccttggggaagtaagagttggaatttttgctaagcaaaacattccttttggcacggaattatcctatgactacaattttgagtggtatggtggtgtgatggggcggtgcctctgtggagccgccagctgttctgggtttcttggggctaaatcacgtggtttccaggaggccacgtacctgtgggaagatgatgatgacaggttttcttgtgagaata

SEQ ID NO: 282024 - DNA, 720 bp, Zea mays
tttcgtacgcgtggggccgcagatggcttcgttgctcaagttgagatcgctcaagctgtatggctggatggtccagttggtgcccagcgaggactcggcaagtgtttcgttcagcatctggaatgaaggagcggagggttccacgagagactgcaccgccgggagggtagcacctgctatcatgccagacctcatacatctggagttcaatgtccctatcgcagccttgtataagagaacagataatggatgcagctgttacagcctcggctgggagtgcctcccttcgctacacaaaatcaaggcgcgtgtcgactatgacggcacctacactgctgatttcgagaagccagtggctgagatgatgcaggcagcaaaactccatcccaaccaacccataattgagatggttactcaattctaagaagcctggaaaactgccatttaatactggttttagcaaccggatgaaaaggccgctaatttcccactagatatattccatttccttgcttttcgacagcttggtgttgtatgtcaaattattaagcagctttgtaataagactgtgtggtgccactttaggcgcatgatgcttgttcctaaacaaacatgaagtaatctcttggtattgtatgtcttggaaatttacacatctcttggtattgtagagtgtaaacagcagattggttcaattcaatacagtttagtttttgtttc

SEQ ID NO: 282025 - DNA, 485 bp, Zea mays
ttcttggaagggagcaggggtgaagacagtgtcactttcaccatggtgcacacattaaagaatatacacaagatcttagaaatacgtggtcaaaaaatatttagctaatggaaaatattattttaccctagtgccagtgcaccagcaaagtgtatgtggtgtcgcccctggaagggagccccttgatgaagatgttgtcgaattgcgaagtggtcgggacgcggagaacacatacattgctgacagcgacatgcttcgtgtgctgatgctacacgaaattggtggagaggtaggctatactgacgttgttgcagtagacgaggatggcacacgcgaggggctgtgaaagtcatggagaagctaacagagccaggatgcctcggtaacgctattggccacagtgcgatactcggccttagcgctggagcgggagacgacatgctgctgcttcgaggacaagcagacgaggttggcacccaggaaca

SEQ ID NO: 282026 - DNA, 754 bp, Zea mays
tcttcttcggacgcgtgggctcaatgataaaatttggaagaatgatgttacttgtgtcaatatgattaggcttagtagagcatcgttctttcgcttttgtaaacttattagggatcgaggtttattacaagacactacacacatgtgtgttgagcaacaagttgctatgtttttacacacaattggccataatgttaggaatagagtagttgccactaattttggtaggtccggggaaaccgttagtcggtacttcaataaagtgcttcatgcaattggagagctacgcaccgacttcattaagccaccatcatcgacgacaccatctaaaattcaagggaacccacgctgggatccttattttaaggtagtgtttggtttgtttgcccaaattatattgattataggtagactgttgagaccttacatattgtcatcgtggttttgagcttgagcacaaggctaagtactattcttatttgctgaacaatcctaatgttgcacaagggtttgtggaggtgccattgctgtacaagcttagtatgcttactgagttcattaatggtaatatgtaggcttgctaggaatacttcattttgggtgacataaacttgtatgtcatgcttctatgtatccataaacaaggcactttgggaatacttcattttaggtgatatgaacttgtatgtcatgctaattgtatgcatgaacatggcactttggattatatgagcgttgtgatgacttgtggttt

SEQ ID NO: 282027 - DNA, 581 bp, Zea mays
ttcctatcgtcactcccttcctgaaggcgtcgcttcggaagtttgtctcggccacgtcgtagcctgtggtggttgctttcgtctttcgggtgccggtttgcgtgtggaggtgggagcttgcattatgaagtcgaagctgctatgtcaggggatgtggctcggcaacgatgacgtggggcgaaccccccttcttcgtgggttggtctgcgtcgaagacgaggcatttggcggaggcggggcggtggattaaggttttggaagtctcgctggtgaagaatcggagctgactcgagtggggtgtctcgtggcttggcaacgacgacgcgtcgcagtcttccttctcctgtgccggtgtttgtaatcgtcgtgtttcctttggccttgtgctgcccgtcttgggagtcggagctcgtcacttgtgttgagctcggcaacgatgactcaggatgggtactgtgtgtgtgggttgctgttgtctgggttgtttgtgcgccctgtattggttttgggcccggtttcccttaaaactgggtcaattcttttcttcttaattgagaggcacagttcctgccattacgttc

SEQ ID NO: 282028 - DNA, 483 bp, Zea mays
tttcccacgcgtccgcacctacaagaaaaattgggtaaatccgcacataagttaggtctagatatataaaacatgttgcgaatctagagacgtataatgggatacaaggagtaacaacgtaatagcccctactcccacgagtcttgttaattttttcttaagtttaattagcattaattatattttaaaataaatttattactaaaatagtttgaactatctatataataattgtaattgcatactataaatattaatattctatttatatatttaattgcatttaagtatgtgtgactatttggtaagagagaatgacagttaaaaaggacatatgtactagtatgcattgtgacacaacagcagttaggattctaggaaaaggtccgaaactggtcgagatcaatgaggggccgcaatcgataaagataaatattataatagtcatagaagtgggtacggattaaatgaacatatgaaaag

SEQ ID NO: 282029 - DNA, 471 bp, Zea mays
tgaagagatatggtggtggtaaagctgacacggctcttgcaaaaagtctaaaggaagaatatggaccagttataaagcagcacattcaatatgttcttgatcattcagaggaactagataaaatgttaaaagtgcaagcccaagtttcagaagtgaaaaatataatgttagacagcatagaaaagacactgggccgtggagagaaattgagtgaactccaagacaagacttctgagctacatattcaggcccagcagttcaagaaacagggagtgaagattcgcaggaagacatggctacagaacatgaaaattaagttggtgattcttggaatccttttgctccttgtaatcatagtatgggtatctgtttgtcagggctttgactgcaccaagcatgaaacataatagaaatggtacaacactgctccatccattttaaattataacatgttttggctctttttagatc

SEQ ID NO: 282030 - DNA, 664 bp, Zea mays
gccgccagcacagcgcagggcagacggagacggagggcacaccatggccgtggggggccttctgcggggcctcgtttcgccccccgcctggctgccctgccatgagctcttcgcctcctggcaccactggcttccctccctcccgcgcctccgcccgcccgcatccgacggcttcaagcttctcttggtgctgctgctcttctccgccgctctagccgaggtccgctacatcgcctcctcctccatggcgcccacgcttcgtccaggcgaccgagccgtcgccgagaaggttacatacttgttccggaggccatctattggggatatagtgtttttcaaagtaccgactgctgtgcagaattatggtgtcaataaggatgttgtctttattaagagagtattggcaacaccaggagacttcattgaggtccgacaagggcagcttattgtaaatggtgtcgcactaaaggagcattacgcagcagcaacgtcattgtacacaatggaagcaatggtccagagatctttaaaagtcacaagaaagaagatgatcaaaaactggactggctgctccatgttgttgacttcttgagtgcccgttgtaatcaatcgttcaatgggcctcagatggtggatgatctttttctaattggatggatgggtg

SEQ ID NO: 282031 - DNA, 504 bp, Zea mays
ttcctctgcgtccgcggactcttgggcggacgcgggggggggccaacaccacccggcggtctcctctccttccctccctccccggccaagaaggctgcctgtatgaaaaacatttcgtctgctttttcacctttattacgcctagacttcggaggaggcccgagcgagcaggctttcctgctgtccaggaccaagcggccggtcactccgtcgcagtggatggacctggagcaccaggctctcatatacaagtatctcaatgccaaggcccccataccttccagcctgctcgtttgcatcagcaagagcttcaggtcatccaacagagtgagctggaggcctctttaccaaggctacgcaaacgcagactccgacccagaacctgggaggtgccggcggacagacggaaagaagtggcggtgctccaaggaggcgatgcctgatcacaagtactgcgagcgccacatcaataggaaccgccaccgttcaagaaagcctggggaa

SEQ ID NO: 282032 - DNA, 418 bp, Zea mays
tctttttttttttttttttttttttttttttttttttttaagaactatcataaatagttacacgtacatcaaggtacaaaatctctgtactctgcagcacaaaatcccaaaataaaaagacagcaaattaacttaagcttgtaactgagcattcccagtgctactttgccttctgtagtagttctgtgtagtgtgtacaaggagtcaatcttcgtcaagaaacagcctggtgcaagatatccctccaattcttcaccgctacccatcttccattccatagatgtggatccaaaggtcacgactcggtcaatggtccgcatcaagagtctgacgttttcttggatccgccatggatcaagcttgccagcttcaccctgggcttggagtactccccgctcatcgcaagcttggcagcaag

SEQ ID NO: 282033 - DNA, 770 bp, Zea mays
tttctcggacgcgtgggcggacgcgtgggtgcagggctctgactgaggtaaagcggcttactcaagaacacggtggtgaattggctttctcaagaacaaggcgatgctgcacacagactactgacatggatggctgttctgccacctttctgaataagcccattcatgtaatgtttggtacatgcaaaccgcatgcttaatccgcttgatactgcgatagatagatccttcacctggtgccaatattctgtgtggcaatgccaagtcacatattctgagcagcaactggagattcgctcatgtaccgattcttcaagggcctaggatcatttggggtgatgaagattttgaaatacatgtggaggggtacttatatgatgaaaacaaggatggttgtgaagagaacggagtagtggcatcacctatcagggaaagggaagtgctattgacatcatggctgacccctttcagattatcgcgctgagatcttcctggcgaggattgggagccacgagccagatatccttgacggaaatgtttgcttggacaccgtaaaccggaaagtaccggcgatgatattgatgatgataatcgcactgctctctattgtcatactgttgtctgcactcttcagcgacatgtcttgtgccttttcaacgtgcgaaatgtgagcaattgctcttgtaaagctgcactatttcactaaaacattattgtttgggttatttagatccatggtattactatttatctatttggaaacttacatt

SEQ ID NO: 282034 - DNA, 527 bp, Zea mays
tcgctcaagttttacatcatttgaaccacgaacttaagaactttcaagtttgttgtctccatttctattattctatattggcttactgttagttatcatgaaaccttccataactgaaaaataaccagtttgactttggttaagatatttggcaggaagcctagtgtgagttaaagtatgatttgactgcttagctgaatgctactggagtctggatctcttaggctgtcattagagctggggtataacatgcacttgaatggcagcattagcttccaacaaaaccacacaaagcattttttgtttccccctttgaattgtgggattgaagggcagcctctccgcatttgtagggggaaggcttgccttgatttatcccttacctagaccccaccattgtaggagcctccgacactaggtctgccttttcattggttcaactgactccattgtgtatctatttggtaaaactgttaatgtaatgtgaatacatttactctagtggaagataccctacattagactta

SEQ ID NO: 282035 - DNA, 419 bp, Zea mays
ttctcctagcgcctggcctctcctgtgcttgtcgtgcccttcgtcgcctcggcgcgaccgccatccgtcgctcgggcgggggcctcggcgcgcttgttgtacgtcactgccttctctatatactacgtttcgatttcgaggcgggtcggcttcttcttcaccggttgatttgttccgctgctttgcgcctacgtgctctcgcagatcccttggggccgtctcgcctccgcgctacgccggcagcgagctgagtttggtttcgccgggttgctcgcattgcggcttattctgcccgcgatcttagttcttgcgttgatcctgcttcgccctcgccttctcagcgtgtgggatgcaagattttggagccgaaccggtcttaggcgtcgtcatggcgtcgcatggcgaggagatggaggcag

SEQ ID NO: 282036 - DNA, 499 bp, Zea mays
tcgcggacgcgtgggcggacgcgtgggcggacgcgtgggtttaagagtgtgtcccttggcttgggtccagcagccttcagaggcaaaccgtcggccggcatgcagtagaggcaggctagctgcaagagagttcatcgatctagctagctagcgtgtgtttagggtacctagctagctagcttcaacatatatatcttagttgcacacacagctcaaaagaaaggaaccatcgatcgatcggcagggagggatggggctgagggagatcgagtccacattgcctccggggttcaggttctatcccagcgacgaggagctggtgtgccactacctctacaagaaggtggccaacgagcgcgccgcgcaggggacgctggtggaggtcgacctgcacgcgcgagagccatgggagcttgcagacgccggcaagctgacggcgagcgagtggtacttcttcagcttacgggaccgtaagtacgccacggggtcgtgcaccaac

SEQ ID NO: 282037 - DNA, 526 bp, Zea mays
gctgctttctgtgcctatccagatggctttgaatccttcattttgcgccatcgctctcgtcctcggtgatcgatccaagagactgggaccttcaaagagcaataggactcatggaggttggagacgcaagaaacggttctgcagcagcggcactgacaaagggaagtgcggatgatgccgcccgcaaaccgctccctccttgctgcgtcaaggccaaggcgcgtgtgcctgaaaccgaggccaactgccatgatactgtggtttcagggtggttcacggaacccagatcgcgttttggtaaaacaagcaaagtgcagtacttcaataacccgatgtggcctggagaggctcattcattgaaagtggagaagatcttgtttcaagggaaatcgccttaccaagaaattttagtttttgagtcttcaacctatggaaatgttcttgtgcttgatggtatagttcagttgactgacaaggatgaatgcgcataccaggaaatggttactcaccttccactgtgctcaat

SEQ ID NO: 282038 - DNA, 455 bp, Zea mays
tttttcccacgcgtccgcccacgcgtccgcgacaaccttgggcatggaacatttgtagcaggagttattgctggccaagatgcagaatgccctggatttgcacctgatactgagatatatgcttttcgagtcttcacagatgctcagatatcttacacatcatggttcttggatgcatttaactacgcgatagctaccggtatggatgttttaaacttgagcatcggtggacctgattacctggatctcccctttgtggaaaaggtctgggagctcacagcaaacaacattattatggtatcagctattggaaatgatgggcctctatatggcacattaaacaacccagctgatcaaagcgatgttattggtgttggtggtattgatttccaataaccatatagcttcatttttctctagaggcatgactacgtgggagcttcctcatggttatg

SEQ ID NO: 282039 - DNA, 487 bp, Zea mays
tcgtttcacgcgtccgctgaaggagcagagagagaaaatgttgagggacgtgatgaggcaggtattgttgagggtaagtctctgtcaaatgctcaagtcgacttaaatctgacaatggcaggaggtttgccgtcaaacaattctgcattgcccccgatgcctggacatctcaactatggtggaatgggaagagatctagttattgggcaacccactggaagtgagcttggtggccgtgcagcctcaattgaatctcggggccctagttcgagaaaacgtaacctggaggaaggtgggagcacagctgacaaaccaataagcaggcttcagcctgctgacagcattgagggaaccgtcattgaccgtgattgtgatgaagtggatgacgccgcacaagattccggtgctaggagccaaaggcctcgtttgtttaatctttttgatattaaatcgccatttttttcaggagcttgtcccagcagaaaat

SEQ ID NO: 282040 - DNA, 509 bp, Zea mays
gcggttccattccaccccccgactaaacgccgccgtcaagtttccccctcccccaccatctacagccgccgccgacgcccaccagggctgttgccccagccgccaccagggaggcaccaccgaggagcgcgccaaggtgccggccgcgctcacgcggaggggcctgcccgcctctgctagggccgaggctgaggccggatccacactggcggtcagcgtggcagggacgtgcccgcttgcgcagaggagcagagcgcccgttcaggcgtccgcccgtacgagcgtccgtgcccacgctggcaactgaccgcgtccgagccgggggacggccgcagcgtgcccgccggggcgctcgggctgccggggaaagctgcaatccgcaggcccaatccatcctctgttttcaaatttctgttagttaaaatgtgtgtttttcaacaaagaccagagaaagatcttaatcttgttagggagtttggcttaaaatccacctctacaatgtcaccatc

SEQ ID NO: 282041 - DNA, 467 bp, Zea mays
gcgtctacgcggacggccacgcgtccgcccacgcgtgcgtcttaatcttcctcttcgtctccttctagtagtggacagagagagatcgagtgctagggaagaagcaaagcaagccagccaggcagcagcaaccgcgcctggtttcctcctcctcctcctcctgctcgtgggctcacaaggcatccttcggttcgggggtgcgaagcggcgcaacggcggaggcggctctagcatcaccggccgacggtcctcctccttctcacgaaaggtactagagcggcggcggcggcggcgcatcaagcaccgcaccgatgggcccactggagccgcgctaccgtccaggcggcgcccctgaggacacgactaagagaagggcctccaagagcaagagtttcaaagacgccgagaacttcgaagtcctcgtccttgagaagagctgcggttgcaagttcaagtctttgaggatc

SEQ ID NO: 282042 - DNA, 512 bp, Zea mays
  unsure (1)..(512): unsure at all n locations
tcgcttacgcgtccggcttctcagcgccacgcaggtcaggcgcatcgagtccatcagagcccacgaggtgggacgcctcctcgagtccatcgccgccgcccgtggagccgtcaacgtcagcgccgaggtgaaggcgctcgcgccggacctcgtggcgagggccatgttcggtggcaactgcgccgagaaggccgacttcatccgccggtacaacgaggtcagccagctggtgtcgggcttcttcctggtggacctgttcccgtcgtcgaggctggtacggtggctgagcatcggcgagcgccgtctcctgaggagctacggcggtatccagcgcatcatcgcgtccatcatcgagagccgcaaagctgccagcaccagcgacgatggggacaactgcagcttgcacgaccatcctgcagaggatcttctggcgtgctgctcaggctgcaaaggagggctcgctagctttccctctcacctncgagattatagggcgccgcatgtttgacata

SEQ ID NO: 282043 - DNA, 571 bp, Zea mays
tcccacgcgtacgtccacgcgtgcccccacgcgtgcgcccacgcgtccgtggtcggcgagtcattaggaaaagattcttggatgatcctggtgtagccacagtgtcaaggccacatacaggaaggaaatctaggaatggatgttctagtaaaaagaaaagatcccctaaatccaggggtttgcgacctccgagacgtgctgctgaaaccgcattaattactttcccaaagaaaggagtttcaacagaataggatgaagatgactccgagagtttctcagatagtgaattgaacaccgatagcactgaagctgcacagttagaatggagtggtcagttctgaactagaagagagattaactccccatttgacatcgatgatgttacagatccttctcagtttactgataataaggaaaattctggaactggtaagaaactagttctcagaataccacgacgtgatttaagaactcaatttcctttaggaagcggaaaagccgaatgctccatacaggataaagcagtgaagtctctttctctagctaatcatgaaccagttgagcacgaact

SEQ ID NO: 282044 - DNA, 440 bp, Zea mays
cgttttattttggagggggcccctggttttttttgggtgtgtgttttttctggaaggaaacctcaggtgctgtttgcttcaagagctaacaagttgtaccggttcctgaggtggaacagctctcaagattctagaacgactcccccccccccaaaaaaaaaaagaggatgtcctgtctatgaaccaaatacgaaagcagaaccactctattgtttcaacgaaccatccccccaaccaactccattcgtggctcattagcagtgggctcgagtggtttggtcgaggcgtttagcgcgaacacactgcgtctgcgtgtatgggatccctcgttattgcctgccgatcgcaggagcaggaccgcaacagatcaaagcctgatgcagcctttaaatgcaaccccaaccgtaaccgaggctggatgccgccccgagccctgagcc

SEQ ID NO: 282045 - DNA, 604 bp, Zea mays
gtttcgaaagttgccctctcggatcgatgagtgctgctgcatgtggtcatcctttctgcggtacatgttggcgaggttacattagcactgctataagtgatggtccgggatgcttgatgctgaggtgtcctgatccgtcctgtgctgctgctgttggacaagatatgataaattcactggctgctgttgaggatacggaaaagtatgggcgatatcttcgcagatcttacattgaggataatagaaagacaaaatggtgtcctgcgcctggatgtgaatacgcagcggaattcgtcatgggcagtggcagctatgatgttaattgcaactgttcatatgggttttgttggaatgtgagtgctcaaactgattagttcatttttacataatcagcagaccatatattttattctttttttcagggcaccgaggaagctcatcgtccagtagactgtgccactgtttcgaagtggatcctcaagaacagtgcagagtcagagaatatgaattggatactggctaattcaaagccttgtcccaaatgcaaccggcctattgaaaaaaatcagggatgcatgcacatcacatggcactcaccatgcaa

SEQ ID NO: 282046 - DNA, 466 bp, Zea mays
gctatcatgccatcccatcccatccaagggaatccgatcaatcccggactcgtgctcccggccaaccctagcttcccttctcttcccctcccccgatggacccgccgccaaccagggacagaggggaggagctggagcctgaaacccgcgccttccccgacgccgacgacccggagacctcccgatctgaacgcgaagagggtatccctccaccgccaccgccaccgcctctgcgccagagctcatgggggcttgccgcgccgacgagcgcctcaggccgctcctcaccctcaacgtctcctgcggcgcagcggacgaccgactcatcgcacacctcgcgcagcacttcgaggtgtcggaggtgggcatgctcgcgcgttgccctttgttcccctcgtttccctgcgcgttggcaaggttcaaagggaaggggcccttctctgcccaacacacattagagggaagc

SEQ ID NO: 282047 - DNA, 683 bp, Zea mays
ttcttcccacgcgtgcgcccacgcgtccgcccacgcgtccgatttactcacagctgttcttcgtcttgctagtcttgctgaaaatagtttaaatgctgttgaacgggtcggaacatacattgagttaccttcagaagctcctcctgtcattgaggatcataggccaccccctggttggccatcatcaggtgtcatcaagtttgaagacgttgtgcttcgatatcgaccagaacttcctcctgttcttcatggcatatcttttgttattaatggaagtgagaaggtaggaatagttggcagaacaggtgctggcaaatctagcatgcttaatgctttgttccgtatcgtggagcttgaacgagggagaatattaattgatgattgtgacacttctaagtttggaatttgggacttgcgcaaagttctaggaataataccacaggcaccagttctattctcaggttctgttcggtttaatctggatccctttaatgagcacaatgatgcggacctctgggaggctctggaaagggctcatctaaaagatgttataaggaggaattctttaggattggatgctgaggtttctgaagctggtgaaaatttcagtgttggacaacgacagctgttgagcttagctcgtgcgctgctgagaagagcaaagatacttgtccttgatgagg

SEQ ID NO: 282048 - DNA, 536 bp, Zea mays
tcgctcacgcgtccggactagctagctggcacgggtagcggcattacttgcgcgcgcggctggctgccatggcgaccttcaagaacagcagcccgtctctgtctccgctggacgtcttcctgctcggggcggcctcggccaccgtgctggtcctcttcttcctgacggcgactgcgagccccgcgtggcccgcgctggaggccggtcctcgctctggctcaggcagcgtgcgctgcattactagtactccacgagcaaacggcacggatggtcgtcgacactctagagcaacacgcccgaggagtaggagctcctccagcgaacgaggcgggcgcgtccggctccgatgatgacgatgcggggtttgcgcggatgctgcgccgagcggcgatggaggaccggacggtgatcatgacgtcggtgaacgaggcgtgggcggcgccggggtcgctgctggactcgttcctggagagcttccaggtgggcgagaacgtgtcgcacttcgcgaagcacgtcgtggtggtggccatggacga

SEQ ID NO: 282049 - DNA, 624 bp, Zea mays
agttttagttctgcccacaagctctaacctgtgttcctcatgtgagcatattgtttctgtgctcaagccgaggatgactcccttcccaaccctgagtgcgctgtcccagagcttgcttgtcgtgttcctgtgccagtggtgaccgcagccacctatgttcacctcatcgtggccaagacactcgaagcaattacacacaaaggtcgcgcctccgtggatcggcgttgaagacaatcctaccgtagacccttcaactggcactttctctagccgattcctcgcaagcactgaagactagagcacctagaataagtggtgtttaaaggaggagtctactccagtggctgctaatcaagtggaggagccatctaactgggtatgatagtaggatctggaacctcttcactgcaataaggtaatcaggagctttctaggtgtccctgtggctggaagatgcttccagtcttgaaggaggattagttaggtttatgtgtgaactttggaagggttctaccttcctgctatggtaataagttatgcactttgagtataacatgacttgtaattattataactctttttatgttgtaaaacttgagttttggaaatataaagtatgtttgt

SEQ ID NO: 282050 - DNA, 834 bp, Zea mays
cccacgcgtccgcccacgcgtccggtggtgcccttcaaaggtctatggcctggatataaacccaagagctgtgaagattgcatggattcccctgtacttgaacgcattagatgacgacggtctcccgatctatgacggggaggggaaaacattgctcgatagagttgaattctatgaatctgatctcctttcttactgtagagacaacaagatagagctcgatcgtattgttggatgcataccacagattctcaacccaaatccagaggcgatgtcaaagattgtaacagagaattcaagtgaggagttcttgtacgccttgagtaactactgtgctcttcagggttttgtcgaggaccaatttggccttgggttgattgctcgtgcggtggaagaagggatatctgtcataaagccttcaggtattatggtattcaacatgggaggtcgaccaggacagggtgtctgtgaacgtctatttcgacggcgtgggtttcgcattactaagctctggcaaaccaaaattatgcaggctgctgacacagatatttcagctttggttgaaattgagaaaaacagcagacatcgattcgagttcttcatggatcttgttggggatcagcctatctgtgctcgcacagcctgggcatacatgaaatctggtggtcacatttcacatgctttgtctgtgtatagctgtcaacttcgccagcccaaccaggtgaagaaaatatttgagtttcttaaagatggattccatgaagtcagcagtttccttgatttatcccttgacgatgattctgtagctgaggaaaaaattccctgctagcttac

SEQ ID NO: 282051 - DNA, 516 bp, Zea mays
agatcgtgcccctcttcttcaacctcgccgggctgcatcttcctcatgaccctgctccactatgtccctcccaggagttcggcagctcggtcgcttgctcctctccgccgctcaccggttccctttccccaagctcgtgttcctctgctcctcttcccctaccgcgcagctccctcgctcgcggagttcccctgcgcgctgtggtcttccccactccaagctcccatggcgcccagctcgcccagctccgatgatgcccaactcccagctttccccctcagttcgctcttccctggccacgcgagctcagagccctccctgctcccgatctccatagccgcgcccctcaagctcggcagggagctttcttcctccctcgtccgcggctctctcctggcgcctggggccgcgcgagcagccctccgctcggctctgctcctccctgctcgcgtcaaccagctcggaccgagcgctctgacgttcgcttgccgtagtgcttcttccccagcgcgtcct

SEQ ID NO: 282052 - DNA, 534 bp, Zea mays
  unsure (1)..(534): unsure at all n locations
acggcaacggagaagaggactgggggctgcggcggctggccggcgcggcgacggggatgggggatgggcgcacaggcggcgccaaccgtccggcgtggctgcagcagtacgaactgattggcaagattggggaggggacctatggcctcgtcttcctcgcgcgccttaagccgccccacccggcacctggccgacgcggcccccctatcgccataaagaagtttaagcagtcaaaggagggggacggagtatcacccaccgcaattagagagatcatgctcctgcgcgagatcaaccacgagaatgtcgtcaagctcgtcaatgtgcacatcaaccacgctgacatgtccctatacctcgcattcgattacgcagagcacgacctttatgagattattaggcatcacagggagaagctgagttcctgcattaacccatacactgtcaaatccttgctgtggcaactgctcaacggcctcacttttttcacagtaactngattatacatcgagatctaaagccttccaacatact

SEQ ID NO: 282053 - DNA, 568 bp, Zea mays
ccttcctccccaaacaaccggcagctgcgcgatggcttcgcttttcatccatggctctcgtcgccggctcctacgagcgcttcatatggggcttctcactcaaaaccctgacaaccccctccgccaccggcgcctcgctctccgagaccctcaccctcgcgccgctcttctcgtacccggcccacacgggcccggtgcgctgcgtggccgcggcgccgcgggcggggctggtggcctccggcggcgcggacgactccgtccgcctctacgacctcccttccgccgcggacctcggcccgctcctggacccctcggccgccgtctccgcgctcgccttctactcccggggccccgtgccgcggaacctcctggccgcctgcgacgacggctcgctccacatctacgacgccgacggcttcgcgctgctctccacgctccgcgccttcccgcgccacgaggccgccgaggcgctcgccgtgcacccgtcgggccgggtcgcgctcgccgtcggccgcgcgggggcgtttgccatgctcaacctcgtccgcgggcgacgcagcttcgcatg

SEQ ID NO: 282054 - DNA, 526 bp, Zea mays
  unsure (1)..(526): unsure at all n locations
tttgtttttgtctggtccttgatcgggtaggcggtcgtgttgtgcatggcggacttgagacagttgatggtttgtccgaagcattggaaatctgagaattacttctgtgaaaattatacggaacaagcagactgggcactcagaaggctatggttctattgagttttcctctcgagctgctgcagaacatactctgatgaacttcaatgggcagatgatgccgaatgttgacatgacttttaagctgaactgggcttctgctagcactggtgataagcgtggagatagtggttctgatcgcacaatatttgtcggtgatttggctcatggtgttactgactccatgttggaagatgtgttcagagctaagtacccttcagttagaggagctaatgttgttgttgataggttgactggatggcccaaaggatatggtttcgtgccttttggagatctgaataatgaatngtgaagatgtacatttgtgcttgctngatctgaaaggggaccatttttagtatggaac

SEQ ID NO: 282055 - DNA, 601 bp, Zea mays
tctgtttcgtgggtgcatctgtagcacaggcaaatatgacggggacaaattatatcatgtttacaatgggaacagacttgaaataccaatccgcatagagttggttcagaaatatggacagactaattcactatgtgaacaaggatggccggatcaatgctctttattccacaccttcgatttataccgatgcaaaatatgctgcaaatgagcagtggcctctcaagaccaatgatttcttcccatatgcagacaacccaaatgcctattggacgggttactttacaagcagacctgccttaaaacgatatgtccgcacgatgagtgggtattacctggcagctagacaactggagttctttaaagggagatatagctcaggtctctcaacggatagtctaggtgatgctctagctcttgcacagcaccatgatgctgttacaggaacagagaaacaacatgttgcaaatgattatgcaaagagattgtcaattggatatacacaagcccaggagctcgtttcaacttctcttgcttgcttgacagagtctggctcaaaatcacgttgtgcatccccagtgacaaaattttcacaatgtct

SEQ ID NO: 282056 - DNA, 663 bp, Zea mays
gaaaaagctaaaaacaatgcttcggcttatgagaaacgctcagaatattgtgaacgagaacaaactatgacagatttgcaaacagtgacccaattggatcctttgcgtgtttatccatacagatatcgagcagcagtgctgatggatagccacaaggagaatgatgcaatagcggagctcagccgtgcgatatccttcaaagcggacctgcatttgctgcatctccgtgcggctttccacgagcacattggggatgtacccagcgctctccgtgattgtagaagccgacctcttctttggacccgaatcaccaggagatgttggagcttcagaaacgtgtgaacagccaagagccctgacacattgtggtgctgtattgtgtattgtacaccacgactcatgccactttggtttgcctcgtgacagacagccttgacctgattcattttttttcgtttttccgttaattaattaatcaatcactgtaatacgaagttttcaggaagaaagtaacagagagcaagagagagaactagttatatgaaagcaggcattgataaagtctttttaactcgatgcctgtggcctctgtagaagtattgtgctaatccctgaactgtttcttgaacaagagattcgtgcataatgtatttttcaggtctg

SEQ ID NO: 282057 - DNA, 565 bp, Zea mays
ctcccgtttctctacacttcctgacccagatggcggcggcaccctgctctaccaccttctccggcgacgtgtgggcggagctgcgcctggcctccgccagcgatgtgccgcacatccaccgcctgatacaccagatggccgagttcgagctcctcaccgacctcttcgccgccaccgaagagctgctcacctccacgctcttcccctcgccgacgccgcctcccttcacctccttcacagccctcatcctcgacctatccccctcccccgtcgcccccgacccctggtccaccatcgcctcccggcgcctcgacctctccgcgtccccgctcgcggaccccgaggccgccgccttcgcctccccgcgcggcggcgggcgcgtcacggccgggttcgtgatctgcttccccaactactccaccttcctctccaaagcccgggctgtacgtggaggacatcttcgtgcgcgcaccctggcgccgccgcggccttggccggatgatgctgtctgccgtcgccggcagggccgccgagctcgggatgggccgggtggagtggtgcgtgc

SEQ ID NO: 282058 - DNA, 510 bp, Zea mays
ccctcgcgtccgaaggccgacactccaccatcctccatggccgtccggcccacatccatcatcgccgcctccgccacagcacgccatggagaccagcaagtcgccaccgctctactcggcgccgcgggagccctctgccacgacagtgatgctgtgtccgtgcctggcgttcttcctcctcgctctcatcatcacctccatcgcactcactgtccactttcgcctctactgccacactcctcttgcccaccttatctccccgcaccgctgcccccaccacatctgacctccgtctccgcccgcatcgctggcgtggtcctgcttcccagaggcagtgttccctctgctgccgccgagatccccatacgttatgggttcccactctcctcgcgacgccggcatgcggggcttacgacgtgctctggggcttcgcagacggaaggttcctctccatcttggctgcctccgacgaagatcagggctcgtcggagcaggaggcggctgcgagca

SEQ ID NO: 282059 - DNA, 371 bp, Zea mays
cgtttgtcgctcccaatcttcagttcgctgactgactgtcgtgttccttattttccctcgtcggtcgacctcgtcgcgacttagttagtccatcgtgctggtcgctatcccatactgtgcctattagctcggatcctgtcccagctcgtcgtcgcgtcgttcgccgtccagtcgtcaaacccgtcatcccctgctcgacccccacctcaccagctcgctccagactacgatcgaaggtcgtcgtcgttccgcgcgtcagcaagcaatctcaagaatcgggtgaagacgaagctagcagcgcgatattccctaagcgctcgacaaattgcctggatcgaaaaatcgctaccaatctcgcggattcgtatcag

SEQ ID NO: 282060 - DNA, 459 bp, Zea mays
gtcttctcagaattccctgatcacgttccaggcagttgagagcccgcgtactagccggacaggaggcgacaccgcgagacgtagcatcatgttggaaggaaaggcggtggtggaggacaccgacatgccggcgaagatgcaggcccaggcgatgtcggcggcgtccagggccctggaccgcttcgacgtcctcgactgccggagcatcgcgtcccacatcaagaaggtaaaccctcgtggctcgtgccgtcccgtctccagcctatgaagctcgattgattggggttgggggggtggctgcagggagtttgacgcgatccatggccccggatggcaatgcgtggttggctcccgcttcggctgctacttcacgcacagcaaggggagcttcatctacttccgcctggagtcgctcaggttcctcgcttcaaaggggcggcagcatgatgacaagcccca

SEQ ID NO: 282061 - DNA, 475 bp, Zea mays
gcgccctcgtttccgcggacgcgtgggggccgcgaggccgacccacgccacgctcctcctgagctacagtccctcctccaccgctgctgcgctcacgctcctcgacctcccacactcactgtcagtgtaaagctcacgccggaggccggagctagctgccccctgcccgtgcgtgtgcatcctggctgctcatctatctctcttgctccgatccaagatccaacaaggtggtgggcggcgggattgcggctgcggcagtcgggttcaggctcagataccagcctcctccgtctccgtttccagcgggggcgagcgctaccggggagctcgacagacgccgcgccgcaatgcccaagatgttcggtttctctcggcgcccgatgaagctgggcaggttgaagggccatctgcacgaccatttccatggccctcgaagcccgtctcggaccaccaagcgttccagccatcccaacgc

SEQ ID NO: 282062 - DNA, 361 bp, Zea mays
tcgtccacgcgtgcgaaataatttccagcaaaaactcgggcacggatagcatgttgataccttgcgttcatcttctgaattctaaatcgcggttgacatgtgattcgtggctccacaaatgctccactggtgcacggtgtgttatcattctgtgagcgatgatgtacgtcagcgtccgtttcctcgaggctcgaccactcgagcttgagaaaaatcaatgctcccacctacctcgagacccaggacgcgtggagagcggtgccaaaccaccatggcgatcctgctcctgttgctcttcggtttgtcctcagcttgagctgatgagtacggggaagagctgctgcagagcgcgtgttgggag

SEQ ID NO: 282063 - DNA, 540 bp, Zea mays
tgcgtcgtccttgtttgtactatacagctgctctcaacctttcgttccgtggcccctctcgtttattcgcccctgccacgaccaggaccgcgtcgcgcgctcgcgcccttcacgccctgcgctgtgcttgcctcgtcgcggccacgtccacctacctatacctctctgtccgacgacctcatcccctttcccaagatccgagccgcggcgtctccaagtacctcgctcgcaggagcaggttgcaaggagccagccactcctgcgagtttctggcgatggtggccgttgcggcgggaaggcgggccggcggcgttggtggccgccggcgctcgggctgcggcgcggggcaggcacagcagaagctactagcgatcgccgtcgccgcgcgcttcgctgaggccgtggcgccgccgtctgcggaggcctcccgtgccggctccggcggctgctgcgtagagctcctcgagtgccttctcggggctctgagcgtcaacgcggccccgccgcccgcgcagcacaggcgggccgtgcactcgatcc

SEQ ID NO: 282064 - DNA, 485 bp, Zea mays
cggtcgcgtgggcggcgattgaggatgtcgtcctgctgtcagtggtgctggacgaggtgaagaataagaacctttcagttttcaacaggatcaaggcactgtgtatcaacaaagcacgtagattctatgttttcgccaacgagcagcatagggatacttacgtcaaagacatggttggggagagctctaatgatcgtaatgacagagcaattcgtgttgctgcacgttggtaccaaagtcatcttggtgagagcgtgaaggttctactgatcacaaatgacagagataacaaaaggaaagcgattgaagaaggccttaacgctgagacagttgagtcatatgtaagatcgcttgcacagcctggtttgcttgatttggttgttgttccaactagcggagatgtttctatggaagatgtagacgatcatagaccatcaaagaagaaagtaatctacaatgagcacaaacctatgtcagaaattaca

SEQ ID NO: 282065 - DNA, 387 bp, Zea mays
tcgtccatgacatggattaagatatttgtcagactgcagaaatgcagatcaatatgctgcttactgactcaatcaggatcccttaaagcggtaacattaacgacttgtgatgtctgtgccttcatgttcagaagttcttgggtttatttcagattgaacagagcgcacaaacagatctcggtggtgatcttcttgaactgaagagggaaatctgggtgtgctctgctttgatcaattggctgcagaatgtcatatatggatattatgccttgctgcagtttgctctcttcctgtaatttggtgttttgatgatgataagagtttttatggccattatcttgtgaaaaaataacatttggaagttaatacaaatgtactaggttctgt

SEQ ID NO: 282066 - DNA, 170 bp, Zea mays
gcgcccacgcgttcgcccacgcgtccgcggacgcgtgggtccatatatggcatgctgcagtttgctctcttcctgtaatttggtgttttgatgatgataagagttttttatagccattatcttgtgaaaaaataacatttggaagttaatacaaatgtactaggttctgt

SEQ ID NO: 282067 - DNA, 343 bp, Zea mays
tcgttcggcgacaacctggaggcccgcgtcgccgacttcgggctcgccaagttcctccgctccggcgccacctccgagtgcatgtccgccgtcgctggatcctacggctacatcgcccctgagtacgcgtacacgctgcgggtggacgagaagagcgacgtgtacagctaccgcgtggtcctgctggagctcatcacggggcggcgccccgtggggggggacttcggggaaggggtggacatcgagcagtgggccaagcgggccacggccggccgacgggaggccgtgccgtggatcgcggaccggtggatcggcaccgcgcccaaagacgaggtggcgcacc

SEQ ID NO: 282068 - DNA, 470 bp, Zea mays
tgattttatttgatttaggatataatttccttaaaattatgtttttaaataagaattttgcttgatgatgggactgcacctagataccttcttctattatcctttttgtaataatgattttgtagtccatgtaattttgtgttcattaataggataagctatgcaggggagctcttagcacatattagaacagtgaagatgtacagttgggagaaactattcactgaatgtttggtggaaagaagagaatcagaagtgaagcatctcgcgacaagaaattatctggatgcttggtgcgtttatttctgggcaaccacaccgacattgttctccctttccaccttttctatttttgcaataacgggacacgcattggatgctgccacggtatttacttgtgttgcactctgtaacacactaatatcaccgcttaactcatttccatgggttattaatgggatgattgatgc

SEQ ID NO: 282069 - DNA, 453 bp, Zea mays
ccctttggtcaagcctaagcgaccccgcccgggccttgcgcagctttttcagctcgcctgtcatctatgcgcacacgccatcgccgcccctagccattatgcttggccgacgactcgctttgtgccactgcgtcgatgtctgcacaggcttgcgatgtcccgtcttagctgccagctttagcttttctctggccgcaaggccgcgctcctcgttcgaccgcgccgttggctgcttactcctgtcgttgtgcaagctatcaggttggctgatgctgctctagtactcgccagttggatgctgaactgaagaaggcgacgttccgatgcgtcgctcatcaagcgttcgatcgaagaattcaatcagagactgtcatcgattctgtggtttcgagttggatttaatttaggaacgataattaatcacgagaggcggaagacgatccaagtcgacca

SEQ ID NO: 282070 - DNA, 868 bp, Zea mays
cttgattggtagcggcagagtctatctgcacggggggctgacaaatggctttgatggctcctcatggccgcttcaaacacgccacatgagatctgctggggaagcgaagctcattatgcatgtcgatggctcagcattgaagaacaagatgggtagaagtgtcgccacatcaagtgcacatcctgttcctgcactttcaatgccagccccatctccagctccagccccatctccagcttcggccccaacccctgctccagcaccagcactagcatcagcgattccatacacgggagtctcaccttcatatccaccggtttcagcatatcctggtgcaaccgcataccctgcttacccaacttctagccatgcaccatataccactgctgaatatccaccacctccgcagcaaccataccaacccccacctgctggataccctccatcctatccaccacaaccatatgagcggtcttacccaccgctaccatatgagcgatcttacccaccacaaccctatgagcgatcttacccaccgcaaccatatgggcaacaaccatacccgcccccgccagcagcagagtcgccgtacccaccagcgccttaccctggtacttatccaccaagaccctattgatatagcagcgtcagccatgatctcaggtagaggcatgcaaaattcagcaagcaacaaacaacagccttgatgctatgtgatacgcgcctcagcgtggattctttatttctaatgatttggttatgttcctaacaaaaaatagtaccaaccgtcactgagttgttgcacatctatcacaaatcagttgaaggtcagagcccaatcgattggtgacaaattggagctgatggg

SEQ ID NO: 282071 - DNA, 631 bp, Zea mays
gtactccagctctaccgatcatgaagctttcgcgtgaaaacatctgcagatgtgcaagaccatcgacgcgttccccgcgggcgcagacgtcctggagaaggcgttcgcggcggcgagcctgtactacaactacacgggagaccagacctgcaacaagatagaggacggagacgacccgcacggcctcgatggctggcaatggcaggcctgcacagagatgatcatgcccatgacgatctccaacgagagcatgttcccgccgtccgccttcagctacgacgacaggtccgacgagtgtttccagagctggggggttcggccgaggccgcactggatcaccactgagtacggtggatataaaatcgataaggtgctcaagaggttcggcagcaacatcatcttctccaacggaatgcgagacccatggagccgtggcggggtgctcaagaacatctcgtccagcatcatcgcccttgttacagagaaaggtgcccatcatttagacttgaggtcttcaacgaaggggtgatccagactggctcatagaacagaggaggcaagaggttgagatcattcagggatggattgatcagtatcatcaggacatggcggaaacatcttcctgaagaca

SEQ ID NO: 282072 - DNA, 490 bp, Zea mays
gggccacccacgcgtccgtttttgctagtgcccctctgcctctggttggggctcagtatgacttaccaactgatctgaaggcaggccatgtgtacaccatccgtaaccacattgaggtggttgaagacctctcattcgtccgtgggagggatgttagagggagccccacttgccgcagacctcacagagaatttgtgtggagctacggagtgccagactctgttggagaaaaaagagagagatcagaggatcgcagaggcagggattttagtcgtcgtgactgggaccatgatgacgatgaggactttcagcagaatagacctcatggcacccgtaggcaccgccgtctatctggctgggcgcgttcttcgcggtgccgcggcggtccagaggattgctctagctcaagcgaaagacgcaggccgtccaccccattcagacgtcgtgggctggcgacagggccggctgggcgctggattccaaaggtaaa

SEQ ID NO: 282073 - DNA, 611 bp, Zea mays
ctgatgcgccccctggagccgccgcgccgtgaactgccgggtccacccacgcctccgttttattcagcgctccaagcatgatttatcacgggcacgattgagggctcttgaaagctctctagagaatggtcaactatgggcccctccatctccatcgcatcggaagacatgggaagagcaagcgcatattgagcgggtactacatgatcattccctattgaggaagcttgctgactcacaatgccatgctctacttgactgtatgcaacgagtcgaggtgaaacctagggatatagtagtacaacagggcggtgaaggtgactgcttctatgtagttggtagtggtgagtatgaagttctggctattcaggaagaaaatggaaaggaaataaccaaggttctgcatcggtatacagctgacaagttatcttcttttggggagctagcactaatgcacaataagccgcttcaggcttcagttcgtgctgtgaccagtggaacattatgggctctaaagagggaggacttccggggtattttgatgtcagaattttcaaacataccatcattgaagttgctccgatctgtacaactgtttacaagatttacag

SEQ ID NO: 282074 - DNA, 564 bp, Zea mays
ccttcgcgtgcgaccaactccgggtccagccatgcagggtggttccatacagatgccaagccatctccacaatcagtttaacccatccctgcctcatatgcacccttcaacaaccccgtttgtatcaatttggccagttgaggtatgtacgtcctatcgctccgagtgttcgaccgctgccttctcaggccacccgccctgcacattcttccatatcagctcaacatacatggaagcagaatgtggccagtgttctacctgagctaatggatggaggttcaaaccagaacagcccagctcaggcatgctcattcacctttatcaacaaagcagcagcacctacaaccaaggttccccttggcatggacaattcaaattcccagtatctcaatgctcctgcaaacaatcagatggctggtgtggacggatttagtagtcaagtggacagagagtttgctgagggtacaactccaagtgggaggaatcaaggtctctctttgaagaggaattacagacctacgtccaacaatgtagaatcttctcaatatggtttggaggggagag

SEQ ID NO: 282075 - DNA, 549 bp, Zea mays
ttttctttgtccgcccacgcgtccgctctaagccttgtgtctctaggggaacgtcgacatctgcaaccagccatcagtatagcgcgaggataaactgagtgtcggaaagattatattggtttggtttgtttgaaaagagagattagattggcttggtttgttagaaaaaaaaagttaaattgatttagttaggatataatgaaaaaagataagttaggttgatttggttacttaggataagaaaaaaaagataaactagatcaatttggttatgatatttcatagaggtcaaataagttgctctgtataagaagagatatatcaatctaattaaacaataattaagaaaaaaatccttatatcttactcggccgtaggcaaggccttcgtctcggcctccctacgctcccttattagtactgatcactgccataacaaccatatgagacactatgtccaatataacagtataacttaaatttttgtaaacgtatagtacttcacatagagacgactataaatattactaagtaattctatgatgatgag

SEQ ID NO: 282076 - DNA, 485 bp, Zea mays
tttgtcttcgtcgtcttgtagtagcactgagtgcgggagtactggccggccggcggcgaggctcctccactttctctgcacccatacatacgtatatgcttgttctccgccgtctccgcctccgcctcccactgccacgccctcttctcgtctcctccttctcctccacctccccctcctcctcaccctcgacctctagctcctcctcctgttggtcgtcgacaggcgaaagtagaagggccatggcgtcatctccttctcccgattcggccgcggtcgttgccgagggctccgcggctcgccgcttctggatcgctgcctccacgcgcgaggccgccttcgccgcatacacgcccttcctcctctccctcgccgccggcaatctgcggctcaacgtgtttcgccactacatcgcgcaggacgcgcactttcctcacgccttcgctcgcgcgtacgaattggccgaggactgcgctgatgatgac

SEQ ID NO: 282077 - DNA, 476 bp, Zea mays
  unsure (1)..(476): unsure at all n locations
aatggctctccaccgcggccatggccgccgcgccccagccgccgccgctcgaggccgaccaaaccctagcgctcccggacgtgcttctcctccgcgtcctcgcctgcctccctgagccccagctcacgggcgccgcctcgctcgtctgcaggcggtggacgcgcctcgcggggcgcctgcgccgccgcctcgccgtgcgggactgggccttcgtcgcgcaccgactgccataccgcttcccggacctggccgacctcgacctgttcccggcctccatcgccgcgcccaccacggcggcgccccacggcaccgctgcctccccgcttctcacctgcggcgcggtctcgctaaccctagacaccagcgcagacccgccgctcggcgcctgccggttcatcgacgacgacgcgctcgatcggngactcgccgccgtcgccgctaggcttcccaaccttagcgcttttagccaccgccgc

SEQ ID NO: 282078 - DNA, 360 bp, Zea mays
atggatcgaaccctagtgtcctccacacgccgtcgccatggccgtcgtccgcgccgccctccgcctgcagcgccagtgcctcgccgccaacccctttctcttctccgggcatggcctccgctaccgcaagcttgaggtcatcctcaccacgactattgataagctggggaaagcaggcgaggtggtcaaggtggcgcctggccatttccgcaaccaccttatgcccaagatgctcgcagtcccgaacctggacaaattcgccatactaatccgagagcagcgcacgctctatcaacgcgaagaggaggtcgcggtgaaacaagacacggagaaagatgatgatgcacggcttcaggatga

SEQ ID NO: 282079 - DNA, 515 bp, Zea mays
  unsure (1)..(515): unsure at all n locations
ttgcatatgtgccgtgcactcgtcccgtccccctccctccactcgacccacccgccaagacctcccattgccgccgccgagccagccaggggggagaagagaggccagccgcgtcgcggcgggcggaggaggaggaggagcgggagagcggagcgagccggcccggcaggatgttcgggcgggacccctggggcgggccgctggagatctccaacgccgactcggcgacggacgacgaccgcagccgcgacctggaccgggcggcgctgatgcggcagctggacgagacgcagcagagctggctcctggccgggcccggcgaccaggccggcaagaagaagaagcggtacgtcgacctcggctgcctcgtcgccgaccgcaaggtcttcatgtggaccgtcggcaccgttctcggcctcggcgtcttcatcgccttcgtcatcatgatcgtcaagctcgtcccgacaagcgcccccgtcgncgtcgcccgccagtacacgcaggcgctgcacaag

SEQ ID NO: 282080 - DNA, 487 bp, Zea mays
agttgtattcttgcgtgagctctttgacttgcgctgggggggtttgacatcaggttgcatgcacagctttgcaccggggacaaacttcctagcacttacaacggttttaagacctccgtctaccctgcagtggtatgaggctccatcacttttggtcctgagacttttatgtacatattaacctgataacaagtttccagggctttcagacgaagccagtcacagctcaagctctctttcaatgcacacaagatcatgagtagtatcttcaagcgtatgtccgaaggttcttgcgcctgagagcacaagcgcctacagtgcctaatgaaattgtcattgaggccatgattaaggggcttcgtccaggacttactgtccagtattttgcttggaagcctccacagactttggagaagctgcttctaaagatggatgaatatcattcgggccgacaatgactttcacaaagaagggaggaggattacag

SEQ ID NO: 282081 - DNA, 556 bp, Zea mays
  unsure (1)..(556): unsure at all n locations
acccctgaggtccggccggaattcccgttcgcccagcgnttgatcgatctagtctcctcctcttcatcccacctcttcctccctccctgcttcgctgttccctttccccgcccctacctggggcatctgcctctgaatcgcggcggctcccgaggcgccgcctggcgagcgtctaggcgccggtctacggcgacgatggaggtgtgatttggacgggagagagcgcggtggtgaggtctcggttttctcgatataggagatggcggcggcagaggcgcggggaggggagttccccgtgggcatgaaggtgctggttgtggacgacgacccgacgtgcctcgttgtgctcaagaggatgctccttgagtgccgatatgacgtgacaacatgtcctcaggctacaagagcactaactatgttgcgagagaataggcgtggttctgatgttataataagtgatggccacatgccggatatggacggattcaggctacttgaacttgtaggccttgagatggaccttccagttatcatgatgtctgctgattcaagaacg

SEQ ID NO: 282082 - DNA, 445 bp, Zea mays
ccttcgctaccgcccacgcgtccgcccacgcgtccgcccacgcgtccgcccacgcgtccggttgtttagggtgtagttcttgtgcccaaggatttaaaattcggtacagaaaagctctaggtacttaggtttttgattgctctctctgcttgtttagttacccttggatctaatgtttaattgtagattaatgtggcacataaaactattatgttgcacaactaacttggtgtgttatgtggtaagatccttgatctatgaaggatcgcggtgttcttggatctggttcctggcctttccatttccttctatgataccgggaaaaaaattaaaactgttgaagtgaggtaggattgaacccagagcatcatgagcttgcgctcacatatgttatcgtaaatgtgacttgagatggtttggtactggataatgacaccaaagattt

SEQ ID NO: 282083 - DNA, 545 bp, Zea mays
gggcatgcgagccgtcgtggctccccttgtgcgctgtccttgctgctcgctctgcgcgcacggtcctctgtcccctgcgcgtagccggtttctcggttcgccgtggagcctgcgcgctcagttctgtccagttcgtgtcctgctcggccgtccgcgcgacacgtcatccatggccgctgtccgtcgtcgagtccctacgtgcgcaccagctccctgtgtcgcgttccattcacctaaaccggagttcgccagtcgtccctgcttgtcggtgtgctgctgctctagtttggatcttgcccaagtcgctgccatggttgtatcggtgtttggcccgcgccgattcgcgttcgcgcagatcgccatcatagtgttgtcgctggtgatagcttcgcgtgcgtgtcaaactcctgcgtcgagtctttttcctgctcgccggtgcgccctcttggctcgcttggccttagtactcatcgcgtcatcgattccgctggtcagcgtcgttcgcatcgtgtcgcgtgtgtagctctatatacgtcaccctcctg

SEQ ID NO: 282084 - DNA, 415 bp, Zea mays
gtctactggttggacagccgacgcgcgcgccgggggggccccgcttgttgtatacggcatccatccgctgccgctgcggcgggcgggcgggcgggtgccgacgaggtacaagtagcaggacaggagtgcaggatggctgcgcggctacctgaccgtgacccgcgacggggacgggggggacccgtcgccgtcggcacagcgtcagggcggtaacatgcgttccgttgcgcgtacggaccaccggtgtcgtctaacaggaagagctgtcagtgacaggtgcgtgccgacgagtgacggtcgcgcaacccatccgtgcgctcctggctcggctagcctatccagtgcggttcgtggtgttcctctcaacgtgtctcgtcgtcggcccggtcggcagcggcagaattttcatttcaga

SEQ ID NO: 282085 - DNA, 333 bp, Zea mays
atctgatagatggaaagcgaaaattgacagcaggggaagtgtcccaaaacatcgatttccagcactagagttgttgtatgatctatctacaaagtgagagtgctcagaagagagactctgctctggatcacgcgtcctgaacaaagtcgcaactccgctctcaagatcaacaatgtccaactccaacgcctgcaattgctcctccttgcacacgaatttcttcttctcaaatgccttggacacaagagaccacttgctagcgctgggcatcgcgatcttcttcgagaggagatgtgatgtcgattcgagcatcgacacagcaatctcccttgc

SEQ ID NO: 282086 - DNA, 469 bp, Zea mays
aaaaaactgcttaatgttattgccaagcttgttgctgtattgggaatactgcgaggtacgacggagtccagtgatttgaaaaaaggtttggttaatgctattcaagacctatatgatgttgttcatcatgaagcgttttcggttgatatgagtggccacattgaagactgggatcaaattaatttagcaagggctgaaggtcgcctcttcaataaactcaagtggccaaatgatcccaaattgaaagacttgatcaagagattgtattcacttctgacaattaaagaatctgctgcaactgtccctaaaaatttagaagccaggcgaagacttcagttctttacgaactcactgttcatggaaatgcctgttgcacggcctgtttcggaaatggtctcctttagtgtggttactccatattactctgagattgctctctacagcatggctgaacttcagaagaaaaacg

SEQ ID NO: 282087 - DNA, 458 bp, Zea mays
acttgcctggcccacgcggcgtcgggccgatggcgagcgcgaggcttctgtcgaacacgctcgggtcggctagacggatccacggattcaagtagccgccgacccaccgtccgtccagcagagagaagcgaaggcgttggccctgccagccaagccagactagtgcaggggtcgtaggaaaaataaataaataaataatttttgacgcagatgagatgggaaatcccagcttgacactttgttagggtattgtgcttgataaaaaatatggcaccaggtgaatctgaggtgccagtaaatcttggatgaattctgccgcacgcatccgaccggatcagcagagacgtgtctccatgccatgatctgggtacctgtgttgtgacttgcgagtgactgtcgctgtgactggtgggtgccgctgtcgacgtgggataatgcctgatctgtccagttggatc

SEQ ID NO: 282088 - DNA, 497 bp, Zea mays
tttttgccacgcgtccgcgcttctatggagcctacagaagatatggaaaagattggagaatgtttttttttatgcccttctagacagaaccgagacataaaaatacatttagttgctggtgcaatacgtgataggacatctgaaatggtggaggctctttacaacattaataaggcatatttatctcttccagagggaacagctactgctgcggggttaatagcaatgatgaccgatcactacaatattctggatggaagtaacagtgatcatgaaagcaatgattcaccaaaagcttcaaggaagccacagaagcgtggtcgtgctaggtttcaatctgtttctaagacatctgatgcacgttatgctgatctaagggcaatctcagccctctttcatcaggctatggctgcctttccggtggtgacgaaaaaatgtgctggagatctgcttgtagggaacaggccttcgtgctgtggaaaaggacttcagagtac

SEQ ID NO: 282089 - DNA, 479 bp, Zea mays
tgtttctgtgaagtgaacataaataatatgaacagctgctcaggaaatatcaacattgaagaaacaagcaaacttaatcaagatatggatggagtttctgttagtcccactaaaattttggaatgcacttctaacattgtgagttcaaagtttccactgcatcggtgcatgaggattgttcctcatgaccaaaacagcggggcatttttcatcgcagttcttcacaaattatcgcccttgaatggcagtaagataaaggatactaaaattcagcacacacttggaacagacagaactatacagttccggaaagaacccgagccagaaacacgaccctatgaaactactttgacacgccgtcagcacaatgtttctgaagtcaatgatactgaaatgcttggtaggggacagaaattaggcacagacagccaaactttaaagcataagaactcaagcgaggtccaaatggttctcaatga

SEQ ID NO: 282090 - DNA, 472 bp, Zea mays
ttcgcctggcagccgtctgccctctgcctcctcgtgtgggcgagtcttgccgtcgtcgttaccatgcaggacagcaatccgttcacatcggtcgattgccaatcctcggggtcggggacgccttctcctgccccctcgtcgtcgtcgtcctccaacctcaacaacagcgcgttctggtccaacgtcgtcgcgctactggatgcgctcccttcggccgcggcaccctcgcgcttcgcctccatctccagcggcaacgggaccacccgcgcctttgtccggggaatctgccgcggcgataccttgccggccgactgcgccaagtacctgcagaacgccacgctgaccatccagagccgctgcaacagaagcagacgtcgcgccggcatctggtacgacaagtgcttccgtagctacgccgacaccaacgcgtcgacgttcgaagagcaatcattccgctccatactctacaaca

SEQ ID NO: 282091 - DNA, 508 bp, Zea mays
tttatgtactgctggattctaaaacagttgttgctgatgctaaatctgtagattcaagtgttgctactttgtctactgatctggaaagcactgaattggtgagtgtcgatcaactaaaatctgctttggcttccacacgcaaatcattgaacaccctatattctgaacttgaaaatgagaggaacgctgctgctatagctgctgatgaaaccatggcaatgataaaccgtttgcaagaacagaaagctgcaatgcagatggaggcaattcaataccagcggcttatggaggaacaatcagagtatgaccaagaagcactgcagaggctgaatgaattagtctgttaagagaagagaaggagatgcatgatctggagagagagcttgagctgtatcgccacaaggttcatttttatgaggaaaaggtgatgaaaatgttcaggcacaaggttgatgaccagaatggatcatcgtcagttttattgagtgcttgagatagtgatgacctt

SEQ ID NO: 282092 - DNA, 502 bp, Zea mays
tgcctacgcgtccgagcctttcttcttcctcctcggcagattcatcgtcagttcaggcttcagctcgtcaggcgagagagagagagagagatgcccagctgcttgctgtcgtgtgatttggagctcgattaatattaccatgattctgctgcacacaagggacgacgatgccaagcaggatgaggttcgcatgatggccaccgctgaatcggacgacgacgccatctgggtaccgcctgatgaggcggcagcagcagcatacagcatgatgcaagatgatgatgatgatgattaccatgccggagccggagaggaggatgacgaatacgaggacgacgatgatgctaccagcagtatctgcaggtggcgccatgactctgatcatcagtccgccgcccacagggaggagcggcagaaagccatgctgagagccatgaatgggcagctcaggatgctcgccgctcgctttctagagtccgctggcattgataccagcagctgg

SEQ ID NO: 282093 - DNA, 435 bp, Zea mays
ttgttttcccacgcgtccgcccacgcgtccgcccacgcgtccgcaacaagaacctgatcaatcaacttcagtcccgtccgtaggagggatttgaaaagccaacgtacacctctgagagttcaactggagcctgaatggcaacgcccaagctgtccccggtctcgccggtgcggcgggacggcaacgacgagccgtgcgcgccatcctccccctcctcctccccggtctcgccggtgcagcgggacggcaacgacaagccgtgcgcgccatcctcccccttctcctccccgtcgaccgttctgagtgcgcaggacgcgtacgagcagcacctgcgcctgccggagctgtcgagcctgtggacggccggatgcttcccggagtgggcgggcgagggcctggtcaagcccgcgctgcacgcgctggagggcaccttcc

SEQ ID NO: 282094 - DNA, 457 bp, Zea mays
  unsure (1)..(457): unsure at all n locations
ttttgttttgggaccaaaaagagaagattagtcgtcgggaagttagagttttgagtgctgctatatcgtagtagaactgtatttgtacagccatgtgagattgaattgaagatcaaatgttgagcctctttgtagttagaggatacggatgctcctctatactgtcacattgtctaccgttcaaaattgttaggcattccaaatccgaaaatacaaaaccacactatctgggatcttttcgttcacatgattcgggaatcgacacgtgtctctctcacgtacgcatcctctgatgaaaaagtacaatattgtgcgcgaacagctcctacttgattatgctcgaaacctaatattttaattccttgaacaacgtgcttgctgaattgctttccctagttttcactcgatggctggctcttaccgacgtgtngtgtttgttcgtttttcctttgctctc

SEQ ID NO: 282095 - DNA, 492 bp, Zea mays
tgccctctcgtccgggctatgaccttggcatccaggcacctgggaggtgttctattctgtctcatatattctgcagggagggcaaatcatcgactgagccttatgtcgtagctcacaacatactcttagcgcatgctggtgcctttcatacttataagcagcatttcaaggtaatttactataaacacatccacgagatgtgtcaaaaggtaaaaacaacataagggctagtttgggagcatgggagaggcaaacctagggagagaaaacccgctataagggctagtttgaaaacctaaatcctctccaggattcccggtgattgaggggaaatttaagctaatttccccctcattccctcggaatacccgtggggttttaagtttcaaactagccataaattactaaatatcttattcaaatgacactccttgggattactacccggggaaatgacagggatcccggaggggatatgggctctcaaactag

SEQ ID NO: 282096 - DNA, 757 bp, Zea mays
ttgggttccgtgagataaccgaggaaatgatgcaggagatggactacaatgctgaccgtgcatggtatgactgcgaagaacacactaccatgtttgatggtgatcattctatgtatcttggagatgataattcctacaaaaagagggaagcagagatgccgaagaagctgactcgtagagatggtagcctgatgacccttgctcaaagcaaaaagatgtcacagatgactgctgataatgctcagtgggaggatagacaattgttgagatctggagctgttaaaggaacagaagtgcaaactgaatttgatgatgaggaggaacggaaagtaatacttcttgttcatgacacaaagccccccttcctggatgggagagccgttttcacataacaagcagaacctgtaatgcctctgaaggacccaacacctgatatggctattattgcacgcaaaggttctagctctggttagggaaatccgggaaaagcaaagcatgaacaaatcaaggcaacgattttgggagcttgctggatctaagcttggcaatatcttgggtgttgagaaaacagctgaacaggttgatgcagatactgctgctgttggtgaccaaggtgagattaattttaaagaagaagcaaagttttcacaacatttgaaggataaagcagaagctgtcagtgattttgcaaaataaaaattcctttctcaacaaaagcaatatcttcccatatttactgtgtcggatgatctgctac

SEQ ID NO: 282097 - DNA, 491 bp, Zea mays
ttgcacaccgagtctcctctactcgccagcgcgcgccctcgccagccgccgccgtcttgtcagcgccagcacgcgcccatggtcgcgtccgccaagttcgccaacgctctgctgccagcttaactatcgtcgctgttgcgtgcctcgctgcgcgctcgctggggtgccgtctgttgtgcccctgcacccacccttgtcgctagtgccaactccgaccatcgcaggctccggtcggcgtcttccctgctcagccttcacagctagcgcgtcgtctttcgtctatggtcgagcatctgctccatcccggcaccctacactggtgctcgacaaaaagcccaaacgaatcgtcatgccatcatctgcatcgaatggaaattgtggtgcctacacgtcgacatcgtcgtttgtctcctctccaggtctccaacttgtgttcacgccaaaaatccgagatgattaggcgcggaaggaaacaaatcattacacgatcg

SEQ ID NO: 282098 - DNA, 530 bp, Zea mays
ttgttactttcaacatgtacaggtatatgcatataggttcaataaagaaaaacttcatgtccaaaaggaaggagaatgaattctccgcaaaatcataaaaaacattacaagtttatatcatgtttatgtgcacttcataacctttatgaacaatattttgctaactaaaaaggattgtacatatgactaatacttttgtcaacacattgtttcagaaactcactgcaaactactattcttattattttatggccttcaacaccaacattttattgcttacgtgcatgtacataccagctcctataggcaacaccaacgtaatacgacatcctgactgctcatactattatatttgtaaactaaactatcctgctaatgttatatgaacaaatatatattcagaataaatctgtcacttctatgatgaacttttggaacacactgctgaaatacaatgtaatatatatggtcctctcagtctaccgtaggtttgctggtactactacaattacaatctcagcacatcaact

SEQ ID NO: 282099 - DNA, 425 bp, Zea mays
tcgtgtcgcccacgcgtgcgcggacgcgggggcgccggcggcgacgactgcggcaaggactgcggccccatcgccacgccggaggggacccacaggaggaaccgcagcagcgaccaggtcgccatacgggccaccgacggggtgtgggacgagctggccaaccacaaggcggcacagaccccggacgggacgccggaccgcacgaaggcggccaagcggccggtggagtccgccagtcgcacgtggaggcacaagcggcgcgacaactgcttcgacaactgcttggtgatctgtctgttgtttcacccgtcgacaccgacgtagacaccaagacctgttacgcgccaaagtccacgccacggaggaaggggcaactaaatgcacacttcaagacagactaccattattgtgcccgaggggattgt

SEQ ID NO: 282100 - DNA, 645 bp, Zea mays
ttacgttcacgcgtccgcggacgcgtgggcagtaagcatgtttgtgctttttgtatgttgagttattttcctcgagcgggtcgtccgacggcggtgcggggcccgcgctgaggaggagcagtagcgcgagctcgaaggtggagaaccccgtccaggggctcatcgcctactgcaagaggtcccagcaactggccttcgtccggaagagcgccagcgacgccggcttccgcttcctgtcgtcgtccgcgtccaggatcgccgccgagtccgagtccgacgacctcgacgagctcaccgagatctgcagaggatgacgatacgatagtgctccacgaacgatgaatcccgatcattatacaatgatgcaaatgcgttccggagattttgtgaaggaaaaaaaactgaaacttgtggcgttgaccgcgcaccctgtgtcaagtgtcatgatgatatcgttcaaatgaatggcatctgaatttgagccttgactggttctgaacagctgtaggtttttccatggatgaggaaaaccaatagcatagccttatttacatcactttagaataggttcaagtacattacaagctcgttatggaacagctgagtttccatggatgagtagaatcaatagcagagccttacttc

SEQ ID NO: 282101 - DNA, 380 bp, Zea mays
tgtgtatgggcacaaatgccttttccggtctccgttggctcttgtgcaggagctgaacctgccgggcgagccgatgtacggctcgccggtgtccaaggacctcaacctgccggtgcagccgcccatggcctcggccgggctgctgaggtacagatcggcgcccagcacggtgctcggcgacctgtgcgaggacttcctctctgacgcgccccgcgccgccagccctgacgccggcgccgacaaccgtctactccagggtccttgctgaccaccacatccgggacgacaagccggcgcacgcttgcctcccgccgccgtccactgcccgactgaaaccgacaccgcctcccagcagtaagagcagccagagatgatgtttg

SEQ ID NO: 282102 - DNA, 510 bp, Zea mays
ttgtatgcctctcgcgtcgccgcgatggccggcgaggccctggaccagccgccggacgtcgtccccttctccgactccggcgacgccgccggtacccgccaccccgtcccccgcggcgctgctccgcccgcggcgggaggcattcgagcacgggctcttgcccatccccaagctcatcttcccggagggtacgctggcgcagaccctcgcccagctcaaggagaagctcgctgcctcagccccggacggacgcgtgcgcgccgcggacctggcggaggcgttgcagatcccgcaggagcaggcggcgctcgccctcgccacgctcgcggctgtgctcccggcagaggaccccgcgctcggcgacggcgccgtggatggttctgccgcggacatccgcgacatgctgctcttcctctacatccagtcttacaaacgtctcgtcccgcggagcgcgcacaaggactcgcccgtcgtggcggacgtctggccgtacacctccgcgttcgatgg

SEQ ID NO: 282103 - DNA, 832 bp, Zea mays
gactagttctagatcgcgagctgccgccctttttttttttttatttttttttttttttttttttttcttttttttgtttgttttttttttttgtttgcgaagaagaaccgggctgcaatttgagaaaaaaaaggaggccgtactacatgaacaatagacctttcattttctgtatgtacagtaagaatgctcaggccatgccaactcttcgtccatacgactaaccgactagcgcagcagggatggcgacgtctctacctctgaatacgccggggcaataataatcaaatcaccatgtcagctggctcgcctgctatctacgtgagccagtgccgaaaatgagcatatgcacaagcatggtgacgatcccggctggtatcaagcttttgtaagatgcccgccgtgcggagccgttcacgtcgaactgcccagtgttcacgtactggttcttccctgatgacgtcgtcacgttcaccgacattgaacaatcgtagtccgcccagcccatgcgcatgtttgccaagtcatacacgaatatcttatcctttaaaacaagatctccgagtatagttatttcttggccctggttcctttgccaaccaatgcaccacaatacactgttgtcaacagaagcctgctgtaaaagatagttctctggcttcaccgacatcgcaacaccacccataaaataaagggttacggttggaaccgatgagtcaacgctgtatgaagtgataaagcattggcttcctttgctgactagagaacgcacagatggagagactgcagcactatcgcactaacaaatcccacgcgtccgcggacgcgtgag

SEQ ID NO: 282104 - DNA, 447 bp, Zea mays
tgttgtatgcccacgcgttcgctcgcggttcctcggaggtggcgctgtgctcctgaggttgtcggtccagcagtggctgctgcggctcagccactgccacgaccgtcgtcggtatcgttgtacacgtcgcctccttgccctggaccccgttccacacgatgcggcgaacgtcgcactggaaggctagcgtcacagtctgcaggttccacgtgatgtcgccgagggtgcggaggaagtcgaagcagcccaagtcgatgtcgacccaggtgatggtgtactcgtcgactgcgatggagatcggcacgtggcgtgcaaacccagcgcaccgaacgcgatcaccattggccacggtgacccatagctggtcgttgttgagcggtgtgaggcctcctcgggtcatcggggcgccctgtagaaaattatgggtggagcccgtgtcgaggagag

SEQ ID NO: 282105 - DNA, 452 bp, Zea mays
caattccacccatccccatcgcgatcgcctctcagtctccagctaagcgatgaagaaccctaaccctcctccctcgcgtccctccgccgcaggcaaggagccccccgcaggcatggcgccgccccgcaaatctcgctggggcccaccgccaccgggcgttgccggcgacaaggccgcgccatccacctccgcccgccgcaccccgaccccgacccccacccgcacagcggactccaggcgccatccgggggcccctcacgcgccagcaccgcacgcccgcaaccccgggtcgcaggcggtcgctctccggccgcaggctcgtccgcaacctccggcggtggagactcctcccccgcagccgtacggcttccacaacctggaccgccgcgtcatgcccctcgccgacggcaccgtccgaacctacttcgccctgccccctgactacagcttcg

SEQ ID NO: 282106 - DNA, 433 bp, Zea mays
tttattcctcttcccctcccactccccagctcctgccgccccgctccacgttccagaacatctgggcggtatcccattcgcatggtcaccccatagccccccgacaaaccaccccaccgacgcaccggcagcaatggcggtgggcagcggcctggccctgtaccacgtcctcggagtggccacctgcgtggcgctgctgtacttcaccttcggcgaggtggacctccgccacatctcgctcccgtccttgcccgtctcccgcccgtcccccttccgcgcggctgccgtggcggcgcccttcgtggagcggcgcggcgcgcagctgttcctggccggccggcccttctacgtgaacggggggaactcctactggctcatggaccaggccgtggagccgaggtcccgggaccgcgtctcccgcatgttccgcacc

SEQ ID NO: 282107 - DNA, 961 bp, Zea mays
gttcactgcgcgccccaccccgtcctgtgttgcctatgcttgcgccccaatgctgactttgtacaactccgtagggcgcgctgcggcaacacagcctacgcttgctgcttggagcaacactaacccagatcgagtcgagagaattaaatcagccttcaaaagcttcctttcagaagcagctggcttctatcatgacttgatgttaaagatcaaatcaaattggggccttccactcaattactttccagacagccttgacaatgcaaacaactctgtgcgagatgacatgaaaacagttcaattgaagaaaggtttgatttcatgccatcggtgtctgatatatttgggagatcttgctcgttacaagagcttgaatggtcccggtgattctgttagtcgtgaatacacagcggcttctagttactacaaggaggcagcttctatctatccttccagtggcaaccctcatcatcagcttgctatactagcttcttactccggcaacgaggtggtggctgtttataggtacttccgaagcttagctgcagacactccttttgccactgcacgggacaacttgattattctttttgaaaagaatcgccaaagctatggacagctgccagacaacagcaaagttcctagcactaagacattacccccacggccatctgggtggggccgaggacggggagaagtaaggtttcaaccaaaagatgttaatgcagaaacagctgaaaggggacgcgagtgcaataatggtgatacattgaagaccttctatataagattcgtcaggctcaatggaattcttttcacgaggaccagtttggaaacattcggggagctgttttcttcagttagcaatgatttgcagattcttctttcttctggtcttgaagaggaccttaatttcggttctgatgctgcagaaaatgccatggctgctgttagacttact

SEQ ID NO: 282108 - DNA, 529 bp, Zea mays
cttacttgtttccatttcactgcagtcctgatcgctggatgctatgcatgaaatgcatttgctgtgcttgcgagattgggcatttactatgagctttgtgacagttaacatcttggtcctgtttggaagctgggattgggaatcaaatccttacatggtttaggagcatccagtttgaacttaaaccattgtagacatctgctgcaataaaaacaattggcttcggtgagaggcactcatcatcagttcaaacttaaaacgagataagccatcggttgattggcctaattaccttgcttcccgtgattgttcgcctcgctgaaaggatatgctcacaacccgtactgttttgacttgttatccacatactatttaaggacgaaaggacatgcgtactaccttcatttgttggtcttcgtctagtcttcagactgataatataaggtgaaaaacttcgatgtttcgcgtgctgtcaagtgattgtgaagcaaagtttctgttagtgtcaatgcgtacaggctgcaatggc

SEQ ID NO: 282109 - DNA, 1511 bp, Zea mays
tgttgggctcatactctctgtaaagctttggctaacaacacagttgcagtctggtggaaacttcacattttctggatcactggaacctttcttcggaattggttctgatgttatttctccgaggaaaattggcacttctttggctgaaaatgttgagtttggaagacaatgcttagcaactgttcaaattcgtggtgacaattacttaattttgtgtggtaattgggagaatagtttccagatcatatctctaagtgatggaaaaattgtgcagagcatccggcagcataaagatgtagttagttgtgtggcagtttcatctgacggaagtgtgattgcaacgggaagctatgacacaactgttatgatctggtatgcatttcaagggagatcaaatgacaaaagatataggaatgcaaattacgatctatcaactaaggatcatgtcatcattgaaagcccttgccatatcttatgtggccatgatgatattatcacatgcttatttgtcagcacggaattagacattgttatcagtgggtcaaaggacgggacttgtatgttccatacactgcgtgaggggacatatgttcgatcgattcgacatccgtcaggtgctggtttgtcaaaaatggtaacatcacagcatcgcaggttagtgatatactctgatagtgacctttctttgcatatgtattccataaatggaaagcatattgcttcttcggaatccaattgtcgtctcaattgcatggagctaagttgctgtggagagtttatggtatgtgctggtgatcatggtcaaattgttctccgctccatgcattctcttgatgttgtttggaggtacgagggagctgggaaaacaataacttccttagttgtgactcctgaggagtgcttcttggcgggaaccaaagatggtagcttgattgttttttcaatagaaaaccctttgcttcgtaaaaacgccatgcaacggcacaaggcaaaaccttccattggtggttagaggtgtagatcagaacagtaccagaacttcttgctgcatttcaaataaaggttatcaatccgcaataatgataacagagaagattctataactcctgtataaatgtacatacgtcatcagatcgagtttaccattctgaagagtgcatgtaccgatcacaatcaagaggataattcttctaactgcaaaacacatactatgggaactaaagtagatttatgtttcatgttcaagacaagagcaaggggataggaccttcaatatgatactcttgatatttgtagggtggtagctagttagtaatgggggtgcatttgagtgtaatataaacttattttgtgggggcattcttgctagataagagcgagccacagttttcctagatagaatttttaggtaaataggttgccactgacctgtaactattaatctgaacattgtaaatggaactgatgcggattcataatagaaggcttgcaactttggaaaagatataatt

SEQ ID NO: 282110 - DNA, 473 bp, Zea mays
ggcggaccgtggacagcggcgagctggccaccgcgtcaccgcctctacagccccaggttccactgctaatcgccggtaatggcccaggctccggcgcgcgccgcttccgccgtacgtctcttcgacgcgcactgccacctgcaagacccccgcatcgcggccgtcgcccctgcccttatacgagccgccggcgcatccggcgtcgcacgcttcgctgtcaacggcacctccgagaaggactggcacctggtgaagcagatggccgaggatcacccagccgtcgtcccctgcttcggcctgcacccatggtgtgtacccgagaggtcgccggattggatgaatttgctccgggggttcttcgccgaaacccccgaggcggcttgtggggagattggtctggacaaaggttcacatggaaaaaccatcaacttcggagaacaggggtgagtgttccagcgacaactcgaactagc

SEQ ID NO: 282111 - DNA, 766 bp, Zea mays
tcctctcgtccgtttttaactttcacggaaatttcccctctcttggtctcttctcttgcgcgttcctcttcttcctagtcctaggctactttcttcgatcccaactccgagtcgcctgtcatctctctctaccagattagattggggatctcatctcatccgaatccttcatagtattacacaaccagcaaggccgcccgcttgccggcaacatgaagaagatcttcggcgccaagaagaacaaggatccgccgcccacaatccaggacgcaaccgacagaatcaccaagcgcggcgacaccgtcgatgaaaagatcaagaagctcgacgccgagctcgcgcgctacaaggagcagatcaagaagacgcgcccaggccccgctcaggaggccgtcaaggcacgagccatgagggtcctcaagcagcgcaggatgtacgaagggcagcgtgacatgctctacaaccaaacatataaccttgaccaagttgcttttgcggcagagggacttaaagatgctcagcaaactatgactgcgatgaaggctgccaataaagagctcaaagggatgatgaaaactgtcaagctcgaagatattgatagtatgcaagatgagatgatggatcttatggatgtgagcactgaaatacaagaaactcttggcagaagctacaacgtcccagatgacatcgatgaggaagaacttatgggggagcttgatgctttggaagccgacatggacttcgaatcagagtcagtcccatctta

SEQ ID NO: 282112 - DNA, 632 bp, Zea mays
  unsure (1)..(632): unsure at all n locations
gggacagacagacncgggctagagtaaagcttaagcacagacctacacacatgtaaactactgacggccctttcataattaggcgcagagattctatacgggtgaaaaagcagacatatcaaattgcctgcatcgccctatgtataattgactgccaaaacacacggtttcgcgttgcagtataaagatcatccagcaaacaactcgagaagcataccagagcacacacagaaacagaacgaagtcctcgatcgctcatcgtctcctctgctccggtttcgttggagatccaggcaatggccgacgaagtgcagcaactcaccagggccttctcaggccttggcgggctcggcgtggacgagccggcgatggtgtcggcgctggcacggtggcgcgggcagcccgagaagcggtccgcgttccgcaagggattcccgggcttcttcagcagccacggcggcgacatggaccggcgcgaggaggagtacatgctgcacctggccgccgagttcgcgcggatcagggacctggtggtgcttggggcgacgcacccgtgggagcgcgacgcgcggcttgcgcaccacgttctgaaccaccaccaccaccacctcgccggcgttgttgtggaggtc

SEQ ID NO: 282113 - DNA, 669 bp, Zea mays
  unsure (1)..(669): unsure at all n locations
tgtgagccggccggggcggctgtggggcacctggcactcagcaagtcctcggatcatgacaacatgagccaggggagctcggtttgcaatgctgaccgtgctggcactggcagcatgcactccggtgaggatgggagctcaggacctcggaggaaacccaactctcctgcggcgttcgtgtcagcttcgcccttggttggccttccggagttctcgcatcttggttggggtcactggtttactcagcgtgaccttgaacttgctaccaaccgcttctctaaggagaatgtgctcggggagggtggttatggagttgtgtaccgtggacgtctggtgaatggaactgaagtcgcaataaaaaagatctttaacaacatggggcaggcagaaaaagaattcagagtggaagttgaggctattggccatgtccgacataagaatttggttcggctgttgggatattgtgttgagggcgtaaacaggatgctagtatatgagttcgtgaacaatggtaatttagagcagtggcttcatggagctatgcatcagcgtggngttttagctgggaaatcgcatgaggttgtacaggcactgcaaaagccttgctaccttatgaactattgagccaagtgtcatcagattaaatcagcacatttgattgtgtgaatt

SEQ ID NO: 282114 - DNA, 399 bp, Zea mays
cagaccaagaattcagagtggtagttgaggctattggccatgtccgacataagaatttggttcggctgttgggatattgtgttgagggcgtaaacaggatgctagtttatgagttcgtgaaccatggtgatttagagcagtggcttcatgaagctattgagccaaaagttgcacatcgagatatagaatcaagcgacatattgattgatgatgaatttaatggcaaagtatctgactttggattggctaaacttttgggatcagacaaaagccacattactactagagtgatgggaacatttggatatgttgcacctgaatatgctaatcctggaatgttaaatgaaaagagtgacgtttacagttttggcgttctcttgttagaaactgtgacaggaa

SEQ ID NO: 282115 - DNA, 336 bp, Zea mays
tttccttccacgcgtccgcccacgcgtccgcccccgcgtgcggtttttagctgggaaaatcgcatgaaggttgtaacaggcactgcaaaagcgcttgcttaccttcatgaagctattgagccaaaagttgtacatcgagatataaaatcaagcaacatattgattgatgatgaatttaatggcaaagtatctgactttggattggctaaacttttgggatcagacaaaagccacattactactagagtgatgggaacatttggatatgttgcacctgaatatgctaatactggaaatgttaaatgaaaagagtgacgtttacagatttggcgtcct

SEQ ID NO: 282116 - DNA, 468 bp, Zea mays
atcggtccctcccctcccctcccctccccacatttcgttgtgttccgcaaacagcagagagaaaacggaatcccagatccacccctccccatctccatccgcggccatggcctccgccgacgccggcacttgcccgtgggatgccctcccgttgcacctccaggagcgaatcctctccctcctccccatcaccgaactacttcccgttgccgccgtgtcccgcgccttccaccgccttctgcgctccccgaccttccatgccctcctctccccgcatcgcctcgacgccttcttcctcctttccccacggctcgccgtccacccgctgtcccgccgcgtccgcactatgcccgcgttcgccgcgctctctcctccttcctacccgctcgtgtcctccccgtccccatcactccttatcacctgcgcctcactccagttcctcccgccgatccccgacggagcctacct

SEQ ID NO: 282117 - DNA, 745 bp, Zea mays
gcaagcgacgacgttctcctccccgtacacaacacgcacgccatctctctcgaagcttccgcttcctccagccgccaccgacccgaacccaccccggacgcggcgcctcccccgcaccctatattgttccccgagctccagccgccaaggattggcgaaaggagccgggcagatattgaaactcgtttcagatcggatccgaggactcgagaaattgcagggaaggaatttgaggatggatttcgagctgcggcaggcgcgggagaagctggagcgcgagcagcgggagcggatgcagcgcgccaaggccaaagcggagcgcgagagcctggccaaggcagaggcggcgcgccgccaggaagcgctcgaggcgtcccaccgcgagcgacgactcgatgccgcacgggcccaggaagaggctgaccggacaatggaagaggtgatgcagctggggaaggggatttcattctcgcacatgtttgaggcacttcgatatgatggccctggggataagatcaagttgccaccatcttcgtttaaggagttgtctgatgaaggagctctcgataaaggtcccatgtacttcaggttgtcgaaggttagggacacagtcccaggtgctgctatggaacaagatgctgggacaacctgttgtggtgttcttgaattcacggcaagggaaggctctgctgaactcccgctgcatgtttggaacaacctgtttgggagtgacaccccagaggtc

SEQ ID NO: 282118 - DNA, 546 bp, Zea mays
tcgttgacgcgtgggcggacgcgtgggctgcggcaggcgcagcggcagcatcagcatcatctcatggtgcgcggcatcggcgaggagatcgacctcgagatcggccctgtcgacgacccctctttttccggagcttccttagtggccgttacgtccacgcacgacactgtcgttcacgccgacgaccacaagagcctcctcatcccgtgttcgcagcccggcgcggcggacgggctggcgccgcagcagcacctgtcgcagggggaagagcatgacgggatgctcaggtcgccgtcggggcacaccaagaagaagaagaagggtggtcaagaaatggagggaggaagtgggcggacacctacaagtgggcctacgtcgccgtgcacgacaccaccaccaaggatcttctgctcggtgtgcaaggagtacggcccgaagcaccgcccgaatccatatggcaacgagggatgcaggaatatgcagatgagtgcgcttgaggagcacaacaatagcttgttgcataaggaggcgctccggttacagatg

SEQ ID NO: 282119 - DNA, 400 bp, Zea mays
gcgcaatgctggcggcgtccctcaggccggggccttcgctcgcggccttccccggtaccgcccagaggagcccagttcctttcctccccttccctgcccgcctccaccaccggcccgtcctcctctccgcgaccgccgagggaaccggcgcccccgccggccagggagacgcctcggctgccccgctcgacgaggtgcgcctgccgcagttcgctgcggactgggaatccgcgcgcgcgtgcaaggaccaggggaggatcttctcgctgccggtgctgagggccaacagcggcgggctcatcgtcaggttcaactccctgcaggggttcgtgcccaaccctctcctcagccccgcgcactggtgtaaagaccccaaaaggcccatccaagatgttacgaa

SEQ ID NO: 282120 - DNA, 585 bp, Zea mays
gtgtagtggatctcaggatgaactgtttgtctggtgcagcatgaaggggttgcctagaatctctttttgaaacatagtgcttaccgcataaacctacattaataggtttctctttccatttttcatttggtcaataaaggggttgccttctaatttagatgtgtatatgtctttccaaaatgaattttttcccaagatctttatgcaattaagggggctcaacttggtgcttaaatcagttgtcagtgctattttttatagctcagtggattatggaaaagttgatttggagatgaaatcccagctgcataagtttttttaaggtaacactaaacctaacttacttttattttgtccttacaggtctacatgctgctaagtttcttttgtttttcaaccaggcttacttcaaccgcttatttctttaaaatagacataattgctaaaaaaatttctaaatgttctatacgcaagctttctaaatgtttgctacacaagattactgtacatcattactaaatgtttcctacgcgcgcgggacgcgcgctcattcccgctccctgaaagcccattcacattttcatt

SEQ ID NO: 282121 - DNA, 402 bp, Zea mays
ctgaagcttcaccaccctctggtagctctgaagagccagttgctgcagcaaaacctagaaggacagccagggctacgaagaaacatgtctatattagtgaaagcgatcctgaggatgaagtggtggagttgagtgatgattcggactttgatttggatgctgactctgactagtgagggtaactgtcatccgtagcatgtgctacctttattgatgatgcatttcttgtgcatgtgctactttaattgacgagtgcgggtaactgtcaatctgtcatccgtgttgttctgttgactgttgtatgtgtgttttctgttgactgttgtcgggaacccaagacattgtctggttaactgatttgtctgtctataattttggcaaaaaaaaaaaaaaaaaataaaa

SEQ ID NO: 282122 - DNA, 637 bp, Zea mays
cttttagtggcatcgctgctgcaggtggaggtggctacaacaaggttaatggggttcagtatggagtttctaggatttactagttctagttgcattgaccatctccagaacacctgatctggaggttgaagtaataacatggcgacagtgaaaagatttaggtgccagtggactgccatgttgactccgagccgaagatacggagcatgaagagtatggtctccgatctcggatcaaggaggaagtgtgacgtcagattgaaaaacagataatattgggcaacagtcatggttctgttcattggacatagcttttcggaaagcaatgccatcaccccgcggcaacggtaaaataaaaggagagaaaaaaaggcagtgccgtcagttggttgctgcttataagagtcaaaggggagcagagacaattattacatggaaaattatgtactttgcaagaacggaaacattggggaataaaaaatagttagtctacgtttacctctctgtatataaaaaaagtgacttgattttatgtattacggctggtgagacccgcttctttaattcaaagctgtgaagttttggcctatattttgctctataataaagttcagattggtacattgagcctgtttggt

SEQ ID NO: 282123 - DNA, 469 bp, Zea mays
gggtgggccgacccacgcgtttgatctctcgtccgaccacgcgtccgcccacgcgtgcgcaaagctcggccggacggacgggctctgcacgcgggcgtcgcgtcgcctccgcccgccggacacatccccggcaataatgaggccccccggccggcgccgcgtcctcgccgccggcgcctgcgcgctgctgctggccgcgacattcctggcggccggcctgttgacgacgtcctccctggcgccgtacctgctgccgccgctggccctgtcgctgccgtgcctgccggcggtgaccgcgccggcggggtccgggtaccgcgcggcgccgggcgtggcggcgctggccgaggccgccgtggcgtacgccacctcggagaccgtgccacagcagtcggtcgacgagatctcgctgtcgctggccgcgctgcggcggcgcgcgccgctgcagctgctggcgttcgggctgggc

SEQ ID NO: 282124 - DNA, 1154 bp, Zea mays
gtcatgagaagacccattccatagatagtgtcgctgagcaaaatgtaatactaaagcctcaaagtgaatgcagcgggaataggtctgccaacaaagatgctaaatatgttgagtgccttcaggaaagtatttatggagggaatcacactggagttgatgtgggtactgtcaattcgaatcatgtccatcaaatggctacaggcgaattggattcgcttcagagagacatcaaagctcctctatacagcagtgttagtgtaaatggtgagtcgattcccttggaaccagatcttgttgctcgacgcaccctttcagaaggtcagtttcctagtgtattggatgtgactaatgcacttgaagcgaaatggaccggtaaagatgatcctgtttctagcaaggtaaccatgccagaatctacagcatcttcagaggactcagaagaacatatgggtgataatacaccttcatacgcctctatattgctgagcaagctaggggacagtgcagcagatcattctaattggatagagatgcctttcttactattttaccgttccctcaataagcaatggaatcgatcaaaccgatttgatgcactcaacgaatatagtcccgaatatgttcctttcttaagggaagtggagcgtcatattggacctaaatttttctttcctataggaatcagtgatactgttgttggagtttatgatgacgaacctactagcattatctcttatgcgctggcctcccatgaatatcatcttcagatgtcagatgaactggaacgagaaatgacagacacttcactcccactatgtgactcaagaagtgtctcgttaactgaactggatgaatgtacttctgaacttctaagaagtgttgtctctacagaggacattatcctctccatgtctggaagaaagaacccacttgcttcagattcacttgtgcctcgaaaagtaagtcacataaaagtgaattttggggatgaaggtcctctaggacaggtgaagtacactgtgatttgttactatgccaaacaatttgatgctctgaggagattatgctgtccatcagagcgtgattttgtcaggtcccttagtcgttgcaagaaatggggtgctcaaggaggcaagagcaatgtattctttgca

SEQ ID NO: 282125 - DNA, 585 bp, Zea mays
tcgtgtccatcaaagaagagttctgaagatattatacagttaagagctcaaaatggctttgcatgtagagaggtcccagttaaagagactaaaaaagtatttcgctcagaggatgaaaatggtaataagatggtcaaccaatatgtccacttgggaaagatcggttctggaagctacggaaaagtggttctgtacagaaacattaaagatgggaagctgtatgcagtaaaggttctgaataagccatacatgatgaaagtacatgttgtacatacaaaaactgccatgacagatgttcttcgagaggtatccataatgagaatgttgaaccgccccaacattgtagatctcgttgaagtgattgatgacccagacatggataaattttacatggttcttgagtatgttgaaggaaaaatggtttgtgataatggtttagaagaagctactgcaagaatttttttgcgagacataatatctggtcttttgtatcttcactcccataatgttattcatggtgatatcaagccagacaatctcttggtaccagtacccggcatgtgaagataggggattcagtgttag

SEQ ID NO: 282126 - DNA, 814 bp, Zea mays
cgtcctattattcaggtcgggcgtggcagcctccccacccaggccgataagccggcatccttcatcgcactcggtttctcgtgcttactctgtctctagtaccccccactcccccaaccccttcagatctcacacaaacttacctggcgtcatccatgcaagcagaagcaccgcagaccttgcaaacatgtcgtctccccaccctcgcatctcacacttgtcgtcggcgacacattccctcgtcggcagccacctatctccaccaatcagcataaggtatccattgccccattctcggcatgaatcgcccagtccacacgtcagttcgccctacatctcaaattctggctacggttcttcaagctactactaccttggcggctcgagccagcacgggtcgtacctgcggcggtgtggagagtcagggccaagcctgtctaccatggtccctcggtcgtcgcagcagcagttccagtcagaggcaaacgtggccgcaggcgcgtcgtctgcccagtcctcacggcagtcctacctgcgacgctgtggcgattcagacgccagcttgtctgacatggcgtcagcccagtcgttgccggggtgctgaggcagatgtgcactacaagatgcggcttgacctgtgcatacaatgaggcttgcagcgtcacataggtggggaaacatgtatagcatagacttcatgatcctgttcttgtctgtgagtggtatatggttctttttttgtgccttttattgtgtgcatctgacgtgacaggagcctgttgaagttgattctgttaacattttagtccgcacc

SEQ ID NO: 282127 - DNA, 454 bp, Zea mays
gtagtagttgctatccgaagccgcaaggaggctggagtattctttggctttgccgagttcgaagacatgtctggtattcagaatgcttcaagcgcatctccagtagagttaaatggccgttttgttcatgttgaagagaggaggcctaactgcggattccctcctggaagaagaggccgtggaagagctgatttctcaagggaccaagctggtgggagatacgacggggagtatgctactcgatcgaaaggaattgggcaccagaaaaaaactggacgccagtatgacagttactactagttatgtaccgctctgctggtaaatggccgtgtaccattggtgttctctacttggtgctgttctggccataattttgctaaaagtcacaatgatgtcgggactagtatctctgctttgttgacattccgcggcgactattttgggggatgggcat

SEQ ID NO: 282128 - DNA, 451 bp, Zea mays
  unsure (1)..(451): unsure at all n locations
ctccgttanattaagatccaactcgagcatgtgaagaggctctaatgactttaagaagagaggtctgcaaactctccaaggagcttgaggaggcaaatgaatcgcatgaggacctggtatcacaaatttctaaactccgagaggaatccaatgaaatgcaagtagatctcactaataaactaggagaggcagaatcactatctaaagctctgtcagaagatttggcttcagtaaatgaaatggttcagaagggacacgaagaactcgaagccacctctattgagctggcatctattgctgaagctcgtgacaacttgaagaaagaactgctggatgcgtacaagaatttggagtcaaccaccacatgagcttgtcgaggaaagaaaaattgtgacagccttaaacaaggaacttgaagcgttacgnagacagttgcaggttgattctgaag

SEQ ID NO: 282129 - DNA, 343 bp, Zea mays
tttcatcgcgtccgcccacgcgtccgcggacgcgtgggtgctccttgcatactcctctcccaaaatttccttgttttttgcttaaaaaaaaatcggctcgtccatcgtcagtaccgtacgtctgaggtagctctgcatcgggaggaagaactgatggcgggtgatccatggcttccggcgagcgcgtgtacgaggacttcaagcctccgcacaagatggagcgcgagccggccacccacacgctcaccgtcgacctctctgcccaagggtacaggaaggagcacatcagggtgcagatggtccacagccaccggtgcctcatcgtgcgcggggagcgccccgt

SEQ ID NO: 282130 - DNA, 649 bp, Zea mays
ttatttagagacgttggtgttgccttctctattttggagacgcagccgacagacaaactctaaaatagatacgagacaacactttgggctacgtaaacaggtataagtatccgtgcgcagacgccgtctggcgtactcttctcgtctccgtcgcttctccttcgccggcgacgaggaggcccgtgcggagcgcatgaaagacgcctccggaatagcctccgtcttgcgaccccgcggcgcaggagcgcacgccggcgagatacccggctcccgcagcggcggtgcagacgccggggttgtccaggaagctcttgtcgtaggccccggtggctaggccggccggaacctggccgctaagctggttggaggacaggttgagggaggtgagtcgcaggttcgcaagcgccggcggtatggcactcggaaagctcgttcgacgacaggtcaaggacgctgagcaccggcatggcgcccagctctgctggtatctctccgatgagctggttcctgctcatgtcaagtttggggcgtatacgtctgctatcttctccatgctgactcagtcgatctgcatagaggtagtgatacttggatactaccattccaccacaaaataagcgaagtttataatcatagcttacttctgtct

SEQ ID NO: 282131 - DNA, 402 bp, Zea mays
cccacgcgtccggctcggtccgatggttcccgtctccgacaccgcactgctcacaacttcgacaccacttccgactccgtcgccaggtccgccgccggcgagagcgccgcagtcgctagctccgtatgcagggttagagtatacagctgcagcggcgggtgctcctgccggtaccgagtgagtgtgagacggcggaagctccacgtccagcggcgtgcccctccgtcttccgtcactccagatccgaggcaggtcactgctgggacgcactcagagctgctcggtggagctgacaggctttcgagaagaggaatataatcatggctatcatgcagagtagtgactcttcacatcatggaattggagaaaatagcccggacagaatcccatatgacagacatg

SEQ ID NO: 282132 - DNA, 544 bp, Zea mays
ttttgcgtgggcgcggcccgcctccccaccggtctcgctctcgcagtccctcgaccgctcgtcccggcagagcagtcgcagcacggcggccaccgtcggggtggacctccggtccgacacggtcaccaagccgtccgacgccatgcgcgccgccatggccgcggccgacgtcgacgacgacgtccggggcgcggaccccaccgcgcgccgcttccaggcggagatggccgcgctcctgggcaaggaggccgcgctcttcgtcccctcgggcaccatggccaacctcgtctccgtcctcgcgcactgcgacgtccgcggcagcgaggtcatcctcggcgacgcctcccacatccacctctacgagaacggcggcatctccaccctcggcggcgtgcaccccatgaccgtccccaacaaccccgacggcaccatggacctcgccaggatcgtcgacgccatcaggaaccccgacggtgcgctgctgtacccgacgaccaggctcatctgcctggagaacacgcatgccaattctggtgggaaatgc

SEQ ID NO: 282133 - DNA, 346 bp, Zea mays
tcggcgatgggcaccgccacgctgcctccggtggcgaggaaggccatggtgctgggccgactggtgcccggatgccggaagctgtcgctcccgacgctcctcgccgagaccacggactacatcgcggcgctccagatgcaggtccgcgccatgacggccctcgccgaggcgctgtccgccgtctcctcctcatcctccggcgccggctcttccccttcctccatcgccggcgtgaccgaagcctcaacattcggggattcgttggaaattttttgttcccgtctcttttctccctcgccccgaatttttcctcgggattagttaacctctagctttctctctttct

SEQ ID NO: 282134 - DNA, 507 bp, Zea mays
tcgtctcatatatgtttgatttgctatgttggtagatgttctcagtctcttgttcatttttggtagtacatagacctggatgtgctcacccactgttggtctttgttgttcaacagatttttcatgctgtacttattagagttattttttttgaagttgacttgctagatgcaaattaatcatatttactggtttctctctctcagtatgtaactgcatatttatctgtttgtattttaggggcttagcctagaacatggatgcagtcatacacaaataagatgattaggttgcttcctcatgttagatctcattaacatgcgaaccttctctaccattgcttttcttcttacttgtttaagtattgttgcatggctaaggacactcatgggatatattatcctgtatactagtcctatgaatatacggttgttgtaaaagaaaaatgcaccaaactgagtgcttcataacttgcaggtccaagcaggtgtgcagattttacgagac

SEQ ID NO: 282135 - DNA, 588 bp, Zea mays
agctggacgcctcgccctgcccgtaccggaccggacatgtgccggctccgccccacgcgtctcgttcttaccgccaacaacgaagaactgcagagagctccactcctggcttggagagcctcgggagatcgagagggctctagaggctggaaggccctggagattgggagaccgagagagtctcagaggtcctgagggccccgtgatctagtcccccggtatggagggtgcttgaggcggaagagcttcgagggctagagggcctcgggacctggtctccgatgtggagggcgtctgacttatctggagccgatcaagacccctttgggcacagggccttagggacacatggttgggtcgagccctgattgagcttttctctgttgatgggatctttgataggcatattgtcagtattcgagggtatggtcttccccggacgctgagagtaatcattctagatgaactactagtagctgccgcgcgcattgcgcgcgccgtcccaagccggctgaggcttgcgacgcactgaactggagcgcggcggtcggtgaatttgcccgaggcgagggcggaggcatcggaaga

SEQ ID NO: 282136 - DNA, 548 bp, Zea mays
  unsure (1)..(548): unsure at all n locations
tttcctttcatgggagacacctcaagtatttagctctaagctggtgccacctttcagaagatccactggagatgctcgctccacatttgccaaacctcacaaatctgagactcaacaacatgcgtagtgcaagtatattggttcttcctccaggatcatttcacaacctgaagttgcttgtcctgatgcacatgcctaatgtcaagcagctggtgattggagaaggtgcgctccaatgcatcgaaggtctgtacattgtgtcactggtggagctggataaggtccctcaaggcattgaatcgcttcgctccctgaagaagctctctcttgtcaagctgcacagggacttcctgactgagtggaacaacagcggaatgcatcagaagatgcaacatgtccaagagattcgtgtttagacgtggcagatgggtaccttctgcagcactattcacaccgtcgacaactccacatttcaatttcatctatactttttctttttcttttttttcatctatacttgnggngactagtgcaatctaatcatttcc

SEQ ID NO: 282137 - DNA, 509 bp, Zea mays
tcgccctttcgccgtctagatccttggtcttcaaagacttgcggtccagcaagttcaccagtttctctatggttcttagttgcagaaatctttgcaagacaagggatccacccttcgcaaagacgatctgatggagagcgtagtacgctgaatcctggagctcatcgatgttgcactgcagcatgtcaatgagctcgtgaacaatattaagctccaggaacctatgcacgtatggctctcctccagtgcaggccaatttcatcaccaaaaaggcggtctgggacctcacctggttcttttcaacctctctgcgttgtagcagccaagccaacctatcaaacagatggctttccagaaggaggtcctgcacccttgtatcatttgccgttttcagcaagagataataaaccttggatgcctttaatgatattttctgctgtctctcttgagggatattattgaagaatcacctcaaatgattggtgaggctttggtgattgcggcacatt

SEQ ID NO: 282138 - DNA, 377 bp, Zea mays
ttgtccacgcgtccgatcgatccatccaggcgtcgtgctccgggaggaaggcgctgcggtcgctggacgcgaagaaggcggcggccgcggcggacagcatgctggcgcagcggaacgtggaggcggagctgctccgggggcggcgggtgtcggacaagtcgaaccgggagaagctggacgcgttcgcggcggagctggtgaaggagcagcagcggcgggcgcgcagcccgggcctgcccaccgtggtgatcaggcaggcgcgccccacggccacggccacgccgcggttgttctccgccaccacgcgacttctgcggcaccgtacggacctgctgcaccgtgccgtacccggagtcgcagggcttctaccagcatta

SEQ ID NO: 282139 - DNA, 503 bp, Zea mays
tcgtataatgaaaaattaagtgagatcatcataccacgcatcacaaaaagagtaataaagtgctctagtacaaggtatatatatataacgcttctacagttctatatcgacaaatatatatactcttcccttttgttgcccgttaagttgtagctagtatcagaagtaagtacgtttgtatgagtgttcagaacgcatcagtaatcgatcggttttgactcccagaaatcatccacgccgttcgtccaaaagctggcagtgaagtgcgacgacaagaactgcatcgtcacagcgtccaggccgaccgtttcatcgtggccggcggcgacaaagctcagctcggagcagtacgggtagcacatctgctgctgctggtgcatgtaccagtcttccgccggccgccgcggagctgtcctggctcgtcagcgccgccgacggcgcgtcgtcctcgctgctgacgacgaccgcgctcgtcgtcgcagtcgcagctgccatggcggctt

SEQ ID NO: 282140 - DNA, 478 bp, Zea mays
ttctatcgcgtgcgcccacgcgtccgccctggcactatatcattcatttggagattttcaatcagctgtatagctatgtaaaattggttgcattttaggtgatttgtgggaattaaattgcaatgtaccagaaatcgatcttaatttatgcaatagattatatgggaaaaatcataccatggattggatgtaggctgaaaccagttacttcatctaggctaaaattgttggttctgtacaaaaggtagtctaattaggctttgatatccgaattaaatgtttatcacctacttttagaaaaaagttagtcatcttcacgatccagatgatacatattcacaaatttgtacatgagtaacaggcaacaacttttctcaatgtatgcagaaaatgacttatttttaggggcctggcgcatatctctatcctattattctattctgagcacattcacatgtacaactagcttaacacattc

SEQ ID NO: 282141 - DNA, 473 bp, Zea mays
tttaaagcctttggcaaatcgaaggaaatgatggagaaagaaatcgtggagcttggtgatgcgcacagtggctttgagaaaaaaaattagcagtggtagggaaaggatagcacggagaagagcaaatgctggtgatgctacagataagcacaccaacgaacccagggagaattctaatgcttcattgcagaaacatcatggaaacaggggtaaatttgctgattcgagtttgtatgaactttcggtaatgtgtgtcaagcagtgccatgctgataactacaacaatgttagtcaacattctagccaaactaaattgaaccagagctccaatttgacatcctttgtactgaaagcctttcttgaattgttgaaatcacttgcatcaaagcacagtagggacttcacaataaagctgcatggagattttaaaaagttaagccagccaataatgcagctagtatggtgttttttgt

SEQ ID NO: 282142 - DNA, 318 bp, Zea mays
tgccaggcgttcgagaggatcaccattcgcgggggaatccatgaaagccggcagatgactcacgcggatgggttctatgacaaatgcttaaggaagtgtggaagggcaaatgtctggaaaacctttacagatctatgctgacttacttgccctcgactgcaccgggcgagacagaatatatgtttgattgcatggtggattatcgacctccattgagacccttgacaacagccggaactattcaccgcgtccaagaagttactcacgaacgtgcaatgagcgaccacatggggactgaaccagatgaccggcgtggct

SEQ ID NO: 282143 - DNA, 470 bp, Zea mays
tttcacgcgtccgcaccacctcacccggcctctctgggctgaccatccaggagagcatgaggctgctgctgctcgtcagggcataccaggtgagcggccacctgaaagccaagctcgacccgctcgggcttgaggagcgtccggtcccggatgtgttggacccggcgttctatgggttctctgaggcggacttagaccgcgagttctttcttggggtgtggatgatggctgggttcttgtctgaaaaccggccagtgcagacgctgcgctcggtgctggagcggctcgagcaggcctattgcggtaccattgggtatgagtacatgcacatacctgacagggagaagtgcaactggctcagggataggattgagacagttaacccaatggattacacttatgaccgtcgtcaggtcatgcttgataggcttatctggagcacacagtttgagagtttcttggcgaccaag

SEQ ID NO: 282144 - DNA, 521 bp, Zea mays
tctaagacgagcgccgcgtgcagacggagtggtggaaaaagctggatgtccatcgccttgcttccaggttttctccaaccatgtccaccaacacactgatctagtactaggactactaccagatcgatcctgcctgcctgcctgcttgtaacagcaacagcagcagaagtggcgcactgtgctttgcggtggcggaggctgcgagagaggaggaacttgcaagccgacttccatggctgccgccttctccgccgctatcctcttccacctgctgctgctcctcttctcgccttccgctgcgcagcctggtttcattagcttggactgcgggggagctcgtgatcacacggatgccattgggatccagtggacctctgatgccagcttcgtctctggcggccaggccgcgcagctgctggtccaaaatggcctgcagcagacccaacagcagctgaccaccgtgcgctacttccccgcggacaacaagaagcactgctacaccatgaacgtcaggaacagga

SEQ ID NO: 282145 - DNA, 425 bp, Zea mays
cagccctccctccctccctccactcctcgccctctctctctttctctctcgtcccgtcctgagaagcggacaaagcgcggcgctgcagatttcgatccggttcccaatgcctcccatgctcgccgtcgccccgtgctagctctctctcccgtctccgcttcctccacctgccgcgccacgccagcgccagcgccacgccgcctggatccggcgagcgcgtggccgggagcctcagatccgagcgaaacccggccttcccgtggtgacggccttcgctctagctccagattggctggcgggtgccattcctcctcctcctcttctcgctcgaggttccaaggcgggtccgttcagctctgaaatctacggaggagtcttgccgccgcgctttaaacgtagaggttatgcgcaagatgtggaagcag

SEQ ID NO: 282146 - DNA, 454 bp, Zea mays
tttctattcccagcttacgaacgagacgaccttgtgggcgcctgattggaagtcaacaccccctatgagcagtcccagtttgctcatcctctgcggactgcggccgaacgcccatcacgccacgcgcccctttcccaatccccatggagatctccgccggcgtcaccactgtcaccgccgtgtcgatcctcatcctcctgttgctgccgcaacccgcggcgccgttctccttcacatacaacttcacctcgccctcggacacgccgccgcccgggattgccttccagggggacgccttctacaacaaggccatccgcctcacccgcgacgagcgcctcggccccatcaccagcagcaccggccgcgccttctactcccacgccgtcccgctcgccgaccccgtctcccgcccgccggcctccttcgttaccgccttagccttttcatcgccgcc

SEQ ID NO: 282147 - DNA, 472 bp, Zea mays
tacttcatctggtgtagatgatgttagtcttaacccaaccttttcaactgttagtggggtagcagacactagttatgttccttcatattctcaggtctcatcacaaggcactgctgtggcactggcaggaatccagaaggattttgtgacagttaagttggatacattgttaccagatagtggtaagggtgctcctcctgttaatgagggagataaaggtgctactgttacaacacctgtggcaaaagatatatgtgctgggactgtgacaacatcagacaacactgtcaccctgacaccaaatactcttaaggaaaacattggattagttcaagtggcatctgcaccttctatgctcgtggcttctgaagaactaatgaaaatagcacatgttgcggtggcccataagcctgttgagaagcaaactgcttcacgtcgccgtagaaagaaaacatctagtagcgaggatact

SEQ ID NO: 282148 - DNA, 315 bp, Zea mays
ttctgaatcgtgggtgcagggcaggatggagtgcggggcggtggtgaggatcatcagccggctcaagcatcgcaacctcgtgcagctcctgggctggtgcgacagccggcacggcctcctgctcgtgtacgagctggtggcccagggcagcctcgacaggcatctccacggcagcgagcgcttcttggcgtggccggagaggcaccagatcatcctcggcctggggacggcgctgcggtgccttcaccaggagtgggagcagcgggtggtgcacggtgacatcaagcccagcaacatcatgctggacgactcgct

SEQ ID NO: 282149 - DNA, 510 bp, Zea mays
agatattatgtggtcataataatgaagtgtggggtgtttggttctctaaggggggaagctacctggtgtcatcttcaagtgattgcactgccatatatttggtaggtggaaaatgatgattcattgaccaagaagcactgcctccagggtcacgaaaaaccaatttcctttgcttcctggagcccaaatgacagaatgctgctcacttgtggtactggtgaatcattaaaactgtggaatgttgatactggtgaatgtaaccttaaattcagaggctcagcagactgcatcatcagttcatgtgcatggtttcctaattcggagaaaatagtatgtgccagctcggagcctgcaagtgctccaaatagggatcttcacttgtgatctagaaggccaaaatctggaagtatgggctggagatagaataccaaaagtcagtgatctccctgtgacacctgatggccgacacctaatctttgtatcttgcaacaatatctggattagggaact

SEQ ID NO: 282150 - DNA, 523 bp, Zea mays
aaatgataccgctcttctctctaaaaatcctcctcaagcacagcacggacgtctggttcttccccccacgcgttattctctctctccttatcctgtcgtactcagatttttttttgtggccgtcggccttatcttcctgcgcgcgctccttccctgcaagctccatggccatcggcccttcctgctgagctcggttccatggacggcgttcctctacctttgacgcgcgcatctccctcggcgccgtcccagccgcgcctggtccctctgcttcatctacctcgcggtgccttcttcagctcgcggcgctcggtccctgctccagctccccggcgcgcgcccatcttccttgctcgctgttcctatttcccctgccatggatcgtcagttcgagctttcccatccgagctctattcatgaccgagtttttttccccagtgcagcagctccgccccaagccgaacggagctcctccatgggcttcctctagcttcgaccagggcggtccttggatgatacttac

SEQ ID NO: 282151 - DNA, 820 bp, Zea mays
ttttccttcctgctgagctcggttccatggacggcgttcctcttccttcctttgacgcgcgcatctccctcggcgccctcccagtcgcgcctgctccctctgcttcatcttccttgtggtgccttcttcagctcgcggcgctcggtccctgatccagctccccggctgcagcagctccgctccaagccgaacggagctcctccatgggcttcctcgagctccgacctgggcggcccttggatgctgcttccatcaacgccggccatcgttcctcaactccggcagtcgctgtggtctcagaagttagccccttttcagtatctatctctctccctgctcggacctccgcgttcccaactgtgcgcgctgtcgggtggccgtcagccatgccttccctgcttgctcgccagcacttgctcagccgtctcggctccctcagcctcaatctccagcgtcttgccctgctctttggttccagccgagctcgcgcctagctccatttcctcctctccggctgctccccatgaccaccgcgctgaacttcttcctgctgtccgtgatgtgtgcgcgatggacgcgatgaagacgctgtgtgtgcttgtgtcgagctctacagcaccagccatgcctctggtctttggtcgtcgtgctgtgcgtcagaactgtttgtagctcgcctgtgtgcccagctgtctcgaatcatgtcgtcgactatcatcaccacgagctcaccttctcttgcgcacatctccgcagacccgaccttatcacgtgtatgtgttatcgatctcggccctgatccgtgcgtcttcaggaaatc

SEQ ID NO: 282152 - DNA, 503 bp, Zea mays
tagcagagatggggtccggcatgagccgcggccggcggcgcggtttcggcgcaggggcgtcgggagggatgctcccactgctggcgcttcaggttctgatcgagtacggccgcgcgggcgcctctcggccgcccgtgacggcggcgttgctcgccggcaacgcgctcatctatctccgtcccggggcgctcgacgggatcctgccctctgtcacacgcgtctccttcaatccgcggctcatcgtcgagaatggcgacttggtgcgcttcttcttgtcaccattctaccacttgagcgaaagccacctgttctacaatatgacatcgctcctatggaagggtattcagcttgaaacatccatgggtagtgtcgagttcgcttccatggttgctgcattgcttgggctgtcacagggcatcgcgctgctcttgtccaaaggcctactcttgcttggtgattatactgcgtactacgaccaatacgcggttgggttctctggtgtt

SEQ ID NO: 282153 - DNA, 429 bp, Zea mays
ggcagccataggccatagcccatagcccccgctgacccccgggcgcagatcttttctgggcttctggctcccctctcccgccgatcacgccgcctcacctcgccgggcggcgtgatggcgacttccggggccggcgaccacgggctgggccagggccaggggcacggccgcttcgcgtcgtccctgacggcgcgctactcggactgggtgctggagacgctggacgagctcccagggagcttcctgctcacggaccccgccctgccgggccaccccatcgtgtacgcttcccggggcctcgccgcgctcaccggctacgcgccgcgcgacgtgctgggccgcaacgcgcgcctcttccagggcgccgacaccgaccgcgccaccgtcgccggcgttcgcgaggccgtacgcgcgcaccggccgcaccag

SEQ ID NO: 282154 - DNA, 604 bp, Zea mays
tgcttgtaccggttcggaatgtttgggtcagaccatttgtattttgtgccttgaggtctgctacatctccgtcggtgacctcctgattgccgtaagaagcggctaggaccgggacagaatggcctatcgacgtccaagcttgctatcacggatcggggataaccgggtcgggcccgttcgccggctttgcggtcgggagcgagacctctggcggtgtggaggacgtcgtggccgagcacctgagcttctccggcgtgggcgtcggggtccacgtgaagaccaactcgggcaggggcggcttcatccggaacgtcaccgtctcccaggtgaccctggacggcgcccgctacggcctgaggatcgccggcgacgtcgggggccaccccggcgcgtcctacaacgcgagcctgctccccgtcgtcgacggcgtggcggtcaggaacgtctggggccggaacgtccggcaggccgggctcatacggggcatcagggactcggtcttcagtaacatttgcctctccaacgtgaagctctatggcattggcagcgactccatcgggccgtggagatgccgagccgtcagtggcagcgcactcgacgtgca

SEQ ID NO: 282155 - DNA, 293 bp, Zea mays
gttcttgtgcgtcgaggactgctacatctccgccggcgacgacctgatttcccccaagagcgggtgggacgagtacggcgtggccttcggccgcccaagctccggcatcacggtccggaggataaccgggtcgggcccgttcgccggcttcgcggtcgggagcgagacctcgggcggcgtggaggacgtcgtggccgagcacctgagcttctccggcgtgggcgtcggggtccacgtgaagacaaactcgggcaggggcggcttcatccggaacgtcaccgtctcccaggtga

SEQ ID NO: 282156 - DNA, 392 bp, Zea mays
acgtagccgacggagtatgccaagtcaggccgtgtgtgaacgaggtagcgaaggctccccacaagacgccgatactgcgtaacgtccacctcctccgtcgtgctgtcgcgactcagcttcagcctctcctccatcggagtgagagctgggttgcagtcggtgagcccagccagctcaacaatgcgcttggcgtaggcggtctggcgaagtgtgatcccggagtctccctggtgcacctcaatccccaggtagaaggagagatgccccaggtcactcatttggaaggtggccttcatcgcttccttgaacgctgccacctctgcatccttagcgccggtgatcaccaagtcgtcgacgtagacacccaccagcagggcattatctccattgcc

SEQ ID NO: 282157 - DNA, 556 bp, Zea mays
ctccatgcctccctgtgcggcggggaagcggagctccatcttccgcggggtcacccggtttatgcggacaggtcgatatgaggctcacctttgggacaaaagcacgtggaatcagaatcagaacaaaaagggcaaacaggtatatctaggtgcatatgatgatgaagaggctgcagcaagggcctatgaccttgctgcattaaaatactggggagctggaacacaaataaatttcccagtatctgactatgcaagagaccttgaagagatgcagatgatatccaaggaggattatctcgtgtctcttaggagaaagagcagtgccttctacagggggttaccaaaatatcgtgggcttcttaggcaacttcataattccagatgggatacatctttgggactcggcaatgactacatgagccttagttgtggcaaggatatcatgttggatgggaaatttgcaggaagctttggtctagagaggataattgatcttacaaattacatccggtggtggctaccaaagaagacatggcagtcagatacatctaaaaca

SEQ ID NO: 282158 - DNA, 455 bp, Zea mays
tctattgcagtatatctaggtgcatatgatgatgaagaggctgcagcaagggcctatgaccttgctgcattaaaatactggggagctggaacacaaataaatttcccagtgagtcatttttacttgtgtggtgatgcttgtgactcgtgttttaaattgctgtaaaagttctcgcacttgacgtgaagatcagccttctgttaatagaaattgtttcattcaggaagcatctcgtggaaactttttttttgtaaaacgacccttatttatttctaacattgatcaataagattttaagatcagctttccgctaatagaaattgtttaattaaggaagcatcttgtgggtatcatatttttggtaaaagaaattcttctctttgtttctaacattgacccattggtcttatatgcaaagaattttgacaaaagctattgagcaacatggttttttt

SEQ ID NO: 282159 - DNA, 1091 bp, Zea mays
ctcgtactcgcttcagacaggaagaaggcccatcggattttacgtgtgggctgcctcggcgcctcgctgctcgccgcagtctcccatccattccagcccccctccccttcggctcgcccctcgcctcccacggcctcgctgctcgccgcggccccagacgtcagctcgcctccatcccggcctccctccccttcgcacctcgcctcctcctcgacgcttgtacctccgccaaggatctctcgggctgtgccagtttcacatgtctatctcatgcttcctctcctctagctacaaccccgccttgtggcctcgctgctcgcccaaaacgttatgaccagggacagagagagggaggtcgggcctagcagagcacgacagtaatggtgtgtgaggaacaagagcaattcgtcgcccacgtccaccatgagccaccgctggtgccggccggggctatggactcccccccccccacggtacgcacgctggtgagttccagaccttattaagctttgcgttatgagggtcttgctacattccttcagtatggagagttctattaaagatatttgttcccttcatttaagtaatgaggtccattgcttttcttttgggcagctatgcatcttttcacctcccttgtgttttaataatctgtcaattggctttagaacctcagtggctggtgagagtatagtggccccaaggaattctggaacaatgatgtacaaatttgagaattgcagggaccgaccagagttgactcagaaggccaattgagggaagtttagtgcatgacatgcaattctcaagattcaaaaacacaaggctgtggtatttaaagagaaacactacaatgaccttatggtcatttgctgcttcagtgaaatcggattgttttccaaatcctcaacatatggattttcatttcagattgtattttcattcaccatgtttttgtctgatgcccaaattggatttccccaattttagtgttgacaatcctcgcttgtgggaagtccattttgagatatagtttaaagtgcatgccatcaatgattctttgacgccatgatttgcagcacttaactttg

SEQ ID NO: 282160 - DNA, 421 bp, Zea mays
ggtcttgccatctccaaagggcagtaataccaaagacacttcgggatttatacatctggagaagggtgcatcagggagtgttggttgttgttcctgctgcttggtgctgctgttgtaacttcatgagtacagtcccaaggttgggaggctcgaccttaacgcctggaaagggcatagggagctgtgttgtccgtcagtcgctgtggcttgtcacagtaatttccgaagatgtccaacgttagttgagacaactgaactgcttaccgtggcaatcactcattgtaacatcaagttgaaaatgagggctgaagtttccctcataggctaccatatgtgagatatgtcctttgtaccactaagtgcccctgtgtcatgtatgaatgtatcttaatttgctgttgcttaaaaaaataaccttttt

SEQ ID NO: 282161 - DNA, 426 bp, Zea mays
tttggacgcgtgggcgacggcacgcttcaccgtatggtgtccatccttccatacctgcgcgccgttgccaggacctgctcttcgggccccccgacggtggcgggctcgaggaggggaacctctccgccgaggagcgtctgcggcgcgagcgcgcacgggagcgcggcctcggggtcacccgctacgagtggcgctctcgccattctggtgaatcctcacgcgccggcattgtcgtgccgctcccatccggggcttactgccaggatttatctggctctgaaccagcgctgaaactacgaagttctaccacatctacgataattgacccatttgtatctccaaatgggagcatgattgcatacgttcgggatgacgaactgcatactatggggttttccaatggagaaactaggcaattaacttacg

SEQ ID NO: 282162 - DNA, 584 bp, Zea mays
ttcgtacttgtactcgatcgcgggcggccgcccgcttggttttgtttttttcgtgttagtcttaattctgccacccatgtatttttatggaaaataaaaagctagatttgggtacatggggtgtcatgacccaccaaagaggccctttaagctccaggctgttgccgaccagcaactcttaaaaccttccatgttcacttgctactatgtacacgtggcaactaaacctagaaacggcaaattaaatccctactccatttacaaactaacccatgcaccatcccatatttacacaaggaccccatcgagcacgtgcccacttttgcgtgcgtcctcacgagcaggatcttatgaggccaaggctggccaggttcttcttgacaaggctcccgagcgagaagatccccgcaccgccgccgccgcggccagcgtcgccctccgtcgagcacaggcgcggccaccgctcctcgtccacccggaggctctccgtgccgatcctctggatcacctcgtcgatggtcttggggtccgcgggtcggccggccacgtcggtgacgtggaacacgttattaaaacatgtcgca

SEQ ID NO: 282163 - DNA, 395 bp, Zea mays
accagagaggtccattatcctttactaagctcctagctgttgccgaccagcaacttttaaagccttccatctccacttgctactatgtacacgtggcaacttaaacctagaaacggcgatttaagcccctactccatttacaaactaacccatgcaccatcccatatttacacaaggatcccatcgagcatcgcgtcctcacgagcaggatcttatgaggccaagactgaccaggttcttcttgacaaggctcccgagcgagaagatccccgcaccgccgccgccgcggcccgcgtcgccttccgtcgagcacaggcgcggccaccgctcctcgtccacccggaggctctccgtgccgatcctctggatcacctcgtcgatggtcttggggtccg

SEQ ID NO: 282164 - DNA, 394 bp, Zea mays
cggatggttgtctactaacgaaccagcttaaggatgagctcacttcactaagagaaagttttgaggccatgaaagatgcgttaaataagcaatcatccataaacaatgatatacaaatgatttctacatcccttcaagatcaactgggtgacctatgctctaaaattatatcttttaacaaggaagcaaacatttcaggcttagaagaggcatctttgctgcatgaacttgagagtaagaattacgctgctgtgatgaaaagattggaatccttccatcagcaaacatgtgacaaggtactttatcttcttgaggagaaggaagtaatggaaaaaatgtgtgatgctcttcagagaaggtcagagaaggcttgaacaaaattgcatggtatgga

SEQ ID NO: 282165 - DNA, 545 bp, Zea mays
cggacgcgtgggcggacgcgtgggtcctgatgtcatggctatctatgatttcatttttctatgggatgaagaccttggagtggagaacttcaaccctagaaggtttcttgataactggtgtcgaagcttggaaataacacaacctgctctggaccctgatctatcaactgatatccaccatcgaatcacaatccgtaataagatggcaaaagttcacaggagaatatacgacaatcggcctagtatgaattgttctgacgagagcaaaggacctccatgtacagggtgggtagagggcatggcaccagttttttctcgcactgcttggaaatgtgtatggcatctaattcagaatgatcttattcatggatggggtcttgacatgaagcttggatattgcgctcagggtgatcgaacagagaaagttggtgttattgacagtgagtatgtagttcatcaagggataccatcattaggagggccatcactttagcagcaagacacctcgaagatcattggatttgatgacccacatacgaagacaa

SEQ ID NO: 282166 - DNA, 465 bp, Zea mays
tttaataactctgccagtcttttggacaagtaggggaagtgattactcctagatttctttgtgctagcttttgtttttgctttcttctaaattcagagttttttcttttcttttctgtaggttgaactcatagctgatcttcatgttatccatgctagcaatgtattgcgtttattcatatttctctattatagtagggtgggtatatgtgataaagcatgtattcgatcaagcagatctttccaagtagggaactaaattgaaaattgtctcttatgaactctatgtctagtttcatggatcagtttgaggcatagctaactataatatatatgatcacactcacatccacttggtgttcttaaactgcatgcaacggtccactattgagttcgtaatactgaacctcatactccttgtcatggtacacctagtgtagcgattttctgactttactgagtgagg

SEQ ID NO: 282167 - DNA, 389 bp, Zea mays
ttcgtctctgtggagctcccatcgtggcgcagcttgcttcccaagccgcgctccacctccgatggcgcttggccgcccagctctcccgctgtccgcccgcctggcgcccagaccatggccgcggctctcctccagctcgccctcaagccccagcccggatcttcccgttcctggccgcgcccctggtccctgccatggcggccgttccctggtcggagtggatcctcagctgggaggcttcctcgagctcgaccgcccacctccctgctcggtccctgctccagcgcctgttccagctccagtacgccgagttcctcgctgtctgcgccatggagctcgcaccgacgaccgtctgttggtccttctctagccgctcgtggtgcgcgctc

SEQ ID NO: 282168 - DNA, 379 bp, Zea mays
atttgatcttgaaggtctggatccccttttagctgatgacccagaggacccactgaatattgtcatatctaacatgcacaagatattattcaacaccgattcatctgctactacatcaaataggatacaagatgtgcaggctgttctaatttgcgctcagcggttgggagcaagaaatgcaagagcaggccaacttctcactaaagaactggaagagtttagggcaagtacttcagctgattctatgaccaagcatcaatcacgttatgtgttgcaagtgataaaatacgtaacacaccatcctgacaacaggtgggttggtgtaggtgatgctacaggggattatgcatttagtcaccacaagcttaccgtataattt

SEQ ID NO: 282169 - DNA, 385 bp, Zea mays
ttcgtgctccccagacccttctctccctctcgcacgacctgagaggctcagacaagcgcgaaccccgcgaagctgccaagccgcgactgcccctcgacctgcccgcttcctccgacgcctagggttttctaccgggcgccgccgccgcagccgcggccggggatgcaggtggccctgcgcagttagccgcttttggatccaccgccgacgcgcgccatgttgctcctgcggcggcggaagcagcagcagctaccgtcctcggagggcgacgggtccgaccacgacgacaacgacaaggggaagaagccgttctcgtcctccgcgccgtcgtccaaggagcccacgaggcggaccaaggccaagtggtcgtgcgtggacagctgct

SEQ ID NO: 282170 - DNA, 541 bp, Zea mays
cgagcggcgacgacccggacgtgacgctgctggcgcgcacgctcgagagccggcgctcctcgtcctacggccactccgtcatccggaacgcctcgtcgcggatcaagcaggtgtcgcaggagctccgccgcatcgcctccatcaaccgccgcggcgccgcggggccccggatcgaccgctccgagtccgccgccgcgcacgcgctcaaggggctcaagttcatcagcaaggccgagggcgccgcaggatgggaggccgtcgagaggcgattcgacaagctcgccgagaacggactcctccaccggtccaagttcggccagtgcatcgggatgaaggagccggagttcgccggcgagctgttcgacgcgctgtcgcggcgccgcaacatctccggcgacagcatcagcaaggcggagctgctcgagttctgggaccaaatctccgacaccagcttcgacagccggctgcagacgttcttcgacatggtggacaaggacgccgacggaaggatcaccgaggaggaggtcatagagatcatcac

SEQ ID NO: 282171 - DNA, 1524 bp, Zea mays
ttttctcgtccgggcaggaagggtgtcaatcaggacgccatggtggtctgggagaattttggttcaaaggatgataccattttttggggtgtttttgatggccatggaccaaacggccatttggctgccaagagggtcagagatcttctccctgtaaagttgagtgcaaatttagggaagggtgaatgcaaagagatttctactagcgatgtcaagagtgggactactaaaggagttgcaaccgaacacagggttgaagatactgatgcttcccctggaaatgaagagaatggcgagtacccagaatttttcacagcactgagggcttcattcttgcaggcgttttatgtcatggacagggatctgaaggcacatagaaatattgattgtgaattcagtggtacaacagcagtcacagtaatcaagcagggacaaaatcttataattggcaacttgggagattctagagctgtcttgggcacaagaggtgaacataatcagctagttgctcttcagctgacagtggacctcaaacctagtatcccgagtgaagcagaacgaattaggcaacaaagtggcagagtattttctcttccagatgaaccagacgttgttcgtgtgtggcttccaactttcaactcgccagggttggccatggcaagatcatttggagacttctgtctgaagaaatatggaataatttctatgcctgatgttttctaccatcgcatcacggataaggatgaattcgttgtgctggcaactgacggggtgtgggatgtgctttccaatgctgaagctgttagcatcatcagcaatgctccttcacaggcctcagcagctcgatttctggttgaatcggctcacagggcatggaggacacggtaccccacatcaaaaactgatgattgtgctgttgtttgcctctttctgaaaacagaagcagcaagtacatcctccagtgctgtaaccaaagattcggtgaagaacagagaaatgagcagcggtaagcattcattggctgttaaaacaagcaccaaggttcctgcaaatcttgttactgcaaaagatgagtggtcttttgttgatggttcctctgggtgtgtcgcgctgccaactttaccagagcccacttcagttgtgaaggatagctcaaaagattgagcttgcctgccaattgagatggcataatttttgctggaaatttgttcgccttcgtttgcaagcttgtgtgcatcagatttgttgtgacgtgaagaccagtgccagtttcattggcgagttgaggaagttattgcatagtggaatggataagtgtgcatattttgttctttttgtacagtattcaatcagtttagtgggatcagttggtagtaatgataactataataataccgtgcctattattgatggatgggggtgatcagatccatgcataggatgaagtttctcccttcttttgtaatataaatataaataattgtgtcggtttcagcagctctaataaattttcttttaagtgtt

SEQ ID NO: 282172 - DNA, 546 bp, Zea mays
ttttattatggtcaccagtgtaactaggtaatggccttatgttaactttagctcccatgtgcaccaaaccagaaatccccatagttctcacatgtgtaaccttgacacacattatcagtacttttttttgaaagtttagaacattgtaataaacaacagtatgcaagatcaaaggaaaaaaaaggaagaatactgttttgtgctaccttatgttccaaattatagttcacgttagctttgtcctaagtcaaacttctctaattgttgaccaatttagtagaaaaatacaccaacatcaaactagtttcttttatattttccatgaaatgtgttttgacatagcatttaattgaatctgtagatgttatataattttttctaaaaaacccgttcaaagttagagaagtatgccttaggacaaaactaaagttaactatacttttgggggtggggggtagcaattgatatgaatctgatagcaacatagaatatgtagttcacatggactctcaacaactttgagtactttctttaacagataatgtt

SEQ ID NO: 282173 - DNA, 446 bp, Zea mays
tttcagtgtcccctctcctcctcttgtcgtccaccacccagtccccagctgcctcgctgatggccaccgagaccatccaggttccggcgccggccatgccggcagtagctgggcgcgccgccaccagaggcggcagcagggcgggcctcccgccgccgccgcggaggggccagatcaaggagaagatcctcaaggacgtcgtcgctgccgtctccgccatggccgcgggcctcgtcaagcatagccgcggcgacggcgaggagggtctcccggcctccgtcgacgccgacgacgacaagtgaagcggccggtccccagaagtataagaagagccgctccgcgcgttctcccttacgcccgctcctctgctgctaccatgtgctcattttagtgcacgcggtagagggcaggcagagggccaaatattttaactatgaagctctcgt

SEQ ID NO: 282174 - DNA, 486 bp, Zea mays
cgtgttttcacaaccctgatggtagtgctgattggtccctccccttagacagacaagtatgcatcaaccatcctgggtgtcctcatcacatccaggttgtctggaaggacaggtgtaatcatgttgccatttaaaagggtgctaaagctgtagttctgtgttactatggtgcaatagttgcagttccttgaaactggtcctaggagttgaagtttgagttaggcacacaaaattgtattctgtgaaataatatggcgttaggatcgtaattgcaattttttaatcgtagtttattgagttaggcacacaaaattgtattctgtaaaataatatgatgataggattgtaattgcaatttttaatgttttaagcttcaaatatgcaacagaggagaaatttcgataatctgaaaattttaatgcaacaaattgggttatctctgctcgaaatgggtcatggtctctatcctgttgttggttctaattc

SEQ ID NO: 282175 - DNA, 581 bp, Zea mays
  unsure (1)..(581): unsure at all n locations
gagcagagcacaccatcctcgcattattcttttcggatttgctccacccctccacccccatgcccgtgtccatctcaggctgcgtcacatcatcgccgccacacccagcaccagcaccagcaccagcggcggcgcaccaccaccggtgccatcgccagcgccagcgctagcgccggcgcaagcggaggcccgggcgacgcggactgggcgaagttactggccttcttttcgtcagcggcgttccttgccatcaagctaaggtcttccagcaaggttacgtggagtttaccaatgggtctggataatacttatggcgacctatctggcatgttctatggaggcctgtcttatgatggctacacagaccacagcagcgcaaacgattacttcagatttgccgatccacttcctgccactgtgccccagatggcagcagaagcctgttcaaatccctcctccactgtgtcaagggccaatactgaaactgacaacccagaggattgggaattcatctcagatgagtccctcgactatatcnagccgatgctcatggaggaggatattgatgagaagttagcatg

SEQ ID NO: 282176 - DNA, 483 bp, Zea mays
tttttacctcctttcttcctctccaaataaatcctctcctaatcttgtctatggaattgatcacccacttggggattttcatagcaatgagaagatagaccgggatggctgaaagcacaaagcgcaccatagctgtcctgccagcgagactaagcagccgagccttgagcttgtcagttttgagttgggattttgtggaattaacattcgataggggtttcctcaggttacatggagatctcatttatatcgaggttacaacactagaaggaaataaatactgcattaccggaagctccaaatttttttatgttaacagtagcaaaggaagtatatttgactcgaaacctacaaaacaaggactggaggccagcactctcataggcctactacagaagatcagtaaccaaatttaagaaaggtttttcgtgaactcttggatcgcagggcatcggctcatccatttgagaatgttcagtcttt

SEQ ID NO: 282177 - DNA, 453 bp, Zea mays
tcctcgcgtccgcggacgcgtgggttttgattctgcgtcgttcccatcaaaatctgcacgggattctgttgcgccagtgattctcgtgcagagtctactccgcggcggctccgcgcgcgcgcacgcagatgggcatcagcccctccaagcgcgtggacgctgcgctgcgccgcgcgccgttgttcgccgctgcctgcgacgccgccttcgaccggtgcctcgccgacgcgcagcgccgcttcccgggcgtccgccggtaccagctcgccgacgccgccgcacaccttcactcggagctcagcgcgtccgtgccgctggtccggcgctgggtgccctcgccgccgccccgcgtccgagtcgacgccgcgctccgcgccgctgggctagaggacgaggcagagcttttgcgactccagtttcgggagtttgccgtcgagctgttcagggaggccg

SEQ ID NO: 282178 - DNA, 390 bp, Zea mays
gtgtcttcccaacccccctgctcgacccgctgaactgctgatgcatcgcctactcttcctactcagctccgctggtccggtcgtcgcgtagcgccctcacccccagccacccccgccttccgacgtcgttctctccgcccagctcaagcgcccagcggtgagggaagggaaggaaaaacagacctttttttttcttctcggcggcctcgtgactatggatccgccgggctccggtctcccgccggtgccgaggtttcctggctcgatccgtgaccggcccacgtggagacggtgctggtgctagtaccggtgcctccaccgtgtttcttggcgaccttactacctcctctactcctatggaagattgctgctgcagcctgcaggaaagat

SEQ ID NO: 282179 - DNA, 434 bp, Zea mays
tctcagagactgaggagtgaagtagctaccatctcgcctcgtttctcccagtctgccgttgctgctgctgccagatcccagagttcgtggtaggtggcaatggcctcgacaccgcttgcaatctcggggacgcagcctacctgggtcccctatgaaccaaccaaagattgctctcagggcctgtgcagcatgtactgcccccagtggtgctacttcatcttccctccgcctccgccgttcgacgtgggcgggcccagcccggacgactcctccggccccgtcttctctccgctcgtcatcgctatcatcggcgtcctggcgatcgccttcctcctcgtcagctactacactttcatctccaggtactgtggcaccttccgttccttccggggccgggtcttcagttccagctcaggtggtggcggtggtgcccc

SEQ ID NO: 282180 - DNA, 436 bp, Zea mays
cctgctggtgccggtccagtaatcgggttgtcgtcccacgcgtcctgttgcggagagcacgggcctccgcgtggcgcaggaactggtctctcggtggccagccaatcatacccgagcgtgaggaaggttccagaggaggctgtggaggtcgacggagatcgttcccacgatccaggtgagcacgatactgtcgaggcgcacccacgcagcagtcggcgccacgccggtggggtcggagaggacgtgatcatccagggcgtagcggcgaagggtgaggaggagcaggtcccgccagcgtgcgtaggacggcgactctggctccaggaccacggcgaccatgaggcgaatgttctggacactcccagtctaaaggtggagctgagccacgagcgggtcagccgggtcatgccagagcaccgtggtggtggtgcggggc

SEQ ID NO: 282181 - DNA, 477 bp, Zea mays
tcgttctgcccccgggacacgcccaaccccgccggcgatttatcccaactgttgcatatcttgcacgcggaccgatgacatccgcgaaacaccgaattccaccgtatcacccggtcgtaactctgtcgccgccatagtgctcgaggtatcttcagacgacgcctcgaccgtcggcgtggtcgcagcagatgaggaggaagacgacatggctacgtaccgtcggcggcggcgtgcggtctgcttcacgcgggccagatctccaacgaacaggagcaaggagggcaggcgagcaagcgagcagtttgaaaaggaggttagggttttcgcggtgcgtggaaaggtaaatttcaacctgcgccgcccccacccccttttatacacaggacgcgacgctttgggaaacccgcaatccaacagtgcggcgtcaatcaacgatcatatcaaaacccccccgcggaaccactgtgagcgagggca

SEQ ID NO: 282182 - DNA, 464 bp, Zea mays
ggggcatggagaacgaagacgacgacgacgcacgccggccgtgggtgagccgagagcccccgatataccagctagctagataaccagccagcgcgagcatggaggcggcggcggcggcggtccggcaccggacggtggaggcgaacggcatctcgatgcacgtggcggagtccggccccgacggcggcgacggcgcgcccgcggtggtgttcctgcacggcttcccggagctctggtactcgtggcgccaccagatggcgcacctggccgcgcggggctaccgctgcgtggcgccggacctccgcggctacggcggcaccgcgcggccgcccgacgtcgcgtcctactccgccttccacgtcctcagcgacgtcgtcgccctgctcgacgcgctcggcattcacaacaaggtgttcgtggtgggtcacgactggggcgccatcatcgcgtggtacctctgcctg

SEQ ID NO: 282183 - DNA, 564 bp, Zea mays
gatgagtttaggctgttcgcctgtggctgcctttgttccgtctgtgtctgccggtgatgggacgggacacctagggttcggataccggcaccggctcaactgacgacggactatcgccagtggcgatcaccctccctgtcccctgaccgcggcgtcccctgctcgcgccgcaccggtggcgacaaggcaccccttgcctgctcccctagacgcgagcgagcgagccaacacctgtcggcacaagaatggatgggaatgctgagacgatccaattctcatggggcaagcgtcgagggaaaggtggtgctaagatggatacacagttctttgggtccttcacattggacaatgtgaagtattcactgtttgactgtgtctatctattctaagccatggtgatcctgaaccgtacattggaaaaatagtgaagatctgggagaaagataatgataaaaaagtaaaaattctttggtttttccaccctgatgaggttcagaactatttaagtggccctgtgatgggaaaggagatttttctcgcctgtggtgaaagtgctgggcttgc

SEQ ID NO: 282184 - DNA, 608 bp, Zea mays
tgcttatttgacgcgtccgcttgatacagcgtgaaacacaagctactttgcttgcggcattattcagagttctcattcttttgatatctgctacaccgtacgctcggatgccaaaggaattgttgccaacagtcattaaagtattgtgcagtagattactgaacaaacactcgaataagactgaacattatgctgtgctggttactgttctaagttgcttggagacagctttttcaaaagtgccacctactttggatgtctttgcggttctcactgaggattgctgtgctggaccatcacatgagcaggaagaatcaaatgttatagcttttcttcttcattgtatagaggaggaaatgcactacagtgttagacatggagccttccaggtgctgagatcagcggttcacaactacccaagctgtgcaaacatgatttgggaaaaacttcgagacaatgttcttaacttgttgcaaatacaaaggtttgaagaccaaaagtatgatgctaactttgggcctcctggagctaaagaagaatcatcaatcaagggaagatgtcttgtagctggcataaaggtaatggatgaatgtctgcgtgtttcatct

SEQ ID NO: 282185 - DNA, 464 bp, Zea mays
ttctttacgccgacgagggccgccgaccaggaggagatcacgcgctcatctctcatggagtccgtctagcttccgctcgtctgcgcccactccaagcagccgcagcggaactcaactactgcaggttgagatgaacggtccatcgaatttcatgcctactcctgaacaggatgttctggacgtcaagcccttgaggacattggctccaatgttccctgcttctctgggtgtcaatacatttaaccactcaaccacgccaccattgatatttgtcactccttctggacaatttcaagggggttttggtgattggaataatttctgctgccaaatcatttttcgctttcagcagcaaggatgctcctggaggcaaggctgatccatttagtgcacagaatactgggaccggcaaggctggcacttttggtgaacaggatgctttcggaaccagaatgtttttgcta

SEQ ID NO: 282186 - DNA, 459 bp, Zea mays
aggaccctgtgctctccttgccaccgaacgagagccaagagcctcccgccccacgacgcgcccgccccggcggcgacgccccggaggacgtttcccgcagcgaccggcgaccaagccttgatcgcctccgccccatggctacccgggcgcgggcgtagccgccgcctcggccgcagcaggctcggtccgccccccctcggcgatttctgttccagtcgcatcgcgcgacagctcgtcgtccgattccgatccccgccaccgcggcggaacgaggcgtctccggtccccgagggtattcggggaatttgagactgataagtcgggatcctgtcgataatgcggggctacgtgtacgagaccaatggttaccaccaggaagtggaagatgagtaccgagatgagtactatgatcaagatgagtatgaggaggaaggttcgggtgctggggatgggtatgct

SEQ ID NO: 282187 - DNA, 453 bp, Zea mays
tttatttactctggacatgtaccatacagagatagtaaactgacaaggttgctgagggattcattgggagggaaaacaaagacttgcattattgctacaatatcaccttcagtatattgtttggaagagacattgagcacacttgattatgcacaccgtgcaaaaaatatcaagaacaaaccagaggtaaatcaaaggatgatgaagtctgctgtgatcaaggacttgtactatgaaattgaccgcctcaaacaagaggtgtttgctgcaagagagaagaacggtatctatattccaagagagcgctacctccaagaagaagctgagaaaaaggccatgacagagaaaattgaacgactaggagctgatatggaggctagggataagcaattggttgaattaaaagaactttatgatgctgaacaacgtctgagtgcagagttgggtgaagaa

SEQ ID NO: 282188 - DNA, 472 bp, Zea mays
gaatccacacctgttgcaatcaacatgggcgatactggggaacgggtttctaaagattgccagagcccgacgtgaaggttgtctttagcgtacgatggatcattgtttatacgagagacacatcactggctggtcacagtccagctgagcatggtcatggaccagaccaaaattgatggcgtcccctgcatcgtagaagcctccaaccaagtttggagcgttctacagctcataggcttatgttagccattctaaaccatgatgaaaggtttgtagagctgtcaccatgttcactgcagaagctgactcttcagtctgttaaatatgctgtcatgaaccagtttgggggaggcaacatggaggtttgtgaattgcattttctctcatgtatttcttatttttctatcttcaagtgctcttatggcacctatacttgctctaacatatatttaattaataaaattctatgttc

SEQ ID NO: 282189 - DNA, 516 bp, Zea mays
ctcgagccgcacatgcagggatattgttaaatgcagctcttgtcaaggtaattgtcataaacgagtgtacatcaagatctggtgttagcataggaggcagtactacttccagtttgatatgcaagtcatgtctccagaagcgaaatcttatgctcactagttacaatacaaatgcaagttatatccagcatctacagaagaataatggccaacagccagtgaccgctcccagaaatgtctctaaggttagttcttcccattctgctgagcctgcccccaaagtggaagccgagccagtcacaaaggttaaggcacaacgagttggaaatgtggaagctacaacccagccagttctaaatgtgaaagcccagccacccgccaaaggggtaacttagaacatcactaggtgccaaaagacaaaagctaaaaagtcaaagtccgaaaaaccaacgaaggctaaaaaagtctaagcgatcacatttttcggtcttatatggaaggaaaataagaccacca

SEQ ID NO: 282190 - DNA, 529 bp, Zea mays
ttctttggaccatggcagcggatcttctgggctcaaatcaccattagcttcacgcccttcttccttcccagggattggtgttccttctgaagcccttgtgagatggcacatgcgccttgaatattttgcttatgaaaccttgcaggacctacgaattggcaaactttttgaaataattgtagattaccctgagagctctcccgctattgaagacctaaagctgtgtttagagtacacgggccaccactctaagcttgctgacctcatttatctcatcgcttcgatatcggctacttactgctggtgcatcaacaaatgatatattgcaccaatatgtgtccactataaaggcattgcggacaattgaccccaccggggtgttcttggaagcagttggtgaaccaattagggattatctgagaggtagaaaagacactatcaaatgcatagtgacaatgctaactgatgggtcaggaggaagtggaagtggaacaggcaatgcaggtgacaatcttctggaagagttgaa

SEQ ID NO: 282191 - DNA, 451 bp, Zea mays
tttggcccttgctcgaccgctcggccgtccatctctctcctgctcggccgcgcactggaccttgctccagctcgccgaccggagcttcgctcgtccccatggcgactgctcgcggtctgcgcactcggcgtccatctccagccagcgctctctccaaccaaggtcttcttcccgtgcgcgctatcctgcgcacgcaccgtgacctgctcggtccttccccatggcacgccccttgattctccctcccatggcgagctccaccttcccttgctgccgtgcctctctgctggtcggagcttcagcttgccgcgcccgtggccgaggccttctccctacgcgcgcacccagctccctattgccgcgtttccatcgcctaaaccggagtttgccctcccgccatgcttgccggcgtgctgctgctctaggtcggatctccccccacttgctgcca

SEQ ID NO: 282192 - DNA, 486 bp, Zea mays
ttgttcaccctcaaaaaccacccggttacgcggcggccataaacaccatgcgcctagtataatggcactattaaggcctttcttgtctttatgcactcggttacaaactcttctccaccaatcaacaaaagcgatatcctctacatcaggggagagatgaccaagcccgaaaggagataagaagctgtgccaaaattgctttcggatgtgggaggcctcaaaagctaaaaggcgagttttataggacgacgattcgacatgctatgttgcttgatgtagaatgttggcctaaaaaaagacgacaggtttagtatataagtgttacagaatgcttatgttacgttggatttatggccatacaagaagggatcaagtctagaatgacgatatatgtgataggcttggggtagcaccaattgaagaaacgtttgtccaacattggttgagaatggttggacatgtcttcatgagagaccttcagagaca

SEQ ID NO: 282193 - DNA, 570 bp, Zea mays
caccgagcacaacttcttttccggctttgtttcctctctctcctctccactttcttctccccctcacggagtgcaagtgcgagtgggagagtgagcggcggcggcagcggcagcgcagcggcagtacagtagccacggcccctgtcgccgcgtggtgtgccgtgcccgtgcccgtgccccctctcagcctctctctcccccttccctaccaggccacccacccaaaaccacagagaaaagcaggcctgggcaccaccaccgctgcctcgccccgagccaagaggaagccccaccccaaatgccttcctcttccccctgctaccgccacagcttcctcttcctggcccttctctcggcgtgcttctcgacaccgggggcagcggacggcaccgggggagccggcgacggcggggatgccgcggcaatgcaggcgctgcggcgggacctggcgccgccaggctggggcccgggtgcggaccactgcgcgtggcgcggcgtcacctgcgcagccgcgggggccggtggcgtggacaccgcgatcgagctgccgcgcccggggctccgtgggga

SEQ ID NO: 282194 - DNA, 237 bp, Zea mays
tcgtttccaaggaagcacccacaattatccgggaagggatcttgaagaatagagctgagatgccagatgttcggcggcgctgttagagaagctgctcttcgatatgtttgccaaatggttaataaagccatcatttgtgccagtgatagtgataaccatttgtttggtataaccaataaaatcgactttgtactctcaaattattttttatagaaatgcaatagatacggatacccg

SEQ ID NO: 282195 - DNA, 442 bp, Zea mays
tttctttacgttccaattccaactctgcaccgggccgctgcccgcattgcaaggcggctgttccaccgctcgcttcgattacgcgatacgcggtcatctacgagcggggagtagcgcagcggccggcgcgcgtcagaagtgcccatggacgccgcggcggtgctgaagcggaagggcgaggaggcgcccgaggcgtggctgctcggcggggtcgccgtccccgccaccaagatccgccgactcgacgcggaggtgccgccgcctgtcgggtccagcgcgggcgtgctgtcacagccgcaacgtgctttaggggtggaggaagcgccgatgagcggccacgtgggggcgccagccatggaagccacgcccttgttgaagaggaagggcgaggaggcgccccaaccctggctcgatgtcgacggggtccctatacccgcacgaa

SEQ ID NO: 282196 - DNA, 540 bp, Zea mays
ttcttcccacctcctgtcggcagctcctggtggcggcgcaagctgcacagtctcgtcaactcgctgctgctgctcaggcgatatggtctgtccctgctaaagatggacaagtttgtccaggaaatgttgcggcggtttatgctcttctacaatggcatggagtctcgccctgtgtttgccacggttgaggagatgctccaatggacgggtctctatggcctcacccgcaggacccttgaggaggagctgctggatgccggcctcaacacccgaacgatagcagagcttgtcactgttatcacaaggatcaactatgggcaaagcacacacataagtggcctggcaggcgccgtgtccttagctggatctgagtcaggattatgggctgtcaaagggggcaactggcagctagctgccggattgctcaagacctctaatgctaccttgcatcttcatgaaggcatagactccatcactgatgccggggatcactacgttctgagatccaatagagggagcgaataccagtgtatggtgact

SEQ ID NO: 282197 - DNA, 460 bp, Zea mays
tcggttaatgttacaaactgttcatggtcgggatgggaaagttgtagatgctggtcttatcttgcttgtgttaaaatttcataaccatatgcctgacagattaggagttatgaatttttcaaactggttgctgtattctgtccactgacagaacagatttcgaaaactgaattgtttgattcagttcagcatagaatcaattcttggtgattacaaaagtatgtagtgcttttgccaagcttttcaaaaagtcttgaatcactctttttggtgatctgaagattaagttatggatgtttaaactctgaagactaaatctgtccaattctggacagcaaagccttctagtgtcttttgtccttagttaaatattgaatcaccttgagatgtttataaatgatatgtagacaattttattacctttccagaaagtcagaatcaatttgtttggatgtctgaa

SEQ ID NO: 282198 - DNA, 570 bp, Zea mays
gcgcgcctcaccacggcgccatccgctgcggtcgctccggcggcggcggcgggatccacgacgacgatggccgtggcggcctcggcgggcgggtcgtaccagcaggaggccagcgccgccgccgtctctgctgactacctgcagtaccagatgatgcttctgcagggggccgccaccagcggccaaggcagcagcagcagtcatggcggatatcctctgtactacgactatggcggccacggcggggctggcgctggcgctggcggtggtgccatgagcagctcctactctttccccgcctccacggttgttaccgtggcttctgtgccgtcgtcctctgcctcctctgctcccagctatggcgaggcggcgcagtgggcaggcggctggccggagagtagtgcgtggagctatccggcgaccacggcttcttggtctggatcaagccagtatgagtattcaccgtcaactcgtccacctcaatagtccatgctccatgtttcatttcatataagacgtacacggccttccttattttcccccttacctcacaaagaacaaagcttttgt

SEQ ID NO: 282199 - DNA, 505 bp, Zea mays
gccgtcgtcttcatcttcatcttcatcgctgctgcgctcacgcccacacggagcatcagttctggcgcagcggaagcagccaccctcgcccaggctttgcttggcctcctctccatctctctgcgtcggcctctcctgcctgctgctcggtcccaagctcccctgtggccgcgcctggttctctgtttcctctaccaagtccggtcggagctctccctgctcggtccctacccaagcgtctgctccagttcatcggccgaccatcgctgttcctccggcgctgcaactctctgctcgcgtcgcgcccagtcttcagctcgcggagctctctctcggtctcctatggccgagcttctccaccagacagcgcccgtcctcgccaccaaccctgctcgcccggatccgtaactccctagtacaagtcggctgattcatgcgctggggagccgttctcagttgctcgccagatcgagtcttgcgtcgtcgttctgtgccattatgctcg

SEQ ID NO: 282200 - DNA, 384 bp, Zea mays
tccttcacgcgtccgcagccggagaggtttgggcacccggttcgtgtggtgtcgttgccgtcggtggagcgctggagcctggcggaaggacagctgtcgggcctgtcgagtccttgctgatgtcctcttgcttccgtaagggggctgggagccgccgtcgtcatagagcgtgcggggcgccatcattacttgtctggcggagcgagccagatgggacgccagtcttgttccccgtagcctgagtcagcttggggtagggtaatgatggcgcctcctgttgacgtggtcggttcgtgccttaggttgggcgatgtggaggcttctccgaggtcgaggtcgagtctgtctttcgaggccgaggtcgagtccgagcccctgggtcgg

SEQ ID NO: 282201 - DNA, 400 bp, Zea mays
tccgtcacgcgtccgctcccaagtccggaatcgctctttacaatttagtgactagtgagagagacttttgtgttcttttgagctcttgcgcttggatcacttttcttcttcctctattattgtttccaactcacttgtaatcaaaacaagagacaccaagttgtggtggtccctgtagtggactaagtgtcccatttgattgaagagaaaggctcactcggtctaagtgaccgtttgagagagggaaagggttgaaagagacccggtctttgtgaccacctcaaccgggagttgggttgccagaacccgacctcggtaaaacaaatcactatgttcatccgctttatttctttgttgatttgtctttcctctcttttggactcgaatttaactctaatgc

SEQ ID NO: 282202 - DNA, 282 bp, Zea mays
tttgtgtggcaagcaaccacgggcggagctcggggggtcctcctactcccggcgggcaattccacgctcatgctgacttcatatataggggccatcagatccaagaagagggaagagcaccgaggccccttcggggcccgtttaggatccacatcttaccgagcgagttctggggtggcctctccctctttggaccacctccaaggctcttggtgtagctagccactctcaccaatcaagttgtcatggctgatctccacattcagacgccaacatgcctta

SEQ ID NO: 282203 - DNA, 409 bp, Zea mays
tttttacattgtagggcaaacccaaaatttgggggccacaggtacatgatgcgggctttggaggctcactttaagaaggtggctggcataagctggtacttgtggatatttgttgggggattcatgttgctgaacatgaatggtcggcacacatactgtctggatctctatcattgcccttctgcttctgtcggccgttggcaccaagctagaccatgtcataactcagttggctcaagaggtcgcctagaagcactccggactacaaggcgacttggtggtcaatccgaatgatgaccatatctggtttggccagccaaagatcgtgctgtacctgatccactatatcctcttccagaacgcgtctgagatctcatacttcttgtggattgtgactacctacagtttc

SEQ ID NO: 282204 - DNA, 884 bp, Zea mays
gttcactaggtgcaccaagaagccaaagccaatggcgactctacctctgctcctgcacctgctatgggaggcctctccgtgggcccgtgcaggcgcggcgacggccgccgtggtgctggtgtggctagcggcctggacgcttgagtgggcgtggtggacgccacggcggctagacagagccctacgggcccagggcctcaagggcaccaggtaccgcctcctcaccggcgacgtgagggagaacgctcggctcaaccgagaagcccgcacgaagccactgccgcttgggagtcacgacatcatcccacgcgtgctacccatgttccacaacgcggtgaaggagaatgggacaaattcattcacttggtttggcccgattccgagggtgataattccagacccggaattaatgagagaggttcctgtctaacaagtttggccactttggcaaaccactgtttagccgtgttggcaagttactagccaatgggctcgctaatcatgaaggcgagaaatgggcaaaacacaggagaattctcaaccctgcattccaccatgagaaaataaagcggatgctgcctgtatttgctacctgttgtgccgatatgattaacagatgggaaaattcaatgtcttccaaggaaccttctgagatggacgtctggcctgagttccaaaatcttactggagatgttatctcaagaaccgcttttggtagcaactatcaggagggcaggaacatcttccagctacaaggagagcaggctgaacgccttatacaatcttttcaaacaatatttatcccaggctactggctcttgcccaccaaaaataacagaaggatgaaagaaattgatcgggagatccgtaaaattctgcatgga

SEQ ID NO: 282205 - DNA, 432 bp, Zea mays
gactagttctagtcgcccttcaacttgccagccgatcccttcgcgtttgtctccgcggttccgacgctccgcactccgctcccctctcccaagcaaacacagccgagtccacgcacgcctcccatcattcctcaaccgcctcgccggagcaaggggagtagcggaggatggagattgaccaggcggtgcgcgggtgcagcgaccgccgcatgcgcaccaagtacagcaacgccgtctacgtcgtccagcgggccttcgcgctctacccatttgaggaagttgccttcagctttaatggtgggaaggattcaactgtgctcctgcatttgattcgagctggttactacctttacaagaaggactctggtgatgtagcccaaacagatgctgttaaaaactgtccactgggtactatctatttcgaaagccctt

SEQ ID NO: 282206 - DNA, 752 bp, Zea mays
cggacgcgtgggctcaaggacaccatcttcgcgcagaacgagctgctcgcgcgcgccaagaagcgcggcgccttcgcctccctcatcgccgccaagtacatccccaagccgctccactgcctcgctgtccgcctcaccgcggagcggattgcgaggcccgaccagtacgcggacccggtgccgccaccgccggcgctcgaggaccccgcgctcttccactatgcaatcttctccgacaacgtgctcgcggcctcgtgcgtcgtgcgctccgccgttgccaactccaacgatccctccaagcacgtcttccatgttgtcaccgaccggatgaacctcggagccatgcaggtgataatccgccgaatggacttaaaaggtgcacactatgaggtcaaagcatttgaggattacaaatttctcaactcctcgtacgttcctgtgctccggcaactggagtcagcaaacctccagaaattctattttgagaacaagcttgagaatgccaccaaagatgccagcaacatgaagtttaggaatcccaaatatctgtctatgcttaatcacttgcgattctatttgccggagatgtacccaaagctacaccgcattcttttcctggatgatgatgttgtggtacagagggatcttacaggactctggaagattgacatggatgggaaggtgaatggggcagtagaaacatgctctggatcttttcaccgatatgcacagtatatgaactttttacaccc

SEQ ID NO: 282207 - DNA, 435 bp, Zea mays
cttggcagagcctgacttccattccatctcgatctcggcgatgccgcgcatggcgcgacgcacagcagtgacttcgcgaagtcgcgaagctgcacgcgtctagcgagcgcgtgtagctcgcccccccctggcggaagccgccaccacaggcacggcatctggccggcggagcattcgtctggccggcgtccgacatgacgcggccgagatcaagccggagacggctcgtggcctcttctcaccaccacagccgcagcctcccagtcgccaggatactaggatgcggtcgtgaagactttccattacgttggatcaaagataggcgggaaagactgtcaaggcacagatctgggaacatcgcttgtatgatggtcgtaacaagtcggacttgaaccaccttaagtcggtccccgaggaagaaagacagccagcatt

SEQ ID NO: 282208 - DNA, 432 bp, Zea mays
actgatttttcctccgcatcccacgtgctgagagggatcggtttagtgcataagcacttagcagtccacaacacacaaatttaggtgaaggaattgaaaagttaaccttgttaatctctattaattgagaagtaaaccatcttgctaatttttcctctattgcattcatgtcctgcatgtagtctccatcatttggagcagtggaagtttgacctccgcgataaaagtttcctctctgacaattttaagattagtttcctctctgacaatctttagatttacacatgacaaacacatcaatcctattcgggtgcatgtgtagaaagaaaaaaaatgatctcctcaaatattctactgaactttgcacaatgatttgtaattattttaaataaatagtccattctcttcagttttcatggtttcttatggaac

SEQ ID NO: 282209 - DNA, 507 bp, Zea mays
tttcacgcgtcccggggagtgctctgttcacagggggagtaacacagcatggcttctgtttatggaggttgtttagcacttcaagatggtggggttcctataaagtttcctgttgctggaattgaaatgggcctggtccttgatacacaagaatttggtggagatggtagcccacttatactctctgatattactggagctgaagatggttctggtgacatggatttgaagattgctggtaatgaaagtggcatatctgcatttcagatggacactaaggtagttgggataactctacctgtgatggagaaagcactcctccaagctagggaagggagacaacatattctaaattcgctgagattcacgtcggccatttccatcctactggcggtagtgttcatgctcatcagctcggggatcgcgctatacgctctcttcaagggcaccgcgaccatgccgcggatgttttctgacttctccagactcttctcgcccgtcgagctc

SEQ ID NO: 282210 - DNA, 510 bp, Zea mays
gcaatttcatctaaatatttacgacagcccattgtagatggaggaaagccaagtgatggacggagtccttggcaacttcggcccatcaattctcaatgtggcttacttccaagagctcatggtagtgctctgttcacgaggggagacacacagtcactggctgtcgtcactttaggtggctatcagatggcacaacgaattgacaaccttgttgatacggaagactcaaaaagcttctatcttcagtactcatttcctccatcatgtgttggcgaagttggtcgaattggagcacctagccggagagagattagacatgggatgcttgcagaaagggcactggagccaattttacctctggaagaggattttccgtacactattcgtgttgagagtactatcactgaaagtaatggttcatccagcatggcttctgtttgtggaggttgtttagcacttcaagatgctggggttcctataaagtttcctgttgctggaattgcaatgggc

SEQ ID NO: 282211 - DNA, 294 bp, Zea mays
cccacgcgtccggatggtagcccacttatactttctgatattactggagctgaagatgcctctggtgacatggatttgaagattgctggtaatgaaagtggcatatctgcatttcagatggacattaaggtagttgggataactctacctgtgatggagaaagcactccttcaagctagggaagggagacaacatattctaaatgaaatgttgaaatcttcacctccaccctcaaaagcactatctccacacgctccattaattcatgttatgaaggtcaaacctaacaaggtg

SEQ ID NO: 282212 - DNA, 674 bp, Zea mays
  unsure (1)..(674): unsure at all n locations
tttcggacgcgtggggccggtcatcacattaccaaaagtgcaaaatgatttctacctttgtagccactctggcattcaggtgagccgatgatagatgttgcgattctccagaaagaaaacaaattctcgtctcaacacatatggttttaatcattttgcacttttggcaagggacgagccggtcatcacattaccatggtggacatttgagatttgcaaccttgttgtgcatagttttacacactaagcacccattgcaccgaaaaaacttacaggatgaactagatgcaaaacctgaagagctggaaggagaagagttggaatctaagcttctagagcctgttgcagctctttcggtgcatccagtgcatgtcccaggaaacaagcaactagcttgccctacttcacagaaagttatagctaaatacgatgagctggctgcactacaagctgaaatggcattgtgatcaggattaacgcatggaccgaggaagcgcaatgacaagcctaatagcctgcaactgatgaaaggaatggtctctactacatgtattattgtccatcccatctttgtttaatggtcgtagctgctttatacaattattcctacctatgctagactgtgagccattgtatatcaatgtattttatcatattgatttcgtaaanaaaaa

SEQ ID NO: 282213 - DNA, 439 bp, Zea mays
acgtgtcgttctggcacgtacggcgtcgctgcgtgagatggcgtaccatgggcatcgaccggatgcagctatgtgtttctccatgataactggattgacacaagcaggcagcgcatggtccgtatgactcaacggaattctaccagccgcagagcaactgggatgctctttacaattttgagcagtgagacacatggaatgatcagcagaccagcaggttggggacaagctgcatttcaaacggtggggaattgtcagcagactgtcatgtgggaccctggatagatggcaagcgggggggatctccctgggtgcaacggagcacttgcacttacaggcactggcacaatcacttgggtatttcagcttccgtatagcaccatgctagtactgtaatcgtttgcatcctccagtccttctccacatgctcacgaacaga

SEQ ID NO: 282214 - DNA, 843 bp, Zea mays
gcgttctttggacgcgtggggaaagctgtctggtgtgttagaaaacaactgcaagtgtatcttatgctttgcagttccagtggtcactttagttcttccctatatatgagattatattggtcacattggtttttcttttctgtaagaatttgatttatgtactaactccaatgtcagataacgtctttataatttcatatttgctggactttccagtccatggaacatgctaggacatgtggatggggaaatctatggcaagcaaacaagatacatttctcgtcgccagatacttgagaactaccaagcttatggtgattcaataattgaccagtatggccccagcaggccaaatgtgagacaacttgtcaagccactgttaaacttattccactcagaacctggcaacagcctatggaaacgcaaagctgactctgcattgcgtcattgcaagacagtgaaaactttcttggaggagactcttgacgcaatatcggacagcgttcttgacaagccagtaaacagggaaccatccagtgacgaagaatattttgctagtgtcgattctctgttgccaccaaaatacacgacaccgatgcatgaaagacttgtagccgcatccacttgaacagcgtgtcgggaagcggattgcctccggtactccagggtgtagttgggtccctgcgcgtgggccctgtcgcccggggcagtgcccacccaggcggggctgtgaaaatgatctatgtaattgttgtaacccatatacgtccccccgtcggggtatatcaatagctgtagacataaccattttgactttgcggtaaaatccttgctcatgcttgc

SEQ ID NO: 282215 - DNA, 443 bp, Zea mays
ttgacgcgtgggcggacgcgtgggctggcacaggcactattaggtgttagtgtcgtatagtgccggcacggcacgactagccactgtagtgtagtgcctgggccgctggttaggcactagtgtcggcacgacacgacatgattactatatcaagaaggccgacgaggttgacccatacactgctcaccggtataagagcaactacaacagacttgttaacacatcatttgctcgccaaaaaaagaaaagaccgtgtaaaccagatccaacagtctccccatcgagctcgcttctccatctcactcgtcattgcgttctcgtcgctgaccatctttgtcgagcagctccaacatcgccattctcctaccagcacactgtgagtccgtttcactcccacgccctcccgcttttgcgccattccactgtcgcatacacgcccacgc

SEQ ID NO: 282216 - DNA, 695 bp, Zea mays
tttccacgcgtgagaaaaagcccagttccaaacctagactagactcctcaccgaggcgacgacgcaagcagctcagcgcgccgccgctgccccgtcccgtcccgtcccgcgccacgccggcgcctcccaccccgtgcgcgccggatcctcgttccacgcgccgcggcgccgcccctggaccggtcgagaggagcggagatccatccatccggccgtcggtcggtgtcgtcgtctgtcgttggctgtaatgaaaagctgggcctgctagagccaggagttttcgttgcaaatctgcgtctccgctatgggttcaggcaacttgatcgtgaagaaggtggtaaagcacagctcttttgatctggacattcagctcgataagagttggatggaggacgttacctgcccgatctgccttgattaccctcacaatgcagtcctactgagatgcacatcttatgaggaaggctgcaggccgtttgtttgtgatacagaccagacccgttccaactgtcttgagagatttaaatctgcatatgaactgccttccaatgtgaaagtttcatcttttgccatgcctcctctcgatagcattattcatattgtgccatcgaacgcaaacaaccgccccagctgccctctgtgtaggggtgaaggtattggatggattggtattgccgaggctcggcagcatttta

SEQ ID NO: 282217 - DNA, 493 bp, Zea mays
ggacgcgtggagaaggtcggagcttgtatcaatgacaaggagagcaagctgagacgtttggagaacatggtggatggactgattaaagagaaggagcacattagtgtactgctccggaacgcactgcaggccaccacaagtgaggtgttaaaggttgcagaggatggtctgagagaagctggcattgagattggacttaacgagcgaaaggagcacatgctagggagtgtggagaaggacgaggtttataccctggcaggggctcttgagaataccatgaaggagtctcaggtcaaaattattgagctccaacatcttgtcgaagcactaagggcggagtctggtttacttagaacaaggctagaagggcaagagaaggagattggtcagctaagaaagcaaataaaaaatcttgaagagaacgagaaggtggcaaatgaaagcgttgagggtctgatgatggacgtgacagctttttgagaggagattaaac

SEQ ID NO: 282218 - DNA, 480 bp, Zea mays
tccctcggccccttccccactccactccactccgactctcactctcactcccactcctcacgcgccgccgcctccaaatgccggcgcttcacccccaccgccggtccttccccattcccctgctacttctcctatcgctcttcgcctcctcccctctattcttctccccgagccccgcagcaaccgccgtcggagattgccctctggattttagctgggcaaatttcacactagctgcggcagcctgctctgacccaacgcagcgggcggcgtgctgccgctacatcaatgccttcgttgccatctccattgcccgctatgccaatgccaccggcaggctgggtgtccctcctgcctttgctgagatctgtctcagctccgtgtccgagacattcaagctgcggaggatcctcaccgacgtcgacgtcttctgcggtctgggccccaagatagggtttcgtataatgcgctgggcggata

SEQ ID NO: 282219 - DNA, 445 bp, Zea mays
tctgtggacgcgtgggcggacgcgtgggcggacgcgtgggtgaaaagacaataaggtggaagcaggaatgggctgaaccacaccgtctgttgaagagaagattgcttatgcctcaaaaagaagccgaagttttttttaattcactaggtgataaatttgtatactgtaatgtcgagtggctagtgaaatggaaggatctgggctatgaacatgctacatgggaactcgagtcctcatcctttttatgtactcctgaggccgaggagcttaaaaggagctatgaggaccgctttaaaactgcaagaaaagcatctgatccttcaaaagtagacaaggctaagggggggatatttcagcaactcgagagactgccagatggttgccctcctggtttagacgatgaccatttgagatcacttaaccagcttcgagcgagtaattaaga

SEQ ID NO: 282220 - DNA, 351 bp, Zea mays
tctcacgcgtccggtcagatcgcaggtgcttgcaggggggcagttgttagttcattcttgtagaaaacgaatgatgctgcggacctggctcatggcctgttaacacattgatatgatcattagttgagggttcacggccagctgcatttgggtcgttgcatttgatgggaggtgccattgttctttgttcaggtcaataggtgtcctgtacctgaatcagattatcctatgtggtgtgaaagcaacagaatactgcgaccctaggcctatctagatcaaggttttggattctggcaccttgtgttataaaattcacttgagtatagaatctctatatttttttgttataag

SEQ ID NO: 282221 - DNA, 526 bp, Zea mays
tgtataggttgtttattgcatgtctccctcacaggaaaactgggatacctgctttgatgatccatcacatgctaaggaagaagatttggatgcctgctttgatgatccatctggtaccaaagaaggtgagctatgcagtagcaagtcgtatgaataccataattttgaagaagatcgagcgatcgagaattttgctcctggccaggtttgggcagcatatgactgggggaggtttcctcgtagatatgcactgattgttaaagtactgacggataaaatgcagttgtatgtctcatggttcatgccctgtccgcaaactcctgaagagaagaaatggtcccttgtggggttgccattggtttgtggaactttcgttgcagatgaacaccgaatctcgttaacatgtccaactatgttctgtcaccaaatttccaacaacaacatgaatcaagatcttgaagtgtatccacaggaaggtgaaatatgggccatttatagaaattgggatatccgatggtacactgat

SEQ ID NO: 282222 - DNA, 583 bp, Zea mays
gatggtccgcctgcaggtactcgtgtccggatattcctcgggttttgacccaacgcgtcctttccacgcgtttcgctaaaaaatgaagcaaggaacgggaatttggcaacacccactgccggggttgggtggcacataaatgaattttgttacataactgaatttgttaggagcacacatttcagaactggatttttgagttgcacacacatttcttttgtttcagaactgaatttttgaggtgcacaaacatttattttattttagaattgaattttttgttttagaactgaatttttagtgaagagcacacatatttaatagtttcggagcatgacattttaaaactaatacaaaactgaatttattacagttatacatggttgttcagatgtgacagcaatgactaatgggacaaatgtcgagataggtccaaaaggccaagaaccaccatcaattagctctggcaatattagttttgttgttcgtgtattggctaagttattgcagatggcgcttgccttttgcttcagctgatcaagatctagatttcgaattgggccatgtgaagcatttcacattt

SEQ ID NO: 282223 - DNA, 419 bp, Zea mays
tttgctaactggggagacattgggacccttcaggtgctcatcgcagtattgcactcgctgatccaattttacggagagcctaagtattctctcgatgaactggcaacggaacatagttcacgactacaaagcctaagatcagaaagacatctggttgacagacaagctaatggcaatggtttatttcgattccaacagcgaagtcattctcctgaaattgttgagttacaggaggaagcagcagttgatgtgaaaccacatgaaaccttaaggctatgaaatagggtctgttggatcagatggatgatgcttacacacagaaaggttctcaaatcagggacatcctaacaggcagggatcctcctatttatacttatgctccatgggaagaacctaccaaaacttgattgctgtatgta

SEQ ID NO: 282224 - DNA, 676 bp, Zea mays
ggacgctggctaggtcagttataactttcatatatgtgcttccatacactttaatgttagtagtaacattgctgttagcagattaaaaacttagttaaacatatgcgtactcacatatttattatttctctttacatcaaggattcccatggacatgtggttgtccattacacagatgttgatacaaatgttcagctcctttttaggtaccgttgctcatgttgcagcccgaggttgtagctacacaggaacacaaattcagaagataaaagtacaagcgtgaagcacgagccagtacaagtcagcgtgaacagtacgggggtactgttcatctatttataggcacaggacagagcatgtgaggaattacagttatgccctttacatttactattgacttatagaaaaatctatgaggactagatagccttttcctctttaagtcggttcctttttccgcgattgagccgaagctcccttgcgcatagcttcggagcaacgacaaccttcgtcatgattatgctcttctcatcgtgtatgcttttaacctgagtccgaaggtacctgtccataagccatgcttggaagacattgttaaattacgtttttgaggaccttcaaaggacgaaggccccaacatatagggtgtttggtttaatgaatgagctagtgcatc

SEQ ID NO: 282225 - DNA, 955 bp, Zea mays
cccacgcgtccggaatatccattttatccctaggaagaatgggataactgctctttacatcaaggattcccatggacatgtggttgtccattacacagatgttgatacaaatgttcagctcctttttaggtaccgttgctcatgttgcagcccgaggttgtagctacacaggaacacaaattcagtgcagcttttgagcttgcaagaacggatgttggctgtgtttttgcaaatcagggtgacaataatgttgaaagaatccagcgttcgaagtatttccaagctcttcttcagaagtctaaagcaaatgtttctgaacaacggaatgcaacatgtcaagagttctcagttcaatgggctccatgcgtcgatgaaagccaagctgaaatggaaaatgagaagctaagcatcagggcttcaaagttaatgatgcaaacgaagttgacatcattgtatagcagtaagtccttgaagacaaatggcgtacccaacaaaaatatgttcaaatcagagaactcatctaaagtgtgtgccggtgttgaaaatagaacaagtcaaaatagtaacaggcggcatgcttacctggacgttgaggaggatgagaaatcccatgggcaattgcagaatgcaaagtggaaacatacagggttcagaagtcctatatttgaggttgcaaattctccatcaagtaatgatgaagctgatgctcctgccaatgagtttacgactgccaagagaatgatggggttggatgttgtgcaaaagccagcacaaaatggtccacaaggtgcttctgtatcaccacaatgtgataacaactatagtacacggaattatggcgtgagaccaagttggaattcttcgtcgtggaccacgtggtagttttataccccctatcagaaacaatggaggatcaggtacaacgatctcacgggtcactggtaaaaatgacgag

SEQ ID NO: 282226 - DNA, 595 bp, Zea mays
  unsure (1)..(595): unsure at all n locations
tatgctacgacgtcttgtgcttccacgccggatgccacaatagacaagcatattaagactgtcatgtctctcaatctctgcccatacttgaagccaatctggctgatcacaaaagacagtcatcaccctttaccgcacgtagcagcccagtattcgagattaaatcctgaatttgattgttaaaagatatcatcatatcaacgaagctaggccacaagactagcctgatacaccgtgatgcctgcaccacttgaggaagaaaggttcagattgtgagacaagggatatatgtaccatatcactgctctatcaagcatcagttctcattatgattcccatggacatgtggttgtccattacacagatgttgatacaaatgttcagctcctttttaggtaccgttgctcatgttgcagcccgaggttgtagctacacaggaacacaaattcagggatctgagcttcaatgatctatctggcccaatgctgtctatactgggcaacttgacatacactaagaaattataagctattttttatttgttacccctttgtttcatagttgatcccccagtgatgattttgcctatncagtg

SEQ ID NO: 282227 - DNA, 649 bp, Zea mays
ttttcgtttcgcgtccggaagaattaaacatcggttgaatgggaaaagacaatgccaagccttatctgagaggcgcacactggatttcgcgtcagttcatgtcgttccttacaccgtcaatttgacgaatcacctcgccacgccttgattttgttttgtcctccgcttctggttctggccgggctcagttcagctgtatggtattggtatcgccatgtcaagcgacctctccacacgctcctcgcctccctccaccgcgtcgccttccgacgactcgcggcggcaggagcaaggccaggcgtcgggtaacgccagcgggagccggcggtggcgcctcgggctgggcgcggcgtgggcgctggacccgcgggcgaggtgggtccgggactggaaccgcgcctacctcctggcctgcgcggccgggctcatggtcgacccgctcttcctctacgccgtgtccctgagcggcccgctcatgtgcctcttcgtcgacggctggctcgccgccgccgtcaccgcgctgcgctgcggggtggacgccatgcacgtgtggaacgtcgtcacgcagctccgcaccgccaaggcgccgccgggtaagcgcgtggccggcgacgaggagcagccgcagaccgtcgtcgaggccgcgcgc

SEQ ID NO: 282228 - DNA, 401 bp, Zea mays
gtggttccatgttgacgtcactgacatgtcagggaagttcttccttccgaataattacagaacgctaatcacaatatcatgtgatcgagatttacaaaggatggttgattttactaccagtgccacacaagtggaagttttcttgattagtagagtagaaaacaggagtattgttacttactctggagcttctgcaagtaagcctggatctaatgctcctggtgataaaaggaaaaggccaccttccaaaaacaaggtatccaaaagtaacaagaagactccaactcccagtgctcctggcacttcagtccaacctagtgctaataatgtgaaacagccaagaccaatagctattgaaaccaacgacaacagggtattccaactggaatttggaagtgatg

SEQ ID NO: 282229 - DNA, 449 bp, Zea mays
ttattagttttctttatgctccttgtgccttttcttttgatctttgcgttttgtttgcaagagacaaaagaagcgcaggggaaggatgccttttgctttcatcaggaaatcaatggcattaatacaacttagaagctaagctgtggctgcttcaagataggaagcttgatggctgtcagcttattgtacctaagtgactaaattttgtggagggccttcaaaagtgttcatctcttactagtgaaccatggtgggattgccgagccgttcggctaaccgggctagccgataattggtggtggtcggctccaccttatcactgttttggattttgaatttggtaaagtttgtaaattttgaaaacttttgatgacattttttgtataaatactatatattatttgaagattttctgctgaaaccaaatttcaaaatacacaacgaatttc

SEQ ID NO: 282230 - DNA, 604 bp, Zea mays
ctccgccccgactcacccgcaggctgtgtctgctcggcggcggccgtctcgactgccgcagaggggagcgccccttcgccgatctgatcgggagctgcaggccaaacggcgaggcgagcccatcaggaaccaccatggcagcggcagccgccgactccgatcccgccgcagctgtggccgacatgtccacctgcgcccattgtcaacgagagatcccttcttcgaacatcgacttgcattctgtacattgtgcccgtaacctccaaaagtgccagcactgtggagaaatgattcctaggaaacttatggatgaacactatgatgcaaaccatgccccgatcagttgctctctttgcaaagaaacaatagatcgtgtgagctgggatcttcataaaggcgaaaagtgcccacaaagaatcgtcgcttgtgaatattgcgagtttgaattgcctgcagttgatctccatgagcaccaggatgtatgtggaaaccgaacagagctttgccaaacatgcaggaagtatattagactgcgtgaatggacagggcacgaaatacagtgccatacaagctcaaatggttctgcagacacattcagagcaat

SEQ ID NO: 282231 - DNA, 529 bp, Zea mays
tttcgtttgccattcctgatgcagaatacagtgcctacactattcttgacgtttccaattgtaaggacaattattattcgagagaagatttctgtcgtgcatggacatcaagctttttcaacactgtgtcatgaagcattgaggcatgctaggacaatggggtacaaagttgccttcacagatcactcactttatggttttgctgatgctggaagcattcacatgaataaggcgctgcagtttactcttgcagatattgatcaggcaatatgtgtctcacatacaagcaaagagaacactgtcttgaggtctgggatatctccagagaaggttttcatggttcctaatgcagttgacactgcaatgtttactccctctcccaagcgcttaaactgtgatgaaatagttattgttgtggtcagtagattagtataccgaaaaggcgccgaccttcttgttgaagtcattccagaagtgtgtcggctatttccaaaggttcactttattgttggtggtgatggtccaaaac

SEQ ID NO: 282232 - DNA, 632 bp, Zea mays
cctagctgcggctgctctgactgcagatcggcgctggtgtctcactggtacaccaattcagaacaatttggaggatttatacagccttttccggtttctgaaagttgaaccatggaggaactgggctttgtggaataaacttgtacagaaaccatatgaagaaggtgatgaaaggggcttaaagctactgcagtccattttgaagccaataatgctgaggaaggactaaaaattgcacagacaaggagggcaggccaatccttaatttaccccctgcaaacattgaagtaaaatactgtgttttatctgaggctgagaaggatttctatgaagctctatttcgaagatctaaggtaaaatttgatcaatttgttgagcaaggaagggttctgcacaactatgcttcaattttggagttacttttgcgcctaaggcaatgctgtgatcatccattccttattatgagtcgcggggatacaaaagagtttgcagacctaaacaagcttgctaagcgttttctgcgtggcggtaatggcgctgttaatggtgattcttgcaatccctctctagagcttttttcgaacaggttgtcccagaattgcacaatgattaatgagagtgccctatttgtc

SEQ ID NO: 282233 - DNA, 339 bp, Zea mays
tggttcgtcctgcggcactgattgggttccgtgggaaaactataggtctagctctcgatgcttcaggtggcttgtacaggaaactgatccagaggttcccaaagagaggccactgcagcttcaagaggagggagttagcgacttctcatgcaaccaggacaaagtttcctgaacttgtggtacaagaagaaaaaccagttcgctctcgtgctattaacggattggcgatcgcagagaggccagaaaatattagaatggaagatgccgaatggcccaaaaggttgactggtccaaagtgaaattgctatttgttcaagagaataccaattttattcaccc

SEQ ID NO: 282234 - DNA, 359 bp, Zea mays
tttattgttggaaccggcacatcgggtatgggtgcaggagatgagcgggggcgattcccaggcggcacgcgtcactggaggccctacagctgcgcagcttcgccgcgacctgcacacggcgcttggataccgccaagtggcagcttgatgaactggcgcgggcagtcagatcgaacgatctggttatgtcagcaggaaaagacacaagggctacgcatgatgatcctgctacagcaattggctatcgcatattagaggtcgagaactatctgaaagaatgcaatcttgcggacggcagggggccattgagctgggttcacttggatgaggatgaaagggacgaccttgcagctttccta

SEQ ID NO: 282235 - DNA, 1003 bp, Zea mays
cccacgcgtccgatcatctactaaaacctcagatcagatgaatcaaatatgggaggaacttggtccaaacatgaaggaattgcttgaactaggtaaaacaggggttgtagcttccatcttagcggcatgtcagcggcttgaaacttatcgccttgagagttctcaagctcttgctgcagcgttaagttcagattctgagtctactgagagcattgttgcacgtatactttttcttgagaactacctacatgagagatctaattggaaatggattcttggtgcaaaaatgagcattctgggttgcttgatgctgcaatctattttccagtacccgcatcaatatattcgcccatatgtcgcaagcttgctggccatgggggatgatcagatcctccaaatttccaaggattcaggaggttgccgtgttcttgagtcttttctaggttcaagtgccactgcaaagcgtaaatttaatgtttttggaaagttgcaaggtcattatggagatattgctatgaatccttctggctcattcttagtagagaagtgctttactgccagtaacttttctcataaagaggctatagtggcagagctgttggctgtgcaatctgatctatctaaaacaagacacgggttccacttgctaaagaagctggatgtcgatagatatgctaggcgacctgagcagtggagggctagtcgaacttcaaaagaaacaacccaaaaaaagtttgaggcagaatttggctcaaacagtcaatctactgggcagattgttaaagaaaagttctctcaaagtcgcacgaagaagcgtaagcagaaagagaaggttgacaaaattactgaggatgccaggagcaacaaaacagactttttttagaaaggaaacagtcagaggccaaaatctggccacccaacttttgagaaccccctgagtgaaggtgctagcgctagcatggcgctcttgaaaggcttttgtcagaggaagttcccaggtttt

SEQ ID NO: 282236 - DNA, 498 bp, Zea mays
ttttgttattactgatatcctccatcctgatggtaacgatctgcttgctgtccttgttcatcctcctgatcaccctggcaaaattcctcctcaggggggccagggtggtgatcatgagattggaaaagatgttgctacacaatacgttgaaggatgggattggatgtgcccaataagggatcgaaatactggtatctgggatgaggtgtcaatttccatatctgggcctgtgaatataacagacccccatctggtttcaacttttcatgatgattttaagaggtcatacctacattgtacacttcagctggagaacaacagttcttggattgcagattgtaccttgaaaatacaggtttcaactgaacttgaagggaacatttgtttggtggaacaccttcaaagttatgcaataacagttcctcctcaatcagatatagagtacaccatgccttctttattcttctataagcccaacctgtggtggccaatggcatg

SEQ ID NO: 282237 - DNA, 462 bp, Zea mays
tttcgctcacgcgtccgggattcttttaatccttcggcgtgcaggattgtctactcaaataaggtgataaatactaaagtatgcttgcacaacggcttcaggtacacctgccccctacacgcgtgctagggtgaaaaggcgtgcacataatgtcgaatgtcgtgctcacatttaatgcgagccatgcagtagttatctcttcgcaaagcgaccaccataccgaataccagggtaagtatgataacctatgacatcggcttctatgacctgggcttgttggcctcgagtgatttgtcggcatagtccctgatagtttattggatttcttggtacaccatgcatgcgcttgtgtggttttaggactggcgtgtgcaccatgtagcggccttgagtgccctgcggtctatgttgcatgtctgcacattgagtcagtcccataatatttctcctcgtgcatttaat

SEQ ID NO: 282238 - DNA, 486 bp, Zea mays
tcacgtttccagtccgggcccgtcccgcccgactgctcgccaccctccggcgcgccagtcccgtccccgtcccactcattccattccattgcacaaagccctgacccctgatcggcagcggcggcggcggccgctgagatcgacagaggcggcgcgcgcgggacgccggacgcggcggtgccggtgaccatcgtgcggtgcggctgcccgtgctagctctctcccaccacgtcatatcccgtgcgtgacctcgcgccgctccggctgcggggcgatcccgcgcgacgaggtcgacgcccgcttggcaccccggcgatccccaccggtctttgagggggctgaggaccgcatgcgttttgggtcttcgacgcaccaacaattcaggccgaacactttcgccagcagcttctaaagcccgcgacttagattctgccttcatcacccaaacccaaactaaccgaaacaattttggtttcgaccacaaaa

SEQ ID NO: 282239 - DNA, 401 bp, Zea mays
taccgtttctcggcgtcggggagaccgggctcggtccgcgttgtctcggcggacggaggaggaccgtagcgcgaccgcccgtccgccgccagagccctcgtcatcgtgccggctgctcctgccgctcgtcccgccgcgttgagcattggggatctcgcgggcccttcgtctgtacccgccgactcttcaaaccctagcctctgtggcccgccgaccccgacgggaggagctggagctggggctggggctggagggcgcggaagctggtggctgttgtttcgctgattggaagtactccatggcttaatgttgaactggtaataaagaggtcaatcattgtcagctagctgtctgaggagggtttttggaagtcttactaagaagagagttactcatgctag

SEQ ID NO: 282240 - DNA, 419 bp, Zea mays
tcgttccacgcgtccgcgcgacggccgcccttttttttttttttttttttttttttttctttgaaaaccaagacgacgagcactgggcattaatttctgaacgctttataacagagtcagtcagcactccaaggacaagaaacttcttgatggtcttcacatcatgtcgctgcccgggggtccccatggcttgggcactcatactttgaagaagcgggggtccaagaactcttggaaggacagacgcttcactggattagggcatagtagcctggtgcatatatcgacacaatcggggcctaaggtagacgccagtggttccgagaacgggagagacgtgcttttgttgatgtactgaagcaactgcacgttgtttttgccatagaatggcgggtagccattcaagagcctaaatagga

SEQ ID NO: 282241 - DNA, 406 bp, Zea mays
  unsure (1)..(406): unsure at all n locations
tttntttttttttttttttttttngagttctgttttggactaaatatctttaaaactcctactgttagcagattgaaacagtacagaccagatcacaacagattgaaacgttggccacatggctctttggagaaggaaatggacgcgaacagaaaaccaagacgacgagcactgggcatcaatttctgaacgctttataacagagtcagtcagcactccaaggacaagaaacttcttgatgttcttcagatcatgtcgctgcccggtggtccccatggcttgggcactcatactctgaagaagcggtggtccaagaactcttggaaggacagacgcttcactggattagtgcatagtagcctggtgcatatatcgacacaatcggggcctaaggtagacgccagtg

SEQ ID NO: 282242 - DNA, 580 bp, Zea mays
cagttgagaagtatatggttccatttcaagaatctcgaccattacccgccgacttaatattgcggaaggttgtgatgcgtttgttgaaagagcgtgcagttcctcttgtggatgattggggaggatgcattggcatagttcaccgcgatgattgtaccaagctggacgcacctcttatttcaatgtctagagggccacctctgtgcgtacctacttcaaccaccgtggagcacgtcattgacctcctcctgagaaacaagtccgagatggtgatcgtggtgaagagtggtaacatgtacgaaggcagctacacatccagctcaagacccttgggcgttttctccctcgccatactatggagcttcaccggcgactactcgtcaggatcagatgatgtccccgacgcaggcatctcccgggcagcaaaacccaaaccagacgccgaggcctgcaaccacagctagtttggtgtttcttttgctcagcttatagcaactccgcgtcgtgttgccgggcaaactagtcatgtaatggtcctccagttggacaaggggtgcatgcgaaaaaaggttttgatccc

SEQ ID NO: 282243 - DNA, 500 bp, Zea mays
ttcacgcgtccgatttgaataagttgcacatacattataccatgtttcttgcaccttggtttggctactaactcatttatgcaagaaaagtgacttttggacttagttttgggcatattgcaagtcctggtgaatctgagaagaaaatgtatgtttcctacacttagtcaattggattaagtgctaattatgttatataaatcgtagggaagctatccaagaaagccaaaagaagttggaggaatttggctaaggaaagccaaatctgggcaagtctcggactcactggacgatccgatggtgcatcggacagaccggttgcccgaacgaacaaagtcttcagtctcaggaattttactaaaaaatcaccgaacggttcggtgtgcaccgtacagcccctccaatggctagtatgacatttcgcccaacacttcaacgactagattgggtcactagacagtccggtgccgtcactagacagtatggtgcccctagaaaag

SEQ ID NO: 282244 - DNA, 415 bp, Zea mays
tttcggtgtcgcgtgggcggacgcgtggggttccgcgagaggagaaatgatgatcccggcgaggcacatgccgccgacgatgatcgtccggaacggcggcgcggcgtacgggtcctcgtcggcactgtcgctcggccagccgaacttgatggacaaccagcagctccagttccagcaagcgttgcagcagcagcacctgctgctggaccagatcccggcgacgacggcggagagctgcgacaacacggggcgcggcggtggtggccgggggtccgacccactggccgacgagtttgagagcaagtccggcagcgagaacgtggacagcgtctccgtggacgaccaggacgaccccaaccagcggtccaacaagaagaagcgctaccaccgtcacaccctgcatcagatccaggag

SEQ ID NO: 282245 - DNA, 522 bp, Zea mays
tctttacgcgtccgattggttttatgtctctatgcactgccattatgcatgctgcttgttgtttgtacgttcacccatggattaaaatgcctttttcaggattaaggaaaattggtttatccatgcttttgtgtttaattactaccgttttatttatgcatcatggatgattctcaatgtacttaacgtgatttgattgtttaaattgatcaaactcgtagatgaaatattttgactgctaatccaattaactatctgttatgattctggatatagtttttcttaaagataaaaaaggccactgtttgtgtcatcatttcaattttatttttacttgagtcaacacctgattttgtcatatattgtgtcagccatctactgaatagacgtgtggttagtatgcatgcactggcagttttcctgattttttttggtatttcgtgaatctgtcaggtaaggctttttctttcagaggattccccttcttaagctggattaagaccacaggacaatcttcaagca

SEQ ID NO: 282246 - DNA, 298 bp, Zea mays
ttatcgtctcagcagcttttttggtttccccttccctgtccccgcgcggtgatcgctgggttctccgcgagcgaggcagggcactgcgcgtcctccgcgaccgcctggtgatcgctgggggttctggacgttggcgtttcatttggttggttggtgggtggcagcagccgtggcgagatggagctgatgctgccggtgacggtgaaggaggagtggccgccggaggaggaggaggaggaggaggaggatgaggttgttgtcttggactctgacgcggacgctgacgcggtcgcttcgc

SEQ ID NO: 282247 - DNA, 1167 bp, Zea mays
gtctcgcgtccgcccacgcgtccgcgactggaccgccgccgagcggcgacggcccctccctcctccattcccccgcgtccctctgccggatcctcccgtccccgccgctctccgcccgggcgcggacgttcaaagattccttccgtgcacccttgttaactaaacaatgaggcagcagactggtaagcgtccctcccaacacagggaatatgaaagagaagaaaggaaggaccaacacaagaggccgtttccccgtgctcaggaaagctctaataatgatgggctggttctttaccgtatactctgtccagacagtttgattggtagtgtcataggaaagcatggcaatgtgataaatgctatcaggcatcagacaagtgccaaagtcaaggttgttgacccgtaccccggtgcagacaaaagggttatcttggtatattgctacgtcaagcatagagaccttgatgctgagggtgatgacaatgagcctgtttgtgcagctcaagatgcattacttagggtgcataatgcaattgttgatgcactgcagacattacataagaatcataaagactctgataagaagagcacagaggaagctaacattcttgtgccagctagtcaggcatcaaatgttataggaaaatctggtgctgtcatcaagcatcttcggtcaacatcaagagcattcattaaagtgagcccaaaagatccaagtgaccctacacattcatgtgctatgagttctgataattttgttcagataactggtggtgctgaagctgttaaaaaagcactgtttggagtatcaaccatcatttacaagcacccatcaaaagagaacattcctcttgaaacttcaattcctgatcctactccaagcattataatcccttcagaacttcctgtctatcctgctagtaacttttactcggccccagatgctgctataccttctgtacatccaagcatgtctgtcttagggtcaacacgtcatgttcccgaacttgctgtacctgccgatgatcatggtcagctgcctatttaccaatctattcttccagttattcctacttatagtgccccaaaatgttcaggagaacttgagtttcgtgttttatgccctggtggaaaaattggcttggttattggaagaggtggggctac

SEQ ID NO: 282248 - DNA, 488 bp, Zea mays
ttttcgatatgacgctgggatcgatcaggagacctacttgctttacttggttgatgatctcctgcagaagcctacagtgagcgagcttgcagagggccatgccatcctagatgacgggagagcattgcttgacacaggaataatagccgcaacgggtaaagcatggcaggaccttgttacccttgcacattcatctagccattccgtggttaaggagctcatgtcttgtaacaaagagctcagcttatatgaggatcttgtggcggcatgggtaccagccaagcatgtatggttgcggaaccgtccattgggcaaggaactgatttctgctttaggaaaacaaagacttttcagcttttggtcatatgacttctcatttctacattttggcacatccgcggaggttcttgatcacctggcgggtttctattctggacttgtaggtcgaaagcatttgtgttcactaccagagaccactgcttgtgata

SEQ ID NO: 282249 - DNA, 331 bp, Zea mays
  unsure (1)..(331): unsure at all n locations
ncgctgctctccgggggggacctccctccgtctcccgggcggtagcggaagtaagcggacggggcatccacgtccgccatccatggctgccacaggtatgcttgcccttctcctcccagtgaccctctcctcgaggccctcccaccgcacgcgcggcttcatgcagatcccacgtcgccagcagccgcgacgcctcacagcggcggccaccgaagcctcctcctacaacttaccatctcgctcctcaccggaggcgccggagaccaggcagattcccctggagacggagtcagcactggagtggggcggcgtgtgcgagcggctggcccac

SEQ ID NO: 282250 - DNA, 474 bp, Zea mays
tttcgttcatccccaaatttctcctctcagcgcgtggggcagtggcggcggcagcgtgggcgcgcggaccgctacgggcacgggagcagcggtggctgcgcaggcagctgtcagcatgcggcatggtgactacgggagcccaggcggcgccggtgcggctgcagccggcggcgggcgaccgtgaggcggctgcgggagcggtgaagtccggtggcgcctgctttgttctgtgttcctatttttgatttgcgaaaggatccaagagagaaaggagggggagaaggcgagaatccaagacaagagcgagcatggagtttgctacgggtgccatgggtaccctcccccccaagctgggcatgctgctgcaggaagaactccacctgaagaataatgtgacggaggggttcaagagcctcactgccgagcttgagagcatgcaagctgcacttgtgaaggtgtctgacgtgccattag

SEQ ID NO: 282251 - DNA, 491 bp, Zea mays
actccaattaaagcctttagtaagtaaaaaaaaaaaaactagatagtttagtggaagtgtggaactacagcaggctcaatgccaacctgaacaatttattgatgatatacaagtccaagcatgggagatttgtgaaaatcagtacagcatggaactattacacgcaataacatatcacaaggtgtcatccataaagttcagaaatcatactcctctgatttcagtactgcgctttcccatcgttgttaaacagatactgtgtcacatggccatgctaggaacagtaagggcttgtttgggagcagaaactcaatcccctcgagatcctggacttttctcaggccaagcaatccatgtgtatgccattttaattagccatttagtttttcatagggctttgttcagttattcccatcccacgattgggagggatcaggagaaattttgacttgctatggatttaaacccactcaattccccttagtccacat

SEQ ID NO: 282252 - DNA, 433 bp, Zea mays
tttcttttttttggacaccgcggcggagctggagctggggctggtgttggagcagaagccggcggcggggtactggagcgtggtgggcgcgcgcccttgcgacgcgtgcgccgcggagccggcgcggctgcactgccgcgcggacggcgcgttcctgtgccccggctgcgacgcccgggcgcacggcgccgggtcgcgccacgcgcgcgtctggctgtgcgagggctgcgagcacgcccccgccgtcgtcacctgccgcgccgacgcccccgcgctctgcgccgcctgcgacgcccacatccaactcggccaacccgctcgcgcgccgacacgagcgccttcccgtcgcccctctcttcggcgcgctcgcggacgcgccgcagcccttcccgtccccggaccctgttcatggggaagcggtggcggaagacta

SEQ ID NO: 282253 - DNA, 527 bp, Zea mays
cgccggtcaccgtgctccgagaatttcccgaggtctgacccacgcagaacgtttaatctgccggctcccccaacccaattcctccagtctgcggaatgagcggcggcggagccctgccgcatctcgtcacgcgctccgagcgcgccactcgccaggaacccggccgcctcgccgtcatccacgcagcggcctccggcgccgacagcgaggagcgccgcttcacttgcggcgacccacctcgccgccgtcggctccctcatcccgccgcatcgccgccgacgctcggcaagcaccgccaccgatacccgccgcgaccgcgagcacggcccagggtttcgggccgccggcgcccttctgccgagggttgtcggggtatacgcctcgccatcgttggagtacgtcgccgccgtcctcgcggtgctcaggtgcggcgcggcgttcctcccgctcgacccgtcgtggccggaggagagggtctcgtgggctatctcggcgtccaacgcggcgctcgtcgtgtcttcagttgg

SEQ ID NO: 282254 - DNA, 394 bp, Zea mays
ataagtcgaagcaccgcgttcctcgtctcgcgtcttcttccactgctccctcccacctccgctcccagcttttcccattctcgttgatacgagcgagagtcgagacaggtcaaaaggagattgagtaaggaaaagaaaaaaaaaatcgctgctcccgaggcacggcggcggcgagcgtgcgacacctccggcggctccacagatccggcgaccgatctccggccgcctgcggatgctccggggccggcgcggtaaggcccaggggtccacgctcgtagccagatctcggggcgctgctgggaagtggggttcgttccgtccctgcctccctggtggtggggatggggtggtccgcggggctgtggtggttcatggccgctctgtgggtggtggt

SEQ ID NO: 282255 - DNA, 495 bp, Zea mays
ctttcgcgtccgcaatagcatcatagaggtaccacacgcagggagatatagcaagggaatgaacatgcaaattcttaagcatgccctctaggcacccagacaaaccgtagatgaaggtgatgattgctcgctcgctcgcttttattttttggttcttctctctgccatcgaatgtcatgatagatttattgattaattaatgtttctcaatcttcaaggaggctcaatgcaaaattagatactctttgttttcactcaccttggaattatttgcactgctcgagtatgagttacaatattgtgcttccgattttggctgcaaacaaggtgtcttcagtctggaagagtagatgtttacttctcggtgaacatgcaagctcaatgtttggttggttgtatcaagatgctaatttactaatgcattgcttactaattttctttcatttgcatatgcaaaataatgaaatgtcaggactatacttttacactaaatac

SEQ ID NO: 282256 - DNA, 318 bp, Zea mays
ccctcgcgttcgcggacgcgtgggcgcgcacaagaaccggcaataaatcgcggaattcccaacgccgcaccttcaccgccgggctccccagtccaatccaacccaaccccagtccggcgacggttccgggcagcgcgcgatcggatcgtcgcgggttcggcttctcgtcgaacggcgcggattcctgcccccgatcggagggcgtcggctgcggcgcctcggcgtctgatctgctgcggtcggcttcttcttgggagaggagtgggatggacggggaagcgatccggatgggtggcggtttcttggctcccgtctact

SEQ ID NO: 282257 - DNA, 630 bp, Zea mays
aaggacgaccttgcagacgacggggttggcgttggcagcatcggaggaagatgcggaggcggcctgccaggcgcgggaaacgaccggggggcacttcatgagccacacggagcggtcggcccgagccgtctccaggtactcggcttcctcatccatcgttcttgctgccgcggcgcgactatccgcaaggctctcgtgctactccggctcggacttgagaacggcgtcgctagggctccgcgagcgacggtcgatctgacgctgcggagggaccgagggagcgaagacggaggcacgtgcgagtgtgcgacgcggtgtgatgacccgtggccgcggctagagttcgccgggcgtgagtcggtagcagaccggtgaaaagaacgaagccaaggacaccgatgaaagtagaagagcaagagctatgccagattggtccaaacttttagtgataatcgaaggaatagcacatggacttctttacctacataagcactcccggttgcgcgtcatacaccgagatcttaagccaagtaacatcctcttagacagtgagatactgccatactgctgacagtaaatggtattaagctattattcagctctttcagtctgatttatcctttttaattt

SEQ ID NO: 282258 - DNA, 396 bp, Zea mays
acttgctctacctacgcgatcctttctttcagtttttatcagatagattcactttggtctgtggtggttctagaaatgccgctaatgttaaaggagtaattaattggtactttgttatatatatgggacatattttttacacaagtgagatcacaacacatataaaacttatgttgtttttctcaaggttatattaagcgctaggcgttaggcgggcgttaggccactatttagcgcctataaagcttaagcgtagattaatctgcttaagcgtttgtagtaatatacaatataatatatatatttgcacagaaaaacaggtttatctaggaattagtggggtacttacctagactagtggacatgtttttgcagccgtgctgcatgttcctagct

SEQ ID NO: 282259 - DNA, 518 bp, Zea mays
agcgtactctttgggcggacgcgtgggcggacgcgtgggcgaatactctatcatgtaccaagcaataaattcctagggtcgtcgattaaactttcttaaattaaatacacagatggaagaggtgctattaatccaaaagggatagagttctataacaatctcatagacgagctagctacacatggtgtccaagtccatgttatgatttaccagctggatctccctcagatcctggaagacgagtatggtggatggttaagtccaatggttgtggaggatttcacggcatatgcagatgtgtgcttcacggagttcggtgacagggtttcacactggaccactctggatgaagtcaatgcggcttgcaattgggtcctatgatattggacaaattgcaccgggaagatgttctgatccatttggaacaaaaaaatgttcagaggggaactcaagtgtgggagcctatttagcaatttataacatgctcctgcacatgcatagcttccagactgtcagag

SEQ ID NO: 282260 - DNA, 473 bp, Zea mays
tcttttgtgttcgaccttcggccagtcgagcagctgggcgcgtggcgcggccagggacgagggcgccatgagctcgccggagaatggcgccgccccggaggccagcgggaagaagaagaaggcggaagaggaggaggtggtggccaaggtgccgttcttgaagctgttctcgttcgcggaccggtgggactgcgtgctgatggcggtgggctcgctgggcgcgtgcgcgcacggcgcctccgtcccggtcttcttcatcttcttcggcaagctcatcaacatcatcggcctcgcctacctcttccccaccaccgtctccggccgcgtcgccaagtactcgctggacttcgtgtacctcggcatcgtcatattcttctcgtcgtggaccgaggtggcgtgctggatgcacacgggcgagcggcaggcggcgaatatgcggctggcctacctgcgcgcgatgctggaccaggaca

SEQ ID NO: 282261 - DNA, 554 bp, Zea mays
ttttcgcgtccgaaaggattatgtttcttacatggaactccagcatgatgaagatcctctatacatatttgatgataagtttggagaatcagcaccaacattacttgaagattatagtgtccctcatttattccaagaagacttttttgatatcttggattatgaccaacgaccagcattcagatggcttattattggaccagagagatcaggtgcttcttggcatgttgatcctggactgacaagtgcatggaatactcttctttgtggccgaaaaagatgggcattgtaccctccaggaagagtgcctggtggtgtcacagtacatgtaaatgatgaagacggtgatgttgacattgaaactccgacatcattgcaatggtggcttgatatatatccacaccttcctgaacatgagaagccattggaatgcacacaatcgccaggagagaccattcttgttcctagtgggtggtggcattgcgttctgaatctcgagacacattgcattacacataccttgtaaccatctatttcacatgtatgtttggttt

SEQ ID NO: 282262 - DNA, 518 bp, Zea mays
gctccttttgctaatcgatggccggggttgaggaagaaggctaggtggcggccctgcgggtggccctgaggcagcaggtgcaggccgtggaggagctgcgggcggagctggaggaggagcggcaggcggcggcgtcaggagccgatgaggcactggctatgatcctgcgtctgcaggcggagaaggcggcggagcgtatggaggcggagcagttccaccgggtggccaaggagcggatccagtatgatgaggacacgctggctttcctcagggccgtcgccttccaccaggagatggagatcagctcgctcaaccgcaggctgctcgccgtccacgccaccggggacgatcccctttcgccggcaagtcgatctcccctggctgaggaagctggccaagagcggcgtgacgtccaggaggaacgcgtccctcccggaggcacacctggaggagctttgctcggagctcgacgtcgtcgtcgacacggacgccgacaagaagagggtgggcgaccggag

SEQ ID NO: 282263 - DNA, 574 bp, Zea mays
accggaccggattttccgttcgattcacgcgtccgctcttctttttccgcgccgccgccgccatggacgcgatcgtctgcagatctcgcgcgcacgcaagaggagcggcgcaggatggaggaggcgctggcggctggcgcgcccatggccgtgtcctccgtcaccttcgacaccgacctttacggcggcgggggcgccgaccccaaccgcttcgcgggctacgacacctccatcccggcctccgaggacgacgccgcggaggacgacgcggaggccgccaaccctgcgccgcgccgcctcgcggtctacacgggccacgccatcgccgtcgccgacatcccgcggtcggccgacgacgacgacgggctgcccaagaggtcccagcgcatcatcgaccgcgaggacgactaccgccgccgccgcctcaaccagatcatctcgccggagcgccatgacccgttcgccgccggggaggccaccccagatccctctgtgcggacctacgccgacgtcatgcgcgacgcggcgctgcagaagaagaggaggacctgctcaggagattgcccagaagaag

SEQ ID NO: 282264 - DNA, 474 bp, Zea mays
tctcagcccaagcagcaggcgcccagcagcggcattgcaggttgcagcaaagagagagagagagagagagtgagagagctcacgagcctcccggcctcccctacccccctcatgcgccgcaagaagcacttggaccggggtgggggcggcggcggaggtggcacggagctcttcatctgcttcacctcgcgttcctccgctgcctcagccacttccgtcgccggcggcagcgcgcactcttccctccgcccctccagctcctccaagctcctcagccccggccgcggcagtgccagcgcaagcggagctgaggcagtgccggccccgcctctgcacccctcactcagccgccgcctccgcaacagcggcagcctcaagggcggccagtccccaatgttcccccccagggcaagaaccagggctgggtgcaccagatcccggtcaacatctgcgaggcactcaagacatttggct

SEQ ID NO: 282265 - DNA, 540 bp, Zea mays
tctagattcttcttcaagaagtaacatccaggtggctctttttgccagattcttatgacctgtataggggccttctcctatcagttcaagcaattcaggcattgttggagaacagaggataccctatcattgttgggattggtggtcctagtggatcgggaaagacaagtttagctcagaagatggcaaatataattggctgtgaagttgtaagcttggaaagttattacaagcctgaacaagtgagagattataagtatgatgattatagctcattggatattgctttgctcactgagaacattatggacataaaaaagaggcataaagcggaagttccttgcttcgactttgaaaattctagccgaaaggggttcaaggagcttcaagtatccgaggaaagtggagtggtctcctgccaagggggactgaaggtactagatgctagtaaagtctgcagttctgtccagaactttactgatgtgtacttacggctttctggcataccatcaaatgcccagctgaccgaaggtgagtgta

SEQ ID NO: 282266 - DNA, 510 bp, Zea mays
tcattcgtccggcacaaggaggtgacattggaaaaggtaatttatctggtggagaaaacatttatagtggaaaatctgcagatgaaacttgcgttctacctcatgatgatcgtggcctctcgacaacagcagatactggatccaaacctagtggctcccagttctgcattactttcaagcctaattctcatcttgacaggtagcacacagtttttggcaagcttgttgttggaagtgatgttctgaagaggatcgagcaagtagatgtgcaatcccctgattcaactcctgttggtcccgttactatagtaaattgtggggagctcactgaccgcaaagatattggatctatgagaataggaattgataaaaagagggccgccccatcaaaagtgtcaaagggtatatcttctgacgaggaaagtaattgatgacagcacaagggtcgtcgtacaaatctcaaaaaggagaaggaagaagagatatttttattcggagtcagatagatct

SEQ ID NO: 282267 - DNA, 597 bp, Zea mays
tttttctctctgccgcgcccctggcccctctgtgcgagctcgttccatagccggcttcgagcatcgccctgctcggtcatggcgtggacaccagacgagctccctagtgctcgctcctctccagccgagctcctcccatctctccctcgcgtcttcctctccctgccatggacgccggagttccgctactcgccatggctgtcggacgagtctcttccgtctttgctcgacatcttcgagcttggttcatgcgtgcgcgctgcactactcccatggcgtgttcctgcgcccggctggatttccctgctgagctcggtcacatgcctgggcaccgtgttctgcacgctcgccggtttcttcgcctccatcagccgcggcaacgtgctcttgctggcgcccctagtcgcaactcgagttgtctttctggctggccaccagcgtgtcgtcgagggacgattcttcactattgcttctccacggtcgtcaccttccatggccggcgttcccctttcttgcattgccgcgatgctccctcgctcctggtgctcgacaaggccaacagcttcaaatacttgtagcatgtctccgcactttgcg

SEQ ID NO: 282268 - DNA, 492 bp, Zea mays
ttgctttgcctcaccttggaggagttcttgcagcagcctccatgtgattctagaaccctgttgttgagtatatttatcccctattggagttcagatggcatcacctttgagaccttccgagcagcacctcgtccacttggcaatgctgtcgcatacgtcaattcagctttcttggcaaggacttcagtggatgcagcatcaagggaccatctcattgaggatacatgtttggtgttcggtgcatatggggctgatcatgctattagagctagcaaggttgaggattacctgaagggcaaaacagtgagctcgtctgtcatacttgaagctgttcggttgcttaaagcgtctgtcaaaccatcagaaggctcaacacatcctgagtatagaattagcttggctgtcagtttcttgtttaccttcctatcctcccttgccaacagcttgaatgaatctgcaaaggttaatggtaccaacgagcactcaccagag

SEQ ID NO: 282269 - DNA, 784 bp, Zea mays
cgcctgcggggcctcctttcgtccgttccccccgcccgccatggctggctccatggtggaccgcgccaccagcgacatgctcatcggcccggactgggctaagaacatggagatctgcgacatctgcaaccgcgaccccgggcaatcgaaagatgttgtcaaggcactgaagaaacggattggccacaagaatccaaaagttcaacttcttgcgctaactttgttggaaactgttattaaaaactgtggggatatacttcacatgcatgttgcagagagagatatattgcatgagatggtgaagatggtgaagaaaaagtctgatcctcgtgttaaagagaaggtattggtgctgatagatacatggcaagaagcatttgggggaccacgtgcaagatatccacaatactatgcagcataccatgagttggtgcgtgctggagctgaattccccaagagaccagagaaacctgcacctttgtttaatggtcagtctcaagcagcaaggaatatgcgtagtcctgaccaacaggatgatgcagaatcttctactgccaatgatttccctgctttgagcatgtcagagattcagaatgctcgtggtattatggatgtacttgccgagatgctgaatgctttaggcccaggaaacagagagggattaaggcaggaggtaattgtggaactcgtggaccaatgccgcacttacaagcagagagtagtgcagctagttaattctaccacggataaggaccttatatcgcagggggttgcactgaataat

SEQ ID NO: 282270 - DNA, 589 bp, Zea mays
ttcgcttctgtctctcttctgcccttctccaagaaaccggataatccatccatccatccatccgcgatccgccccgcccacccaaggaaggaacccgatcccgactcgccgcgggctcgatcccccgcgccgacggcgacgcgtggcaggcacggcaagcgcgccgcttcgccgacgtccgcgccgcctgggggcggaatgcgtcagctgtagaggacggccacggcacctttcagccttttcctcgtctgctcctcctctcgcccgggctcggtcggtcggtaacgactcctgctgtgctgtgctcgtgcagtcgtgctccagcctccggcagcgcctgctccgcaaacagttgcctctcctgtgtgtgctcaccaagggtcaaggggccagtccatccgcccgtccaggaaggaaatcgttcatccccagaagacaaagcgatccacttggataccggataagccctgtcctcgcggcgtcgcatcccctctcgattcccgcgacaggtcgcagtgaatgacgacggaaatcagcggcccttgaagcgaagactcccccccgccttcggtgctctccaccgatccga

SEQ ID NO: 282271 - DNA, 648 bp, Zea mays
ttccatcttaggagcgcaccgctcactcccagacgcccgtgcaaaggaatcccccatgatctcctccaaaccgccccactcctccgctagctgcaagctcgagatcaacgccacatcctctgcccctctgatgacggatccacccgccgtcccttagggcagccgtccgctctctgcaagcgcgaccttctggccagttctacgcggtcctccatacccgcaggtcgcatacctcgccctccccacgccgccgccgcgtgcaacggctccacggtcccttcacccgctagggtttggcattttagccgcatacatgatctgccagcccatatccagtccactcccgttttcttgagtgtagcagccgaagcatcgctcgcagatggtgtctccgccccactcaatcgaggtccggacccccggtgattcgccgcggctcaccaccgctctcccatcctcttcgtggccgccgagatcaccaccctgcgcctttgtgtcccatccgtcacctgcctccgtcgtggtcaccaccatgcaagcaggtcaccaccgagcaggacgcccggttgtccctgctacacagcatcgaccccgtctcctccctgcgctgaggtcaccaccaaatccacctgcgcccttaacccatcc

SEQ ID NO: 282272 - DNA, 520 bp, Zea mays
tcttccccgcactgcactgcaccccggcctccctgcgcggccgcccacgcgcccgccgcttccgccgcctgcctccctcctcatccgatctcttccttgcaagcccggagccccaggggcagtctcataaaagctgttagcgccatcggccaccatcacatctttttcctccgcctatttgtactacgccactgttgtgatcctgcgccctggacctggggggacagagagacggagggacgtcggctgcatcctgccgcctcagtgccgcgaacaagctgtcgagacggagtgccagagaccagctcccctggaagtgcatgaactagtcagctacaagtttagtacatggagcagacgcgcacgggtggtgccggggagcagccgaggggggctcccggtgaggaaccggcgaagaggatcatcgttggcggagacgcgccggcgtcggggacgtctggctctggctgcttcgactgcaacatcttgcctcgagtgcgccacggagccggttgccacg

SEQ ID NO: 282273 - DNA, 659 bp, Zea mays
tggtcgcgtgggcggacgcgtgggcggacgcgtggggtcatatttagtcagaatctggtcgtcagaagaagcctcccccagtcagctcctgccgcaccagcagaaatcggaggcgttaacttcaagcgcttcaggaagagggaaatggtgtctggaaacagcttcaaggacctcattccgtttgcgcgggaaccatacagagagtcggaccacgaacgtggcagcacgatgaccgatttcatgcgggaggagaagcggcagaaacaaatggaggccattgcggaggatctcttcaacaacgcaaagtccaagaaaagagcagccgctggaagttcgattcacaccctctctcaccggccacagatgatgagagccaggcaggcagcaggagatcacctctatatgcgatctgcatgctcatctgttagccacggcgttagaagccgaattagtgtaggccggctgtcggatatggattgtacctgaggtcatgttagatatgaatggttctgagggaaatattagctgtgattttggcattacgcgtcgggcaagtttagcgttagtctagaatttgaccaaacaagaggattttctccggttggatgttgcgagcaccagggttttcttgggttgaatgttgcatggttagttccaac

SEQ ID NO: 282274 - DNA, 768 bp, Zea mays
tctacgcgtccgcccacgcgtccgcggacgcgtgggcttcaggccagaagagtccaccgaaacataacagtttgttctccaggtatgtcttgggcaataatcatgcacctagtagccaacaccatggccattctggtaaagtgaccaaggaaagcaagattcatgaagtacaaggtcaaaaggttgtttatccagaagattcccctatcattgattcattagagtttgtagatcaggaatacgtcttcgtgtctggaccacacctggagggatcatcatcttcaacaaatgcctctcagcagcttaatgtaccagcaaaatatgataattcgtctgtttcaccaccaaagttaactttcatgagtgcaccaatgccgataaatggtttgccgattaatagacaacaacttgctgggactggtagctttgacagccactgttctcctgcatctggcacttcacagggatctgcagatataagtgatgccatggatcagcccccatctgattatctgacgaggattagattgttggagcaatatgcatcagccatagcagggttggtcagagatgagatcaaaggtggcagacacttggaagcgttctctattcagctaattgttcttgcaacctggaagcaagcaattcatataggaaatacctttgtagcttcacctgcaagggagagtccctcacaggatatccctatgaaggggcatattgctggtgcttcccatttgcctgcgaactcaaagctagctgatgatg

SEQ ID NO: 282275 - DNA, 308 bp, Zea mays
cccacgcgtccgcccacgcgtccgctccacctcccatgccccacttgttcgcctccccccggcctccctgatccgtgccgccctcccccaccccgtcaaccaggagcgcacccgcgtgtcggtgcggaaatgcgggttcgtcttgcggcgccgcggtgagctattgattgctggtggtagctcgccccgggcaccggcgatgggctgcttcccgtgcttcggctccacgcgcgaggaggagctcaagtactacggatccaagggccccggcggaggcaatggcggtggtgggcgagcgaccgcgtcct

SEQ ID NO: 282276 - DNA, 716 bp, Zea mays
cggtcgcgtgggggcgtcgtccctagacctctcagggttttttgaggaagaggacgtgtcccaaaggaagatcaggttcacgtccgcacaaccgcctgaggatttgttcgccgagatcgaacgctctgcgactgacatgggcttccgtgtgcacagtgggcatagtaagcttaggctgtcgcgaaactgcgaccggtcgaagaatcagaagaaccctatgtcgtcatcgtcgtcgtcgtttctagtctgcaccgaggtttttgagcttagcccctctttgtatgtcgtggagctcaacaagtcccatggcgaccctgcactgtacaggcagctctgtcagaggatctgcggtgacctaggtgtgctcgagatggaccagatctttgggacgaggccgccggtcgccgacgatctcgcgggcttggccttggcgttggagagacgatctgcgacgcctttggttgcgttgtgacgaaaggctgcccccgccggcccccctgaccgtgatgtttgtagcgtcagattatttagtgacgacgaagcagttcagctgcaacgcagctcggaacggttgtgtgatccctcccagaaatagaggacaaggtaaaagagtgtagccgtacacgtgtaggatcatgctccaatgtaaataaagtggtagtagcccccgatgtaaaactgaatgtaaaatctaagaaataaatcgttcatccagt

SEQ ID NO: 282277 - DNA, 606 bp, Zea mays
gaagtttaccaggttcgaggcccaggtcttggcgttgcgtgcggaccctgccacgttcactgaggagcctgaagattctgagggctttggtaaatggagtgccttggtctcaattgacgagatgaaggaacagatagagacggtgctccatgaaagccctggattggagagctttgtggagaggcttgtgccgtcagttgtggattacgagacattctggtcaaggtatttctttgctgtcaataagctcaagcaggcagaggatgtccgcaccaaacttgtgagcagggccatgtcaaaggaggaggatgaagaactcagctgggatgtcgatgatgatgatgttgaagatgccaatactagtgatcacaaagacagcacaaactcgttggtagataagaaagaggagcaagcagcggagcctgttaactgtgaaacagagggcagtatggaacaagaagcagcagctgaaaatgatttggccgacgataaggaggttgctttggctgcagccaaggatggtaacggtgaatcaagttttgaagcatcgactccaaaggcaagcaatgggaccagacaagaagagaagattgaggctgctgactc

SEQ ID NO: 282278 - DNA, 484 bp, Zea mays
taatttcctgaaaacactaacggggagtgttgcgagtattcatggtgggttctctgttttacgccgagcagctgagaaggtgtttcctccactggatttcaatcagcaacctcccgcacaggagttgattgcaaaagatcttcatggcaacgactggaaatttcgccatatttttcgaggtcagccaaagcggcatcttctgacaacaggttggagtgtctttgttagtgcaaagagactggttgctggcgactctgtcctttttatctggaatgacaacaaccagctgcttctgggaattcgccgggcaaacagaccacaaaccgtcatgccatcatcagtactttctagtgatagcatgcatattggcctgctcgctgctgcagctcatgctgcatcaacaaatagccggtttactatcttctataatccaagagcaagcccttgtgaatttgtcatacccatggctaagtatgtgaaagct

SEQ ID NO: 282279 - DNA, 420 bp, Zea mays
tctgagcatttcatgctgtcaaggttaccaaacgtcaaatttgttattgtaactctagggtagaaaggttgcttgatgcttgagagaagcagtacagatgcttctgaggcaggggaaatagatgcagaggctttattcgaatcactagagaagagcattgaccagagttctactataccaaaatgcgttgcttccaagtcaaacttgagaataagcgcggatggagtaggctccataagtggcaggttacttctaggtacggccgaagttataccacctggtgaactcgtagatacaactggcgctggagatgcattcattggagcagttctatatggtttatgcaccatcatgccaccggagaggatgctaccttatgctgcacgagtggctggttgtggttgcagaggtctgggggct

SEQ ID NO: 282280 - DNA, 599 bp, Zea mays
tttgatgttgttgatgctaataagccttctagtgcactctggagtggtgtaatgagtgatttgttggatccgaattatagcaaccaagcacagcaaagcagttttgtacagcctgctgctgaaactgaaagcaatgcaagagagataggagggagtagtatgaatggaggggaagaagtcctcaatgctgaaacaacccctgcatttgctagagatcaacttagcctgggagttagcggggggagtgtcgggatgggtgctagtcatgaagctgaaattcatgggactgatgtttctgagcataaaactggtagcgttgttggagatgctgatccaattcctgagctcatcgagactatgggccacactggtgagtcagctcctggacctgcattgatggatgagtttgtccctgaagaagttggtcgagaaggtcctaatggtgatagccaagatatggcatctcggttagcggttcgtgctgacagtggttctaaaatttgtggttcaactaaagctgattcagttgagagtggagagaagacgagccgtgagaatagcgcacatccttctctttcttgcaatgcaagagttttttc

SEQ ID NO: 282281 - DNA, 433 bp, Zea mays
caccccccgcgcgcggaggcgttgcttccaggtcgtccaaagactgcatccctcccccctctccagtctccacccagaacacaagcaggcagcagccgatcggactcggctagtttcgccggccgcctccaactggtcctccgctgggcgcgagggctctttctctaggcccgtagatctgcgctgctgcgccctcgttgtcgtgaaaatcactatccgtctcttggatcgagcgatcctcccattcgcggcttcgccccacacgagtcgttccaaggagccgaaatttccagcccgcccggcaggggcaggcggtacggggattcgggctctgccctgcttttatcagcaactccactggccgctgaggttctgtaggagggcggtgcaccggtggggccaggggagcatgatgagggggcacacgtgggct

SEQ ID NO: 282282 - DNA, 569 bp, Zea mays
gcgcgagttattatcggctcgaacccgtactcctcaagcaaaaccactggaggagcaccaagagttatctccggctcgaacacgcgtccggtcctgacgcctgattcgcaccgtacacggcaaggtggcatagtcgacgggccgtcagcggcgagacccaagccaacacagcccagcgatgtcggcgcgtgaccgcgagacggccgaggcgctggtgcgcctcgccgcctcgctggacggggcggtgctcggcctcggcacggctgccgtcgccgtcgcgtcgtgggtcaagtacctcgccgtctcggggcagctacgcctcgtcgcctccgcgacgacggcctccatcgccgacgcccactcccttctctcaggcgacggcgccgagccgcggatcgccgcggtgcggggctacgtgcgggcccatgacaagttcttccgggccccgttcttaggcgaggcgggcgtcgtctccaagcacacccagatgtgtttgttcacagaatggagaggcatctttggatggacctttgatctgcatgctcttttttcagacatggaagagcaaa

SEQ ID NO: 282283 - DNA, 426 bp, Zea mays
gctgcctatggccagctagagccaaccagaagagcttgcggttactgagagtgtgtgtgagagagaggatgggtggcagcggcagggctgctctgctgctggccctggtggtggtggccgtgagcctggccgtggagatccaggccgacgccgggtacggttacggcggcgggtacaccccgacgccgacgccggccaccccgaccccgaagcccgagaagccccccaccaaggggccgaagccggacaagccgcccaaggagcacaagccgcccaaggagcacgggcccaagccggagaagccgcccaaggagcacaagccgacgccgcccacgtacaccctgagccccaaacccacgccgtcgacgtacactcccaccctgacgccccccaagccgaggccacccacatacacttccgcccata

SEQ ID NO: 282284 - DNA, 632 bp, Zea mays
tttttcgcgtccgatgagttttttgttctacagctatgccctatgctaaattcactaacaacatgagacacttctaatcgtctcttgttcctggtataccaccttatgtaaatgctatctgttttaaagttttctccctgcactgtcttgtaaaagtgtatgttgagtctgtttgctagtaaaattacaatatttcaagcatggggtcgttcacaaccccttcccacaagcagagcattttggccagtctgttgcatatgtagcagtgaatggtgctctggctggtcttatttgttttgaggataagctcacgggagattcttcgcaagttattgacacactatctaagcaaggaattagtgtatatactgttatccggggacaaggaaagtgctgctatgaatgtggcttcagttgtcggtatccaggcagataaggttcttgctgaagttaaaccacatgagaaaaagaagttcatatctgaactccagaaagagcacaagttagttgccatggttggtgacggcattaatgatgccgcagcactagcttcagctgatgttggaatcgcaatgggtggatgtgttggggcagctagtgatgtatcttcagttgtacttatgggcaacagg

SEQ ID NO: 282285 - DNA, 491 bp, Zea mays
agagaagataaaatttgccatgaaaacactagctctggtgatgtctgtgctgaaccaaaagagtcgatgcttcttcaagaaaatggaataccagttgggactggaaacatggtagaagagaaggttgatgcacaaccacatgtggttgtccagcaatataaggaagaaactaacttatctccgttaacagatgccctcaagaagagcttgatgcaggaaaccaccttatctccatttgcagcttctcacaaggatagcttgacgcaagaggatggctatatgcaagaagctgatttatgttccatgactgctaatcacagggatcgcttgattgaagaaaccaaattggtaccggcaacagcttatgacaaggtcagcttgattgaggaaactggcttaactcagacactatcttatgagaataacttgaagctacaatttaaggaaggaacaaagatcggtgatatctatatgctgtcacaagatgtgga

SEQ ID NO: 282286 - DNA, 846 bp, Zea mays
cccactgtgtatcgcccacgcgtccgctttcctgcttacatcaagcagcaggcaataattggtgtgctccgtgcaatcaagcgatgcgacgtcggcatacacaaccaatcatcgccggcaagtccgagtttgattttggcctcggattccactcactactcggatgggttgtttatgtggccgttcagatggtgaagtatcaagcatgcaggtgcagatcggaagaggcacgcttctttctgatgcttgctacacggcagcagcagcagcagtcctctcctgctaagcatatatgcatgtttatactatttagattagatattgtgtgtacagtacagactgctgatacaaccatccaagtcactgctgatactagttagattagatattgtgtttatactaattctattctggtttaagcagtggtgcactagtacgaaggggatcaagcgaccagacacaagtcactgtttattaatgcgtcatttggagcagcgatgagacgcttagtgatcttgtcattgaacaggctggatatataaatggacccacacatgtgtgtgtgcgcctttgtaagcatgtcgatgtaatcttttatgtgttttctcttggcctgttggcctagttgtctttaaaaaaaaacctgagctgacagaggatgtctgcagggcaattgtaataagtgataattcagtgggaccctgtgtgttggcagcaatgtaatgcttcctagttggcataaagatccatgcatatgcatgccacttttctacgatttggatttttggaaggtgagggtgtttggtttgacaaataagctagttcattatcttgttacttatcact

SEQ ID NO: 282287 - DNA, 815 bp, Zea mays
accataccggtgtatatctggatggcagtttcatgaagcatgtcagttcagggtgcccgtatttggaggttctcgagctcaaagattgcccgtgcacatttgaagaggtcacatcccacacactgaagaacttgattctggaaaattgcggatgcaatgagctttctgggattacatcacccacgctgaagagtttaacaattattgctagtggatattaccacataaataggctggttttgaaggcccctgctgttgcttatctgctcctggatgtgaatgcttattttgttaaacgcgatgtttcatttgatgagatgtcatctcttgccaaggcttcaatttatctaagggacagtgtaggaagtggactcagcaaggaccaattcaagcttctttgtagtgtgtctaatgtgacaactttggtgttgtcaggtttccagacaatggtgatcagtgaagaattcccagaattccataaccctttgaccttgttattggaaaaatgtgatcttactgacaacttccagatgttggcaaactttcttcagcattcacctgatttggagaagctcactttgggccgttgcaagttctcaaaagatcccaagaaaaagaaaggaaaagccagattgagcaaggggtgtctgaaccagtttaacgtccggtgcaagaacctcaagcttactgaaattatctatgaagacgacgatgcgaaaaaggtggtggaacttttgtggagcatgtcaggggacctgcccaagaattacataaaactcaccaaggttgacccggatcatccttagtccaggtca

SEQ ID NO: 282288 - DNA, 579 bp, Zea mays
atctgatcctgactaattctctagttcaatatcgtacattttctgtgatgtgaacagttctcaaaagatcccaagaaaaagaaaggaaaagccagattgagcaaggggtgtctgaaccagtttaacgtccggtgcaagaacctcaagcttactgaaattatctatgaagacgacgatgcgaaaaaggtggtggaacttttgtggagcatgtcaggggacctgcccaagaattacataaaactcaccaaggttgacccggatcatccttagtccaggtcatctggcacttggtcacacagtggcttctatgaactttgcttgcatgcctcccctgtgtttagacgtccttagttgaactgctgggcgtgttcttttggactcatttctagataatttagttctacgagctatggtacttgttttgtgtggtctgcagctcgagactctagtccttatggtgtaagcttgcatgcttcaaagggaacagaaaattgcatgtttgcttcgtttccttgtatatccggtttcaagtttggtggatgcagactgtttccaaatgaatcttcgagttcatttcgt

SEQ ID NO: 282289 - DNA, 1064 bp, Zea mays
taccttctcacgcgtccgcccacgcgtccgcccacgcgtccgcccacgcctccggcgcaactggccctcgctagatgtagctggggcgctctctaccgccgctagggtttctaccgccgccgtcgatgggcgccctcaccgacagccggaagcgtctctcggcggaccactgcctctcggccgaccaccgactaccctacccgtgctccccgccgtcccttacccctcccttcaagcgggccaagctctccccaattcctgaacacgatccctccacctccgatttcccgcctatccgtccctctccccaaatcatccactccgctgcggcggcatccacctcctgcacgccgggcccatccccctcttctaccacccgttccaccccgcttccgcacaggcgccgactcccaccgccggcattccagcgctcgatccacggcccccagcggatcctgcgcgtcttccagcttggaggggcgcgacgggcccacgccgacggccactcatggttctccccgcaatcacccccgcctcgtcctctcggactccagcagtacgttgagctcgtcaacagcgtcacccacccggcgccgcccactcccgccgccattaccaatgctacgaggcaggcggaggcggcgcccttcgaggtggtcgccatcgaggaggatgaggacgagaggaagcagcagaacgaggaggaggtgatggggagcgtggtagtgagaagggtgccaccatacaaggagctgtacgaggcgtcgcgacagaagcgggatgccaagctcaagacgctcgagtttgaggtgcggctcactgagcagggccgtcttagccttgagcggcttgccgaggccctcccgcgaattacgccaaagaaggaggaggtgcctgaaccttttgttcctcttactgatgaggatgaagaaatgattcgtcaggctcttcatggcaagaacagacatgagaggttagcagtacatgaaccttcaaatattgtgataacgagggagatcatgcagtgcttgaataccaagagtggctaaatgatgaggctatca

SEQ ID NO: 282290 - DNA, 378 bp, Zea mays
gtattgatgctcttgaaagagagtgagctaacaccaagcaaggccaatatattggacgggcggtacgcagtatttggatatgtaactgagaatgaggactacctggctgacgtcaaagttggagatgtcatcgaatcaatccaagtcgtctcaggcttggacaaccttgtcaacccaagctacaagattgtaggataacgtgttttgtatcagagtttcttgtctgtgggtctctgtcctcaagtcgatgtaaagtgctatatagtatcttactcccatatccttctcgctcgttaacgagggtttgtgtcacgcggaattcgatagtaattgaaagtacagagttattgaaaaaaataaaaaaaaaaaagggcggcc

SEQ ID NO: 282291 - DNA, 833 bp, Zea mays
tttcttttgataacgtgcttataattttagctgcagcgtgatagcgaatacatcctaaaatctcttcgtcgacgctgccaaagagcatggatccgggctgatagccgcaagatacgacaaattccttcagttccaatatatcctcttcggaaagttgttggccactaaggtgccgaagatcgaaatttttatctttcgaagaggtctcatcagttctctttgccttatcagtagatgtttcagctacatttttctcaggaaccacatcagatataaggctatcaatttttgacattgtggtagcgagattatcaatttcaggtgtaccttcattagctttggcttcaacagtatcttccgcatcagcaggcacaatagtcttttatgccgaagttgggggcgaggtctgttcgatggcttgcattacgttcatcattcgtcgtttcttttgacccccagcattttccccggtatccaaagcggtcttctttgattgcaataggttagtcagatctaaccctagaggacttagcattgcgaatgggaagggttcaatcatgaccttcggaatttctaaaacatcaacagaggaagacgaagaagggcctgctgtcttttttggcacatcttgtaccttcgtctctacaggagatattatgacaagctttcgtttcttgggagtcgaatccttcggctccgctagaactttttgcttcttgacaaccctctgatcttccttgacggaccagatggcctacctgttcagaatactaacaattctctctgttttcgctcattccgccccttcgtcaagtctatcgtaatctggatat

SEQ ID NO: 282292 - DNA, 986 bp, Zea mays
  unsure (1)..(986): unsure at all n locations
gtttgttttgatccgtatgcattcgagttcttgttggagggtattgctgtttcattgtcaatactgtagtactggacatgatcttgcaattgttatgagcagggatgaactattttctatggctgatatagtcactccaaatgtgaaagaagcatctaagttacttggtgatgtatcattgcatacaatttctgacatgtgcaatgcagctgaatccatttataaacttggtcccaaatatgtgcttgtgaaaggcggtgatatgccagattcatcagatgcaattgatgtgttatttgatggtaaggagttcactgagcttcgtggtctgcgtataaagacccgtaacacacatggaaccggttgcacattagcatcatgtattgctgctgaattagcaaaaggtgcaacaatgctgcacgctgttcaggctgcaaagcaatttgtggagtctgctctttatcacagcaaagatcttgtgattggaaatggacctcagggaccttttgaccacctcttcgaactcaagtctccattatacaagacgggatcactgcaaaagttcaatccaggtgacctcttcctgtatgcagtgacagactctgggatgaacaagaagtggggtcgttcgataaaagacgccgtgaaagctgccattgaaggtggcgctaccattgtccaattgagagaaaaagacgccgagacacgggagttcttggaagctgccaaggcctgtgtggaaatctgcaagtccagtggagtgccgctactgatcaatgaccgcgtagatgttgctctggcatgcgacgcagatggcgtccacgttggccaatcagacatgtcagcatgggaagtacgacggctcctaggacctgganaaatcatcggcgtctcatgtaaaaccccgggccaggccgaacatgcatngaaggattgcgcagactacatcgggctgtgcggtgtcttcccgaccacgacgaggcaaa

SEQ ID NO: 282293 - DNA, 462 bp, Zea mays
ggagcctactgctcctccgtaatcactgctgtcaccgcgcagaacaccgtcggcgtccaggggatccatgctgtgccggagcagttcgtgggagagcagctcaggtcggttctctcggacatgtcggcggacgtggtgaaaacagggatgctcccttcagctggagtagtcaaagttctgtgtgagagtcttaggaagtttccagtcaaagctctagtggtggatccggtcatggtgtccaccagcggtgatactctttcaggaccatctactctcgctacatatagggatgaactattttctatggctgatatagtcactccaaatgtgaaagaagcatctaagttacttggtgatgtatcattgcatacaatttctgacatgtgcaatgcagctgaatccatttataaacttggtcccaaatatgtgcttgtgaaaggcggggatatgccagattcatca

SEQ ID NO: 282294 - DNA, 596 bp, Zea mays
ttgttttgcgtccgcccacgcgtccggttttgatgagccgatcattggctccattctcaaggaaactcttaaggctctggattaccttcaccggcagggtcaaatacatcgtgatgtcaaggctggtaatatccttatcgatggtgctggggtagtgaagcttggagactttggtgtttctgcttgtatgtttgatagaggtgataggcaaagatctaggaatacatttgtaggaacaccatgctggatggctacagaagtgctccaacctggcactggatataattacaaagctgacatatggtcattgggaatcactgctctcgaactagcacatggccatgctccattttcgaaataccctcctatgaaggttcttctcatgaccctccagaatgcaccacctggtcttgattatgaacgtgacaaaagattctcacagtcatttaaagaaatgggtgcaatgtgcttggtcaaagatcaaacaaagagaccaacagctgagaagttgcttaagcattcatttttcaaaaatgcaaagcctccagagttgactattaagagtatcttgtctggtttacctcctctctgggacc

SEQ ID NO: 282295 - DNA, 720 bp, Zea mays
ctgttgtttggggccaatccaaatgcgaatccatggttcatgggcacaggagtccctttggctaatgcgcgctgggggaactacgcattctcagctgctttcgggggactattccctatgcttagcttccaagttcatgggtttccagatgctgctgcttatgcgcagcctgctgggttccactatgggtatggccatgggcatggattccatggcggccatatgggacacgcccatggcgtccaccgacaagcaccattggggcaacagcagcaggcagatatctacttgaaggccctgctcttcatgattggaattctagtgattgcaagcctcattgcgttttaaaatttgttggcaacatctaccaggaggcctgctcgtcacggctgggacgtggaattctgggaatgcaatcctcctgacatgtcagagtccgttgatagcttgacatttgtgatggcatattggcccatgaaccgccagaatttcagtgtgtttgtactatagcttggcgctgaatgttgcataagttattattctgtttgcatgaagtgttcatagaatatgtattaatgtctagataagtacctacgtttcgtaacaccttatatagagtaccaggaggaacatggtgaaatcattactgtctagtcttgattttttttaaaaaacattttggaggttaatgttacgtgcaattaaaaaggtaagagtgac

SEQ ID NO: 282296 - DNA, 496 bp, Zea mays
tcacttagggagacaaacctattcctcgtttctatcatgcagcagccattgtaagtagcaagatggtagtgtttggtggtgattctggtaatcgcttattagatgacacaaagatattgaatctagagaagcttacttgggattctgcgcctcctaaagtttgcccatcaccaaacggatgttcgatgaagttgccagcctgcaaaggtcattgcctggttccttggggaaatagtgtcatccttgtcggaggtaaaactgagcctgcttctgatcatttatcagtatggactttcaatacagaaacagagctttggtcacttattgaagccaagggtgatatccctgcagctcgaagcggacacacggtgattagagctggtgctacattgatactttttggcggtgaggacacaaaaggaaagaaacggcatgaccttcacatgtttgatctgaagtcatcaacatggcttccattgaactataagcactggac

SEQ ID NO: 282297 - DNA, 621 bp, Zea mays
acgattcgaaccatccagtctccgtgtccagtcgagtctcagcaaggaagatgtgggggaaaggaaagaagcgtttcggcggtggcggcagcggcgagcccgcggccaagcgccaggccgcgagggacgatggcccctccgaatccgctgaagacggtaccgtcgtagccgagatatcgaagaacaagaaggtatccgttaggagctggaaaggcagggtcttcgtcgacttacgcgagttctacttcaaggacggcaagactctccccacccgcaaaggtatatcactccaattagatcagtggaagatattgaaggacaacatcaaagccataaatgaggcaatcgaggaaaatacatgatgggagccgccaagcagtcacgtgacgggcgagcttttgcttcttctctgtttgaggcctgatgtacggaagtagtttttgttgcccatatgctgccgtgttgcttttgtccatttgaccacctgctgttgtaggtggccgcatggccgaaaggtttggtttctgccccgtgctactagtaaacttaaacgtcggacggatgacgtaacttctcactattatcttgtagccaaaaacaacttgttaggattgcagaact

SEQ ID NO: 282298 - DNA, 559 bp, Zea mays
cgtgtcgcttgggcttccaccccacggacgaggagctcatggtgcactacctcatgaggcaggccgcctccatgccgtgccccgtccccatcatcgccgaggtcaacatctaccagtgcaacccctgggatctccctgccaaggcattgttcggcgacaaggagtgggttttcttcagcccccgggaccgcaagtaccccaacggcgcccgccccaaccgcgccgccgggtccgggtactggaaggccaccggcaccgacaaggccatcctgtcgtcgtccacgcccacgagccacggcggcgccaacatcgtcgtcggcgtcaagaaggcgctcgtcttctacggcggcaggccgcccaagggcaccaagacggactggatcatgcacgagtaccgcctctcgggcgcggcggacgacgactgcaagggcagcaccaggcgcagagtgtcttcctcctcgtcgtcctccatgaggctggacgactgggtgctgtgcaggatccacaagatgagcaacgattttcagttgtcgtcgtcgtcggagcatgagcacgagca

SEQ ID NO: 282299 - DNA, 574 bp, Zea mays
ttctacgcgtccgctccactcctctggtcgtggttgcagaggtcctccactcgaagccctcggccattgcaggtaggtagctacaaaggactaagcggacggaaaggcggcagcaccttgaggcttgagcgaagcccaagcctgaacctcctttgatcaacagcgggatggagctaaagatggcagtgaagtgacggaaagagcgctgcaaggaaagaatggaagagagcaggaggtaaagagagagagagggtagcttgaggacggttgagctgaggcgagctgcgcggttcaagggagccgcaacgtgaaatcgcagcgatctctgtttccacattccagtttgaagtctggtctgtggcggctaccgttgtgctttggcgttccttttgcgacagtttttgccctggtgcaggctggtgcttggtgcccttttggttaataaactgcgctgcaacgaaatctcgtggtatattgcttcagttgaaggccggggcttgtttgtcccttgaactctaagagagagagagagagagatgcagtcacgcgagggatcacatgcacgcatgacgca

SEQ ID NO: 282300 - DNA, 542 bp, Zea mays
tcggattgcttgctttcagcagccacacagtattgctcatggctactgcttgtgttccgacggtggatgcggaggaagcatgcgccctcctcagctcttccacacaccactatctggatgtcaggatgtgggaggattttgacaagggccatgtcgccggtgctcggaatgttccctactacctctccgtcactccgcatgggaaggagaagaatccccagtttgtggatcaggtttccgcgctctacgccaaggaccaaaacttgattgtgggttgccgctctggcatccggtccaaactcgccactgcagacctcgtcaacgcgggcttcaccaacgtgaggaacctacaaggcggatacctttccttgctccgaagcgcatactagctagcttcctgcttatttgttcgcatgcttgtaataagtgagtcaacatatgcttgaaagatctgttcatgaagaagcagcatcaactccatcatgaaaaatgattaatgacactgcagatgtgcatacccaacaactttactatctaaaaat

SEQ ID NO: 282301 - DNA, 519 bp, Zea mays
tcgtctactgcttgtgttccgacggtggatgcggaggaagcatgcgccctcctcagctcttccacacaccactatctggatgtcaggtgcgtgcctgctgatcgatcatccatccatcccatgaggccatgatgcatgtgatttatttgtactagcaggatgtgggaggattttgacaagggccatgtcgccggtgctcggaatgttccctactacctctccgtcactccgcatgggaaggagaagaatccccagtttgtggatcaggtttccgcgctctacgccaaggaccaaaacttgattgtgggttgccgctctggcatccggtccaaactcgccactgcagacctcatcaacgcgggcttcaccaacgtgaggaacctacaaggcggatacctttccttgctccgaagcgcaaactagctagcttcctgcttatttgttcgcatgcttgtaataagtgagtcaacatatgcttgaaagatctgttcatgaagaagcagcatcaactccatcatg

SEQ ID NO: 282302 - DNA, 285 bp, Zea mays
ggctgcttgtgttccgacggtggatgcggaggaagcatgcgccctcctcagctcttccacacaccactatctggatgtcaggatgtgggaggattttgacaagggcctcgtcgccggtgctcggaatgttccctactacctctccgtcactccgcatgggaaggagaagaatccccagtttgtggaacaggtttccgcgctctacgccaaggaccaaaactctgattgtgacctcgtcaacgcgggcttcaccaacgtgaggaacctacaaggcggatacctttc

SEQ ID NO: 282303 - DNA, 529 bp, Zea mays
tcgtttgaagaccctccccaagtcacagaacaagatcgtcgtgggcagcactcgccactcgctctcgcaggcggtgaggcggcgctatcagagcggacttcgccctccccccacccccacacccacgtccccctacaggcagccctgcaaccatggccgcggcggccgggctcagccgccggtgcaccgtccgctgacaagtcgacctttctcctacgacagcaaccgtctccgtccggtcctggctgtttaaaaggagaggaaaggcaggaggaggggaggatttagtgttaagccaatgggggctattggaggcgatgagtcggtgcagcgggataaagtggctggagctgatgctgttaatggccagcgggcaagtgtgcgcagaatggacaggatacaggtgctggtcaggctgaggccactgagcgagaaagacgttgcgacgggagagcctgcagaatgggagtgcatcaatgacaccactgtcatgttccggagcacgttccctgatcgacccaccgctccg

SEQ ID NO: 282304 - DNA, 656 bp, Zea mays
cccacgcgtccgtgtatgctttcagtgaccttataactcagaagatcgaagggatggcccaccatgaggcgttcgcgatgcctagcagctctgtcctgaacggcactccgtcggaagctctcgtggacacgcacacctccagctcctccccgtcctacgaggtccacggcgacggcggcaccgccagcgtctctttccctcaggacagtggcagctacatggtgcaaacagtaggtgagccaaggcaagagctgttcagccaagtggtgttcagtaaccacatgtgccctttccagtagggagagagcgagaggatggaaggacgacaggaagcaataatgttgagatcctatggaggtggaggccaccaccagacgagtttgtgatgttggacgcaatccatcccctcgtcggtggccgtaacgggaacccctgcggtagctagcattagcagtagtaataatagtaggctgttggttacatcatcctgttagatctcaaggtctctgtcggtaccgcatcatctagtaggcattgttgctgcttagcttttgggctctcttattaccaagggttgcatgcatgccattgtattgtactctccaattggaaaaaaaagaaaaaaaatatcatttgttcataaacacagtcaagat

SEQ ID NO: 282305 - DNA, 574 bp, Zea mays
gctgttgttgacagctccaccgctcgccgccgccgcccgccgcgccgccacagctgccgcatgtggcgccgcccaccggctcctccttccagtttgctttctatcctccaacccctctgccccgagcactctcgtaccgcgccgccgcttcggccacatgtcgcaggagtgcatggccccgcgcgctcccctaccgccggtcggacggaactttgcggtggctgtgggggatgagatcctgtatggagaggccccggagctggttgtggtgtcgttctaccggttcgctgatttccccgaccatgctgcattccggctgccgcttaaggagctttgcgaggagctgcgtgtttcacgtggcattatccttgcacctgagggaatcaatggtagcatatgtggaaccccagttgctgtggacaaaatcttaaactgtattcaagaagacggtcgtttaaaaggattgagaatgatccagtcacctgttactccagaggatgaggccatacatcatggacataccagtcacttcccttgtggtgctggggaagatgcaccattccgatggatcatg

SEQ ID NO: 282306 - DNA, 621 bp, Zea mays
aacacccccgctttctttatttatgaaaggttagctagggcgccgctgacaacatagctcgcataaataggcaggacccgtggtgctactctcctgtccccttccggccttttccccccttctggagcttgggggggaggcactctgcaccttcgtcttcgtcttggcgtcctccagcgctctgccttcctgagctggcttcttgtccgcaggatccatggcgaaggactacccagcttctccgaaagctcagcagctccaggaatccaagaagcagcgcctgacatacatcctcgtcgtaagcgcgctctgcatcgccttctacgtccttggcgcatggcagaacaccacgcttccaaagcccataggcaactcggcgatcacccgggttggctgcgatcccactgccgccacgacacagtcctctggctctgtgccgtcgtttgggccaggctccggcgaggtgcttgacttcgacgcacaccaccggctcaccatcaacaacacggacggcgatggggaactgcagcagttcccggcgtgccctctcaacttcagtgagtacacgccgtgtgaggaccgtagcgcgggcgccggttcgaccgaaacatgctagtgtat

SEQ ID NO: 282307 - DNA, 585 bp, Zea mays
gtctcgcttctccccacaccgcccgctacagcgccggtggggggcccccgcggctgccggcgaccggtcgccgccgccgaggccgtcctcgccgccccgacattctccagctggcagcattagccatggtttagcggaggcgattctcgttgcagctgtttccggggtggtgggttttcaaggaataaagaatgatcaacctcttcgaattgagcgttggagccagcgccaaggtctcctcaagagatggctctccggtgagaggaactcagtcggagcggaaggagtacgccggatcaaaggcgttgactggcagcacgaggaggagctcgtcggatagatcgggtggtacgcccatgaaaatgctgatagctcaggaaatggccagggagggggacgcgaatcagaagaccactaacgttgcggcgaggctgatggggcttgacgataatgtggatcttgctaagcctgtcgtgcctacaaacaggaggagtttaccggacagccatttatctgctacactggcaagagtgaacaaccaaattacatgtgagaagcacacgagttacgccgaagatgtggagt

SEQ ID NO: 282308 - DNA, 447 bp, Zea mays
agtatttggcagggaattccaacacagatttgtaagtattcaaacagctggggatgatcttatgtctgatagataccacttgagttctgcacctggaaataatgtgtttgtgggatttggagtgctgccagcggtcgtgccggtgcagcatgcaaggagcggatgggtccaggatgcgtggagcacgattgagcatcgggtcggcgcacgttaaaacataatgcaaatgagctgcacctgcactactgtgtagtgactacaaactcgtgaatcaacaaaatctacaacttgaaggctgtgatagcgagcagggggtgagggagcgaacagagtggttgtcccctcattcgagatgtaaagtccgccctctccttacctcaatgtactgctcttagctctacacaagatgtaatcaatgtaagtgctgatgtcagttctggaaacgtg

SEQ ID NO: 282309 - DNA, 442 bp, Zea mays
ggtgaactcagctgtgcccatgccatgtccagttgtccagaagacactggcactcaaaccagctaccacagaacagaagctgaagctggagttgccgccagttaccaatgcggcagcctacgctccatttgttctgaaaaggtgcaagtcagagccgatgcgatcatcggcgcgtttggcacccgatgcttgcttctggaaggaccgccatcggccgctgaatgcgactggagttgggttctgatccgtgccagacagctgctggaatgtgacatttagttaggtagtgagtgagtttgcgagcctgttgtgtaatagtagcgagtggttctttgactgtgctttgtgctgttatgtgatgtctggacaccaccaaataatagcatgttgttaagttactatatgagataggttctttgatattgatttgtgctgttatgtg

SEQ ID NO: 282310 - DNA, 481 bp, Zea mays
attgtataactgattaactctgcttttgacgatgtctacttcgtcacttgatttctgggtgggctcaaggaggattgatgattgattaatccctaaggcttagagaagacccttgtcttccttatagcagcaaatggaattgctgcacaatcgtgctgcatgctaaggaatggaacatgagtaattgtagtttggccaacaagggagaagcttgctatatatccaggcataattcataaaagagaccgttgttttatgacctacgactattttagactaaagcatacgagaaggggtgagggaaaaaatgatgctcatctgtgtaatttatgttacaaagtgcatgagtttttacagaaacaagcatgctcatactgtatattttttagattgaattgttttactgctataaacaatttcctgttcagctcattatgttacttttatgtgcacgtattcgcatatatttttgctcctattc

SEQ ID NO: 282311 - DNA, 517 bp, Zea mays
cccatcttccgcccacgcgtccgtgattaatccctaaggcatgctttgcacttctgttttacttcgattctcttagcgataatacccatatggattacctcttactcctctcctgatgctttgttcactgaattaatatgtattgcttacaaccgaaggaatctattataaacaggcttagagaagacccttgtcttccttatagcagcaaatggaattgctgcacaatcgtgctgcatgctaaggaatggaacatgagtaattgtagtttggccaacaagggagaagcttgctatatatccaggcataattcataaaagagaccgttgttttatgacctacgactattttagactaaagcatacgagaaggggtgagggaaaaaatgatgctcatctgtgtaatttatgttacaaagtgcatgagtttttacagaaacaagcatgctcatactgtatattttttagattgaattgttttactgctataaacaatttcctgttcagctcattatgtt

SEQ ID NO: 282312 - DNA, 345 bp, Zea mays
tttttacattggcacttcactgacagaacagcgctcttttggtccttcgaaagatatgacaaatgagatgttgatgcatttgatggatggagcacacagcagtggcagtgatctcatccacaatgatgctcatagcactgtacagctcgaatttggcatgttaaacaaccacaactcaacaagtcttccatcagcaccaggccaagggctgtctctgagcctcaatacacatatcttggcgccttcctatccacactggtctgcaaagcaggacttattaacaccaaattcttacaggggtgatgacaacagaatgaagaatatgcaatctgaggcttcacaggc

SEQ ID NO: 282313 - DNA, 635 bp, Zea mays
catcgccattcctatcctccgtgagcatctctctccctcggatatttcttcactgcaggccatcggatttatctgcgccgcgggtgctcgcctcagcccaaaccgcgcccatgggccatggcgtgctcttcccctgtgctcgccggcgctcctccctcgcccatgccgcagcgatccagctcgcatccactccctgctctcgtgctccagctcggttctcctccctgccgcgcgagcttgcccctgctcggagttccctcggctcggttccagctccgtgtgcacgcacctatctcccatggtcgtgtgccgtggtgctccggcgtcatttcctcagtccctgcgctcggattccccttcttccatggcgctcgcccagccgtcgagctcccttgcgcgcgcgtgctccttccctgctcgcgccgccgcgcagctccctgtgttcatccatggctgaacgcttctccttggtcggcgtccgattccctgctgctgggccaaaattcctcatccccttcacataggtcgtccttgtttagccatggtcacacggtggtgggcacaggaacatcttggtctgtccatggctgctctcttcgtcgttggtgctcggcgaacaaccccctgcgtcgcgc

SEQ ID NO: 282314 - DNA, 465 bp, Zea mays
  unsure (1)..(465): unsure at all n locations
ctcttcgtcgcctcacactggtgctcctctccccatcgctccgccgcgcccatggcgtccctcttcggggctcgccgccggcgatcaccggaggacgacagcgaggacgatagatctggcagagggaggaccaagcgcttccgcctctccccggaggaggacgcggcgtcgccggcggaggcggggcccggcgcggcgacggagaccggctggctctccggtttcgtctacggagcgaagagggtcatttcttccgttttactgttctcctcgcccgaggagaccggctcgggggaggacgaggaagaggagaaggacgacgacgacgacgaagagggcatccacttgaatgaacatgaagctactcatgacactcatggagcaatagttccttatagcgagccaaaagctactatngagcanatggntatgaaggaaacattctcagggatgaatgtgatagga

SEQ ID NO: 282315 - DNA, 583 bp, Zea mays
cgtttaccaggcagtgagaacagatggtgttaaggttagcatagataataagggcacaccaacaaagaagaggaaagtggcacataattctaccaagaaaggaaaagtaactgaaaatgaagattccactgtaggtcccaacactcagaaggctaatactgatgtgggcattgtattggaagaggttttggaggaggcaccgaaatggaaagtgttatggtttgcaggaattgttgcaagagataacagaacaacggatgaagagcagtgccggcaatgtgcatgatgaggacaaaaatcgatgagagtggcatagttttggtatcatgtaaagatgaacgcacatgcttgcagctgcaggaatgcatattaaatcgcccctgtcaggttatgcgagaagagtgggaagaagtatctgattggaaaagctgagctgcatggattgaataaggacaagagaaaatctgagcaaccaaaaggtgttggtgtcctggatggtgaagttcagatgggatctagtgagagtgtgtgtccagttagcattagcacactcgaaactaatgccttacttgccgctgcctct

SEQ ID NO: 282316 - DNA, 402 bp, Zea mays
agcccccgactctccgtctccgccccaggaccaggagaacagagaggaaaacgaagcggcaacgaaacaggtcgagctccagggtccagcttgctgaaactggagtgtacagtgcggagctgaatgtgtgtccagtccagtacttgtagatttttttttcacgaccgtgttgtcgcattttttttttgtcaagaggtgtagtgtttttgttgatccacgtagcgggcgggaacgattgatgtgcaatcaagtgttagatgtaaagtgtacaaacaagtcctgcgtgcaagcgaggcttctctgtctttttagatcatgtagtcttcgcgtgggtcataaatgacttcacgggtttggaacagtctttctgagaaaaaaaaaaaaaaaaaaaaaaaaaaagaa

SEQ ID NO: 282317 - DNA, 611 bp, Zea mays
tttctttcttagccagcaaccatggcgtctttctgtacaggcgatggctaaatcagctcacaagcttgccttcatcactggaaacgacaagtacgtgacgacgggcgtcgagggttctattccggtcctgattaaaagtgggaactggatagacaccgctgaagagatcgacgatttgtttctaggagacgcagaggtttggaggaggccgtcgtttggaactgctggtccacttgggggtgaccacccactggttaccaaggagggccatcacgtgctcgatgttatcttcacaacaccaatccaagatcttggtcaggttgcagagaagttggacaaagttgatggcgttgtggatcacgggattatttgcagcaaccaaccatacgctgtcattgcatccaagggggaagtgcaggtcctggacgagaaatcttcggtgatacagtagcggttaaacctttttggctgctctgcagattgttgcgcttttcggaacaagactctactaccagctagctgaaaaaaaaaatgccatgggttaatcatgtacaaccagaagctttgttcgccactcgacaattcagctggcatcagttgaagtctgtgtc

SEQ ID NO: 282318 - DNA, 562 bp, Zea mays
  unsure (1)..(562): unsure at all n locations
gattaatggcattaatgtgtttgaccatattgaagtatttggtggtagcaacaatttgtctggggatacactgcgtgtgatgcctctggacatttttggtacaagaaggcaaggccgaagtacctccatatacaatcttcttggcagggctagtgatcatggtgttcttgatcacccacttcttgaagagccttcctcgacattgaatttttcacatcaagaacaaaccagagaatcttgttgagatggctttctctgatcgaaatcacgaaggtagctcctcccgtttggatgctatattccgcagcttgcgaagtggngcgtaatggacatcgctttaatatgtggctagatgacggtccacaacgcaatggatctgctgcccctgcagtacctgaaggcattgaagaattggctgatctctcattttgagtcggcccactcaacaccctggtgcccagacttgtgggtggtactcaagaaaatgaccaacccaaacatggctcaactgctgaggcaagggagggatcgccagctcagcaaaatgagaacagtgaaaata

SEQ ID NO: 282319 - DNA, 394 bp, Zea mays
ccgggtggagtttctgggtgccgttccgcgggagtggacgcgcgccgggggcaggacaggcgtcgaggtggctaactgggtgcagcggcggctgggccaggctctggacttcgagtgcaccgggctgtctcgccgcgacaagtacatgatgctcgccggtaacgatggcgtggtcgccaagtagagagagcgcccggcgcgcgctgcaacagctgggtgtgtttttattatgcatacatgctgggtaaattattgtcgaaagctagttcgttactgtaatttgcatggcagtaatggatcttttggttccgctgtgtagagaaaatttgattagctgcaaaactaatcaaatactagatgcttggatttaaattcaaatcaaaatagtatatat

SEQ ID NO: 282320 - DNA, 577 bp, Zea mays
agggcgcccacggtttcggaggaggagagttcttcgactgggtacccttccaagatgctcgctgatgcacgatacatatcgcagacgctgaagctgggcgccctggggatcccgtcatatagagcattttctctggtcgaacttgaagctgcaactaataacttcgagaactctcacctgctggggcaggactctcacggcgagatgtaccgaggaaggttaggcaatggcaccccagtgacgatcaggacgctgaagatgaagaggagccagaccgcccagagcttcaaccgtcacatcgagacgatctccaggctcaggcaccagaacctggtcagcgctctgggacactgcttcgagtacaatctcgacgagtccaccgtcacccagctgtacatccgtgttcgagtacgtgcagaatgggaacctgaggagcaggatctcgcaagggaccgaagggtgcaggctgacgtggtcgcagaggatctcggccgccatcggcgtcgccaagggcatccagttcctgcacggggggatcatacctggcctggtcggaaacgatctgcggatcacgaac

SEQ ID NO: 282321 - DNA, 462 bp, Zea mays
aagatcctcctcacaaaggagaaaaggaggtcccagagggtgcccctgactgtttatctggtctgacatttgtcataagtggtaccctcgacagtcttgaacgtgaggaagcaactgatctaattaagcgttatggtggccgtgtgactggctctattagtaaaaagacgagctacttattggccgacgaagacattggtggagtcaaatctaacaaagcaaaagatctgggtgttccattcttgactgaagatggtttatttgatttgatccgaaaatcaaagcctgcaaaggctcctgtagacaaacgtcaaaacaacaacagttctgaaaagcttcagaaatcacagacaaagagctctccagctaaagttgaaaaacgagccgaagcaagtgctgtaggcaaaagtattgctttaaacagtaatgctgcaagtgccttcgctgacaaacaaaagccca

SEQ ID NO: 282322 - DNA, 647 bp, Zea mays
tatttaaatttgcaatttcaggccttgagattgcatattgacgactcagattccagcaatgaagtaacacagccattgccagagctggcgtcatcaccccacggaagtcagtcgatgcatgttcattatggattgatggcttgtgcgattgctctgactggggtagctgtgatggtttacatgagacactctaaagcttgaacttctggagaacaaagaaatttgcaaagcttatatgcacaactcatgcgcatagaaggatcacacacttcggctcatgagaagggtaatagtgaagtaatcatgggctgatgacgatatacactcgattacattggtggtccaagagaaatacgctgactgactgtcatattctccagttaactcaagtcagttcttctggtgggaggcaagcctatgctatggcatttcccgtccatttttgacaagtacctcgtagtttcatgatgcagtgaaatatgcaaactagcccttagggtatgtacaacctttgtggtgcggtttttcatgtaaaaggcagttaaaatatatgtaggtacaatgtggttaagtcacatgtgggttcattgtggtgtatctaaactttgtatcttatttaataaaatttcccaacacatgatttattt

SEQ ID NO: 282323 - DNA, 539 bp, Zea mays
  unsure (1)..(539): unsure at all n locations
gttagtagcaggacgggaaacagctcgaggattagggttagagttaaagtgcagacactcaagacacaaattaccttgggcccagccagcagccatcgccatctctcttttgccgaagagagaaaaatcccttggttcacctagggcgaggctggaatctggaaggcgacgcgatccgttgtcgctctcgaaataattttcaggaaccatgaatacggaacccattggtgacggcgacggagaaggcgaaggctctccggcgatgatcgcgacagatacagaggacgtcggtgtttactcataaataacacgaagactagatggactcagctaattaattctgtctatccgtcgcatctactacttttcaaagtccagcgccgcggtcaacgcagccccgacgccagctgcctgcggagctttcaagtttcatatattgttttgtttccgaatgccgagtctttgtgcagactgcagagtgccagaggtacaggccgcangttgaggagggaggaggcaaggcgaagctgctcgccgtc

SEQ ID NO: 282324 - DNA, 231 bp, Zea mays
atggataagtgaaattctccgtgacgagtcttggaaatctgaagttgatattaccgaggaggtacttgctttgactgatggtgctaatgagagcagaaagcctgaacccagacaaacaccaatgcttctcactgcttctgctattgagacaaataaaaggagttctgtgcagacaaaaatccaaacaaaaaagaaaagttctacttgtggagcaaccaaacaagaaagcta

SEQ ID NO: 282325 - DNA, 494 bp, Zea mays
cccactcgtccggtctggtagtagcatttttgtaaaactaacatacaaatctagcattaacttttgccccaaatttctaaaatctattatgaactacaaacaagttccaagtattccttttcacatgaatatgagcacactttttaagccatccaataacatttaatcaacatgtatcgtctacattatctagctgtctggtagaagcatttttgtaaaattaacataccaatctagcattaacttttttccccaaatttctgtaacatattatgaactacaaataagtttccaagttttcctcttcgcacatgaatatgaccacccttttttacgccatccaataacatttaagcaacatgtatgcttaaattccacaatactgaccaattacacaaatgtttgctactatttcaatttttgttgtcacatcatttaaaggttacaaaatattgaacttttagtgctacgacctacaatacttgagaagagat

SEQ ID NO: 282326 - DNA, 589 bp, Zea mays
  unsure (1)..(589): unsure at all n locations
attttcttggctaaacaatcagtagagcctaagcacgcaagagacaaagaaaatgttgggcaatcagatactagggggcttgggcacatctggggcactgtctcatgcttatgttcagcatcctccgctgcgatgtgacataccagacactcagggtctgttctatgatgatgcaaataagttccttatagctccaactgctgatcggatattgtactggaaaacaattctacctactccatctggacctccaaactctgatccagttaatgaaggacctgtcttgtcagttcgatattcgctggatcataaagttattgggattcaacgatccagacatgaaattgagtttagaaatagggaaacaggggagacttgtagcaaaaagtgcacagctgattcagaaactgtacttggctttttctggacagattgcccaacatgtgatgctatacttgtaaaaacacgtggtcttgatcttcttgcctacgagcctcagccccatgcttttcacttggtggaatcgaagaagttcaatgtgagctggtatctttacacacatganagtaggctgattctacttgcttct

SEQ ID NO: 282327 - DNA, 448 bp, Zea mays
gatccatccacactgagctgcccaaatccacattcccatcggcgcagacggccgggaggaggatgtccatgccggagacgttcaccctgaaggtgggggaggcgacgccggccgccgccggcaggccgtcggccgggcccgtgtaccggagcatctacgccaaggacggcctcatggacctcccacaggacatccagtccccttgggacttgttcagtggggcagtcaagaagtaccccacgaacaggatggtcgggcagcgtcaggttacagatggcaaggccggtgagtatgtgtggcaaacgtacgaggaagtgtgccagaaggtcatgaggattggatcagcgatcagaagcctgggcgtagagcccggagctcactgtggcatatatgggatccaactgcccggaatgggttatggccatgcaggcatgtaacagtcaaggga

SEQ ID NO: 282328 - DNA, 419 bp, Zea mays
ctggggagtacagaccagtaattgtggttatgagatgatacaagcaagccatgaacaacggttaatctgcttgcagcagcagcagcagcagccagaggtccactacaggacgttcagcaagaagcccatgaaagatacatcatacatgatggtgtgatctgaatgaacatttcaagatgcattcatcgaagagcgatcgaagcagatgagaataaacccaagctacaaaagaatcctgagctagggaggaagggaggagcggaaacagcctacgacttcttctatcacattaccgcacgggttaatcactgggacgccatcatcatcttcttcttcatcggcacactaaccactcaccgaactgggagaaacaagacgacaaggaaaactagaggggagagagagagaaagctagaggt

SEQ ID NO: 282329 - DNA, 249 bp, Zea mays
ctacgcgtccgatcacaccatcatgtatgatgtgggctgattgaacatttcaagaggcattcatcgaacagcgatcgacgcagatgagaataaacccaagctacaaaagaattcctgagctgcgaaggatgggaggagcggagacagcctacgacttcttctatcacattaccgcacgggttaatcactgggacgccatcactgtatgatgtatctctcatgtgctcaaaaaacaaacgatctctaaaa

SEQ ID NO: 282330 - DNA, 555 bp, Zea mays
agaatgttgtggaagatatcattcgctggggtacagaagaactctttgggagtagtgacagtgtggatggtaaagatagcaatgaagcctcaggttctgttgctgatgttgaatttaagcatagaagaaaaaccggtggcctaggtgatgtttatgaggacaaatgtattggtggttctaccaaacttgtttgggatgaaaatgctattttgaagctgcttgatagatcaaaccttccatcatcagtggccgaaagcactgatggggatctggacaatgatatgcttggtactgtgaagtcaatagactggaatgatgagctgaatgaccaccctggtaccaatgaggatattgcacctattgataatgatgggagtgcaggtggcatctgaatcaaagcaaggtgctactaatcgtttagaagagaatgaatgggataaacgtttacgtggcagatggggagcaatatcaaatagaggaggaggcatctcgtggtcgaggtaaacgtctcagggaggctgtttcttacagtgagacagtttcacacttcctgat

SEQ ID NO: 282331 - DNA, 957 bp, Zea mays
actacagttcaggaatgcactgacatggtttacagtgaacatatcctggacaaaaacagaatagagaagcaaatgaattcacatgccaaagaagatattaatcaagacctaatcttgcatgaacaaaatgatgagaaaacaaattctcatgaggcggagactcctgtagctgagtcaggtgactgtgattctccttccaaagcaattgctagctctgagaacatcaattttcagggcaaggtcattgaggtatctgcaagcagccatctagaaacagtatgctcaaaatatgactcgccgtctggaccaaacatgcacaaagaagggaagttcttctggtccagctcgaatatctccagagctggaggaaaggcaccatgtggaggttcaggtaaaagtcgacacagagcatcatttttctgtcagtaatgcaaacctagagatatcttttgatggtccaaatccaactgaatgtgacaaggaaatctctgccattggtcatgggagtcaagactatattcaatcttcgcagtcacatcaactctcagcctgtgcaaaaccttggagcttggactcagcgaaaacaaaatcggatactgtcagtattcaagctcaacttcgaaaccagttggagaatgctcaaacatatcaatctaataacctttcacaaaacatgcaacaacaagagcttacaatgcctcacaatgttcaaacatctgcacaaattcaagatcaattgcttgcacagcctaatcacagaaaccaacagtatctccaaatgatgcaagggtatgcaacacaaatgggggaatattaccaacaacaactgtattacctgcaggctcagcacaatcaacagatgcagagtctgcaacagcaacagctcccgactgagcatcttcagcaaacttttatgcagcaagtacagcagctgaaccagcaattggtactttggca

SEQ ID NO: 282332 - DNA, 597 bp, Zea mays
ccctttcttccgcccacgcgtccgcccacgcgtccggccactccagctagcttcggcgcttatgccacggccaagatcagtgtcgatgcgtcccttgcaggtggcatcattgggaagggtggagctaacataaagcaaatatcttccgtcacaggggccaaggtggtcattcaggaggaccgccatgaatcagacaccagcttgaaaaacattgagtttgagggcacctttgatcagatcaggaacgctagtgctatggtcatcgagctgattgttagcatcagtggcataggaagcaacttcaagaccaagatgtgtgagaacttcgcaaaagggtcatgctcttatggcggcaaatgccactttgcccatggtgagagtgagctgcgcaagcctgccgctgcttgagatccatgccctgtttcttacctcatagtcattagtcaatgtaactcaaaacttggcctctgatgatggatttgctggcttctttaggtctacgctaatgaattgctggcttcaggcctactactaaatttgctgacttctttagtccttcgctgttggccaactaaatctgttttctgcgtttgttct

SEQ ID NO: 282333 - DNA, 496 bp, Zea mays
gttttgttatctgatcagccagaggatatattgtgctggaaagatcccgaacacccaaagtattcctttggtgcctcagtcactgaagatggaaagtacatcatattgggcatctatgaaggttgtgaccctgtcaacaaattatactattgtgaaatttcttctcttcctcaaggaatagagggctttagagggacacaggatttgcttccgtttgtcaagcttattgacaattttgatgctcaatatcaagttgtggccaatgatggtgatgaatttacatttttgaccaataaaagtgcccctaagaataagctggtaagggtaaatatcaaaaatccagagctgtggactgatgttctctcagagcatgaaaaagatgtgctcgaatcagccgacgccgctaatcaataaccaacttttggtgaattatatgtcagatgttaagcatattctgcagataagagaccttagaactggaaactttatttatcag

SEQ ID NO: 282334 - DNA, 439 bp, Zea mays
gcttactcctccagcatccacccaacggatccgcggcaaccgaccacccatgggatcgctccggggcgcggcagcctcctccgcggcgccgcgcgcgggcgacctggtgaccacgcaggttagccttggtggatttgatgccaccgtcaaggcgctcgatctcgccgacttcctcgagttgaatgcgggctcggtctggcgctgccgcctcaagacctcctggactccgccggacgcctatcccgacttccttctccccaccgtcacctccgccgccgcgccgccgccacagtacgatcgcgtgcctccgcacgccttcgtccactttgcgcgcccggagggcgcgcgcgccgccgccgacgcagcggccgatccgactcatctctcggcaaaccctgcgcgcgcgtcgcacggacagctccttcgggcatccgcgcgt

SEQ ID NO: 282335 - DNA, 473 bp, Zea mays
gctttcgctcgtgatctagagaaccaacacacttgctgatggactggagtcaaagcatttctctgcagttgctaggtacacaggaaacctactgagcttagagcgctgagtactaatgaggggctttggaggattgggggccctgttcgtgggcaccggccacacatgcgttcgcccgggcctgcaggaagactcaaaaccgcgatggctctttcttgagcggctgcgataactgaagaaagatatgaatgagattctttcgatgaataattccagcaaaaataatggtttcttctgttgtgtatacttggcagaaggaatggataatccatgctatgcagcttgggtgattgcaacagtactgcaagtgctttatttttcttttttgctaggttgttttcagtttgttttgtgcatttgtggactgccttttttgggtaattaaatggtgtacatttttggcttacattttt

SEQ ID NO: 282336 - DNA, 559 bp, Zea mays
ttggttcggtgctaccgaactgctccttggcttgagtgtcaatgagaacgatacaaaaccagatgaagctaaaattaatgctatgataggacgttctaatcagcaattccttgcacgtgttggagctattgagttggatgatcaaggacaagaggaatctggatctgaaaagaatgacatgtataccattttgccatgggtagatggtgttgcacgggttagttttaatccttggacttgaagatgtctctgcaatcaaaaaggctgctagagcaatgggtgatgcatcaataaatgaacatatgcgtacctcattcaaggaagctggggctgttaaacctctacttcagctgctcaagcacaaagatgtacatgttacagaagctggtgcttatgcgttggaaaaattatgtgtaagtgccacagtctgccataatatcaaaacagaaggtggactagaattgcttgaaatatagtcaaggatcgacataccccagtagaactactagagaagattatttatatactttcttgaatgtttgacatggggatttgcatg

SEQ ID NO: 282337 - DNA, 515 bp, Zea mays
caccatatttattagcatatggatggatggattgattggcagaacagaaggggctgcttagtcaccgtgacataggcaactctagatgtcgcggctgcgagcgagctcgaggatatcctcatcactggtgaatgctgaaggagtggtgggggtcacgagcacggccctggccagagggtcgacttcggggctggggctgggctgctggagctcggcgtcggagtcctgagcttggctcctctcaccttcctcgtgcagaccctcttccgcggctttcaagtgacccgcttccgactcggagtctccgagggaggggaaacgctcccgactcggactccccaagggaggggagggagccggagaaggggagggaggctgggtgaagggcatggagcacatggcgatgccctcttccccctgcctctgcgggcactggagcgtgagaggccgtccgctggacccatggcctgctgcctagcatccccatcggggcagaagggaatgaatggggcgcg

SEQ ID NO: 282338 - DNA, 535 bp, Zea mays
ttggtttgtcagtccccgggccttgctctccctgcacttcgccgcgacgatctcctcccacccgtagaccaacaacaacggtactaaccagtaccagccccgcatgcctctcgcggcggctgccgcggcacgttgccgcatgtccttcgccgatcggcctcacccgctctttgtgccgtatcgaggcgcatccgcggcgccggcggaggttccggttggaggcaaattcgtcggcgtctacgtccgctcccgcgccgaccgcggcggatgagggaggcggagcggggttgtgccccgtggtcaggttcgacatggtcgacttcaccgacgccgaccgcgtaagcgtcgggctccatggacggtcggatgagatgatcttcgaggccacggtgtgcgatccgagcagcgagctgtatgggtcaacggtggtcctgcggcagctgaagagtttgcaggcgaagcgcaaggggcgtcgcgctcttcaggtgctgaagaagctggcctcgtcgcaaatgatgtaccacttctacgcact

SEQ ID NO: 282339 - DNA, 859 bp, Zea mays
ttctcatcagagcatttaaacttgtcgaaaggggtgttttccaagaggaaggaatagtccagctgctgcagtcaccttgctctgatgaacttgctggctataagatcccaggaacacgtcggatccaagataatctttccgatctccgtgctcaggttgcggcaaaccagagaggtatagcacttatcaaagaactcataaatcagtacgggttgatcactgttcaatcatatatgaaccatgttcaaaagaatgctgaggtagctgtcagggagatgctcaaaacagttgcgtctagagttgcaaaggagaatggatcatgtgttgtcgaggatgaagattatatggatgacggctctgtcattcacttgaaactcacccttgatgctgttaaaggtgaagctacaattgacttcgagggtaccagtcctgaggtctatggcaactggaatgctcctgaagcagtcacaacagctgctgtcatatactgcctacgctgcttggtggatgttgatataccactaaatcaaggctgcctagcgcctgtgaagatcctcattcctaaaggctctttcctctcgccaagtgacaaggctgctgttgttggtggcaatgtgctaacgtctcagagagtgaccgatgtaatcctaatggcgttccaagcctgtgcctgctctcagggctgcatgaacaatttgaccttcggggacgacaccttcggttactacgagaccatcggaggtggatgtggagctgggccgacatgggacggcactagcggtgttcagtgtcacatgacaaacacaaggatgactgaccctgagatctttgagcagcggtaccctgtccttctgcacac

SEQ ID NO: 282340 - DNA, 1200 bp, Zea mays
ccttcgcgttcggcacgctgcacgctgcacgccgccgcgccgcacttctccccatccggcgccttctctatcctcgccgctgaagacgtcgtgccgtgcgtagtgagcagaggctgattgataagctcaaaaggctcaacaactcagccgctagcatccagactctttcgcgttggtgcatttttcaccgcatgagggccaaaagggttgtagacacatgggaaaaacagtttactagtgcaagggaggagaagaaaataccattcctctatctatcaaatgatatcctgcaaaacagtaaacgcatgggggcagactatgtggatgagttctggagggttctacctagatccctgaagcatgtctatgaaaatgggggaggggaagggaggaagcaggtggcgagattgatatcaatctgggatcaccgtaaagtttttgggacccgtattgaaagtatgaaaaatggcattcttggtgacaaccctcctatattggataacaatgggaatagtttaaatcctagctctaatcccacttcaaattctaaagctgcacggaaggattctggtacaatagtaaaaaaactcactgttggtggtatgcctgaaaagatcgtgtctgcataccaattagtgcttgatcagcattttgatgaagacactgctttaaacaaatgtaagactactttgggccttttggagaggataaataaagatattaatgatgctatcatcaacggtaatcagccagcattgtcattgatctctgaccttcaagaacaggaaatgacccttaaacattgtatcaaacaactcgaaagtgtagatatggcgaggatatccctggtcaatcaattgaaagaagctctcaacgaacaggagtcgaaatcattagttcttcgcgatcaattgcaagttgctcaaacagaggctcaacgtgtcatccaacttaggaaacaactggggggtgcccttgtcacgagcgtcacacattctacttctagtccgctcatgattactccaccagaacaaacttcggctataatgcagggttcagaagtaagatcgacacatccccagtcacaaccactgaatcctgcagcttcgcttccccctacagtcagtgcagtgggtgatgagtccaagagaacggcggcagctatggcggataagcttgcatctttgtcagcacctgtgc

SEQ ID NO: 282341 - DNA, 475 bp, Zea mays
ccgcacgccccgcgcgtgggcaccgcgaactgctccctgtcgtgatgcccgccgccgcgcgccttcctccttcctccccgcatcccgcgaactgctccctcccccgccccgcgaactgctcctcccgcccgcgcaccgcgaactgctccctcccacgcgcgcccactgccctcaccctcgccctcgccctcgacggcgctgccctctgtgatggcgggatccacggacgcatatcagtcaggcacccactatctgtcgatggaaggtgaggcacccactatctgtcgatggaaggtgatcgacgcagtgatggtctgcggtcaacatcgcaggcatcctcgccccacctccaggtcctcccgacccccgtccccgcgcgagtccgacgtcgttgttccgaccgtcttccccgtcctctcggccaccgtcacctcgtggcctgccctgcaaatgggaaggcatggcgtgtaggggc

SEQ ID NO: 282342 - DNA, 558 bp, Zea mays
tttgtttgcgtgggcgagaatccgaggagcgctgccaagcgccttcgcgacgggatcgacgcgacttgattcgcgagtttcaacgtcgcgaggagagcagaaaattacgcaggcagagcggctgccggctgggtgttgaagctagagcggctaggagcaggttcggagcgctaccaaacaggcccttaacctaagcgctcctgcccttcggatccggaagttggaggcgcgcgaggaggctaggcttgcaaggtctcccttgctagacggcaacggggtgacgatggcgcacgagcggggcgccgccgcatccacccacccagcggctccaacctccgaggaagacgcgctatttattgatttattacatgaagcgcccctgtctggtcaccgggagcctagaagcatagttggcgggaccttgtactgtatcttattggtaggttttgctgctgttgccatttcagctccatggatatttcttttcgcgccagatatgatctctccattgctatgtagcttcaatgctattcttctcgttctacaggcattttcaca

SEQ ID NO: 282343 - DNA, 562 bp, Zea mays
gatttgttgcatcgtagccaactagcaacgacaacccagctagtgattcggttgccgccatggcttacttgctcaagagcaggagtgaaccagtgcagcagctgcgggtacccgcgtcttcagaagaacagcagagaagggtaaatgaggtccgggagcgccccggcgatccgccggcagagatgccgaaccgcctttctgacgccactatccgccggttcctccgagcaagaaactggagtacgatgaaagctaccaagagcctcaaagaagctaccagttggcgacgtcagtacaagccagagaaaattcgttgggagagcattgccgacagcgagaatgaggctaggagagcctacatacctgactaccttgacaagaaaggaagaatggtcttcgtaacacttccaacaataaagtccaaatcttcagagaaggatcatctaaagtatctagtgtacaacttggaaaacctgctcatcgattgtgcagatgcagaagaggataacgttgtttggatctcggatttcaaaggctgtcaatatcaagcacacccatttcg

SEQ ID NO: 282344 - DNA, 520 bp, Zea mays
tggtggttcctgtggtggtgagagcgcacaacctcaagcactggttccaactggccctggtccttctggtgagcgcgtgcccgtgcgcactagtgctgtcgacgccggtggccaccttctgcgctctcctgacggccgcgaggacggggctcctcatcaaaggaggggacgtcctcgaaaccctggccaggatcaagattgccgcctttgataagacaggtacgatcactcgaggggagttcagcgtcgaggagttccaggcggttggcgagcgcgtcactacgccacagctcctttactgggtctcgagcattgagagcagatcgagccacccaatggcgtctgtgctggttgattatgcccagtcgaagtcagttggacccaaatctgataatgtcgccgagttccaaatcttccccggtgaggggatttacggtgagatcgatggggaaggtatgtatattgggaacatgaggattttgtcaagggcctcatgtgaacagttcctgacatgaaagat

SEQ ID NO: 282345 - DNA, 461 bp, Zea mays
tgttgccggacggcgcccgcgtgtacgatgatggcctttaccgagctgtcgacatctacctcaaggctcatccgggtctgagtgaagacgagaaggagaaggtgagcggcgtggtggacgggcgcaacctcacgctcgtggcctgcacgcacgcggcgcagaacgaacggctgccgctgcggacggtcgtgcaggtgctcttcttcgagcagctccagctgcgccgggccatcgctcagacgatcatggcgaacgaaggcggcgcagccgggtcaggggaggaaggcggtgagagcgaccgcggcggtacatggcgcgtggcggcacggggcaaccagatgctgcggctcgacatggacagcatgcggaaccgcgtgcaggagctcgagcgcgagtgcacgagcatgaggaaagccatcgacaagatggaccggagaggcggggcacccgtggatggggag

SEQ ID NO: 282346 - DNA, 372 bp, Zea mays
gcgtccccgcctcattcgcgcgaccatggacacggacacggacacgacgacgtccaccgcctcccgcctccatcccgcggccggacatgtacgctcattggccgcccggggcgccgagagcctcgtcacctgcgtcttcgcgacggtgggcacggtcctcggcgcgatcaccggtggcctcatcggcctggccacggagacgggcgtgctgcgcggcacgggtgtcggcggcatcacgggcgcgctggtgtccatggaggtcgtcgagtcgctgtggagctccgacgagccggcaatctggagcgtcgtttacgtgcttcgatgtcatttggagcttgcttaccggtcgtcttgtgcgctagaaggtggacc

SEQ ID NO: 282347 - DNA, 502 bp, Zea mays
  unsure (1)..(502): unsure at all n locations
ccgactccctagctcccacactacgcggccanatactacatctttaacccgccttcaccactacatcctgcgctgcaaacgcctcgcctctcctcgcctctgttcagctcacggtggaagaggaggcgacaggccgacagcacacgagagggagctagcactagcagaagcgcgcgaaggagctcaagcagccacgcgccgaccagcaccaccgcgcgatggcgtgcatcaacatgtacaacccagacggcgcggcggggttcggcggcggcccgcagcagccggccgcgctgggcccgcgcatctccttctccagcgacttcgccgtggagccgacgccggtgcagaaccgggcgacgagcctgcggtgccaggaggaggacctcaacttcgagttctccgtgggcagccaccccatgatggccgccgaccagctcttctccaagggcaggatccttcccctcaaggacaacggcggcgacagtgtctgcttcgctgccgc

SEQ ID NO: 282348 - DNA, 405 bp, Zea mays
tctagactctcccctgccccgttctcttctgctgcctgcctttctctcttctggcgtccgcgtgtgtgtgcatttcactgtactgctttcatctcccgctctttcttcacctgctccgcgctagtgctggaaccaagaaagcctcatgcggcggcggctggccgaggtgcggtagagcggcggagatgggctgggcacccaggtggttgcgcgggctgctcggcggcggcggcaggaaggccgccgacacaaggccggtgaaggagaagaagcgctgggggttcggcaagtccttccgggagaagccccccgcgccagtgccggcgcggcctccgactccgacgcctccgtcgcatcccgcggcgacgcctcgccggggctatgcagcggcggatgaggcgggcg

SEQ ID NO: 282349 - DNA, 483 bp, Zea mays
  unsure (1)..(483): unsure at all n locations
ctggatgnccgngcgaaggatgagctggtgatgcaggattccaaccctgcatttccccgctgttctaggatgggagaaggccgagacggagatctcatcgctgaaggcgcacccgagcgctgcggcggccaagaactccgcgctggaggaccgcctcgtccacctggacggcgccctcaaggaatgcgtccggcagctccggcgcgccaaggacgagcaggaccggacggtgcagggcgcgctggcacggcaagcgcggcagtgggagtcccacaaggccgacctcgagctgcgcgtcgtcgagctcacggcgaggctggaggccaagtccgagcgctcggtggcgggcgccgccgacggcgacaccggctccagcaggctagccgccctggagaacgagaactcggcgctgaagttgcagctgctcgccaagacggaggagctggagctcaggacgattgagaaggagctcaaccggcgggc

SEQ ID NO: 282350 - DNA, 820 bp, Zea mays
gacggcaaggtgtacgttttgacggacccgagcgacgacgatcccgtgaacccgttcgagggcaccctccggcacgccgtcatccaggaggagccgctgtggatcatcttcaagcgggacatggtgatcacgctgagggaggagctcatcatgaacagcttcaagaccatcgacgggcgcggcgccaacgtgcacatcgccaacggcgcctgcgtcaccatccagtacgtgaccaacgtcatcatccacgggctccacatccacgactgcaggcccacggggaacgccatggtgcgcagctccccgagccactacggctggcgcaccatggccgacggggacggcgtgtccatcttcggttccagccacgtctgggtggaccactgcgcgctctccaactgcgccgacggcctcatcgacgctatcatgggatccacggccatcactctgtccaacaactacttcacccaccacaacgaggtgatgctcctgggccacagtgactcctatgtgaaggacaaggcgatgcaggtgacgatagccttcaaccatttcggcgaaggcctcatccagagaatgccaaggtgccggcacggctacttccacgttgtgaacaacgactacacccactgggagatgtacgccattgggggcagcgcggagccaaccatcaacagccagggcaatcgctaccttgctccgactaacccgttcgccaaggaggtgaccaagagggcggagactgcccagaccgtgtggaagagctggaactggaggtcagagggcgacctgctgctgaacggagcctacttaaccccgt

SEQ ID NO: 282351 - DNA, 509 bp, Zea mays
cgctgatgcagctgctctccgcccggctaggcgtggcctcggggaagcacctcgccgagctctgccgccaggagtaccctccctgggccactcgcgcgctctgggccatgacggagctcgcgctcgtcggcgcagacatacaggaggtgattggcagcgcgattgccatcaagatcctctcggggggtgccataccgctctggggtggcgtcgtcatcaccgcgctcgattgcttcatctttctcttcctggagaattatggcgtgaggaaactcgaggcatttttcgctgtactgattgcaactatggctggttcatttgcggttatgtttggtgaaacaaagcctagtggcaaggaacttctgatcggtttggtggttccaaaattgagttcaaagacaattaagcaagcggttggaattgtgggctgcatcatcatgcctcacaatgttttcttgcattcagcactagtgcagtccaggaagattgacacaaacaagaaatctcgt

SEQ ID NO: 282352 - DNA, 541 bp, Zea mays
  unsure (1)..(541): unsure at all n locations
gtggtcnatgcatgtcaaggggtgttctcccataccaggagtttaactggacactgctgtgacacgcaaagccaacaaaaggtggaagacctggatctgaaaagaacgagagtaagttggggcggccaccaatgaaaaaagcctctgaccgtaaagcttcatcctggcattcacaagctctaaatagtgatattacagacataacaggtgaaccagaagatgaccaagaggagcttttagctgctgttaatgctgctcgcagcgctattgttagtgcctattctggtcctttttggaagaaaatggagcccatgctaacttttatgagctcagaaaatttatctttcttaaaaaaccagatcaaccttgtttgagagcttgaagtgagcatgttctgcatgtatgacagtgaacatgatattatagcatcagttgatcacagaataatgtcaaagatggaggagcattcatctcagggacttgctctgtctaatttccccccctcatcccagcaaagtaaaactaatggagttggagcaaa

SEQ ID NO: 282353 - DNA, 1485 bp, Zea mays
tttatgcgtccgcccacgcgtccgcccacgcgtccggtgtaagcatcggaaaccggaacggcgcttcactctcagtagccgcgagctacccgccgtcccctggtcgattcagtgcaaatcctccaggtttctgggtcttaatggcttcctcagatatctctgttgatattcgtcctgacataaactcatttgatcattttttaagcatgcgatacattgcaacagatagaccctggctgaaattatatggaataagagttcagcctgtgccaccattcagcagtttgagctacaaacctgatccagcgctcattcatcattgcctacctgatgaactaatgctcgagatttttacaagaatgagcccatatactttagggagggctgcatgtgtctgccgcaagtggaaatatactgcacgcaatcctactttgtggcgtgctgcatgcttgaaaacttggcagaggagtggaatggaggcaaactacatgatggttcggtcgttgtatgattcctcttggaggagaatgtggctacagagaccaagaatccgaattgatggtctctatgtgagcaggaacacatacattcatactggagttacagaatggcaattcaagaaaactgtcaatgtggtttgctactaccgttacttaagatttttcccgagcgggaagtttctctataagatctctccagataaagttaaagacgctgttaagtgcatgcatttccgggcatcaaaggctgattgtgtatttaaaggtgactacgtgctgtcagaggatggccagatagaaatggctctcctgtacccagggcatcggtacacgcttgtcaggatgcaccttaggcttaggggcaccacagttggtgcaaataacaggttggatgtactgaagattctaaccaccggagtgaatgcaactgagctgcaaaactggaaaggaagcatactagaactcgttgagggctgggaggaggatgagacgcatgacccggagtgcctgccgtttcccacagcaggggtttgtcaccctttgtgtttgttccgtttgaggaggctgatacttcggtgttaaacctccccgtggagaagatggactactacgtccctgggtgagctcttcatgacgacgatggccattggagaatgagatgatgggtggtcatgttacaggttaaaatgatgatggccaacgatctccttccctctcagatcccttgctagagcaaatgtgtaaatacagtgttgttttgtttacacttttcggttggtcgcatgctgttgtatgacattatgtttgttgatacctggaaacaggttttattattgttggtgcttgaaaatggtgtgggaggaaactcactatcaaaaaaagtagagctaccctcctgaagtaatgtgggtctgtattattatagaaacaagcagtctatcgttgcgaactttttagtctgtatgtattttcgcattgtacagtt

SEQ ID NO: 282354 - DNA, 390 bp, Zea mays
cggttgcgtgggcggacgcgtgggcggacgcgtgggcggactttgtgggcccgtttcgtttctttccctcgctccccagccgcatctcgagcgcgctctcggcggccgtccacgtctcggtcccacgcgctgctcgcttgctcgccggcggggcgcgagggcggtggcctaggtcgtacccagcgaagcgcggcgtgccacgaggtgggggttggctcgggaccatcgagcctgtccggaattttttctggcgcgtgatttgccgctgagaaagcatcggaaaagggaacggggatttactctcagtagccgcgagctacccgccgtcccctggtcgattcagtgcaaatcctccaggtttctgggtcttaatggcttcctcagatatct

SEQ ID NO: 282355 - DNA, 550 bp, Zea mays
  unsure (1)..(550): unsure at all n locations
agcagatgttttgcggtgcagtgcagtgcaggtgcgggatctctgaatcgctcacgcccagcttcctctgtcatctccctcctcggacctcgccacctcacgcggaaggaggggaagaggaagcgcggagactggaaatcgggccccaaatccgcttcggtctctcgatcggcgaggcatgatttatacaaccggctaggatggcctcaaaagctataaaaagaaggcctatcagcgctgagactgataaaacagggggaaaacaaatggatacagcactgtcagatcctgtaacagaacctcttctaggaaacactcctcaggaagagaaatccaagacatatgagcctattacacggtcaggtttctgggatgggacggcacaggagtgtcttcgttggacacatcttttagcagcttttgttgctcaatctgcaagaaacatagtaaatgttctttctgaatttggatattttttagcaagactctttggttgctcttctgcttccaaagttcacaaaatggacagacancttcagttaatctcagt

SEQ ID NO: 282356 - DNA, 668 bp, Zea mays
ggcctctctcctttctcgagagagcgaagtaaacgggacagcggctgcagccacccagtgtacgagcgctccgacttgtgtgctctcatgccgtgctgctacagagctgcctcataaaagctccctgagcctgctcctgtttgcagcttgcaaggcgccaaggacggacggaggcgacgactcgcaaggtagctctgctcgggcgaggcagcagcagcacgcagcagtactccgttcagaatcaggagagaagacgttgttctccgggcactcgagtcgaagtcctgacgagatggacggcaatgcgaggtcggcggcaacgaatcagaagaagcccgtcgtcgcggacgacgacctcgtggagctgctgtggcacaacgggagcgtcgtcgcgcagccccaggcgcaccagaggccggcgcccacctacgaccccgaccgcccgggcaccagcggcctcaccggcgaagagaccgccgcgtggttcccggacaccctcgacgacgcgctggagaaggacctgtacacgcagctctggtacagcaccatcgccgacgccgccccgcagcacgagggaacgctcccgggccctacctcgcagccttcgccttcgccgcccgttgggagcagcggcgtcgagtcgagctgggctggcgacatctgctcga

SEQ ID NO: 282357 - DNA, 744 bp, Zea mays
cctctcgtccggaaggatattatgaagaatcaccgcaaatgatggatgaggctctggtgatcgcggcacatttctgtcagataaaacaaatctttccaaactgatccgagcatgccagggcaaatgaagcagcactgcaggccctatgcacccttgaagtggagcaccaagttcacagaatgtttttagcgtgataatcgcgtggtgctgtgagatctcagaaccattgcccagaagcacaagaagtttattgtcaattcctgattcaatcattgtctcaacagccttcagctttccaacctttgtcagagatgcaagtgttgtaaacacaatttcatgccactgctcattttctgcagtcaagagatctgcaattcgaaccatgggaattcttgacaaaatttcatccgcaattgtggcatcaacatgctcagatatcttggtcagaacagaagagaggttggctagagttgaagtatcttcacaggcaccaagaagatcaattaatttatctatggaacctgctatttcaagagagtgagcaagatttatgtagtctgatggggaaaatatgactgtaattgcggcagtgactgcaaaaataagatctagtgaccctatagaaattatctctgctattcgagggccaagtattttgctgaacccagttctatttgtctcaagttcagacagggatctgcatgccatgagagcttgagttgtgtttaccagtaaaatctcgat

SEQ ID NO: 282358 - DNA, 777 bp, Zea mays
tagtacctgcaaaattctcggtgctattcaatctaatgatttattatgagttgtttgggactgctccatttaaaaaaaagaagaaggttcagagcaccttcataaaaaaaggttagagtttatagagaacgcctcttgagctcatggttgtgtaatttgcatagaccagaattacgtaatgttgtttaactaaaaaacataaagtggagcttaaaacaatatggggtgaagcagtctcgacgaccccttaaactaaatatagagtatttgcaatttgaattgcgaccatacattctcttctctatctctctttttaccctgtgatttgctagtggccatggtgtgatgcagagatgggcagtcagagaacggagatgctagtggccatgatgtgatgcagaatttaatcgatcggttgctctcatctgaagtcctgaatgtagccagagtttgggcgaattttacacaaagttgacgacacgcagcacaagaagaatttgcatcaatcaacacatacgattacgttttttctagccaagcttcactacataaaagatgttgttttttatatacaaggaagaagaagaagaacgaagaaagaagaggaagttgtcggtcgtcaaaccaaactcaaaccagaatcatcagcctttgactagccgtgcgtggacgccgacgccggcgacgagatgtaaggatcggactgcacgagcccgtcgaggaaatcagctaggcggtgctcgcgcctcctgatggcggcgttctcgagcgcgcgca

SEQ ID NO: 282359 - DNA, 685 bp, Zea mays
cctagcgtccggcctaagatcgggagcagtccacatgcgtataggaataatgaggtgtctaccgatctccctttagtagggaagcataataaagggtgccattgcaagaagtcaggatgcctcaagaagtactgtgagtgcttccaagctaatatactatgctctgaaaactgcaagtgtatggattgcaagaattttgaaggaagtgaagagagaagaaatcttttccaaggggatcataaaaatgcaattaacattcagcaggcgacaaatgcagctgtaaatggtgctattggaaccacaggattcccttctccctccacgtcaaggaagaggaaacatattgatccttcacttgaccattcaaacaaggaacatgcagcgcacaggaattgtcacatacctcagaaaaatgcagtgcctgatggttcaattccaataagccagtctgcacatcctccaactctgggccccttcaactttaccccccgtccagcagacactgtccaagcagaggatataaaggagctatgcaagcttttagtggtggtatcaggagatgctgcaaaaacatatgctggtcagataacgaaggaagatagggtcggcgagaaggaagatgcaatcggagggcagaacgaagatgacagggtaggttccctagcattgacaaaccatgatagag

SEQ ID NO: 282360 - DNA, 503 bp, Zea mays
agaatgttttagccttccacctcgaactccgcggcgcccagcgtctctgggtaaccgccccccgccccgccacagagacaggtcgacgagacagacaaaggccggccgccatgggagaggacaagaaggcgggcaacaaggacgccgccggcggcgacaagaagaaggacgccggcgccggggccgcgccgcagcccatcgtgctgaaggtcgacttgcactgcgccggctgcgccaacaaggtccgcaaggccatcaagcacgccccaggtgtggagtcggtgacgccggacatggcggcgggtaaggtggtcgtgaccggtccggcggacgccgtggagctcaaggagcgcatcgaggccagggcgaagaagcccgtgcagatcgtctccgccggcgccggcccacccaagaaggagaaggataaggagaaggagaaggagaagaaagcggacggcggctagaagaaggcggacaaagagaatggcggcggcggctccggc

SEQ ID NO: 282361 - DNA, 499 bp, Zea mays
gccctcttctctctctcgctctcggcgacgactgggcgaccgccgccgccgctgccgctgcgccgcccttgtccaggtgcccaggtcttcgccggcgccttcgccaggtcttcgaaggtaacgagcaccaaccgggtatgtgcaccccttctcctcccttcatgctgcgcgaaaccgagcgcccgaaccctaacttggatctgatccagttgcaagcgcgggcctcatgtattatgcctactatcttccaattttctgcaaaacattactgggtttacacgtgcatgcccttttctgggtccgcccgtgtctgaaccataacctaagctgtttggatctgatttagttacaagtttatacgtgtattggcaccaattcggatctccgaactcttttcgccaaaaattactgggtgaacatgtgtacactgtgcaccctatctttcagtgttcattggttttttgtgtttccttctcacttgtgttgctactatgggtac

SEQ ID NO: 282362 - DNA, 473 bp, Zea mays
gatagagcatacatggagtgccattgaaagcggtggatggatcatcttacaatcaggatcagatcatgccagagaattgctatcagatgatgatttccatgaagttcttcaccgtagatactatgatctacagcacctcgcaactgaacttgctgtcaaccctgacaatcagcagcaacatgaaatcatccccgaaacagatgtggttgatccttccatattaggcattgcaaaaggtgttgagatggttctacaaagattgaagagagtggaacaaggaataagggacctcaaggaggaaatcgcaagcttgaggtactatgagtatcaccttttgactgaactccacaggaaaatggactacatgatgaattacaacacccagttggaggagaggaaagtgccacagatgttttatcttgttagcctggacaaccggtccaaacagctggtcacaagaatactgtctggga

SEQ ID NO: 282363 - DNA, 584 bp, Zea mays
agaaaggcctctttttcttcagaactttcaaaagtactgggcgtatgggagtcctaaactatcagcagatctgccagcttctagtgattttaaggccactaaagtctgtagaaacttaggatttttgtctgattatgctaaaacattggttcctaatttgttaaatggggaagacttggtgttattaagtgatttcgctgataagctacaatcttggtgtaaatcacaagttgcagtagaggctgcacaaaatgatattccaccagaaagcatggatgccatgcgcccggtgcagcagctcttgccaacacggactaagcactccagcctccaaaatgaataaccttccaaaggatgcacagaacatggaagtgtctacaccagtacccccaataaatccgggaggaaatgatgaggacgagactccaaagaacactgtctctagaaatggtggtttcctgcagaatgcagttggccaagacctagtccatcttggcgttgcaagaacagcaagtggtggcccttcggctgtcgcttccggtgttagtactggacaccagcacaacagaatggatcttgatcca

SEQ ID NO: 282364 - DNA, 650 bp, Zea mays
cggctcgaggggaggacggcctacgtcacattcaaagatcccaaggcgctcgagatcgcgcttctcctcccgggagcaacaattgtggaccacattgtgaacataccccctgctgaagattacatctacatccctgttactgaacaacaacttatggttcatgaggtgacaagtagaagttcagcttctaatgcagaattggagtactcctcagaggccaatgtcagtcccaatagccgtgtctatgtgagcaaggcccatgatgtcatgacaaatgtgattgcaaagggttcagcaatgagacaagacgcagtgaacaaggctaaagcatttgatgagaagcatcaatttagggctaatgcatcagcgaggatcaattcctttgataaacgtgttggcctttcggagaagataaacaatgggatatccgttgtcaatgaaagggtgaaatcagtagaccaaagattgcatgtttctgataaaacaatggctgcattgctggctgcagagcgcaagctaaatgatacaggctctgctgtgaaaaccaacaggtatgtgtctgctggaacaagctggctgaatggtgcttttagcaaggtcgccaaggctggtcatgttgctggctcaagaactagagaaaagttccagtt

SEQ ID NO: 282365 - DNA, 474 bp, Zea mays
tttctgtacggctgcaaagcgtaagcacgggtgggcggctgtccagttttgtcctgccatggagccgcgacgcgcctgctgggagtgggaagagctcgacggacaacgtgacgaggccaccactgctgcccgtgcacgacgacaggcccgcggcggggtgctcctgctccgcgctcaggtccgtgctcgccaacaggttcgcggccgtcgcgtccggcccgctggcgtgcgcacttctggtctgcgcgacggcggggggcctcggcgggcatccccgcggcgcgcaacaacatgctcggggtgctgacgtgggtggatcacggacgccgtggacgctcggcgccgcgtccctggcgcccctgttcctctttccagcgttcggcatatcctcgacgtcatctccttcgtcctcgggagcttcatcctcgcgctcgccatcgaacagtacagatgacgtttttttttccatatcat

SEQ ID NO: 282366 - DNA, 484 bp, Zea mays
ttgttataatgaagacacctggaaaatatttccaccttcctggcatgtcgactatctgctgtgtatccagttctgtaagattacaagggcccagcttgttgatatccttaatactctcaaagaaaaaccagatgttgcaactttgttattggcgttccagagaaccattgaatttgaggaagaattggcagagaaattcagtggtggaactacaaatgctagaaataaagagacaacaagtgatgatgaagatgagggtgggggacacaataaaattgtttcggacatacgaaagaaatatgagaagaaattggctgcacccagtgacgaggacaaagataagcagaaagatttgtcagttcctggtgctgggttcaactttcatgggatcatatcttcttgttttgaaccatatatgactgtatacattgaacttgaggagaaatctttagtggatcaattagaaaaacttgtccaggaagaa

SEQ ID NO: 282367 - DNA, 1236 bp, Zea mays
cccacgcgtcctttttatctatggaattacggcatgtatataactatgtgagggttttctcttctacggacaacaaaactaatcagcattgcatatcaccccgttcgctcagagaggctatatctgcagttgttcttgtcacggttggtgatacgtcttgggcttcaggtattgttctgaacaaaaggggtttagttctgacaaatgctcatctcttggaaccttggagatttggaagaacttcaccttcagatttacaagcctcgttcgctggagaacatctcaatgctggagaaaacaaatcattgcaaccacagcaaggcaaaatttccaatgaagatgctgtcaagcataaggtttcgtcatttaacttgggtttcaaaagagggaagagaatatctgttcgtttggaccatgaagagagacagatatggtgcaatgctagtgtggttttcatctcaaagggtccacttgatgttgcattgcttcaaatagaaaaggttccagttgaattaaatacaatcagaccagaatttgtttgtccaacagcagggtcgcctgtttatgttgttgggcatggcctttttggaccccgatcaggcctacactcttctctatactcgggggttgtgtcaaaggttgtccaaatcccagcaaatcaactttctcatctggcccgtgctgaggctgacaatatggacataccagtaatgcttcagacaacagcagcagttcatccaggagccagtggcggcgttcttgttaatacacatgggctaatggttgggataataacaagtaatgctaagcatggtggtggaagcacaatacctcatctgaatttcagcatcccctgcaaattactggttgcagtcttcgagtattcagcaaatggaaacctcgtggttttggagcagttggacaaaccaaatgaagtgctctcatcagtttgggcattggcaccatcatcatccccatttgtcaggagctccccagaaaaaggcaaagaggaaaaggtcttggagttctctaagtttcttagtgacaagcaacaagctctgaaatctaacgtagatctgaaggaactatttaggtacaagactcccagcaaaatatagagtgcgtccactagaattcatacaaggaaaatgtttgttcccagaattttgtatgagacgtttgatcccagaaatccccagtacaaaatgagttatcagagcacagtgcctttttttt

SEQ ID NO: 282368 - DNA, 485 bp, Zea mays
tttttctctatttccccctcgcccagctcagaggcggagcctgaaggaaatcgcgccaacaggccctagccccagatgcgcgccgccgcttgctgcctgcgctgctgctactgcttctaggggtcttgcggcgatgctgggcgtcgagcccgagagcggaggcgccgcgtcctcctccgccgcagagaattttgacgctggccagtacgccttcttcgggaaggagccactcgaggggctcgagctcgggggtttggaggaagccggcagtgatggcaatggcggtggattcagcgggccagatgaggggctgtaccggctaaactcggttggagacgagattgacgatcagagtaacttgtctgacattgatgatcttgcaagcaccttcgctaagttgaaccgaagcattagtggaatcccggatcctggtgttatctgggacaggagatccatttcaagaggaagttctttaactcttgact

SEQ ID NO: 282369 - DNA, 301 bp, Zea mays
gtccagttttgttgtgcataagattcacatctcaatcgtggggcatcttgaggtcacgatttagtcactgtcccgagaggataaaatcctcttcaaagcatggggtagctccagcacaatgtctaaatcgtgacctcaagatgtccagttttgttgtgcataagattcacatctcaatcgtggggcatgtttttgaagatattgttcagaatcttgtggtagtatagcctgcagttgtggactgcaattccctgtgaaagcaaggcagacatttgccgtgggcgctcgatatattccggct

SEQ ID NO: 282370 - DNA, 578 bp, Zea mays
agataagatgttgggagttaaattaatttggaagtctgtgtctcttttgctgcgcccagattcataaccataatcatgtttaaacaagtgctgtgtgaagagccatatttctcacataagttttttaggatattgtcgcgtccggcgagagaattgtgatatctgtgagatcccttttgttaacatagttttatgagcttggaagcttagaagccatctagctctgaacatgattgattgatcactctccatagaaagttgacttgaacattaagtgaactgcgtgagtattatctgagaatactttgattacatttgatgcttaaactagctcaaagcgtctccaagtcatttgtcgttgggaattaattcactgcattttgttatgtctgtacatggaagtttgctggataaatctcttaatctatctgattagatgtacatctctactgatgtgctatataactgtagatgttcaaaaaactaacagtgattatctctcttctatgagatgcacttccttgcatcatttcatgtccctacaggtttagattatctgatttttcgggatggatgcc

SEQ ID NO: 282371 - DNA, 525 bp, Zea mays
  unsure (1)..(525): unsure at all n locations
tctgtttctccctcccgttcccgtcctcccccgctccggctttccctttcctcccccttcctcttcctctctccttgggggcgcggcgagatcgggcggaggagccctaccgccccccctcgccgcagcccgcagcggaggcgggtgctcagctccgcggaaggttagaggtgcggggctgcgtttggaaccggcggtgggcgcgggagatccggccagcggggatgcagcaggaccagcggaacaaggcttctgcagaggccgacttcttcacagagtacggggatgcgaaccggtacaagatccaagaggtcatcggcaagggaagctacggggtcgtctgctctgccatcgatctccacactcggcagagggcggcgatcaagaagatacatggcatcttcgagcacgtctccgatgccgcgaggatcctncgcgagatcaagcttcttatgctcctgaggcaccctgacattgtcgagatcaagcacattatgctgcctccctcgagaaaggacttcaagg

SEQ ID NO: 282372 - DNA, 360 bp, Zea mays
caagcgcctctaggccgaggctcggaggccacggcgaggaggagcagcagctgccagcaggggaggacacggatagtagccggcctcccgccgcccgagtgcccaaccgcccccgcaattactgttgttgctgcgtgcagagcggttttgaattgccgtctcctacccaggaataatccatggccccgcctccgccatggcttgccgccctcctcttcctcctcctacccgcgctgctgccggcggtcggctccgtctccggcgcggcggctgccggcatcttccgggtgcggcgtaagttaccagtcggagttggagggggacactggcgccaacatcagcgcctcttcgtgcccacga

SEQ ID NO: 282373 - DNA, 697 bp, Zea mays
ccacgcgtccgcgcctggctcgcaccgctgacagtgcgtcagtccaggtcgatcctccctctttccaagatccggtcattctctcggggtcggctaccgccgccgccgtacgccaggtgccgactgccgagaccttctccgatctgtttgccggcgaagagcgcccgccaaatctgcccctggtttcaaccgattgaaccccgatgtccgacgtcgagaaccctggcgtgggtgggaagccgccgccgtacaaggaccctgacaatgggagtcagcgattcctactcgagttggagttcgtgcagtgcctcgccaaccctacctacatccactatctagcgcagaatagatatttcgaggatgaggcatttatcgggtacctcaagtatctaaaatactggcagcgaccagagtatatcaaatacataatgtatccacactgccttttctttcttgagcttctccaaaatgccaatttccgaaatgcaatggcacatccaacaaacaaggagcttgctcataggcagcaatatttcttctggaaaaactacaggaataacagactgaagcacatcataccgcgccctcctcctgaacctgcaccttcacaggcacctgctacattgcccctaccagcgtccgtgccgacacctgtagctccacctgttcctgcaccaacattgtctatgccacctgt

SEQ ID NO: 282374 - DNA, 448 bp, Zea mays
tcttccacgcgtccgtgcagattctcaccaggtagacgtacatctccatctccagtaaggcgcaggccaaggtctccatcacctgggaggcgtaggccaaggtctccatcacctgggaggcgtaggccaaggtccccatccccaagaaggcgtatgccaaggtccccatccccaggaaggcgcaggccacggtccccatccacaggaaggcgcaggccacggtccccatccccaggaaggcgcaggccacggtccccatccccaggaaggcgcaggccacggtccccatccccaggaaggcgcaggccacggtccccatccccaggaggacgcagaccacgatccccatcgcctggaaggcgcaggccatggtctcggtctccaataagacgtcagtccccatctccaaaacgccagaggacatcaccaagttcaccgaagactcgtt

SEQ ID NO: 282375 - DNA, 581 bp, Zea mays
tcgtccacgcgtccggtggggggttctcaaagagtcagaaagaaattgttaagcaacacatatcccacaggctcagattttcattgcgagcttatacctccatcctttacctcaggaagtttgataatttccaaattatattaagaggaaaacctgttgagcagatatttatcactgacgtccgaaaattgaagaatgtcgttacttacagacctcaagcagcacatgattcccaagtggcctcggtaaaaattgatattggttttgcaaaggaggcccctattttgggcatttttgggatgaaatgtctaccacaaagatcgacttataatgcctttctggaaggtccttcaagaaggatctagcacagggagaagtgtggttcggtgtactcgaagcaaattttattgaaccagcacatgacaaacaagattttgagaggacaccattgtttattcggctagaaacaagacttagacaaattattattgatttctggaaagaaaggtgccatttgattggttaccagccaatggatccacatttaagatcccagtataaggccaccctcaaagaatcgg

SEQ ID NO: 282376 - DNA, 515 bp, Zea mays
gaaaaatgatggcacttctccagaaccttcgccattaaaagataaaacagcaacagaagattcataccgaggatcgctgggtagtgcaaaaggtttgcatggtccagtaactactccggtgtggttctcattaatttctttgcctaaccagtaagtattcatagtgaactgaggagagctaaaatgcgaggaaactctctgaagaatgctccctccattataatcttatgtcattttctgagttttaagtcacatgcaaactggttttcaggaaagaagatccacagactgctcagttaccaaagacttgcgagagaatcaagtgagttccattgaaacctgtaatttattttgactcttgccatgctcggaagcttttgtgcatagtttagagttgttcaattctttgcccgattagtctgctccaggctgatcaacgtagtgtgatgctcataatatttcctctcagactacatgactgtagtaatgttacactcccggcatcttctgattag

SEQ ID NO: 282377 - DNA, 539 bp, Zea mays
tttctcttaccgatccgatcgtcaagcaagctgagccaccctgacatggcatcttgacccccctcctccgcctcgctacggcagaggccagccgccgcggcggcgacgcccgatcagcagcacgagccaccacgtctggaagacggcctcctcccgaaccaaggcggatccccggcgacatcggcgctgtcccaggcgctgtcctccacggcaaacctggccaacctgctcccgaccggcacgctgctggccttcaacctgctggcgccgacgttcacgaaccacggcgcgtgcgacgccaccacgtcgctcctcacgcggggcctcctggcgctcctcgccctcgccagcgcgctgccctgcttcaccgactccctcaagtccccgcacgacggccgcgtctactacggcgtcgccacccgcacgggcctctggctcatcgactacccgccgggcgcgccgccgctgcccgagggtgccaccgggcgctacaggctcgcgttcatcgacttcgtgcacgccgcgctgtccgccgccgt

SEQ ID NO: 282378 - DNA, 413 bp, Zea mays
ttcttcccacgcgtccgatgggttggaggcgaggttgatcggggttggaggcgagtttgatcgatctggcttacgcttgtgcaatcagaagttcggaaatgttcagagttccttgtgtttgttcactaaccaccccctctcctgtcatttttctttgaaaattggcattataatcttgattacccttcattggagatgctgcttgccggatctgtaagggcaagaagtagatttgaggcgttgactggactgatgcccatagtaccgggtgaagattgtcaggatatatctacctaaatcgctcttctattggtttatacacatttctgtccgctgcaattcttaaatgttataaattggggctggttgatttcttcagcatttgcattatatggatggatggatgggttgtt

SEQ ID NO: 282379 - DNA, 323 bp, Zea mays
gtagattgaggcattgattggaccggtatatcgcgacgatcttctccctacatacctaaatcacttttgtattggctcatcttcagcttttgtccgctgcaattcttaatttcttatattggggctggcgcgtttttccagcaatattatatggatgaatggatgggttggaggcgagtttgatcgatctggcttacgcttgtgcaatcagaagttcggaaatgttcagagttccttgagtttgttcactaaccacccgctctgctgtcatttttctctgaaaattggcattataatcttgattacccttcattggaaatgct

SEQ ID NO: 282380 - DNA, 563 bp, Zea mays
gcgtcgttgcttacacacacacacacacacacacacactttacactcgagcgagaccacggcgccataccgccgtaagggaggagccagcgtcgctacctgaagcttgctagctagctcttgcgtgtctggctgcgccgactgagatggacccgcgctttccgctgccggccgcggcggcgccgtccacgggcggcggcggcggcgccagagggcaccaccggcgggcccactcggagacgttcctcagcttccacgacgcggacctgctcctcgacccggacggcgacttcttctccgacctcgacttcccctccctctccgacgactctccggccgcctccgaccccaccccgccgccgcatccgcagcagcagccgccgcaggcttccccggccccacgtccgcccggcgggacccacacgcggagcctctccctcgacgccgccttcttcgagggcctcgcgtttcagggacccagtgggagcgccgggggtggaggtgggcccggacacaagaggagcggctcgatggatggggacacctcgccgttcgagggcgagt

SEQ ID NO: 282381 - DNA, 351 bp, Zea mays
cacacgcgtccgcacacgcgtccgagagacctgccactcgttccctttcccaggcgcaggcgcctctccttgccaggcgtgacacagacgaactggtgccgcctctgctggggcttggtcctcccagccgagcgcgcctcatccggatcttgcgacgacggtgcccaagctcccggcctccctttcgcatccctgctgcgagccgtccgtctccggaaagagttagagccgtcgggctccgtaaagaattggagccgccaggcgccttgagaagggacctgaaccgtgatgtcgtctacagagaagatggtggggtcgtctgccacggcggcgccaagggatccgtacggg

SEQ ID NO: 282382 - DNA, 784 bp, Zea mays
ccacgcgtccgatttcttttcagctgtctgctttcgggacgatgtgggccgcgctattcggatggatatccagttcgtctttggcctatgtgtatgggcttgaaaggggttcagtggaggagttgctgattgccaatgggagggaatgtcctgagaagacagttctgaaggatgggctctcattggagattagaagagctctagattcttgcgtttgtaacgccgtgccagtactcatatcaaacttgaggttgcagataccggtttcaaaactggagattactctgggctacttgattgacacaatgtcgtttgttgacgccctgccttctctgcgatcgaggcagtggcaggctgtggttctggtaatgcttgacgcgctctctgtgcaccagcttcccgcccttgctccagtcttttcgaattcgaagcttgtgcaaaagatgttgaacgctgctcaggttagcagagaggagtatgactccatggtggacctgtttctaccgtttggaagatccgtccaggcgatcacgcccatgtaaacgagaagccgtgtgaatctgcattccggaagctgcgtgaatcgtagggtctgatctgatatttagttttacacaagtcgctgtctagaacgagccatgtatgtatgattgattggttatctattgagcaagatgcgctctggcaatttgtggaagctgaaatacttgcgaccatgacgcctgcctgtcagtttgtgatattcccccaggttgttaaaaattgctctgctgtcgttctcagc

SEQ ID NO: 282383 - DNA, 730 bp, Zea mays
ggcccggaacttactggctcgacccacgcatccggtgggttaaggggctagctcgtgagtaactgagcagggtgtacttggatgcataggggggtgaggaagcaaggaagactgtggagcaggagtgtggcacttgtgaatctaatccgcatggagtgtacaacatccttgctgcaatctataatgccatgggaagtcctaatctgtagtacagatagatggagtacacagcgacgtatttagccctggtgtcaagcgggggagccacacactctcggaataacaggattcattacccgctatgaattcaaagtcggcactaacaaagggcttggacacaatcctgagcaacaagatgttgaaatactatttggacctggctatactggtcttgcggatcttgggaatagttgatatatgggttcaataatgcaagtcaatgttttaacccaccattccatatcaagatactttgagaaacagaagtttgaaagctgcatttgctactgcactagctgatccaacagtagacctaaacatgcaaatcaatcatcattctggctagcatgcacccaaggttgaccaaactgattcgacagttttgggatgagatcataacgttcgtccgacttttgcagagatcattacagaactccaagatattctacaccatatctaggcaccgaagggatctctgaatgtgatccagcatgtgttgcttttgggtatc

SEQ ID NO: 282384 - DNA, 554 bp, Zea mays
aagcattttgcagtccagcagcagcagcccctctcgtactcctccgcctcccgcaatgccgccccgttccgcctccgccttccgcctccgcctcccgcttcgcgacccactggatagctgacgccctcgccggcgacgagtccgtcgacttctccctgctcaaggttctggtgggggcctcgtcgaagcccctcgcgggcgccccggaggccacgcgtgagcgggtcgcgctccggtccattcaggaggtgtcgtccgtgatagccgctgggggtgatgccgcggccacggcgggggtgcttagtgttgatggcgcccggtcatgcgaggatgggctgtttcggcttatcagagaggttggaagtttcggagatttggagaaggatttgcttccacctttcagtcaagacatccaggaaaatatatgtaccaagaagtttacattaccaggaatttctttccagttgctagaaagagttgagccatggatagcatctatggccccacaaccccaaatggaacacaatggcactgaacaatgtgtcaatgatcag

SEQ ID NO: 282385 - DNA, 461 bp, Zea mays
cggacgcgtggcgcgacgcgtgggcggacgcgtgggcggacggtggggaaagatgttcctgccaacgtgtatgttggaatgcggtattggcatcccttcactgaagaagccatagaacaaataaaacgggatggaatcacgaaacttgttgtgttgcctctataccctcagttctccatatcaactagtggttcaagtctccgtttattggagagcatattcagagaggatgagtatctcgtgaatatgcaacatacagttataccttcctggtaccaacctgaaggatatatgaaggctatggcaactttgattgaaaacgaatcgacaaaatttaaagaaccccaagaggttattatatttttcagtgctcatggagttactctggcatatgttgaagaagctggtgatccatagtaagcaacaatgcgagagtgtatcgatcttatcatggaagaact

SEQ ID NO: 282386 - DNA, 598 bp, Zea mays
  unsure (1)..(598): unsure at all n locations
ttcatagctgtcgaaacagtatgttgaaatgaggttggagaatgatgcatcaacgtctgaacacaagaagggaggaaaattgtccgatgagactgcagatttccaagacaatgtcagtagaaaaaaacagaaagcaaacattgcttctttaaataattgcgtaagtatggacaatttaactgtcaatcctattgatcctgtagttctcaatgagggagagcagacaggtacagcaatcactgagcaggttcctgttcctttgaatctagtgcttgagaataacaatgacaaggaccaaggtgagcaaagcagtgaaacttcagaacaacttatgtccaaagaaccacaaaaaagggacatcaaaaggcaaaagagaacatggtctcatacatgcaagtttgatgatgatgaccttctgatgacagctgtaatatataagctgacagcacgttacaggaactcttttcatcggaagctcagaaataaattcggtttcaggcgtcttccaacatactcgctggagaatgaagataaaggtgacaggaagaagattctngagaagctaggacggtgttgaacaagttacttgaaatgggca

SEQ ID NO: 282387 - DNA, 385 bp, Zea mays
ttgtcttccctctcccttatctccctccagccgcgcctgctcctttccggcgccttcctctccatcttcttggcgctcggccgcccctctctggtctccagcgcccagcgcgcgcgcctggctagccccagctcggaccgagccatttccgcccgtccacgttcctccctgctcgcgcccatctccctgagctccgtgcgcgcgtgctccctacccagccagcgctcctcccctccccatccatggccatcgcgcccttcttccctgcccctcccatggcgcgccccctgcttccccaagccgcgcgctccttcctgctgccgcgtccatggcgcccagcccgagccctcttccatggtcggtgtcctctgctttcctttctcag

SEQ ID NO: 282388 - DNA, 634 bp, Zea mays
tgcactagccgccgcgccgctggggcgtcgtggcggcggtcgtcgcactcgtcctcctcgcctgcctccagatccagtaccaccacctcaaggtggatctcggcaaggccggctttgcctctgccacgcaagagaataacgcgatccgcagccgcaatcgcattcgctggggccccgacaggaacggcgcccactccttgccgcgcgggattgtccaccgccactccgacatgtccctccgcccgctctgggaggacgacactgcttccacccacaagaataaaaatggtgaccacagtgctctcctcgccatggcagtcggcatctcccaaataaaaaacattgacactatggcccgtaaggttctgaaggaaaactatgcagtcatgctcttccattatgatggaaatgtagatggatggcgtcatcttgagtggagtgataaggccatacacatccttgctcacaaccaaacaaaatggtggtttgctaagccgtttctggattctgatggcatggctatctaaaattcatttttctatgggatgaagaccttggaagggaaaaccttaaccctagaagatatcttgaaataatgggggaccaaggcttggaaataacacaaccctggttt

SEQ ID NO: 282389 - DNA, 472 bp, Zea mays
ttgtctttggacgcgtgggcacgacacgctgctccccaccactaaccgcactcgattgagcgccatgctgcagctccagccccctgggttcctgcccatcccgcgccggcgcgtcaccgcccgccggcgtcgcgcccgccctgtcatcgccttcaactcccagtggaagatccccgacgtcgacacagatgcggtgcgggagcgagtgcggtcttggatgtctctggcgcggggcgcgatcgccgaccgcggggcgcgccgcgcgggagggagggaggcacaaagaggagcccgagggtgggaagaagaagcagcggaaggaggtgaccgtggaggagcaggcgttcgttgcggtgccagaggtcaccgtggagccgcgggtgccccagggttggctctcgctggacgccgtcgtctccatcgagcagttcgccaggttggatgggttgacggggagacaggtgcagaggat

SEQ ID NO: 282390 - DNA, 462 bp, Zea mays
tttgtttttggacgcgtgggtatggcgagcctcaacgtgctgctcctccctgagccgggctccggccacctcatgtcgctcatcgaagccgggaagcgcctgctgggccacggcgcgggcggcggggacggcctgggccgggagttcacggtgaccgtcctcgtcgtgcagccgccgacgccggagtcggccgccgaggtgggcgcgcacgtccggcgcgtcgcggagtccggcattgctggcgtccggttccaccacctcccggccgtggagcccccggcggactgcgccggcaacctgcaggagttcaagtcgcggtacctggagctccacaggccgcacgtggaggccgcggcgcgggagctcggcgccgcggcgctcgtggtcgacttcttcgccaccgccgtgctggacgtggcgcgcggtctcgccgtgccggcgtacgtctacttcacctccacg

SEQ ID NO: 282391 - DNA, 384 bp, Zea mays
gctcgctatcgctcccttgctggctgcggtgcgggtgcgccgccgtcgacgagggagtccctggctccctccctccgggttcgaattcgggttgcttccttagggttcagtggcagtacatagcatggccctaaagctcggctggaggagaggaggaggaggctggcttgcgcttccattggggaatcggaccaccgcgtcttcctccgcatgcagcagctccaacttgttcgtcggcggtctttcctacgacactaacgagacagctctcaaggatgttttctctcaatgtggtgatgttattgcggcgaaggttatatgccatcccacaagcggcaagtcgaaaggatttggttttgtcaagttttcttcgcaaaaccaagc

SEQ ID NO: 282392 - DNA, 808 bp, Zea mays
tttggatgtccaggcacgagaggcgagctgtccgatcgataccgtggtggtggggagagtgagtgtgtgagagagagagtgagagagtgagcgtgcgagcgagagagatggccgccgcggaggtagtcgtcgccgtcgtgaccttgcttctcgggctaacgtcgtgcatggcagagaggtcggtatggagggaggaggaccggcgcgtccgaggagaggtgacgtatgagcagagggccctggtgctggacggcgccaggaggatgctgttcgccggggagatgcactacccaaggagcacgccggagatgtggccaaaactcattgctaaagcaaaggagggcgggcttgacgtgatacagacctacgtattctggaacgttcatgagcctatccagggccagtacaacttcgagggaagatatgatcttgtcaggttcatcaaggaaattcaagctcagggtctctacgtaagcctcaggatcggtcccttcatagagtctgaatggaaatatggaggatttccattttggctacatgatgtcccaaacattaccttccgaagtgataacgaaccctttaagcaacacatgcaaagatttgttacagatatagtaaatatgatgaaacatgaaggactttactacccacaaggaggtcccattataacttctcagattgagaacgaataccaaatggttgagcctgcatttggctcaagtgggcaacgttatgtcagttgggcagctgcaatggctgtagaccttcaaacaggtgttccctggacgatgttgcaagcaaacgatgc

SEQ ID NO: 282393 - DNA, 578 bp, Zea mays
gtcgcgtatgttctcgtctataccccacagccggccaccccccgcagccaggcaagtgaccgttgcatcctcttccccttccccttccagagccctcttctatggaggagtaaattcatccgtccatccaccgacccagagccctcgatcccctaaaaaaaacccagagccctccattccacagccatcctcccctctgcagtgcactgctgcttgaccaagcaacaacaagaagctaccagcgcgctacctgcagattgcagcacacgcaagtgagagggcaggcaactccccggacgcaaggagttagagggcaagcatggcttcccttggtgacataggcctcgccgcgggtctcaacgtattgaccgccgttgccttcttgctcgcatttgcattccttcggctgcagccaatcaacgacagggtctactttcctaaatggtacctcaggggaatgagagacaatccaatcgtatctggtgcagctgtgcaaaagtttgttaacttagacgccagatcctacttgaagtttttaaactggatgccagctgctctcaagatgccccaggatgagc

SEQ ID NO: 282394 - DNA, 684 bp, Zea mays
gtgctataagcaagctaaaagtccttggtagtggttttgaagtaatttctgttgggaggagaaagcttgtgcgttcagttcctaccgaattaaataaagaccacagtgggatacttgggctagctcaggctgatggctatgtcacggtggaacaagttgaaaaggaattctcatggtctactgggcgtgcgattgatgctcttgaaactttgctcaaggaggggcttgctatgatcgacgatggccacagggatggcaagcgaagatattggttcccatgcgtcactgtcagctccgacacagcagctgttgaagtcaagtcataacctgtaagtaaaatgtcgattccacagtgtgttcacgtccccattccatgaggatgaggtggaaaccagtggcacggatgtgtgtaatgattggtatgttaagaattcagttggaacatcacactttgaatatgaaaggtggcatgattcttatttaggggcagttcgtttcttccggaacggatgcatggatggaacaattcctagctggtttggctctctaatttgtataggttttgatcagctggaatgattcctggtccattcctagacaaacgaaacaaggccttagaattcaggtttctttttttttgtacaatatttagagttattataattctggccttctggctggcag

SEQ ID NO: 282395 - DNA, 615 bp, Zea mays
cccacgcgtccggaaaaaaaggggactcgctctcgccaactcccctgctccacagccacaagcccactcggatcccaatccgagccctactcgtcgtcgacgacgcgacggccccgtttgcgaagccagccagccagccagccagccatcgccgtggaccggggagcccggagggatggaccccgagaagcgcggctacgagctccaaaattttgtggcgcatgatgcggaagttaggtccctgtctattggcaaaaagtctaggcgtgtgttcatcaccggtggcaatgatcgcaaggtcaaactgtgggccattggcaagcaaactccacttctgaccttgtccggccacacaagtgcggtggaggctgtgcagtttgattcagcagaggtgcttgtgcttgctggctcgtcaaatggttccatcaagctctgggacttggaagaagctaaagttgtgcggtctctcactgggcacaggtcaagttgcactgctggtgaattccatccatttggcgagttttttgcatctggttcgtcagatacagacctgaagatatgggacataaagaaaaaaggatacatacacacatataagggtcacagaggagcaat

SEQ ID NO: 282396 - DNA, 475 bp, Zea mays
tctctcacgcgtccggaactttctgcctgacaaaaggactcccgtggagccattcgttgtcatcagctggtctgttagtgcaagtcatagtcgtatcagggatagcgcactgagctgaattccttttttcttttgaggactggacgcagacgcacacatatttcgtgcagcctggctgggcgctggaatggccatggccatccacacgtggttaggggcctaggcgaggagctgggcggcgtggcaaacttggcaggccgccatggtcgcgtggaattccaagaaaacggggttttgtgtgatgtgaggctggaatggaacctggggggtcagcagcacatgtttccagtctattgcactccctctgaccgaaagggcgctgcactgcaattttattttactacctttgttcaaaaataatgggcgtctccttttcagatgtcaatcagtttcaactttgattagatttacgctc

SEQ ID NO: 282397 - DNA, 508 bp, Zea mays
ctcaatcatatgtgaaggaggctgcaagagtaacaaaaattgttgcattacttgacaagactggcaaaccaagtaaatcggcacctcgatttcttaaatccaagcagaattctgttatacaggtcacactagatggagctgtctgtgttcaggaattctccaagagccgagctcttgggagggcatacttgaggtcggctgggcgcaccattgctgttggcgttgttaatcggataattggccaagatcagaactagaagacctactacactcttctgaaatctgaaccaaatccttgtcgttgccttgtcgttgctacggttatactctacgtagtagacactggcaacatgatgttgggaaattttgtttagcagctgcttatagccattccattgtattgagttatatgtgtaagatagtagtcacagctgagttgtgttctaacccccggcttttgcaaaaatgctattgaatccttgcgagatatatatgctgactacttgtg

SEQ ID NO: 282398 - DNA, 673 bp, Zea mays
ttctttcgtccggccgcggtaaacgctcctcccccaccctgtcgcccgcggactgcgatgacgagggacccctgcgcggcctcttcgtgctatcccgcgaccccgagtgcccaccgcggctgctggtggtgcagccgcgcctccgccccggaagcctcctcgagtccaagctcgccgaggcactcaacctcgccaactccctcgaggagcgccgcgacggcttctaccacagcgagttcggcgccaagggcgcgccgccgcacctcgtcgtccagaaccccgcctcccgcggtcgctcacacgctgatacatattttgggcctggaactgtggataatgtcaagtgctacctgagtgcaacggaatcagaggaagatgtggatgcagtttttgtcaatgcgattctctctggaatccaacagagaaacttggaggttgcctggggattctcgggtggggctcgcgttgggcttataattgaaatattcaatgctcatgctgaaacaagagaagcgaagttacagtcagagttggcagctctcatgtacatgaagactaggcctgtccgtgtacgtggcccaggtggacgactaacttttggtccaagtggggaggctgaggttgtcagtgcaagagggagaggtagtgggggaggggggattcatagctggct

SEQ ID NO: 282399 - DNA, 1340 bp, Zea mays
ttcatggtggtagtcaaattcagtgcactggagtgagccatgatggcaacattctcatcactggtggtgatgatggagttgttgcagtgtggagatttgtgaaggatggcatccgccgtctcctgagaatggagaaggctttgtgtgctcacacgggcaagataacttgcgtctctgtcagccaaccttactcattaattgtctcaggctctgatgactgttctgttatcttgtgggacctgacaagcctagtctttgtgaagcagctaccaaggttcccggcatcagtatccgcgctacatgtgaacagcctcactggtgagattctgactggtgctggtgttctttttgctgtttggagcatcaatggggactgccttgctgtggtgaacacctcccagcttccttctgacctcatcttgtctgtgacaagcgcgacacactcagactggcaggacacaaactggtacgtgacaggccatcaaagcggcgcggttaaggtatggaagatgttgcactgctcgtctgatgaagcagtaaatagcaagagcaaatcacctgcggtatcgtctggtgggcttagcctgaacggccaagcaccagagtataggctacttctgcagaaggtgctcaagtcacacaaacaccctgtcactgccctttgtataccaccggacttgaagcagcttctgagtggcgatggcagcggtcacttgctctcatggtcattgaaagacgacagtttcaagggttcatagcacagagaaatatagggattcagctgcacatatagagaaacactggttaaattgtaccactgatttcttcctcgtccagaactgagcatgggcgtgcattgacaaaagatctcggatcagcaagcttctacatggtatatgaaatgttcccttgatgtcccatgcctgggccatacagcagtccgggcaggagagagaatacaacagacacaattggaaggatgaagtggacgtggatgcgccgctgcgctgacatcataatcttatactgtgaattatgagatggttgtaccttctcttgtttttttgaggagaaaaggattcatgtgggctgtaggtgccattgtttgtaaagtctatacagggtaattttggtggtgccggttgaggtggctgatggtgtagtgtctcgatgttttgttcggggttgtgggagcaaggaaagaggtattagtttcattttctccccccccctctggaggctagtttgggagccccaaaaccgaaagtgattggatggactaaaagcttctccatattcaaaattgaataagaacggaattttagtcactttaatcctcc

SEQ ID NO: 282400 - DNA, 445 bp, Zea mays
gtaaccctcctttgcctcagatacctgcccactacttgagaataaaggatgggagcatacccgcatcttccatccaaaagtacattatgcagaagctcagccttgtaagtgaatccgcggctgaaataagctgctgcgggcagacagtggggaaccttgggcaacccgtgcgcaacctggtggaccggtggctgagggttggcccggcacgcccgctgcacaccgtgataggctcctccgggggagattacgtgatggtgataagctatgggcggccgaagtctgcgtcctcttgaaaacgcgcccgtcgtcaaccatcagggaagagttcttttttgagtgtcatatactcgatagcgttagcgtagcctgctgctcatcctctcaccgatgtttctaagactatgcttatctgttctttaacaaatcgcctgtttggttgctc

SEQ ID NO: 282401 - DNA, 694 bp, Zea mays
tcgtacttcgcgccggcgacccgcatcgccgacttggaccgtggcgtcttccgtggcgtgctggggggccgcaccgccggcgccggcggacccgtcctcatctaccccatgaacaagcacaagtgggacccgaggagctcggcggtgaccccggacgaggaggtgttctacctggcggcgttcctgcggtcggcgctgccgggcgcgccggagagcctggaggcgctggcgcggcagaaccagcggatcctcgacttctgcgcgggcgcgggcatcggcgccaagcagtacctgccgggccacaaggcgcggcacgagtgggcggagcacttcggcgccgcgaggtgggaccggttcgcgaggctcaaggccgagttcgacccgcgggccatcctggcggcggggcagggcatcttcaggccgcccggctcgccggcgctcgcggccgactcgtaacgtaatccagctgcttatactaattattaggcgcgtttagtgtaaggtagaggtactagctacagcagtaaccatacaggattgtttagttagctccggttggttcatgtacaaatgtggggttgttaatcgcgtgctctgccatggctgctgtgatcggttctgtacaggggatgaggggagccaaatatccccgtggcagaatcgattcttcctataaagaaaaaatatctatggt

SEQ ID NO: 282402 - DNA, 598 bp, Zea mays
  unsure (1)..(598): unsure at all n locations
tagtatagctgcacaaaaagctgttgttaactacagtactgagaacttagatgctccaatcttatccatagagtaggctgctaaaaggtgcaggtatttcgaaaccccgccgcttctgcttcccctgaaaattggtgatttctcataaggaatggcagacgcagatcagaaaatctattctgaggttaaactcaattctcagtactacttttacatggaaacacaagctgctctggcaatacccgatgaggataactgcatggtagtgtatagctcaagccaatgccctgagacagcacagaatgtcattgcaaagtgccttggtttaccttgtcacaacgttcgtgttattaccagaagagttggtggtggatttggaggaaaggctgttagatcattacctgtggcaactgcttgtgcacttgcagcatttaagttgcgccgacctgtccgtatgtatcttgaccgcaagactgacatgatagtgactggaggtcggcatcccatgaaaatatgctattcagcgngattcacaccagatgggacaatcactgctttgcatataggtttgatcataaatgcangaatgacaaaagat

SEQ ID NO: 282403 - DNA, 819 bp, Zea mays
gattggtgtaattcctgccacattagatccaaaccgtttaattgctaacaacgcctggtccctttcagcggctgaaagagaccaggcgttgttatcaattggtgtaattcctgccacattagatccaaaccgtttaattgattattcttacctattgaagttatccagcttagctgataatctagcactactgggccatacagtccttgaggatcgcgctaatgcttcaatagggcttgaacagggcagtgaacatgctatagacttttggaacatcagtgaaaatgatgaattctgctatggtggggctgatgtgaagtccgtgctctgtcttcattacaagctttagcatctagagaaaatcaatcggtattcatggtatgtttccagtgtgaaaagacagtttgcaaagcttgctgtgctgggaaaggggccttccttttgcttaacacctacagggagttgaagatatatggtgggagtcaaagtggtggctactcagcactcacagatagttttgtgtgcaaatcgcgctgcagcgaaattatcaaacgtgcattgtatgtggattatgtccgggttcttcatagtttgcgcagaaaagatcgttcagagaaagcagcactgagtgctgtgaatcaggtctgccaactggagtacaagaaagcatctgatttatctcaaagtatttcaattcggtcagagacaattgaagcagatccttgatggcgaagaatcccttgcagaatttccatatgcaaactttttacaaatggttgagactgccaatgactctgaaccactgctttcaatactggc

SEQ ID NO: 282404 - DNA, 780 bp, Zea mays
aactaccacgcgtccgccctcctccggtctcgactgccatggccgccgggcgggccttccttggcgcgccgtgctcctccctcgccgccggcgcccgttgccttgccttcgcttcccctttgccccggaacctcacccccgcgctccgctgcggcgttcgcggtcgctgcatcgcctccgcctcctcgtcccctgactcgccccccttgccggagccctacgtgctcaccactcctctctactacgtcaacgctccgccgcatatgggaagcgcctacaccaccatcgcagcggacgccatcgcccgcttccagaggttgctagagaagaatgttatatttattaccggaacagatgaacacggtgagaaaatatctgcttccgcagaggccagtggtagaaacccaaaggagcattgtgatgcaatttcaagttcatataggacgctctgggctgacttagacatagaatatgacaagtctattcgcacaacggatcgtaagcatgaggctgttgtgaacgaattctattccagagtgttaaacaatggcgacatatatagagctgattatgaaggactttattgtgtgagctgtgaagagtacaaggatgaaaaagagctattggagaacaattgttgccctgtgcatctgaagccttgtgttgaaagaaaagaagataactatttctttgccttgtcaaagtaccaacataaattggaagggctactgaccagaaatcctgattttgtaaggccatcatatcgcttgaacgaggtcc

SEQ ID NO: 282405 - DNA, 449 bp, Zea mays
ttctgtctggccgcccacttctctcccacctcccctccactcttttgcttgtcgcggggttagaatcccatggcgctgtcggccgagatccgcttcggccaccagatccccctatcccactgcgacactgactcctacgaggaggaggaagaggaggaaggagaggaagaggaagacgaggaggaggagttcgagggggtaggggaggcggaggagatggatgaggtgacggtttcgtctccgctgatgctgccggcaacggaggccaggggagggagtgtccgtggtcgagatggtgatgggggcgcttcggaggtcgctcatgttgtgcagcaacagcgccggcgccggcgccggcgtgcgcgagccggagcaggaggaggacggtgtgactcccccgggtggtatgcaaataggggggccaacggatgtgcggcacgtctcacacg

SEQ ID NO: 282406 - DNA, 497 bp, Zea mays
ttcgtctgatgaaaagagccggaagcgagaaaaaaatcaataagggaggcgatgctccggctggccggatccttccctcgtctcccccctcccgtgcgccctatctccccagcccccgccccgtcccagctctcactccgccgcgtcctcctcctcctctcctccgccggcttcagccccacgccctgttacagcagcccttccttcgcagcgatggcggcggcggcgccgccggtggccaagaaggtcccgcggcagctcgttgagcacggcgacgtccgcgtcgacaactactactggctccgcgacgactctcgatccgacccggacgtcctcgcgcacctgcgcgccgagaacgactacacctgcgccgtcatgtccggtcagtcgggaacttgggatctactcacatgcgagaatgccttagcgtgctattaggcattagcttgagatctacccacatgcgatctattgttttgacatgacaattgacaatc

SEQ ID NO: 282407 - DNA, 894 bp, Zea mays
ttgtcttgaatcttgcttttctgaattagatttgtttgagtgtcttcctacatgttggacaatgagtttcaagttgatagaagatgtacaagaatttgattcaaaggtgcaagtgttgaacttcatttcagttcttcttgaacatgcgggggacaaggttattccatttgcatgtcagctatcacaattttttcagatgatatggaatgaatctgcgggtgaaagcttgctacagatacaattactaacagcacttagaacttttgtttcttcgcttggattccagtcacctctttcttaccacatgcttattcctatactgcaaagtggtatcaatattgacagccctgatgctcttaatcttcttgaggacagtgttttgttgtgggaagcaaccctttcaaatgccccttccattgtacctcaacttctggatttattcccttaccttgtgggcatcatgaatagaagctttgaccatctggaggtcacaatgaaaataattgaggattacattatttttggcggttcagaatttttgaaaagccatggtgcaagcctagctaacatcattgatactattgttggaaatgtcaatgataaaggacttctcactgcacttcctattgttgatcttcttattcagatatttcctctggaagctccaccattgatatccagtgctcttcagaaacttaccttcatttcgttgagtcaagatgatggccaaaacccgtctaggacaactgtccgagcatcctctggggcgattcttgctaggcttctggtgatgaatacaaacttttcggcacaactattatcagagcctgctcttttggcaagcatccaacaagcagggatttctgtgaacaataatctgcttttttctttggt

SEQ ID NO: 282408 - DNA, 669 bp, Zea mays
tttgttttcccacgcgtccgctcctggccatacgccataggaagaacaggacacggacggaggtgagggcaccactcggaaatcctgccatcctgctagctggaggggctgtagctggacagtgactgagagtgagaggcagcagcggtccggtggctggcctccttgctggatgctcgccgtcagggaggtacgacgagcacgaccgcctctccctcccgggagcgttccctctccggcgaggtccctcctccgggaaatgcggcggggcagttacaaatgacatcttcttcttcttctccttcgtaacctgctgcaaaggagggcaacctcctgcatttccgggttctctttccacgagaagggaagggggaaccggaggatgccggccaagtacctgggggcgttggcggaggacaggcgcccggatctctatcgccaggtgggctgcgtcaccgggatcttgcaggccttcgaccgccgccaccatctcgcctcctcccacaagaggctcctccccccaacaggccatgcacccagcaatccaagcaaagggggagaatgcacgagatattcacccaggttgttctggagaagaactcgagtaaaacttgggctgatagccaaagagcaccagcaacagaactatctcaaacctcatattcatca

SEQ ID NO: 282409 - DNA, 491 bp, Zea mays
ttgtattctcacgcgtacgcccacgcctccgcacagacgagccgacacaagcagttagctatagctgctagcctgatcgccaatggccaccgccggcagcaagcaaggaggaggctcgtccaagccgcctgcggctggtcaggagttggacccgaggtacgagtgggaggagaacgccagcagcttcatcctccgcatccacctctcaggcttcaggaaacaagatttcagggtgcaagtcgacggcgccggccgcctcaccgtccgtggccagcgctccgacgccgccgccaacgccaggcactcccgcttcaacaaggtcttccagctgccctccacctccaacctcgacgacatcgccggccgcttcgaccttggagtcctcacgctcaccgtgcccaagcgcctgcccgcgcccgcaaaggaagaccagcagcaggccaagaagcccgaggatgccgctgccgctgccgccaccaagcaggtggcgg

SEQ ID NO: 282410 - DNA, 603 bp, Zea mays
tcgatagaagtgaggcgagaaaaacagcaagccttagtggtccactttcactgccaactcgtgcttctgcaaatagtctgtcagctcctattcgatcttcaggaggttttgtagattcatcaggtgacaagtccaaacgaagtgtagtagagattaaaggccgcttttcagttacatctgagaatgtcgatcttgcaaaggttcaggaaggtccacttagtagcctctcacggaaatcaccagagggttcactgctaagaaaatctgccagcactggtgattgtttgattaatactaagctgatgcgtaacgctaatcagctgaaggaattctgcaatagttctgtatcatcttcagtattaattccccaccttaacaaccttgtgcaacagaccatgtttcagcaggatgtaatcatgaacctacttagtaacttgcaacaggatgagaaagttgatagaacacagcctggaatatcttctcaagtccgaacgatggagaatggtaaagtggctgatacagctaactctgagaaggaaccgtcattacttggtaaaatttcaagattacagtctaggatgatacactgactgatgactattg

SEQ ID NO: 282411 - DNA, 471 bp, Zea mays
tgaatctcctcagaggtctttcagcttcactaattgtttggatagtttatctggacatcatgaggccatttgctgaatcaactttgttagggagtttgacacacggacaaatacctaacagtcagtggatttttgactcacctgctaactctgatgtggagtctaaactgagaaattatctgcttgagttgggaagcgacaaaattttaggaatacaagtctgcgcatataaagatggaaaggtcataatagatactgctgctggtatgctggggaagtatgatccccgacctgttcaacctgattctctttttcctgttttctcagcgactaagggtatcactgctgggatggtacattggcttgtggacaaagggaagctgaagttccaggaaacagttgtcacattttgccgaatttggaactaactgaaggagttaaaaaggtcatcatcttctaatcacacaatct

SEQ ID NO: 282412 - DNA, 556 bp, Zea mays
tcacacgcagaggccgagggaaggccgacatgaaggtttactccttgcccggccagattttcaaccctacggaggagagggagcctctcaggattatctacaagtcactgtccaagcagatcccctccagtgagatggctgaatactggtctgatggagcatggtatgtaagcctcctgagagagcaaggaaggcatatgaaaggaagcaaaagcggcagcagcaagtgaggatgggtaccccaatcaagtattgtgcagtgagaaaagataataaacctgaaagttccaagaacccaggcattatcgattccaaggcaaagagaagagctgattacagtgacgacgacgaccatgacttcattgtgaaaatgaagagatccaggggatgacatttacttgtaatttttttattaattatatcaagtacagataccaaaaagacatgctttatataagctagggtcctaattaattaaaccctgcaactgtacccgcatgcatcttgaatagatatactgaggtttgcaagtttatgctgttgaattgaattgtaa

SEQ ID NO: 282413 - DNA, 469 bp, Zea mays
gtgccagcttgctccatcaagccgagagcccactcttctttctcacctcgcatcgcactccctcaatctctcgtctctatcgccgcatcgcttctctgccggagctccaacaacctcgcctcgcgcagcactccgctgaccctccctgactccctccctgccgctgggatggccgggaaacgagttacgggccgcgatgggcaagacgagggcggcgccaaggtcgggctcccggcgatggacctctccctcgcgttcccgcaggccacacctgcctccattttcccgccgtccgcttcggattattaccagtctgatgatttgctgaccagtgaagagcgctctatcaggatgaaggtcaggggtattatggaaaaagaaattgctcccattatgtcagcgtactgggaaaaggcagagtttccattaaatgccattcctaaacttgcaagccttggtgttgctggtg

SEQ ID NO: 282414 - DNA, 644 bp, Zea mays
tgataaatgatatgttccatcacttcttgaggactgttaattctgggcattcagaagccgtcatatgctgcatggaaacaataatgagattggtaattgaggagagtgaggatgtccaaccacagattgcttcatgtctactccaaaatgttagaaaagaagaaaaggaatcttcttcagcttcctttgagcttgctgaaaaagtgataggcacatgccgcgagaaacttaagccagtctttctgcaatcactaaaaggcacttccttgagcgaatacagccaaatcgtcgcatcggtttgtgaagatgtttcagatgacagggaagataacaatgctgatccttctgggaaggacacggtggatgatggcaagctctctgaaaggactatttctgatgaattgcctcaggaatcttcaaaggcggagcaagatgttagccgtcctgaacaagacggtacttgtatgaatggtaatacaggtactgcgattagcagtggtgctaccctaccagatactagcgaatctgatcaaggaccaccaaaagagaagactgaacaaccttgctatgctgatgacataacagataccgatcagttgaaatctaaccacaatgaaggtgcggagttcgatactgcaaagcct

SEQ ID NO: 282415 - DNA, 905 bp, Zea mays
  unsure (1)..(905): unsure at all n locations
aattatatctggggaggaactgctaatggactctgaattgaagaacttgaagttgcatgataacttggggaatgaaattccccataacattattgctatttcagatatgaatggtgaagctcccaagagaatggagtttgattgttctaccggagggccatcaggagaaagcacttcatatcaatttaatgaaaataactggatttctagtgagcaaactgcaaataattatttctcaagaacttccagtagtgttgttgttcctactgagtggggaaggcccaatgcaccactttggggtggcagggtcgttggacggcggcaaattagatacattagaggaagctcttgtctatctactgatgaatataatgcttttatgaatatatttgagagaggctctcttctctactgcaatatgtcctttgatgcactgctaagtgtgcgaaagcaactcgaagaatttggattcccttgcaaagctgtcaatgatggtctatggctacagatgcttctgtgtcacagggtgcaagcgatagttgctgacacttgcaggaactgttgccttacgaataattcttgtgcttgcaagcaagcatatgtgagctcacatacacaccactacaggcaggaacatgaccggagcagtgtttccggcaccataggtaatgtctaccttgcggatgcccagggcgatgggaatggtgtacttgggcctgtccgtgttaacgtaagaggagcagttgatggccttgccggtattgggagagggaactcaaatgtgcctggtgcagcctgngctcctacacgttacgtcttctcacgtgtcccttacgggctcggttcaagaaatgcccagcaatttgccaatgatgaatcagaacctagaattgaccgcaatggaa

SEQ ID NO: 282416 - DNA, 673 bp, Zea mays
tcggacgcgtgggcggacgcgtgggcggacgcgtgggggagggggggaaggggcggcggcgggcccaccatggaggggtgggggaggggcggcggcggctggagaaggcttgataccatgtgagaggagagagttacagttgctaaaccctaaccctaacagctacagtgataaagccccctagtgggctgtgggctaggcccatatacacagatagctaacagtttctatcctgaaatcttaccgttgtctgttatggtggatgccagagcccttgctctggctccttttgttgagagagggctgaaatggttcacagtcaagttcaacttcaagtcagaagggaaggcttttatgactattgtagggttgtgctttgctgttgctgctctcatgttctttggattaacaatactttgggcatagaacatctgctttcctgacacagttaggaatcttgaagagatgctgtggattccaatcagtaacgcagtgatcacactctactgaaaaatctcacctaatattttcagtgtggttgtccatagcctgcatgaatatgtatcttcatggttcgttagtgatcgcaaacatcttgagtatacatatccctgtaaggtcctgttggaccgtgtgcagtcatgacacattttcaaaacaaaacatgtttgct

SEQ ID NO: 282417 - DNA, 538 bp, Zea mays
aaaggcctttcttttgccttccgcattactgatgcagcaaccccagcgtcaaatgaaggtcaaggatggcgaagaaattccaatgtgcctcaagaagggtatggaacagcaagtgtcatacctgaccaaggaattttcctagccgcgtctgtttaccgtcctgtttttgagtttatgaataaaatagggttgatgttgcctcagaagtactcacaacttgggagtgatggcttattggcttttgtgaataactttctgaaggagcacttcttgccagcaatatttgtagattaccgaaaatgcgttcagcaggccatatctagtccagcagcatttagaccacgtgtacatgcaacatcagcatatagttcatcggtggaacttggacgccctgtgcttcaagggcttctcgccattgatataatagccaaagaggttcttggatgggttcaattgatgccaaactatgcgactgagcttgtggagtatgtacgcacatttttagaacgtgctcatgagagatgtcgtgcatcatata

SEQ ID NO: 282418 - DNA, 552 bp, Zea mays
ttttattattgacactaaactctactatgcagttacacttttactgggacaggaaatggttattttgcaccagcattatagaatcttcaagtacgctagtcaacttatatgatgtactgtcaagatgtgaatgacttagagctgatagtactacagatgaatattggttaccgtgctgatgctgtcttctctttgctctgagactaccatacggaaaaaatattatgtgcatgctctgactgtatgggtactgttccacatagattgaaatgcagatgtaattctcatgctatgcagatggtatacaaaattgaagagactggtgcagttcttgtagagaggctgcatggccataaggcctacttgtcacctttgaaggataatctattaggccagcttgccgtttagtctgaccccacggcgaacaagagtgatgcatccaaatatctggctggtcatctcccgtttgagattgatatggttgcatactcattgtgttactttggtggtggcaaagatgaggaagacgaactagaagcttatcgccaaatt

SEQ ID NO: 282419 - DNA, 648 bp, Zea mays
gctggtgccgccccggcggaattgggtggacccacgcggctttctgtcgtctcccatggaacgggtcatctccacgcccgccgcctccccgacccaaacccgtatccggggacccctttccctcccctctcggctgcgctgccggcccggcgcgatcgcgctggcgtcgccgctgcgccacgaggctctctccgccgcaccggaggaggcgcggagccagccgccgccaccggctgccgtcgggagtctgttcccaaaggcttgcactgctgcccttttcctattgatgacagctgttactagttccctgcactcgagccttcctgcctatgcatcgatgcaaccagttgccaaaactggtgtaggaggaggtctcttcacgacagagatactaagcagtggctgggctggttttttagctgggtgcttacataccttgtctgggccagaccatctggctgccctggcgccactgtcaattgggagatccagacttgagagcggactggttggcgccctttggggctgtggccatgatgcagggcaagtcattttcggcctgctcttcttgctactcaaggaccggttgcacatcgaggtgttccgtgcatggggaacaagagttgtaggcctgacccttctgatcat

SEQ ID NO: 282420 - DNA, 581 bp, Zea mays
  unsure (1)..(581): unsure at all n locations
tttccacgcgtccgggagcagaagacccctcaattgctggcatggttctggatagtgctttcgctaacttatatgacttaatgatggagcttgtagaagtttacaaaatacgagttcctaagttcacggttaagatggctgttcagtacatgcgatgcgtcattcagagaagagctaaatttgacataatggatcttaatgttgtccagtttgcacccaagacgtttattcctgcactatttggacatgcttcaaatgatatgtttattcagcctcatcacacagaccatattcatcaggcttatgcgggggataaaaatctaatcaaatttgagggtgatcacaattcgccaagaccccagttttattacgactctgtttcaatattcttctacaacgttcttcacccacctcagtttccttcaacctgcacacataaacttgataagtattataaccctggtgcttttaagggtgctgctggtactaatgagagcttatngtatgagatcatcaatggactacgggcagctggcactgatgcaggangttcatcagctgctacagctagttcacgatgc

SEQ ID NO: 282421 - DNA, 476 bp, Zea mays
tttacgcgtccgctctgaaaactaggaaccccactccccctcccgaaactaccgccgccgccgctgccgccgcgatccaggtctcccgcggtcccgccccgcctgagctctcgacctctcctgtcggcttgtccgtgcagcgccggagggcgttccagggcgtgagaatggagacggggggcagcaagggcggccgtggcgctctggtggtcctggaaggcctggaccggagcgggaaaacttcgcagtgtgcccggctgctgtccttcctcaaaggcaaaggctacaatgccgaaggatggaggttccccgatagggccaccagtgtggggcagatgatctctgcctacctcgcgaacgattcgcagcttgatgacaggacgattcatctgctcttcagcgccaaccgctgggagaaaagagctttgatggagagcatgctacttagtggaactactctcattgtagaccgttac

SEQ ID NO: 282422 - DNA, 436 bp, Zea mays
ctctctctgagaactaggaaccccactcccctcccgagactgccgccgccgccgctgccgccgcgatccaggtctcccgccccgcctgagatctcgacctcttcactcctcgccgctactgctcgccctcccgcgtatcctcgtatcagctctcaggttttcagcctgatcaaaccggtgtacccagccgtgcatgactgcattggttcggctcgccggaagagcagcttcgcggagcagggtcggcatagcggcggcggcggcaccccctcctgtcggcttgtccgtgcagcgccggagggcgttccagggcgtgagaattggagacgggggggaagcaaggtcggccgtggcgttctggtggtcctggaaggctgggaccggagcgggaaaatttcgcagtgtgcccggctgctgtccttcctcaaaggcaaag

SEQ ID NO: 282423 - DNA, 680 bp, Zea mays
  unsure (1)..(680): unsure at all n locations
caatctttgaggaggagagcgaacagtcctgttcacactgcctcaccatatgattccccacacctgccaataccaaatgggagcattagacatgaattctgttagaaatacaggtgatgcgagtcccaggatagcaggtcttattggatatgatcgaatgccaaacccatttactccgcccaatggcagcatactatatagagttggtgggcatgatgttcctgcagctatggagaacactagtgcttttggtcctaggtctaatccaactgctgctcagtatgttcagccttttattgctcctgaatcaatccagcatcaacctggagctcccttgagggaggttcatcctgaaagagcataccctgaacccatgccgtcgtcatatgctgatggcaaaggagctggttctgcattgcccctcaccgaccaattatccaggttggatacaaacacaatgaagaaacctgaaggtccagatgatgttaactcaactcaaaatgtgaatgaaacaactcctttgcatgctgtggatgaaccaagtaccttaccccaccatgttgtagttgtacatgaagttgatactaagcaggggaagccaaccgaacatgaaagcaggcaaaagcaacatgaagctggngctacagcactgcangaatgtggngatatttcagaggata

SEQ ID NO: 282424 - DNA, 660 bp, Zea mays
ctgaggcatgaggcggtgggcgtgttcctgacacactgcgggtggaactcaaccatggagagcttgtgcgtcggggtgccgatgctgtgctggcccttcttcgcggagcagcagaccaactgccggtacacgtgcatgaagtggggcgtggccatggagatcggccaggacgttcggcaggaggcggtggaggagaagatccgagaggcgatgggcggggagaagggaatggagatgcagcgccgcgcgggagagtggcagcagactggtctccgcgcgacgcggcccggagggcgctcatacgccaacctcgacaagctggtcgccgacgtgctcctctcgggtggcggcaagagttctcaggagggtttcagttcgcacaccgccactgtccaatgattcggactgaacatggatggtagtacaccaaaagagaagtttgtgtgaatgtcgaggcaaacccataaatcatggagcatgtgatggaatggaaggaccgaaggagccagtggcggaagaagttacttctcgtagtaggcaaaaattggaatatgaaaacctggaagctaagagggttaatccctaattactatattttattcattagttcgtaaaagttttggtccttgttttaatgtaataacgacttacatattttag

SEQ ID NO: 282425 - DNA, 626 bp, Zea mays
ccggttcaatgtcttcattgctgtgttcttatcagcaccagagattagcaccaggccagccgcctcttcagaattacataaacatgcagcctcacctgttccatcaccatcaacctcctgatgttccttcaccaagagacaaacgatcaaggtcaggaagaggaggaaagcacaacatacgcttttctcaacagccttctgatgctggtagccagcatagtgagagttcagggataaagttcagatccaagtacatgtcatctgaagagatcgaaagtatcttaaaaatgcagcactctgcaaatcacagcaatgatccttactttgatgactactaccaccaagcttgcaaagccaaaagatctgtaacttttcagaagtccaatttctgtcctatgtcaataaaggacttcccctcaaaatccaggtctggtgttgatcagcattcatatctacaggttgacgctaatggaggagtttcattctctgccatacgtagacctcgtccccttcttgaagctgatttgcctggatctggtgatggcttttatgatcataagtcatccacgaggtcactggagaaagaaccaatgcttgcagccagaaaaccgttgaagattctcttc

SEQ ID NO: 282426 - DNA, 507 bp, Zea mays
ccacgcgtccggagagttgaagaagctaaggatctgtttgcttctatctcgagaagtgggctggtgccttgtgctgtgacttacagtataatgatcacaaatcttctaaaagaaggattggtggaagaggcagaagatatgttttcatccatgcagaatgctggctgtgagcccgattctcgattgctgaatcatgtagtcagggaattactaaagaaaaatgaaatagtcagggctggagcttacctgtccaagattgacgagaggaatttctcacttgaacacttaaccgcaatgttgctggtcgatctcttctcaagcaaaggaacttgtagggaacacataagatttctccctgcaaagtatcattttcttgcagaggccagtccgcgattgatatgttgattgttttttttggaatcagtccttgcacgcacctgtcacagttaagctagtatatgatcttaactaaaaccattggtttacttcatgttcatgttttctcgg

SEQ ID NO: 282427 - DNA, 1007 bp, Zea mays
ggagaacaggctgttgatgtcatttgttaatttccatgagcaagagaagatctctaaagaaatcgtaacacacgctatagaaagctgcatgaagaaacaagcagataacctgttgaattcactggacgttatcagcggtaggttgtcacagttggagttatactgctatagactggaaaggtccattggagaattacgaagtgacgtgatggattatcataacgaagcaaatctgaacttccggtgcgttgaaaagcaagtgaaagaggttcagaaatctgtgcaggctgttcaggaaaagcaggagcttgctgaaactcagaaagaaatgaccaaacttcagatagtacatgaggattctgcacaaaagagtgaaggtactgctccatcagttttcatgaatagggaaaatgaggttgcccttgtgccattgcaccaagtaaatgctgttcagtcacctcctgtgcaattccaaagttgcagtggccttattctacagcaactgatgccagtccaagaccagcagcgctcgaaccaaaccgctgtgtactgtatgcgaggccaaagccatctggagcacagacaggcccaaatgttcgaagctgctggtcaatctctgcagacacacactcggaaaactcagccaccgacagtagttgaggtatctcaggtaaccagtcaggcaccagagttctaccctcatccgcagcaccaatggcaacatcagaccggccagcaggttttctcacaggcaaggcaaccacaaccacatgtactacagcagctccgcccccgcgtccggcaaggtccagcacagatggttcagctgcaaacgtcctctccacacgctcatagtacaccacaggtcacagtagtatatcctccatacgggcctcatcagtctgcctgtggtaatgctgaggcacgcagtgggggcatagttgtgccaccttcatactctacaatttcttcatcccaccggaagcatcatgaagctgctcctgttt

SEQ ID NO: 282428 - DNA, 984 bp, Zea mays
ttttgagcacatcctctcgccgctccgccacgaccgcattgtccgcctcctgggcacctgtgccgacgacggcgagcgcatgctgctcacccagtacatgcccaacggctcgctccacgaccacctgcacgggcaccacctgtcgtcctcgtcggcgtcgccggtgacggcgtcctggaggactcgcgtccaggtgctgcttggcacggcgcgcgccgtcgagcacctccactgccacgccgtgccgctcatcatccacggcaacgtcgcctcctccaacgtcctcctggacgccgcctgggcgccgcgcctggccggcttcggcgcatcggtgtggcgcgcggccggcgtggactcccagcccgtggaggtcgccggcgccgcgtcgtgcggcgggtacgccgacccggagtactgcggcacgggccggatcaggccggcgagcgacgtttacggcctcggcgtgctgatgctcgaggtcctgacggggcaaccacctgtggtcagtgtctgggacgcggcgaagcagggcgtggtggccgtgaccttggcgtcgttcgcgctgccgagcatccaggccggccggcttggggacgtgctcgacaggcgtccggcgccgcagcagctccagccgctgcagctggtggccaacatggcggcgcgttgtctgcatctgcaggggggtagtcgcccggccatatcagacgtcgtcgccaacctcgagcaggcactccgcctcatatgaaagcatgtggacatctttgcttgtacaaaagtgaacttgcttgtcgttcagctagctatgatgctcaaactgtgtctgtgtgtacgtttggtccgtgcgagtcctcctagtagaccatggtagacttgcaacatttgcgcaacatctcctactagagaagcagcagggtgcatcaatgatggtgcccaaatatggctgccagcgtccttgcattggccaccattacccatattttcttg

SEQ ID NO: 282429 - DNA, 485 bp, Zea mays
ttgtatagccaactgcctcctgatatccaagaagggacaagaggtaggaagatacttctttgcaagtagcaaactgatgtcctttcttggatatcaggaggcaaagccaactgcctctcagattaacaatgcaggagtgcatgacctacatgttaattctgtaggtcttcaccagcaaaccatctcaattgaggaaaagcaaattgcagtgccagttaattcagttgcattgtttaattcctctggtgattctcatcaacaaaaacttcagaaggatgaagctccaatagaagtgaatgcaaaggagtgccggaaatgcaatttgacgtttcatgaccagagcgcctatatgcaacatcagttgtcctttcaccaaaggaaagctaaaaggcgcagggttagtaaatctggagaattgggtaccaacatagatggaaactacgagaagactcagcagaagacctcttgagaggtatctgggcatt

SEQ ID NO: 282430 - DNA, 478 bp, Zea mays
tttccttctgaatttcatctcccagcccctctgctcgctgccctcccctatccccttgctggctgcatggtgctcgttccttcctgctctgagctgcataggacatctccatctctccatagatggcagccagctgcgccctcacctcctcccatgctcccctgcagcagcgccctaatcaccagcacattggaccgtttcctgtgagctccagtctcatcacttaacctcgctctaattgtttttggttgaagcggggattccccatctcctctctgttgtttcactaattcttagtataaatagatccttgttaaaatattgcctgctgcggctgctttgtctgtatgtgtatatgaggaagagcaagctccgacatgacggctgcttggtgttcgatgatatacccgaacccgagatctttgctatgttggcgaatactgagtcatattgggatgtgtaaagctaagtcacttct

SEQ ID NO: 282431 - DNA, 403 bp, Zea mays
ggatcagatatagggcatcgagctgcagccggaggttgacgacaagcatatcttcagtattgccccgaatggtgtgtactcagccaaatcaacatatgaaggtctatttctgggatctgtgacatttggacactataaaagaatctggaagtcttgggcattgccaaaatgtcgtttcttcctttggctggttgcccataagagatgctggacagctgatagattggcaaagcgaggcctaaatcatccagagcaatgtcttctatgtgatcaagaggaagaaaatatggatcacctccttgtgcaatgttccttctcacgagaattctggtaccttttactcaggaaattcggtcttcactctctcgcaccacagccgactgcaaactccttcctgggatgg

SEQ ID NO: 282432 - DNA, 450 bp, Zea mays
gagagagaggcgaggcggagggaaaaaatcgaagaaatcgccgaggggattggattggactgcgactgtggtttgattctcccttccacgccgcggtcctcctccagagtccagacccaatcccaagtccctagtcttgcgagggaagggatcccaaatccggcgtccagtccagtccaacctatagtcgatataccccccgccggcttggacgtatccttgccccaattctgattgacaggagaggagttggatcacggagcattggaatggctgccgccgcataggatggagctggattcctccggccgcttctcggctgcccccgtggatgctgtgaccgtcgcgattggaggttgaggcggaggcgaaggctttcttcagtaagagattgaagagctggggtgtagctggttgggtatggaggggagatggcatcccacgcggaag

SEQ ID NO: 282433 - DNA, 451 bp, Zea mays
tttctgccgctgctccatcgtcgtccttcccggaggcagtctgggctgacggctgcatgtacgagggggagtggcggcggggcaaggcgtccgggaagggccgcttctcgtggccttcgggcgccacattcgagggggagttccgcagcggccggatcgaggggcagggcgtgttcgtcggccccgacggcgccacctaccgcggcgcgtgggtggcggaccgacgccacggcgtgggcgccaagagctacgccaacggggactactacgagggccagtggcggcgcaacttccaggacggccaccgacggtacgtctgggccaacggcaaccagtacgtcggggagtggcgcgcccgggtgctctcgggccgcggcgtgctcatctgggccaatggcagccgctacgaccgggtctgggagaatggcgtgcccagggggactggggtctt

SEQ ID NO: 282434 - DNA, 679 bp, Zea mays
gtcgtgggatccatgatcagaaacttaaacgtggggattctgagaacattaaggcttcaaatggtatgtttctgaaccatagtgacgttgacagctccaagccaccagtggttgaactacttggagagttcgtgcttgcaagtagctcaagagaaagatctaccaagaaattgtatcagaatgctggagatgctaccgatcagaaattgttgaaacctttgagcaaggatgaggatgttgaaaagatgcagacgcattcaagcatcatcggaattcttggtttcggaagagccaataagagcaggagaaatctataaaccgggagaggaccgttgcgacgccaactccactgagtacgctcaagccgcctccgcaacaaggtgacttctccctgaccaaaatccaaggtgctcagctcgtcgttcgctaacctttggatgctgggttcctctgtggtgtggtggaaagctgtggacgggacatcacctagttgttacccaagctttgatattgtactttaggagcagaacaatgttttaccagaatatatgctgcgtattcgtcccctcttaatatcctcatgtgcatgaatttctcgtaatgatggctacacttaagctttccggctagagatgtctgtaacgaacacatatgtggcttcttagtttattttagttct

SEQ ID NO: 282435 - DNA, 924 bp, Zea mays
gatccgcctcttgtgcgcccccgccgacgcacgcaactcgcagacggcgcccccccagatccacttctcgctggccgctcagatcctccatatcctgacctctccctcctcttgctgcagatgatatgctagagcgtcagcaaggcggactctccaaacctccagagagggagggaggcagcagccaatgcccagcacgtaccaatctgcgtggcgggaggtgcccggactgcgtacccacgggcgagcaggattttgacgatccacgacccgatgaagtcgccggcgtcggtgacgcacaaggcggcagtggccatcgtgcgctgacgcccagtcccttcctctcgcgagcgaaacggggggccggtggtgccgccgggcgaatggattcgtccgagagcgagcaaataggggtaagcatttatcaagcggaagtgggaagaaatggtacagtgaagtggaggaaatgacacaggacacaagcggaagctggcatctcaaggcggtcgcactcgctcggcttgtgtgttgcagttctattcttgcgttgtggagctccgaagtctctgctaccaggtgcccccgtgccggggcataggtgcagtctccgctgcgcccagcctactcaaaggcagctaccattgcgacaatgagagggagctcccaaggctccaatgttgttgctgtcagttcttcaaagagttattgatggttcacaaaactccattgttgctctgccgattcgcaaagccttgatgattgttatgatggatccaattttgaggccatcatcaatgatgtcattgttcccatgggacctcaatctccaaaaaaccccagaggtcgggggcagaggaatgtgtcagtgcggtggttcagttaagaaccattggtacatttgattgaacactctacttttttttc

SEQ ID NO: 282436 - DNA, 497 bp, Zea mays
gtgccgcgtcgtcgcctcaacatgtcgcgtcgccgccccaaaccctgagctaccccatcgaccagcctaggtgcgccgccgtccccaagcttagctagctgacccaggtgcgtagtcatccccaagcttagttgtgcgcaatcaaggtgtacgccatcatcgccgccccaaggttgtcaccgcccccaaggtcgtcgtcgccctgcaacatccgcaaagcagcccctattcgttggtggtttcctaggtctgtgccatgccaaggatctgaagttgttttgccgccagcacgctgaagacatggatccacgttttgaggatgaagacaccagtttcccttggaatttctcaggtttgacaaatacagctcgcaatctctttggtgcacatagtacaccctcatccttcaaccaatttactggtggacgttgtcgtgtctcggatcgaattgacgacctcgacctcaactcccaagtgttggacctcaaacaccaacg

SEQ ID NO: 282437 - DNA, 744 bp, Zea mays
cctgcaggtacttttccggaatttttgggtctgaccacgcgtccttgaggggtgttaaatctgttacattctcggaggtagacttcactatgtaagtatatttacattaccatttcattggtctcactattatgtgctggtactagacactcctatttaatatcatacattttcatgtttcaaaaccataaaccaatagaagaaagaactgaaaagcagacgttgaatctggctctttaccagcttaatacaacaaatttacatcccaccatacttaactgttcaatcaaacttcattgtagggcaaagattttttaccatccaatactcctgaaagttcctccaacacattagaaaaccctgcaaaaaggttcttacaacacctttttccttttgaactgaaagcatttcctttacaatgccacatattcccacttaacacatgcctcataaaaaacatcaccacaggctcaaacagacctctgcaaaagttggcaaactgagttagcagatcgactcataagttcaatattagagacgaccttcttgacctatgttattggattatgtgttcattcaattgttgtagtgatctttatttgattggttccacgctatacatgttgtattgtgcctacgatgctaagtatttttgtttgcaactgtggctattatacaatatgagtcctgttatatattgtcactcatacaatttccaaaaaaaaaaaaaaaaaaaaaaggaaa

SEQ ID NO: 282438 - DNA, 464 bp, Zea mays
ctttccttctcccacggcaatggcggccgtagcggcggctccacggccgcagctccccatgctatctggcggcggcggcgcggcactttccagtctgaccctccaaacactggccttcatttcccccctccccatcagccgctgtcaccgctgtgtgctccgctccaacgcctcgtcgtccccgtctccgccgccgtcgcaggaggaggcagcggcagctgaggtggttccaacagctgagtcctgcgtcaatatcggtctccagctcttctccaaaggcagggtgaaggatgctcttgaacaatttgagaatgcattagagctgaatccaacatcaattgaggcccaggcagcgctatataacaaggcatgctgccatgcgtatagaaagcaaaaaggctgcagaatgtttaagggaagctttgagagactacaatctcaaatttggtaccatacttaacgat

SEQ ID NO: 282439 - DNA, 548 bp, Zea mays
tgcacgatcagagatagtaaatcttagaaaaagccagtattgtgggcctgtaccatctattgaaccccagattcttttcaagtatccacctggaaagagggcagaagttagggaggctgatttgccctcattctgttttcctgaaggtgtaaaggctcgcctaatagagaggactccatccatgagtgacctgaatgaagtgatatttgggcaggaacatctgtctcgagatgatctgtcttttatcttctccctcaaggtatcagacaatgcgccactatatggtgtttgtctgcatgttcaggaaatagttcaaaaggcacctggtatactaggtgctgtctcacccttaaaccctacttcctataagcccagtcgtttcttggtttctgcaccacgttgttactgtctacttacaaaggtacctttttttgagctacactatgagatgctaaacagcgtcgttgtacaggagaggcttgacagaataacacagtttgctagtgaaattactctagctgagccagttccttgtcctattaaagaac

SEQ ID NO: 282440 - DNA, 529 bp, Zea mays
agcttttgatcattagcctcagctggcgtaccgtcgaggccggtcccacttttctacccctgccagaaacctccaggatccgactccaatcgaatcgccaaagcagacaggggcgctcgcgggggcgccgagctcgacggggcgagatggccgggaacgactggatcaacagctacctggaggctattctggacgctggcggggccgcgggagatctctcggcagccgcaggcagcggggacggccgcgacgggacggccgtggagaagcgggataagtcgtcgctgatgctccgagagcgcggccggttcagccccgcgcgatacttcgtcgaggaggtcatctccggcttcgacgagaccgacctctacaagacctgggtccgcacctcggctatgaggagtccccaggagcggaacacgcggctggagaacatgtcgcggaggatctggaacctcgccaggaagaagaagcagatagaaggagaggaagcctcacgattgtctaaacaacgcatggaatttgagaa

SEQ ID NO: 282441 - DNA, 755 bp, Zea mays
  unsure (1)..(755): unsure at all n locations
ccaacatcgccacctccatcgcgccgttcgaggacccagtggtccagaagtactaccaggcgctctggagcaagtactccggcgtcatcgactacgtcaacttccagttctacgcctacggcgacaacaccgacgtgcccacgtacgtcatgttctacaacaaccagttggcgaactatcccggcggcaaggtcctcgccagcttcaagaccggcaacgtgaccggactgctctcgccggaccaaggtatcagtggggccaaggagctgcagcggcagaacaagctgccagggctgttcatctggtcggcggacagctccaagaagagcagctacggcttcaagtacgagaccgaggcgcagcagatcattgccaaccactgatcgatctgcgatcaggacttagcttaacaagggatcacacattttacaataaataaatgataacctctcaggtcaacaacaattacttgcaggttaaggagttcggctgttgatttaaggacagaatgatggtgagtgaaaatgcaagtttaaagaaaatcgtcattattctgtcctttaaacttgtactagcaaagtaccagtgtgttgttacgatttacatttatgtttaagtatacaataaaaacataaacacatgtgtgttatgttggttggatatatgtaaatatgagtttagagccaacaatcatggtttaaatctccatttatgtnaaaaaaaaaaaaaaaaaaaaaaaaaaaaaaaaaaaagga

SEQ ID NO: 282442 - DNA, 376 bp, Zea mays
ctcgtttccccgctgttgtggctgcggtgcttctgctgatctgctccgtcttctcctcccggcaatggcctgcttggaggcgcccccgcgcgtcgagctctgcccggtctcgtgccagccccgcggcctgcagcttccgccatggcggctcagcctgtcgaggtcctcctcttcatgcagatcttgcacccttgtgtctcgccagcttccaatttgcaatgcacagtcatatgctgatgatttatgggtggctgcgcctcatagccctgcatctgttcgctcaaggatgcttgcagcggaaagagaggaagcaaaggctgtcctgtccctgtttctgaggcagaaaggtttacgaagcacgctggccgcacggatc

SEQ ID NO: 282443 - DNA, 536 bp, Zea mays
ttcactcgtccggtctctctctgttcttctgccccgatcggccgatcccacccacgcatatctctcggccgcgcccgcggtagtgttcgtgttcctcactcctcccgcttccttccccgacactacctcagctcagatccgcggcggtttcccggtccctggatctaaagcggccggtgagcaggcctccttccgccgacgcggaccacctggagggaatttatcctggagccgtcttcctcctcgcctcctctcgcggcgcggcgcggaggccggaatcacttggcggtctagctgagcttggattgatttctttcttcgatcgtggtggctagaggcacctggtttgtttcttgccgaagcccgtggcacatgtgaacagcatggcctgacttctgcttttgctacttagcaatggctaatgcacgcaaacacttgcaaccttcaagcggatcacgcaatgacagaaagtaccagggcacactgggtgcttctgcagcagaggacatctcaccggagcgtgcgaatcacattgt

SEQ ID NO: 282444 - DNA, 607 bp, Zea mays
ttgcgctgatcccgcggaggatcagggagaccatacatgggtggggaaaggcgacgaggaagaagcgccggcgccgccgcggcgacgactcgacggtccgcacggagacgagcacggtgtgctcgctcacggacgacgacgaagacttcgaagacgaccaccaccaccaccaccacggaccgtcgtacgagaccccgagagccgggggccgcccgccgtacctgaagatcgagacgcatcgtcagtcgggcagcgggcacgacggccccaggcccggcggcaccccgtgcttccaccccagcggcagcggcagcgggcacgccatgctcctgcggcaggcctccgtctccgcgccgtcgtcgccgtcgtaccgcggaggcaataacgtgacaaggtcggcgtccatgcccgggatcgccgcgctgaggacaacgggctccggcacgccgacgcgcgtgagccatgaggagcccacttgatgcgcgcccgtgcatgccatggatggcttgctagtgcagacgtactgaggactgagctgctagtgtagccccggatttgaaggtatatcgatatatatatacacacgaaaagatttggggtgacaaaa

SEQ ID NO: 282445 - DNA, 520 bp, Zea mays
tttgtggaggtgaagctcaacatcgacaacatgttcgcggcgctcgagtccctcaagcaacatgggagggcggctgggccgccctccaggaagaatcacggcgcagggcccgctctgcagcagtagcaggaaccgcctcaaaggaggcgcatggcgccatggtattgggcgagggcgtccgtgccgcgcgggctggagttcgccgagagggcgccgagctcgagtgacgcggtgagggcatcaagctcgagctcaccatgagtctccacatcgctactgccatccactgtttcgctgccatttgcagcgactgtgctccagttcgatcgtttgggggaaaaggtgagtcctcccatttcctgtagatgcatggccgtggatgacggtaaatttatcaaattccaagctttacgggttagtcacaagcgtttactggggtagcggtatgcttccagtgaacaacaaggtaccctgtggaaagattaattattgcaattaatttactaagaatacatatata

SEQ ID NO: 282446 - DNA, 487 bp, Zea mays
  unsure (1)..(487): unsure at all n locations
ctcatcgtccggcattgcctaccagtttccccatcggcagctccgtttccgtctccggcaccaggaccagtgccacgccaaccaccgctacctgctccacgccaaacgccagttgctttgcagctactcgtgcagccgtgctcgccgcacacgattggcgccagtctttagttcaccggcaaagcttgttttcctttttcttttcttttcttttctacccttgggaagtctgaactgtactgccacgtatgtctgacctggcgtggatggacggcgcaggcttccgcgagcgcgcgggtgtaccacgtgacggactacggcgcggacccgaccggcgccgccgacgccacggcggcgatcagcaaggccatagctgacgcgttccgcccgcccaccaacgccaccatgaccggcggcatccccgacctcggcggcgccgagtgcacctcgacggcggcacgtacctcatcanagggccctcacgctg

SEQ ID NO: 282447 - DNA, 399 bp, Zea mays
atcactacttaatgatctcacgacgaccgaccgccaccagacctggaaggctctcatcaggtccgggcactcccggccgtggcatgccgaatgccccgatccactccaagaacagcgcctgctgctgctccagcgtgagcgtcagcagcgcctgcccgatcccttcctccagggccgtcaacgttcagccccttggggtacctccggagccaaccgaagtccgccagcatcggcctgaaccaggcctggaagacgccgaaccgtctggctccggcgcactggagcctgccgctccccatggcgatgaagaccgtggccgagatccggctcagctcgtggcgcaccatcggcgacgcccgtccgtgcacgccgctgaggctcgtttggtcggcccacagc

SEQ ID NO: 282448 - DNA, 520 bp, Zea mays
  unsure (1)..(520): unsure at all n locations
cccacgcgtccgcccacgcgtccgatcagtggaagctgctttccagccggagacaactgcatactcccctggtttgaagttgaaaatgatcaagtggctgcagaactctgagtgtgcaccttctgttcaggttaagtcatttaaagagggttcattggcacaaggtacattgcctaggagtgaaagcaagaacttaaccactgctacatttcaatcaggacaggaggaagccatttcatcgattgaccatcattttctggaaaatgataatgctaataacggggatctggttcaaaatggctttcatagatgtcctgatcctgatgtaaatcagatctctggccgacatttgctcaacatggatggttactgttgctatattcatcctatcattgagaaaaggttgcaaggctcgcggagtaatagtttggagcaaactatacagaataatgngtatcatggcacaactgccatggaagtctgtaaagcacaatcatcagatactctcaagctttcacct

SEQ ID NO: 282449 - DNA, 449 bp, Zea mays
tccgggcctgtagttcgtggcccgacccacgcgttctccatcatcgagagggccgccctttttttttttttttagacacagaaataagttattttgctaaacaaattataaaatggctacaactcttttagaaaagccaaagagctcgaggaatcagatccggaagtgtctctaagaagccggagcactgacaaaagcgcctttaactaggtcaccagttctcaacataacgggaattaagccaaaatttgaatcgttcttagaagaaatccaaaacaaaccgccttttcgctgttcgagagatatttccaatctcatcgctcatcttgccttgaaccgtggtgcaacccgtggaccgtggtcgtcgaacatatcaactggcgccaaaattgcagctccgtccgcctagtgaaatgactcacagcacagggacgaagcaggccttgacg

SEQ ID NO: 282450 - DNA, 529 bp, Zea mays
ttcctcgcgtctcctcttcccggccgaaggagcaccgccccagccgatcttctctcccccacgccccatcaggccgtttctggctgctcttgggcctccctcgccctccctgacggccccgagctcgccctccatctccgccccagctcgcgccatctcggtgcctcgagctcgtcgtccgcgcttctgtggccactgccgggaagcatgaggaggaggcctgggatcgctggcttgcagaatgcggcggctactcgtgaccaattccggctggtcggggagaatgtggccaaggtgaggaccgatgtcatgaaggagcagcttgcgacgttccggtcacagctcgaggaattcgctcgcaagcataagagtgacatccgtaaaaacccagtattcagacagcagttccatgagatgtgcgcaaaagtcggagtagatccattggcatctaataaaggagtctgggcagaactcctagggattggtgacttctactatgaacctggggttcagatagttgacatatgca

SEQ ID NO: 282451 - DNA, 482 bp, Zea mays
tctacgcgtccgcccacgcgtccgcccacgcgtccgggcaaggaaacaggcagctctccacggacaacgcgattctatttagttatctggcggctgccagtgccagccagccgcctttcgaaaccgagcacgagggagccgacgtggtggtctctggaacctggttcgagcgagcgagcgatccatctatccagccgcccgccgggaatttctgtgacgaggaggaggaggaggagggggtatggcaatggtggcggcgcagggaggcggccggagggacgccgaggcggagctcaacctgccgccggggttccggttccatcccaccgatgaggagctggtggtgcactacctctgcaggaaggtggcgtgtcagcagctgcccgtgcccatcatcgccgaggtcgacctttacaaatatcgccccgtgggatctttcagagaaggcgctgtttggccgcaaggagtggttctttttttac

SEQ ID NO: 282452 - DNA, 575 bp, Zea mays
tttttcgcgtccggtggaagcaaagacaaaaaggtaagtacctcaatcaatgacaacaatgcatctcgtgcttcagaggagaatacccctgctagtgggtcgggcgaggcatctgaagctttacctgttgagactaagccgcgccctgtattgaagcaactatgtgaacagatggacaccaaaggccttctgaaatttctttcagaaaactgtagaaaacttgctagctttcgtgatgaactttctgttgcactaaaatgtgcaactgatcctgcacgcttcgtgcttaattccctggagggtttcttcccaccagaccaaactaattcacctgggagtaaacataatgcccttgaggtccagcgcaagagctgcattcttttaatggaagctatagcacctgcactagggatgaaggagcctggtggcgacgacccttggagctctgaaattaaggagcaagccaaggaaattgccgaagagtggaagagtaagttagctgagattgacctgatgcttctaatggctattcattggaggcacaggctttcctgcagctttttacaacttttaat

SEQ ID NO: 282453 - DNA, 388 bp, Zea mays
tttggatctgtgtatcttggtacgctgcctgatggcagccgcatcgctgtaaagaagctagagggcataggacaagggaagaaagagagtccgttctgaggtgaccatcattggcagcatacatcacatccatcttgttaaactccgaggcttttgcgctgaaggagcgcacaggctccttgcatacgagtacatggcaaaggggtctctagatagatggattttccaaaggaacgaggattcctccctgcttgactgggacacgaggtttagcatcgcccttggaacagccaaggggttggcgtacctccaccatgactgtgagtcgtagatcattcactgtgacatcaagcctgagaatgttctccttgacgacaacttcctcgcg

SEQ ID NO: 282454 - DNA, 710 bp, Zea mays
tgtataaattaggatatatatccggttctacttgtttttcatgtagtttgatattgtcatctattgaaatcatgaaagtaaaagtgcaaaatgtgattggtaggtccatcacactaatcgccatttttgtccgaccccaaagatactgttgaaacacagtttttaaaaccttggtttaaacattgtttttatccagaatatgacatttcactgttttctttcgcataggttttaggtgatattgtagaaagtatagcaggtgctattcttattgacagcaaacttgatttggatttagtttggcgggtttttaaacctcttctttcaccaattgtcacacctgagaatttggagttgccccgattcagagaacttaatgagtggtctgacaagaatgggtactttattggaattaagtgtgaaaatcgaggagacagcacaatggctatccttaacttacaactcaaggactcagcctcttgtgaggcaaggttgtgggaagaataaagtagatgcgaaagcacatgcagcttccttattgcttagggatctagaggaaaaaggacttataattccaaggaatgcaagcagagtggaacaacttgaaaagaattctggtactgtaaaacattgcaacaacgtgcttgatgttatggacacacaaaacgtagcaccacctaggcaaaaggaagtagctgtgttaagtacca

SEQ ID NO: 282455 - DNA, 446 bp, Zea mays
gtgggcgcaccgtagctgagcctgttattacgagcgcgcccgtgagagtggaagagagggctggccccgccggcctgatcagatcagcggaaggcacaccgagctcttgcctgcctgcctccactccacccaatggcgatgccgagggcggcgggcgcggggtcgctccgcttcctgggcctgctgaagcagccggagtccgacgccgccgccccattcgagctcgacgagcgcgacgtggtgtggccggcgggcggggggcagcaggacggttgggccgccccgccggcgccgcggcgtcgcgcgcacgccgtgccgctgtacagcttcgggctgtcgtcgctgctcgccgaaggctgcggcggcggggtgcccgtgcccgtgccggtgagggcgatggcgccgagcgccgcgccaggcagtctgcgcccgtgcgcgtgccgcgc

SEQ ID NO: 282456 - DNA, 478 bp, Zea mays
aaactctcggagacagggaagtagcgtacgtagatccagagctcggcgccagagatacccgacatcctcgtcatgtctccggttgcaagcaagggagtagtgatggacggtgcggtggcggtggcggcagtggccgccgccgtgctgctgtgcctccatctgccggcggtggcgcgaggccagctgcaggtggggttctacaacacgagctgccccaacgccgagtccctggtccgccgggcggtggccagcgcgttcgccaacgactccggcatcgccgccggcctcatccgcctccatttccacgactgcttcgtcaggggctgcgatgcgtcggtgctgctgacctccgccaacaacacggcggagcgtgacgcgccgcccaacaacccgagcctacacgggttccaggtgatcgacgcggcgaaggcggcggtggagcagagctgcccgcagacggtgtcgtgcgcggacatcg

SEQ ID NO: 282457 - DNA, 917 bp, Zea mays
tttgctttggagtggtgggatggccacccatgggaactttcaggatgaacagcctatttaaccaggccaaagagaatgcatcggaggctggcgccaagaagcccatcgtcgaacctgacatgcaggaagacaaggaggagagcaagaaaggccggaccgtcggttgggtgaaggtgaacatggaaggagatatcattggaaggaaggtcgatctcaatgcccatcgctcttacaagacccttgcctcagcacttgagctcatgttcatgaagccgtccattggtctttgcacttctagcagttcaaagactctaaagctattagacagctcatcggagtatcagctcacctatgaggacagggacggggactggatgcttgttggagatgttccctgggagatgtttgtaggttcagtgaagaggctcaagatcatgagaacctcagacgccaaaggtctcggtccacgattccaaggggctcacagacccacagcagcttgcacgagaggcaggacgtgaaaccaccgatgtgcgtttggtgctaacaccgctggtgaagcttgaactgtatttgatatcacgtaacagtaacaccagcccatatcgctggcatagttgtgagattacggggctgtttggtttactgtctaaggcgccccaacctggctaacttttatgtctaagtttagttcttcaattcgaacgactaaacttaggcaacttcattgtgtctagtggaaatagtagaagtttatgattttgcttcttccctgtggagccctcgttgagctatcctaatgggctatacgagcattatcgcccccagctcttctgtccacgctgtttacctgtgaggaatggtcgcccaaagtgttggtttttatccttgtgtttgatatggcagaagtatctgct

SEQ ID NO: 282458 - DNA, 477 bp, Zea mays
ttccgttcgctgttcaggaagggcgggaaaaccatggcgttctccgccgcggtgcacagcggcgcgccaccggctgcgaagcgccctgcctccagcggacgggagggagatcagatggtcgtcacgccgctgggcgccggcagcgaggtgggccgttcctgcgtccacatgacattcaagggccgcaccgtcctcttcgactgcggcatccaccccgcgtactccggcatggcggcgctgccctacttcgacgagatcgacccgtccgccatagacgtcctcctcatcacccactttcacttggaccatgccgcctcgcttccgtacttcttggagaagaccacgttcaagggccgggtgtttatgacccacgccacaaaggctatttacaagctgctgctctcggattatgtcaaagtcagcaaagtgtccgtggaggatatgttgtatgatgagagtgacattgctcgctacatg

SEQ ID NO: 282459 - DNA, 498 bp, Zea mays
aattttgtctccgtcgatacgccttctgattcaggcagtatcaattttcagaacagccaattggaagatggccctgaaagcaaccactgtagtgctagtgaatgtgaaataacaaaaggacctgatgatttatacgatgggggttctggttctaacaaggaagcacatatggtggacttcgaattttatttaaaaagtgaaaggggcgagggccagcaacagaagatagaaattaacgagctccatttattatttgagacagcaccaagccggttgcatgtgaatgtccactggctacagaatgcttcaagaaaatatgccacctcaatgctgaacaatctacctgagatccacaagctcgagcttatcccgaaaggaactgaagattctgttgcactacatggttgtctggaagcctttctaaaagaggagccgttggggccggaggacatgtggtattgcccgcgctgcaagaagcatcagcaagcgatgaagaaa

SEQ ID NO: 282460 - DNA, 831 bp, Zea mays
ccaaaatcttcaggaaaacaaactggagatgaaaccctaatggaaaatgaacctgtgaaggcagtagcagtggaagaaaatataggtcgtgatgacagtttgtccatttcttatcaactagcctgtaagacagtagcagaactgcctgttacagatgcccagtcgcctgctagttcttctggtcattttattcctggaaattttgacaacacacatccaacatcttccgccacttcggacaatgctattaattctctgacttcaaagttcggtgcagagctagcacaaagtcatgattctacggacaaaaagggacagaatgatgctgaggaggttgaggagttagagagtatgacaccagcagcctatagtgaacctcccagaaatatacaacttagcttacgaagtgcttccgctaaggtcaagccttctacactaccaagacgatcagcgaggcttcttcctaagtaaccgccgtaaatgatacagatgagatccagtgtgagaatagcctcactaccggcttagtcagattccatgaggatgaagggatagaaaacagttaacaagcttagattctaattttgtatgttcttgttaattcttttttgttccagcaactgagtagaacttggtttctgaagcttaggctgcgtgactttttatctcctcgtgtccatcaacatctgttacagttacagtcgtactgtcgagctttcatacactattgtacaaacgactcctacttttacagcatctgtttcctctggtctgcgacttgttgcatgatgtcttctgtgttttatatccatgcaatataactattggtgc

SEQ ID NO: 282461 - DNA, 831 bp, Zea mays
ttgatgatgtcctttctccggaggcgtccggagcgtcgttccacgcttcctttattgattgtgttcggtagatgattcttggacatcggtttggtgttcggtggggctcaaatacggattctgaaggacttcaaaggtgcttgaatcagtacatcttaggtgctatcccagactaggctgcgatgggtttaccccaaccttcaacagtcgaggatgatgcgccaacagcactgcgcacctctatttcttgccctccacattctggaggagttagtgcctgtgatttggatgggcttcctgcgggaagctctagcagaagggtgctttcgtacccattgatacgtgattttgatagaaaggccacattagatgctcctaatgaatcaaatgggtattctaaagacggatgtgaatttgacgaacccgcagacctccatggactaaacattgattcaagaaatacaaattcttggtcttctcctaaattagtgccttctgtccatatgccggcaaggagggttgtaggctttgattctggttgtattggaggttctgatggggcagaaacggatatggtcgattcatctttggtcgacagaaattctcatttgccatttgatcagcatggacttcaagcaaggaaaagactgttctctccattgaaaaatgtgctcgttaaacagttcaatggtgatatgctcaaccttccttctggtgattctagatttaggcattctgattcagccgataaactatacagtactggtttccaagataataaaaaagccaacacgggatgcatcaatttgtttgaaacgcgggatactccag

SEQ ID NO: 282462 - DNA, 522 bp, Zea mays
ctgaaatttgaacaccaatccagcaaaggttgcaactttggagcaccttatgagtggcaagtttacaacactcttagtgggaaccatggtgtcccacgggtacactacaaaggaaagcagggagagttttacatcatggttatggacattttgggaccaagcctatgggatgtttggaataataattcccactcgatgtctgttgagatggttgcttgcataggtatagaggcaatctccatactggaaaagatgcactctaaagggtatgtccatggtgatgtgaagcctgagaacttcttgcttggccctcctggtaccccagaagagaagaagctttttcttgttgaccttggattggcaactaagtggaaggatgttggtacggggcatcatgttgaatatgatcagagacctgatatctttaggggaactgttcgctatgctagtgtgcatgctcacttgggaagaactgggagtaggagagatgatcttgaatcccttgcatacacgcttattttt

SEQ ID NO: 282463 - DNA, 565 bp, Zea mays
cggacgctggtcgagacgcgtgggcggacgcgtgggcgcaattggtgcggactgcggacaatccccgcatcctccattacttaggcccaaacttcctcctcgggtggcggcggcggcggctgctgctgctggacatggccttggcgggggcggctgcgctgcccctgctctcgctccccttcctcgccgtcacgacctgcctcgacgttccttcccatgggtgctattggactggttgccaaagcaaatggtttggagtctgcgctgctcgccacttcttggattctcagtcagatgattgcgacggcctttgtgtggagtcaaaaagccctccatgccttccactccacacacatttctattgatgcaaaccaggtctatacattggttttactacattcagacaatgaaagcagtctgctagtttgcttgaatcatgtataaacatggaacttaatagttaatactaatacctagaccttggcataagtactctaaggactacacattctttttaaactgtcactgtaccatgtggataaataactctagcattctgataccg

SEQ ID NO: 282464 - DNA, 793 bp, Zea mays
tgtgtactacctgtccggcgggatccccgcgcagctcgcgcggtgcgccaacctgacgctgctcaacctggcgtacaaccgcctcgccggcgaggtgccggatgttctcggcgagctcaggagcctgcaggagctcatcgtttccggcaacggcctcggcggcgagttcccgagatcgatcctgcggtgccggaacctcagcaagctggacctgagctacaacgctttccgtggagacttgccggagaacatctgcaacgggtcacggctgcagttccttgtgctcgaccacaacgagttctccggaggcatcccagcagggattgggggctgtacccggctgcttgagctgcagctcggtagcaacaacctcagtggcgaaatcccagccgagataggcaaggtgaagagcctgcagatcgcgctgaaccttagctccaaccacttcaccgggccgctgccccgcgagctcgggcggctcgataagctcgtcgtgttggacttgtcgcgcaacgagatatccggccagatcccaggcgacatgagagggatgcttagcttgatcgaggtcaatctgtcgaacaaccggctcgcgggcgccataccggtgttcggaccgttccagaagagcgcggcctccagcttctccggcaatgccgagctgtgcggcgacccgctgaccgtagactgtggatcatcaatctatggctccagctatggaacggagacggaccacaggggaatatcttacagggtggccttggcagtcgttggttcctgcgtgctcatcttc

SEQ ID NO: 282465 - DNA, 444 bp, Zea mays
ttcctctggaaaaaatattaacatctacaagttcaactgaatgctataccaggacatagttcttggagaatttaataaaactaggttgatatggtaatgctgatgtgtctttcctgtaaactgggtcaaaattaagagaggttcgacttaggacacaactgacgtaaactataatccacaatggctggagtgtaacatatctgtctggctgatgctctgtgcaatctactccagctgtcttaccattctgtcaaggtcaattctgatctaacttcaggacatacaatgggataatcatgccacttgtctgctcaagtattcttgtgatgtattttgcatgtctgaacttgactaattttttcttcttactgctcttaggttgtctttacatgacagaacaaactgcagcacaattcggaaagcgtatacaatggattatgtgcc

SEQ ID NO: 282466 - DNA, 762 bp, Zea mays
tcgtctgtatattatgattattattattaaacttttgtcgaggcctacaaactcttcttttagggatacatgattgatgactaatggttgtgagattcacttggggatcaagaaggaattcaggacaaacccctcctctttttaaaagacttcgcctaaaacacaaaaggtcctgaaggaacgtgtttcaggacattgcagataagataggcatcaagctgagattttgtaatctcagagaatgtgaaagccacatctggtcgttggatagtccgtgtgagaagactagagctgaaattggatggccacaaggggttccatttgtccatccacatggcctcccaaacaaggcaaagcttgggtttttggaagcttacgaacctggatggacggcctcccaacaagaaatggaggaggcagcctcggtaatttttgatgtattaccagccttggatatgttttgaatttcagggttggtcaacagttcatttcttctacatgttgcagaagtagcaatgtatactgaccccaaaaaatgtagatacatagatgcagtattgacaacgtgtcaatgcaattacctgctgtttaaattgaaaaccacgcctattaatttcgtagatgagttagcttcagaaaaaactttctacgagataatcaacaatgcattctaacggaaattgcttgtaagttgtaacccaactccacatttccgttatcatgacaacggaaattctaataagaaccctgatgtggagatcc

SEQ ID NO: 282467 - DNA, 737 bp, Zea mays
cctgcgcggacatcctcgtcatcggcgccggggacgccgtctcgctggccaccaaggtggtgaccaagggcggctggagcagggacggcaacctctaccaggtggagaccggcaggcgggacggccgcctgtccagagccaaggaggccgacaagaactcgccggactccatggatggcatccgcaagctcatcaggaggttcgcttccaagaacctcagcgtcaaggatctcgctgttctctcaggcgcccacgcgatcggcaaatcgcactgcccgtcgatcgccaagcggctgcgcaacttcacggcgcaccgggacagcgacccgaccctggacggcgcgtacgcggcggagctgaggcggcagtgccggaggcgcagggacaacacgacggagctggagatggtgccggggagctccaccgcgttcggcacggcctactacggcctggtcgcggagcggagggcgctcttccactccgacgaggcgctgctcaggaacggggagaccagggcgctcgtctaccgctacagggacgcgccgtccgaggcgccgttcctcgcggacttcggggcgtccatgctcaacatgggcagggtgggcgtgctcaccggcgcccagggggagatcaggaagaggtgcgcctttgtcaactagctagcgatatgctggattgtactttgtaccctctccccttaattaaaatttaaatgctggagtttcaccccggtctcg

SEQ ID NO: 282468 - DNA, 480 bp, Zea mays
tgccactggtgccgtagatggttccaaagctggacatgcttctcagagatgccagagataacggggtggatgatcttcagttgatggagggttctgaagctatggagatggaacctgagcttcgatgtcttaaagctttactatcacctagtactgggataattgactctcattcactcatgctctcccttttggctgatgctgaaaacttgggaacaactatatcatataacacatcagttatcagtgggcatgttggatccaatggccttgaactccatgtttgtgaaagcaaagagctgcagaattatcatgtagggtctcatgtgaacgcacaacttggtttgcttccgaagcttgtgataaactctgcaggtctgagtgcagttctacttgccaaacaatttcatggccttgaccaggaatttgtgcccactcctcactatgcgcgtgggtgttacttcaccctctctcaaacca

SEQ ID NO: 282469 - DNA, 530 bp, Zea mays
gtccatacctgatgatcgtttcatgcagcagctttatgattcttcccatgggacaatacatacttcattgtcatctggtgaccgtatgaagctttgtcttcaaagaacagaagagattcttgatcttgctctgaagttacctggtcatggtaagcataatctacaactacatgcaagtgtgaaattgagagagacaggaaatattggtttgtcggaaagttgcgctactgccctaccactgccccatgaaatgatgggtcatgcagcttggaaagaatgttctgctagtctcacacagggctctgcagttgttgatgctctttcacaaaaagaaagtattgtagactcaccatctaagaaaactccaagttatggttctaacgattatagcaagatgactgtttttgaagttacaggttttcctcaaccatttcaaggtcttcagaaaccgaaaagtgtagcatctcatatctcaaatgaagttcatgaaatggatatttcctctgtccatcctcattcatggaaaccta

SEQ ID NO: 282470 - DNA, 545 bp, Zea mays
atgatattaaggtagagttgaatctgtcttttagcgaactgccaatggctgcataaagcaagtgtcctatcatgcaaactgtgtttctgctccgggtggtgggagaggtcacttgccaaatgcaaagatatatgtttgtccctcatgtaaaggattgggaagagtcactatgtatccatgcacatccgtttgtagttcgtgcagaggcatcgggaaagtaataaaggattactgcttgacatgccaaggttcacgggtggtaggcggcatgaaacatgtaacattggatatgccagcaggcactgtacactcagattcaattgcctttgttgaattatctttcgtctgatagatacatgctcataagtctagactgtgtggactttgaagttactttgtgcaattgccctatattctaatggagttgcagagagtcatatacgcactggctctactggaaacttcccaccacaacttggatgcagttgagctaacacttagttgccaaaagccatgtgcgtgtacatactatgatactgtaccca

SEQ ID NO: 282471 - DNA, 707 bp, Zea mays
ggcgaagggggagatgctaaatacttctggcatgcagatgtcaacagatcctaaccactacggggtatttccacattcattctgcaaccaacatgtggtttcatttcagacgagttcagttaccagtgtatcaggagccataccagtttgtctagacacttccagtggaatgaatggcaatatggcgatgttgaacactacaacttcaacgattgtatccactggttcaccaaacatgagtgctgagtcttcttgcccgaacctcaagtatactgcaccgttggctgtggagtggtcctatccggagctgcaattgttgaatgatggcctcaacaagtatgcaaatgaaccaggaatcatgaagtacataaagatagcagccacgttaccagacatgacagtaagagatgttgccatgagatgccaatggatggcagcgagaaaagaagctacaagacgacggaaacctgaagaacattatcttggaaaaaagataaaagatagaaaggataaaatggctgagccgtcatcatggggtaccaatcctcctgttcagactgagatgagatcttcctcttctatgcctcctaacgccaaacacaatgggtttctctctgcagactctcaaattgatcatggcatgctaaatgtattggaagaaaatgctaagctactcaatcaaatagaggtaaatattttaacatcac

SEQ ID NO: 282472 - DNA, 977 bp, Zea mays
tcagcaaagcaagttcttgagcatccctggcttcaaaatgctaagaaagctccaaacgttcctcttggagacattgtaaagtcaaggctgaaacagttttcaaggatgaacagattcaaaagaagagctctaagggttattgctgatcacttgtcggctgaagaggttgaggacataaaggagatgttcaaggtgatggatactgataatgatggtatagtttcttatgaagagttaaagagtgggatcgcaaattttggttctcatcttgcagaatcagaagtgcaaatgcttatcgaagctgtggatacaaatggtagaggagcactagattacggtgaatttttggccgtctcgctccatttacaaaggatggcaaacgacgagcaccttcggcgggccttcctatttttcgacaaggatggcaacggtttcatcgagcccgaggagcttcaggaagccctgatggaggacgggggagctgataccatggacgtggtcaatgacatattgcaagaagttgacacagacaaggatgggaaaattagctacgacgaatttgtagcgatgatgaaaactggcacggactggaggaaggcatcgcggcactattcgagagggcgcttcaatagccttagcataaagctgataaaagacgggtctgtaaagctgggtagcgagtgaggttgcacctctgcagccgatgttcttctcttctgatcttcttttatcttctccaggcattgcccctcgggcccactaatgattatttgtggtccgggatttagatagccggagcctccctgattggtttactcgtgtaattagcagccttttccagtgtcgctggggagcatctgctgaaggattgcacacctgcatgcctggtcgtctcccccggtgtagtacctgacgctcaaaatgttgtaaaaatgttttggtgttgacctcaaatataatgcaatttgctcgctggt

SEQ ID NO: 282473 - DNA, 547 bp, Zea mays
ttagaagcaagagtaggaggagcagctggtctctcgccaagtcgcgcctctccctcctctcttctcttttctccctcgcgtcgcgcgctccacatgctgagcctgaggtcagtatccggctccaactcctccaggggcatcgccgccgtggtcggcgtcggccccaggctgggctcggcggtggcgcgcaagttcgcctccgagggctacaccatcgccatcctctcgcgcgacctcgagaagctgtcgcagctggcggaggagatcgcgcaggcggccaaggcgcaggtgttcgcgctgcgggtggactgcgccgacgcccggtccgtgcgcgaggccttcgagggcgtgctctccctcggccccgtcgaggtgctcgtctacaacgcctgcgagccgcctgcagccaacgaggacgcgcgccccgcgcccttcctcgccgtcacccccgacgccttccaccgcgccctcgccgtgtccgcccgaggggccttccactgcgcgcaacaggtcatccccggcatggtggagaggggcaggggcacca

SEQ ID NO: 282474 - DNA, 140 bp, Zea mays
caaatcaaagggttttcttcctttttttgctccgtggttctttcagccatatgtactatgcagcttgtgaatgtaaagctgtacctgtacggaaggtgacatgtttctagcttcgtatctagttggagctcaatatagcc

SEQ ID NO: 282475 - DNA, 613 bp, Zea mays
gaaaccctgatgtcatggatggtgtccataacaacatgattgttggggtcaatactgaagttattgcatctgaaggcatgattgtcactgctggtggcatagattgccatgtccactttatatgtcctcagttggcagaagaggcaattgcaagcggcatcacgacattggtgggtggtggaaccggaccagcacatggaacttgtgccacaacttgcactccagcaccatctcaattgaaattaatgttgcagtccactgatcaattgccaattaacatgggattcacaggcaagggaaatacttcaaaacctgaaggattggctgaaatcattaaagctggagcaatgggtttgaagctgcatgaagattggggaactaccccatccgcgatagataattgtttatctggtgcagaagattttgatattcaggtcaatatacacacagataccttaaatgaatcaggctgcgtggagcatacaatcgcagcttttaaaggtagagccatacatacatatcacagtgaaggtgctggtggcggtcatgctccagacatcattaaaatttgtggggtaaaaaatgtgttggcctttttaacaaatcctacccg

SEQ ID NO: 282476 - DNA, 509 bp, Zea mays
gtgggagtaatgcatcatgtggacgaaccacaccagtgacggcagaagcataatcagaagcagaagcccaagcgctgaagcttcaactcaacttgaagagcctgcctgtagaattgctctagctagctcctccgtgccactgcccttttgggcttgcctcaaaggtcaccggagacgacgagggagacgactaattaacagacgctgacagagtgacgcgcgagaggagaggagagttccgaaccccccccctctccgctgtactgtacatgagctgctgacgtgtcggataagtagtagtagctagcgtcccggcgggtgctggaaagaataataataataatgtaacgaaagatggctggccggcatgaggttgagggagcgaccgagcgtgaagcaacttgggcgccatggacaatacagttgggacacagtcttaataaaaaaaataaaaaaaaaaaaaaaaaaaaaaaaaaaaaaaaaaaaaaaaatataaaaataattataat

SEQ ID NO: 282477 - DNA, 527 bp, Zea mays
  unsure (1)..(527): unsure at all n locations
ccctcgcgtccgcccacgcgtccgcccacgcgtccgattcatttgaataataagctgctgagcgcctccagttccataatctgctgctgctactgcgttgttctctctttttttgtatctgctgctgtttccaagtaacgttcttttgtgcttgtctatgttgcacactggttaatttagggtctgtttggctgagatagcctagggatagtactagttgggctaaagtttagcccagcttggcttggtagatggctaagtagttggaaatttggctaaaaaaatagctcatctattggcccctcttgtttggatgcaccagggccaatttttagctagcttctaatcagctcttgtatccaaacccttccttaataatagttccatttcaaatattttgctggttacatcaatatcatgttaactttgcccaagtgcaagaatgtgttcacattacagttngtagtttgcttactgctctttgtgctgccatgatggancttctcgtaacctgagacatactatga

SEQ ID NO: 282478 - DNA, 556 bp, Zea mays
cccacgcgtccgcccacgcgtccgatggttggagccatagagaaaaacattcctaagcttttgaagcatgacaagcttttctctgccaagagagctgaaggttatgtgtattctctgtggtctttgttaccatcttgttgcaactacccatgtgatacgtcaagcaattttagagttttacaagatattttatgtgacactctgcaaaaccatcctgccttgcatggcattgtttgctccagtattcaggttttaatcaaacaaaacaaaaaagctctgtcagtttctagggaagaagacattcttgctgaggatgaaataagcaaatctgaaagaagagcaaaggaacgttatactcaaaatctggctgaggaaaacttgatagcgatacgtgctttctcttctacgcttctggaagcacgctgttctacattcttgatgtctgcgaatgatgctattggattattgcagcctgcgataagtgagatagcttccatatcagacaaaaacgttgttgggaaattcttccttgatgccataagaaagttgttggatg

SEQ ID NO: 282479 - DNA, 669 bp, Zea mays
acggtgaagtatgtgtaggggcagaggtggagggtggaggtagatgtgttgtatctacaaccaggtatgttcctgcttattcaactcgggtgaagtttgaggacaatgcatggcacgttcttccagcgaactcgtctgatccaatgggtgctgcagatcccgtgtggactgaaagcttctggaacactattggcctcagggtctacgccgtgcaagatccagcttacgattggcttattcttcttgccgggctcggaatcactgctgcatcttattgcgctgtacactttggcagagcatacatttcaaaggtggcgaagcttgactgaagcgtcagtgagctgccccactgataatgggtatctagagctggaaatagaactaattaggctggcaattcgtagaacattagcagcgcatgagacagggtgattaagctgcgagaaagccgcaataaattatgagaaccaagcacacccgaagcaagtcctccatcattatgcggacgtccaggtcgatgtaatattaatgaaattgtgaccgtgttacgttttgtgttgaactggtactggtaggtaggttatgacacgcctctagctctagttggtggatgttttcgggaacgtgtttttctgtttgtggatcctccctactcaggtttggttgcgt

SEQ ID NO: 282480 - DNA, 641 bp, Zea mays
tcagttcttcttaactctggggtcgtctcacatcttgttcatttgtcaaagtccatggatccaattttgaggctaaaatctgtatgggctctcaggaatattatgtttcttcttagtcctaaggataaagacttcattgttaaggagttgaccttatctactctttcaagcctcatatgcgattctgaacattttgttcaagaacaaaccctggcacttgtgcgcaatcttgttgatggatatgtggactctgctaattttgtcattggtgaagatggaataattatgaatgctattgcaagacaactgaacaatgcgtctgccccgggagtattcgttcagggtatgtatgtgcttgcaaacattgcggctggaaacgaattgaacaaggaagctgtgatgaatgttcttctgcctcacagagcagatcgcatcaaaccattgtttgcggtgaactttctgcaaagcaaggataaacaattgcgagttgccacgctgtggtgccttctgaacttgatttacccaaaatgtgaagcctcatctggtagggctgtcagactgcaaaatgctggagtgatccaacaagtgaaaaacatgataaacgaccactgcttggattgcaagcttagagcacgtatggt

SEQ ID NO: 282481 - DNA, 527 bp, Zea mays
tactccgccattgaggtgtttgagctcatgccaaaatatagatgtatgcctgatatggtcacatacagtagccttattaatggcttttctgaacaaggccttgatgaaatggcctgtgatctgttcagaagcatgccatgcagggctgatctatttagctacaatgctacattgaagggtttgtgtatggctgcacgatgggatgatgctggagagcttatagctgatatggccacagaagattgtctcccaaatgaagtgacattgaatatactaatcaggtccttgtgccaaaagggactggtcaatcgtgcaattgatgtttatgagcaaatgcccaagtatggaattacaccggatcttgtcacatataatgctcttatcaacggctattctgaacatggccgtttggatgatgccctcaagttcttgagcaccatgccttgtgagcctgtcaccatttactattattctattctgaagggactgtgtagggctgaacgctgaaaaaggcacagaaacttgtc

SEQ ID NO: 282482 - DNA, 458 bp, Zea mays
gtgggcttgctttagatgattgtctacacagtatgtgtagtatatcaatctgggtgccttttcagctacagaatctatgagcatggcgctcaggcaggcatatttctgcaccaattctgcaacattttggtgatgggttctgatgatgcattctgggattgctgaacgctgcatgagatccaggacaactctctttagttgggatgctgaaggttgacacctgttgaagaatgttggttgcataggcattgaatatggtccaggcatttccttgaaacccatttggactttggagttagttgtagagatctcaggtattgactaagctaagcaaaaacgagtttgtaattgtgttgtccagtgctagcgacattttgccaactacacctgttgtaaatgtaccagacttgttgctgtgaatttgacacccctaaaggaattattatactcttccagct

SEQ ID NO: 282483 - DNA, 621 bp, Zea mays
cctactgtggtggtgctggaaatggctcggctgcaaagatatgtaacaacatggcaatggcaatcagcatgcttggggtctccgaggcctctgctcttggccagaaccttgggatcaaagcaactactctcacagacattttcaactgttcaagcgctcgctgctggagtagcgatacatataatccagttcctggagttatggaaggtgcaccatcatcaaggaactatagtggtggtttcacttccaaattaatggccaaagatttggatttggccatggcttctgcatctggagttggcttcaaatgccccatgggttccaatgcacttgaaatttaccgaaaactatgcgaggatggttgtgaactcaaagacttctcgtgtgcattccgacattactattctggcaagaatgaagagtgatcttggatacgctgcaaaatttcctcctttcgaaatcaataaaacagcaaataaagttaggacctgattatgtcccatgaattgaaacattgaaaccaatatctagaaagtgtgtttccttgtttcattattagattactttctaattggtctaaattcctggaaccgaacaggaccttattggaaagtttacagt

SEQ ID NO: 282484 - DNA, 532 bp, Zea mays
tggagatgcagtaccggtagttctcgtcggaatgtcggctgcctcgtttcccttgttgagcacatgtcacccatgtctgcgctaatggcagcttgtgggtcaagcaagctgctctcaggacctccagtatctctggtaaagcatctttgtaggaagcagtgctgaactggtggataatcaataggagttgccatgaagccataagtgagaagatataagcattggtgttcgtgtctcaatatcttacacacttgctttatattctatcttttccaaattataagtcgctttgattttttttgttacataattttttccatgtgtctaaatataacatatatctagatacaaaagaggatctatgtactaaaagaaccaaagcgacttataatctggaacagatggagtagctgatctagggtaggtaaattgaaacgcgcatagttttttttgtttctacaacatgcaatttaagtagatttatatcatgcctacttaagttgaatgtagaggtctgagattatattttgga

SEQ ID NO: 282485 - DNA, 611 bp, Zea mays
tttttcgcgggagaagaggcgcaacgcggcaccggcatggactcgggcagcaagagctggagcatcgatagctacctcaacgagcacttcgacatccccgccaagaacccgcccagcgaggcccgcctccgctggcgccgcgccgtcggcctcgtcgtccgcaaccgccgccgccgcttccgcatgttctcaggcctccacgccctcgacgacgcccagcgccgcaacatcctgggaaaagttcaggttgtaattaatgtgcacaaggcagcgctgcattttatggacggtataagacgataccacctatctcctgagcttatcgaagaaggattttgtatcagtccagatgaactggcagcaattactggaatccgtgaagactctacgatcctcaagtcacatggtggaatcagtggaatatctaggaaaatcaaggcatcattggatgatggcatcaaggaaactgaaatagcaaccagacagaagctgtatggcagcaacaagcacaccgagaaacctcctagaagcttctggacgtttgtctgggacgcgttgcatgacctgacgttgattattctaatcgtttgtgccgttgtttctctaatggg

SEQ ID NO: 282486 - DNA, 532 bp, Zea mays
ggtatcgaccttaacatgtccctgcctcaggctctgaagagatggcaggcgttcgaggacagcagccactttgtcggtgcgacctcgtcgtttgttgcgagcctggataacactcagaccagcatccctacgaggcctcctgggttcgcggactcgttcacctctgccgacggaagataaagacatttagcgctgctagtaagggtgtgcaaaaaccttatgtttccgttgaaatggaagctcgggcgatccttgttcattcttttagtctcttcacccccgccaccaatctttccatgtctctttattcgtctctgtactgccgtgtagctgctctttggtcgtgtatgctgtgatcttgtcccgaaaattgcctggaagttcgaagactttgctaactggtttatgtcatttgctaagattaaagtagaaggatgctagagctgtatggttgtatcgggtactgacaatttgcaaaggaaggtgattctgtgttcgtccaaagaagtatggccctggcctgaagcttttc

SEQ ID NO: 282487 - DNA, 261 bp, Zea mays
  unsure (1)..(261): unsure at all n locations
tcgggacaagatcacagcatacacgaccaaagagcagctacacggcagtacagagacgaataaagagacatggaaagattggtggtgggggtgagangacattaagaatgaacaaggatcgcccgagcgtctatctcaacgcaagcataaggtttttttcacatccttactagcagcgctaaatgtctctatcttccttcacctctgccgatggaagataaagacatttagcgcggctagtaagggtgtgcaaaatgtctg

SEQ ID NO: 282488 - DNA, 814 bp, Zea mays
ttttagtatgaagcaacagtggctacactttcacaaatggagaagagagctgtaatgacagaaacaatgctggaagctacaaagcaataccagactgttgcttcaagttattcttttggctacattttacttccactttccaagcatctatatcacttacgagctattattggaagtctattacttcaaccgcggcatgactacttttcatgtgtcccgctaactattccttgagttggtttcttttcctctccaattattatatttttttcatgtacactactaacattttctcgatattcctacttttaatttaataagcttgaaatctaatttcatactacaatacttcatttacttgtaaccttctatagttcaattcacctcgtgcataccatgttcttgggaagataaatcaagaaccaaaccaagatacgtcaacaagagaatcaacctgctttctaggggacttggatggcttgacaagagcaaggcatgcccctaaagtcaaaagttaaccaaaaataactatctgggttcatgacttctggtaccaggccctacatgtcattatcagagcccttgtttcttactaacctaattgatctagaaagatcatacaaagttgagtatcagtggagtcacatatttgaatttttttagcagggaatgcatgattctgctgaaacatcttgaggctaaactcatctagagtccaagatgaaggcatagctcccgacaagatctggatttttcattaatgcttggattgcctgatcatgacaacaatgtgttgaaatcaacttatatgttt

SEQ ID NO: 282489 - DNA, 467 bp, Zea mays
  unsure (1)..(467): unsure at all n locations
ccttctcgtccgctttattttgtctggtctcaagggccaaatgttgctttgtctctgattaacattatgagcggcacgtcaccgggtgatatgcagtgcagcagcaggccacgctgaagctgaagctgaagctgaacctcatctgcaggggcacaggcaaggagcagatggcagtagtgtagtgacgctagctcatggaaaaaaggtagaacgatctgaagcaggagttacagacaatgaggaagatgcgcttgtttacagctccctaaaaaaaaagagataaatgcgtcgataaggccaaccttgttcatcatttggtttggatttttcggggaaaaaggggaatcaagttggtgtaagctgtagttgctttgttctgacccttggctacctgaatgagtgggtcaaaattaaacaggcactgcgctaattaagtgctgaacaaaaagaaannaaaaccatncaaa

SEQ ID NO: 282490 - DNA, 715 bp, Zea mays
gtctcggttcacgcctatcctgatagctggctaccaaaggcaagtatggaagaaaaagtcaagtacctttctgtctgggttgattcacacttgaatgatagtgaatacgtcttgagaaagcctgtcctgtttacagaagtaggttacctccaacatgcagaagctaacagcacagttgatggagacactcttctacaagttgtctatgacagactatacgattcagcaaaaaagctgcaagcaggaagtggcgctcttatttggcagttgatggttgaaggcatgcagatgtaccatgatgacttctccatggtggcacgggatcgtccctccacatataagctaatgaaggagcagtcatgccgactgcaaagtctatatggaaatgagggagaccctacttggcaatgctcaccctaggttttttcttcttcttcgtactattggtttcgaaaccttccacttcatgcaacaaactggattgttggaatcattcagaaagaggatgattccaatgatgaacaaacatctgtgtggtaaatagcttgttcatagatttatagctgaagagctagactgctagtggaaaatccacttctgacaacaaacatgcattctgtcatatcacatcatgctgtacgttgtacaattaatatgacgtattagtggtcaaagtgaaaggagcaccaatacaagctatgatatctactgctgc

SEQ ID NO: 282491 - DNA, 1140 bp, Zea mays
cggatcatactgatggtacaaaattgtgtaaaggctcaaaagaggttgagcaaccgagcccagtgtccatccttgagcctccaattaatgaagatatttgttttccacgatgtttcaactatgacttgcaagggatggctaacaaacagagaggttgccatcaatatcacaatgaatctgaagttaacatgtcaagtgatgatgaagaccattctttttaccaatctttggaagcatttcaggtcgaggaaaactgggacttctcatatcttctcgacatacttatatgctctggtatcatagttgttgactggcagctcatctgcaagtcatggtacttgcctggttaccctgttggccctcatgtctttgataggcttgaaaggaaatacaataaaatcgcaacatgggcaaagcctgagaggaggcttctttttgacctcgtgaattcaattctttccgaggtccttgcaccatgtgttgatgtgcacccatgggtgcagcctagtagacactgtgtggcattttggggccctgaagggcctgttgagaaggtttggcagacaattgttaggctgcaggaagactgtgtcacaaggcatcctgatgagatggttcttgatacaaattggctggaagtaggcaccgacatcaatatggtggggaagcagatagctaggatgttacatggcgacctcttggaagaagtcatagtggacttccttggttgagttggtagtttcatgtggacataactagtaactaacaacttcggcaacatggggttcgctcaaacttcaagcagattatgctgaatatgtaacggcttttcaagtgcacacatgctgcatttttcttctggttataataggagctatgtattatgtaactgcattggagagcaaaatatacaggccaaaaaaacactactgcaggtatttttcgattctgtactgctaagctgtacttcctggtcctatctgatcctttgatgggtgtagtacatgtaaggaaaatggcccttaatctagtttggttatcatgtttgatgaccaacatgatcatttggactaatatttgattggcgaaaaagtggtctgatttaggcaaaaaaaaaaaaaaaaaaaaaaaaaaaagaaa

SEQ ID NO: 282492 - DNA, 683 bp, Zea mays
cccacgcgtccgcaaaacccctcgcctgcggcttcgcgttggccggcaaccgccgctgttgccgacacttcaacgcgtacctcgcgcccccgcgctgctgatgcgatcagcgacgcacgccagatccgagcttctgtaggaccttcagccggccccgtcccatgggggactgcgtcgtcgcggacggccacgtgcaccatccctcggatgaggtggagggcgcggttccattgacggtagccgtggagctcgatgagcgggcgggagagtcacgggaggagggtggtgggcagcggaagaaagtgggcgggatccgaagggagccgtcgttctcgcggtggtgcagggacacctctgtcgccgccgcctccaatactgccgttgctgcggcgatcagcgacagcgacagccactactcagaggagttcgacctaccgctcctgccatcctcctcgggcggcgggagctcacctatggacattgaggcgggggcgacggtgagatctgatgatctgccgatctccacgaggttgcttgcgaaagtccatgggttgataacgtgttggtaaacgctgagcacatgcttgactctgtacaacaatgagatgctggggaacacatgtggaagttcccggcgcaattcctgatgaacacggtgcaattcacgatgcaggctgtggcgt

SEQ ID NO: 282493 - DNA, 941 bp, Zea mays
caaagttttcattggactgattgttggtgccatgctcccatactggttctcagcgatgacaatgaagagtgttggaagtgcagcactcaagatggttgaggaagtccgcaggcagttcaacaccatccctgggctcatggagggcattaccaagcctgactatgcgacgtgtgttaagatctctactgatgcatctatcaaggagatgatcccacctggtgcacttgtcatgcttacacctcttattgtggggatcttctttggtgttgaaaccctctctggagttcttgctggtgctcttgtttctggtgtccagattgccatctctgcatccaacactggaggtgcctgggacaacgcaaagaaatacattgaggctggtgcatctgagcatgcaagaaccttgggcccgaaaggttcagacccacacaaggctgctgtcatcggtgacaccatcggtgatcccctcaaggacacctcaggcccctcgctgaacatcctcatcaagctcatggctgtcgagtcccttgtctttgctcccttcttcgccacccatggaggcatcctcttcaaatggctttagaggaagaatggaagatggatgggtagtttatttttgccgggggagagcactagatatatgtcatagagaagtttcagtttacccatatggtgcacttcatccttttttgtttcgcttgtactgtgtcgcagtcttgttgaacttgtcagccgtggtatcacctagtttttgggtctagatgcagtagccgagtggagcaaaaacgtctagcattctacaggattggaatttggacatggatgtgttgggaagtttgatactgcatgtagatatttcgatgatgatgatcaaggaatgcccaagtcagatttccctaaaaaaaaaaaaaaaaaaaaaaaaaaaaaaaaagaagggcggc

SEQ ID NO: 282494 - DNA, 382 bp, Zea mays
ttgacactctttttcaacatatatgactgttttcattgttataacctcttgccatgctgcatgtttcattcataatctatattgtttctattcagattgccatctctgcatccaacactggaggtgcctgggacaacgcaaagagatacattgaggctggtgcatctgagcatgcaagaaccttgggcccgaaaggttcagacccacacaaggctgctgtcatcggtgacaccatcggtgatcccctcaaggacacctcaggcccctcgctgaacatcctcatcaagctcatggctgtcgagtcccttgtctttgctcccttcttcgccacccatggaggcatcctcttcaaatggctttagaggaagaatggaagatggat

SEQ ID NO: 282495 - DNA, 799 bp, Zea mays
ggactttagaacatcctcagaagaagactcagaggaagactgagaagactaatatgggagcccggaggaagattctatcttaaaaaaagagggttttattgagcatcgaggaacaaaagaatttagtctaaaataccaaaaagaagtagatcggttttttttcattcttcaagaactgcatatcttgccgagatcctcatccctaaaggtacttgacaatagtattattggagtcgatacacaactcacaaaaaatacaagaagtcgactaggtggattggtccgagtgaagagaaaaaaaagccatacagaactcaaaatcttttccggagatattcattttcctgaagaggcggataagatattaggtggcagtttgataccaccagaaagagaaaaaaaagattctaaggaatcaaaaaaaaggaaaaattgggtttatgttcaacggaaaaaatttctcaaaagcaaggaaaagtattttgttttggttcgacctgcagtcgcatatgaaatggacgaagggataaatttagcaacacttttcccgcaggatctcctgcaagaagaggataatctccaacttcgacttgtcaattttatttctcatgaaaatagcaagttaactcaaagaatttatcacacgaatagtcaattcgttcgaacttgcttagtagtgaattgggaacaagaagaaaaagagggagctcgtgcttctcttgttgaggtaagaacaaatgatctaattcgcgatttcctaagaattgagttagtcaagtctactattttgtatacacga

SEQ ID NO: 282496 - DNA, 543 bp, Zea mays
  unsure (1)..(543): unsure at all n locations
gcattgtcacagctgtctaactgtgccctaacacagaccgaagcgtcgcggcgctatctcctccgcggctctgcgcgcagtcgtgttggcaactgcagcggggcggcggcgtgcgtccctgctgtgagcttcatcgccccgtatcaagctagtttaggctgtcagcgggccacaacttcagccacacaacccggaactccgacaaccctcgcggctcgtgccgccctctcccgctcggtcgttcccatggatccaccgcaagagttggccgccgccggccgcaagcggcgccggcgaggaggcgtccggaaccgcaaaaggctttcctcgcagaaggggctccctccagcgactgcgcccccaacgccggcgtccccacctgtcaagcggcggcgcaaggacatcgctggacaggccgctgctatgccgaagagaggcaacacctcgagtctactggacaagatgcgtgcaaggttatctggtggccattttagaatgttaaacgagaagctatacactngcagtggagaggatgcatttgac

SEQ ID NO: 282497 - DNA, 606 bp, Zea mays
atttacaagtacatttttggaaaaaatcatgaactagattggcacacgcgttacaaaatgattaaagggatttgtgagggtttacattacctccacgagaatgacagagctccaattattcatttgaacttgaagccagcaaatgttttgctagacgcagccatggaacctaggatcacagattttggtttatcaaggcttattggtgaagggaatactagaatagtcaacacacacactcttggaccaatagggtacatggcacctgaataccgtgacatgggggaagtttcacgcaaggtagacatattcagcttgggtattcttatactagagattgtaactggtcaagacaatagtaccaaggttgactttatcgatcatgtatgtgaacactgcatggaagggccacaaataaaatttatgtatccctctctggaacctgaattacatgatcaggtagaactgtgcatcaaaattggcctagagtgtgtccagacagatcgaaaaaaaagacctactgcaggggacattatacgtaagctcgaggaaggaaccaaattgggccctacaccatcccgtgaaaatatactacagaaattggta

SEQ ID NO: 282498 - DNA, 510 bp, Zea mays
ggatgcgtgggcggacgcgtgggcggacgcgtggggtacaatctcaagtcttattgtatttttggactttggtgctcatctaactatgcagagtgctacagctaatggctatccagactcggaggagaaaaatggttctcagaaatatgatgtcttctttcatttgtatgttttattacatttgggtactactactcatctcatataagaggaagtgttggaaaatagagagaaggataagagttagagaacttagaagcaaaatggttctcagaaagatatcatctaggaggcttcactgtgcaaaatccaccacgaagcacagaagaatattttaacttgtgccatgctagagctagaaatattattgagagagcctttggaaggctaaagggccgctgggctattttaaggtctccgtcattttttccggtcatcgcgtggaagaggaaaaagtaaagggtgtggacttatttgaggatgaagcattggtgaaggcactctatgagc

SEQ ID NO: 282499 - DNA, 442 bp, Zea mays
cccacttgtttcgcccacgcgtccggtttgtcatcgcgcgagcgattaccccgccgccgccgcgtcggcagcggcgatggcgtcgtcgttgtcgcgggcgctgctccgccgcgtcgcagaactggctagaggacgcctccgcgccaaccaccgcatgctctcatccgcgtcgtccaccgccgccatcgagagggcttcgcagttgccggcggaggcccaggccgtgcgcatgacggagggttgcgtgcggagattaaaagaattacatgctaaagaaccatctgctgaaggtaagatgctgcgcttaagcgttgaagctggtggatgttctgggttccaatattctttcgctcttgatgacaagaaaaatgcagatgacaggttttttgagactgatggtgttagattggtcgtggatgacatctcatataatttcgaaaag

SEQ ID NO: 282500 - DNA, 327 bp, Zea mays
agattaggtcattagaatggaaaattggttctttgcactatgattccatttgtgcctacctaggccccgttctaaacctctaaaactaatagtcagcaactaaaattagcggagaggtttagaatgggtcaggtaatgaaccagctaattgttagctatagacgccaggtagccattagttgttagctacttcagcccagctaaaatcagcgacgaacttatgagctatctgacagcgtgctcataggggtgcacaaaggggccctattgacggccaagtcactagaggtttcacaggtctggaggacagcaatggacaatgacgtg

SEQ ID NO: 282501 - DNA, 541 bp, Zea mays
catcacggctgagtggcgccaccgcccgtggggcccatcactggtgcgcgcgctcaataacgagtgagcgcgccaccgtcgagcggcctttcggcggtgcgcacaaggccagcggtcgaggcgccatttccttagtcgactagggtctccgtctctccgactgctagttttcctgcatattcgagaaatatatggatcttttctgctcttcaggtccttctcttggttataggcctcctatagtcctatccaggccttcctgtatcaaataccaatcataggttggattatgcagtaccgattcgagattcagaaaaggagaaatttcaaaattttcggtttctcatcattctggtgttgaacatctgaagcagcgaatcttgtgacgccatttcaggtgcctgtcatcgttgacaagtagcaaaagtgcaggcttgttcaatgcacctaatgaaatccctgccaactagtagaaattttatttttaatcacaaactaatgttttatgccagcatatcctcggctataagtttctatgaat

SEQ ID NO: 282502 - DNA, 622 bp, Zea mays
ggccgaattggatcgtcagacgctgggggtgagccggggatggaggcgactgtggaccacctgagcgcggcgtacgacgacttcatggcggcggcggcggctgtggtggaggcccgcgtacagtcgggcggcgagaagaagacggcggccacggacgccgcgctcgaggccttcaagcagcgctgggagatcttccgcgtcgcctgcgaccacgccgaagagctcgtcgagtccatccgccagcgcatcggctccgagtgcctcgtcgacgaggccacggggtccgcctccgccggatccgttgccgcccccggcatcaagcccatcagcgccgtccgcctcgagcagatgagcaaggccgtccgatggctcgtcatcgagctccagcacggcgcctctgctcaagggaccggcggcagtggcggtgccgctaccccaaatgccggcgctggagggcaacacccggaggagggtgcccagtaggtatggactatggagttactgaattaaactagtagcatcgcccttctcatatgaaaattgtagcatttttccttcaatagaaaacaaagaacttgtcgttgctgtgtttctatgagtgacagcattaaccttgcgtgtt

SEQ ID NO: 282503 - DNA, 518 bp, Zea mays
aagtccagtgagaatgagcgacccttgtgtggagttgcttctaaggagaatccaattcagctggctgcaggcagagctcagcaagagcctccaccatccaatgtggaagataaagtagaaaatgatcaatttttttttgaaggcatagttcaaagaaatccttctagtagacttgtaaaaggcagcgagtcatttgctattgttgcttttggaattcagatactgcagcatcctcagttctcaaaactttgttgggctacgtcaaagctacgggaaggcccctgcactgatataaatggaccatggaaaggctggccatttaattcctgtttgttgcagagcagcaccttacctggtaaatcactaaatggaggggacaatgttgtaaagggaaaggacaagtctgtctgtgtgagagggctggttgctgttggcttattagcttatagaggtgtctatgggtctgttattgaagtttgtgctgaggtgagaaaggtgttgggactgttagtcgggac

SEQ ID NO: 282504 - DNA, 677 bp, Zea mays
tgggagtcctgaagcaatgaagcagatatgtgatagtgttgttgtgcctaacttgcgcctgcgggatgaggatgaggagttgtttgagtgcaattgggtggaatatgttaggcgtgactctgagggtagcgatgcagatacgctcagacgggcagcgtgccggttgctgcgaggccttgcagcgaactaccgggagcaggtggctgcactcgtgtcagcacaggtccagcagatgttggcagcatatgccgcgaatcgggcaaacaactggaaggagaaggatgctgcaatataccttgttattgctcttatgcagaagcctggtgccacaggtggcggcacagcggtggttgacatggagagcttctttacatctgtgattgtgcctgagctccaggctcctgattggcagtctgagccaatgttgaaggcaactgtgctcaggttcttgaaggagttcaaggatcagatccccaaagccactgcattggcactcctgccaagtgtagtgaggtttctgacacatgagtctaatgttgttcattcatatgctgcaacttttatcgagaacctgctgatcatcaaggatgctatcccagtaccaggggtgaccacagtaaccaggtctccacgttttgttgctgctgatatcaatccatttgccccacagatcattc

SEQ ID NO: 282505 - DNA, 411 bp, Zea mays
aactgctccttttccaccggcgattattccggccactgaccttcgttgcgtgccgctcgtgaacccggttcgagaatcgacggcgcgggcggctgcatgagagggtgatataaaatcgataaaaaggacgagcagcacgactctcattttttcgggggagggttgcggttgaagaggattgcgctggagaggacccaattttagggcggtgccggcgcgaccgttccgggatcgggagctttatctggggggcgcgagggatcacggcagcggcgacgaccgaccgacctaccggccggtcaacccaaccccaccaccaccagttcccgcggcccgcgtcgaggaagaagaagggataggagacggagacggagactgagcccggggtcgcaaggattgcccggggcatgc

SEQ ID NO: 282506 - DNA, 534 bp, Zea mays
tctatcgaaccacggcctcacatactcgcgcatatggcgtcaatggcagggcgtcttgttgcccggacgtcgtcctcctcggccaagcgccagcggttcagctccgctgttctcctcctcgctctcttccagagctcgtggtgctacgacgacgcggcggcgacgacgacggtggattacggttacaacaacgagcacgaggccgaccgggtggcgttcctccccgggcagccgaggagccctccggtgtcgcagttcgccgggtacgtcaccgtgaacgagcgcaacgggagggcgctcttctactggttcttcgaggcccagacgtcgccggcgcacaagcctctcctactctggctcaatggaggacctggttgctcgtccgctgggtacggagctgcttctgagttggggcctctcagagtcaacagacacggggcagggcttgagttcaacaattttgcgtggaacatagaggccaacttgctcttcctagagtcttctgctggggttggctttttctacacaacacat

SEQ ID NO: 282507 - DNA, 474 bp, Zea mays
  unsure (1)..(474): unsure at all n locations
atttggttttgtcaagttttcttcgcaaaaccaaagctacgcagcattgcaaaagataaacggtcaggtgcttgatggaaggaaaattcgggtgcactatgcaaacgggactggatgacttgtgatttagaaccagatagaaaatgagatgagcaggtgatgattgatgagcatccagcggctggatcttaaaaatccgcattcgccattgaagttttgttgagatctcgaagctgtaaaaactcggacgaactcaagcgagacaaagatttctcttggtgacacggactgttataagatgttttctgtgaggaaaaagttagtctatcatatttttacttgccactatttttatttggtttgtaaaataaaatgagttgatccactcatagttagttaatactaagggtatctacagtaacattcttttaattttattcnctaaaagaatattttttgtcctttacaaataac

SEQ ID NO: 282508 - DNA, 499 bp, Zea mays
tctctcacgcgtccgcggacgcgtgggttgcgatcagttgtgcagggctaccacacactgcagcaaatgaaatggggtccaatgaccgagcatgttctagacaatcttcattgcaagatagatgcattccaggcaaatcaagtactcaagctgcttcatgaccacactgtcgctcttggcttctttcaatggttaaagaggcaacctggattcaagcacgatggtcatacttacacaaccatgataggcatccttggacaagccaggcaatttggtgttttgaaggaacttctggatgagatgagccgagctcactgcaaaccaactgtggtgacctacaacagaataatacatgcatatggccgtgcatattatcttaaggaggctgtcaaagtatttgaggaaatgcaggaagctggttatgagcctgatcgggttacatattgtacattgattgatatccatgctaaagctggatacctagacattgcaatggatt

SEQ ID NO: 282509 - DNA, 330 bp, Zea mays
cccacgcgtccgaaaatcagttccaccatccctcactcccgtccaccactgtcatgtagtcttgaccagtcatgccctgggagtgctcctgctgatcctgccgtaaaaaagttaaatatcatttccttggactcagcttgccttgatcctgcccatgtgtgcttttttttaccgtcagtcctgtacaaggactatcattttccttctcggcatagccgtaatcatttcgatcgatttgtttccttacaatgtttattcatacctaatgcctcaaaattatggtatcgccaaagactctggcttcttgaaccattctgcagtttttgtctc

SEQ ID NO: 282510 - DNA, 863 bp, Zea mays
cccacgcgtccgcagagctcagcgccctgtctccctccctccctccattcctcctcctccgctctctctctctgcaggcctgcactgtgaggagactgtgacccggggacggagagctcctttcttctctctcatcggtcccacccttatttaccggtcggttgttcctgggccgtcccgtcccgtcccgtcgtctcgcctgggttctcgcttgcttctcaccatcactaccaccgtccacaccatcgcgagggcctggagggaagaggatgggacagggaggagaagtgaaggcggcgccggccgtgagggtgctggtggtggacgactcccccgtcgaccgcaaggtcgtggagctgctgctccggaaccacaaccaccagggcggcgccgcgccattccacgttaccgccgtcgacagcggcaagaaggcaatggagcatctccggctgatggagcaaggcggccagctggattcatgtgccgctgatgctaatcggataaccattgacatcgtgctcacggactactgcatgccggagatgactggctacgacctgctcaaggccatcaaggcgctgagctcccctaacccgatcccggtggtggtgatgtcgtcggagaacgagccccagaggatcagcagatgcctaaccgccggtgccgaggatttcatcctcaagccactcaagaccaaggacgtgcagcgcctgcgcaactgctccagcgccgctagacccacggacggcgcggcccaccagtgcgagagcttgaggagcagcagcagaaagctgcggtcggatcaggtcgccgcgcctgcccacagatcgcaaccgacgacgggattaaccatggtgctgcat

SEQ ID NO: 282511 - DNA, 859 bp, Zea mays
acttggtggatttattcttgggggcagtatcccttcatcattaggacagctggtgaaactgggtacaaccttgaaccttagtagcaatggtctagtgggtgacattccatcacaattcggccttgaatgtttcttacaaccaatttagtggaccagttccagataatcttgtgaagtttctgagttccacaacaaattcttttgatggaaacccaggcctctgtatctcttgcagcaccagtgattcttcttgcatgggagctaatgttctgaaaccttgtggcgggtcaaagaaaagagcagtgcatggccgattcaaaattgttctcattgttcttggctcattatttgtgggagcagttctggtactcatactctggtgcatccttctgaaatctcgagatcagaagaagaatagtgaggaagcagtcagtcatatgtttgaaggttcctcatctaaattaaatgaggttatagaggcaactgaaagttttgatgacaagtatatcattggtaaaggtggtcacggaaccgtttacaaggcaacactgaggtcaggggatgtttatgctataaagaaacttgtgatttctgcacaccaaggttcatacaaaagcatggttggagaactgaagacactaggtaaaatcaagcacaggaacttgattaagctgaaagaatcttggttgagaaatgacaatggattcatactgtatgattttatggaaaaaggtagccttcatgatgttctacatgtagttcagccagcaccagccttggactggtgtgtgcggtatgacatagccctcggcactgcccatgggttagcatatctacatgatgactgcagcctgcgatc

SEQ ID NO: 282512 - DNA, 407 bp, Zea mays
tctgtagtggagagtttcccagaagagctattttcagtgcttcgaacaatccagcttttgcgagggctgactgtagggatgggccttacattctcgtgcgctaagcattggagatcaatcgctgaggatgcattgttgaaagcaggaagacaaagcgcttcaaaatcaagaaagcaaaagagaagttttctcaggagactgttttggtgaagtagggataggggctatcaaagaacatgatatacggacattctgtgatgaaagtatgaaacggaattagccaacagctcaagccttcgattcttatattcacagtacatcagttcacaattcatttactttgggtgcttgttatttgacacaacgatgttgctcgttcctttaaaacaatggggtatttggatttt

SEQ ID NO: 282513 - DNA, 669 bp, Zea mays
tggtcctcctctgggagcgacgaggacatcaccggggtcaccgtcgatgaggacgagcgcaaggccccgctgttgcaaacgcactgccatggacacggtcacagccacagccacagccatgtgcataagccggtgcaagccgaagagcatgaagaccaacgtggtggtgtgggtgaaggtggctagcgttagcatcgacagctacaagtccgacaagatatgcttcctcgccggtgtgaagaagctgaggcagaaggatgcttatgaggtccctcgtgaagccgtctctgttgatgagttctgacttctgagctcgatttatttcccttatccgtagtatcattcgttcgtagcattttttgggtcccatgtcatcggcaattgatgtgctgcgggcctgcggttttgtagatttggaatcacatggatctgttgtgcctggcagaagacaacccgttcatgttatctgacgagacattcacatgtgtgatgtttcagtaatgtgaacatttagcacgtgttctggttctgcattggttgctcctagaattcatgtcttcatgttttactgtaaaacgtggtattgggctattagccgagttgcacagtttgttccaacaggtaatcctatatagctatctccagcagttgtatatggatctgtcccct

SEQ ID NO: 282514 - DNA, 870 bp, Zea mays
attttgttgtcttagaagctcttgaacttgttgaaaatctgggaaatatcaatgacttctctggaaagacaaggctattcctagtgttgcctgtcgctgtacttgatgctacctttatcatctggatattttcatccctctctagaactttggagaagctgcagctgcggagaagcatggcaaaacttgaattatatcggaagtttacaaattctctggctgtgtcagtgcttatctcaatcgcttggattggctatgagctatatttcaatgcaactgacccgttgagtgaactttggcaacgggcttggatcatcccctccttttggaatgtcctttcctatgccctcctcggcatcatatgcatcctttggtctccatctcgcaatccaacagggtttgcatattcagaggatgcaggtgagggagctgatgaggaagggctctctctagtaggcagtgcggtgaaaggaaccggagatatggtaaacatgcatatctttccggaggacaagcgtgcatgataagttttggcctgaatgcagctgtactcctggcagaatgctatgtgaagtacctttttcctctggattcacgacttagctgacatcttctaaagattgcgtaagattccagatgtacaggtggtgacttgtgttgaacgatttgaccaagagatgtttacttcagttgtggctacccaatacaaaaaggtcggcaaaataaactatcactgagagcataagagggtttgtctttgtaatccttgtgatggtgacgtagcttgtaggtgattgaaatgtatcattcccagagctgagatgtactcactccgttccaaattaaaattcgttttttttttattgaatt

SEQ ID NO: 282515 - DNA, 380 bp, Zea mays
tttcctctcgtccgcggacgcgtgggtgcggttctgccccgtcggcccagtcatcccggcgcacgaggccatggaggactgcgccgtgggcgggttccgcgtcccgcgcggcaccatggtcctggtgaacgcctggctcatccaccgggaccccaggctgtgggaggcccccgaggagttcaggccggagcggttcctggacgccactgccacggtcgccgcccccttgctgccgttcgggcttgggacggtggcgctgccctggggaagggatggccttgcgcctcctcggcttgactctggcggccctcctgcagcgcttcgactgggaggtcggtgggtgcgttgacatggccgaagcgtttggctgtccatgccca

SEQ ID NO: 282516 - DNA, 605 bp, Zea mays
ccccccgttctggttttcgtctaatctagattggatgggatgatgattcgaggcgttagcttattttagctgttatcccagactaaaccctggctcgttggttcggcggcctcccggtgagaatcgcatctccaatcaggatggagacgaagaaagtggagtctgtccctggtcataatcacgcggggagtggatgataagatcataaaaatcagacaatcatcggtcacaactcatactgttgtgtctttttttcccctgagccaccgaggccaggagtgattgattggtttaagctcagcgcacccagagtctgtgacattcatgggtagtgcctgttcgaggaagaggggccagctggtccaagaggatgatctctacagtgcgaggttctccaagagcggcagcttcaagtggctgctgcatacgctgccccgcagcaactctgctgatgtgcagcggagagcacaaggcccagctccaaaccggtgcccgtcgcttgtggagctgtgcgtggccaaagtctgcaaggacataaataggtattctgatttatccctgctgcccagagatcttagtcagcagatattcaatgagctggtgga

SEQ ID NO: 282517 - DNA, 402 bp, Zea mays
acgcgcggtcctagtctttctaatctacactggatgggatgatgaggcgtggcgttagctcattttagctgtaatcccacactaaaccctggctcgttgagttcggcggcctcccggcatggagacgaagaacgtggagtctgtccctggtcataatcacgcggggagtggatgctaagatcataaaaatcagaccatgcatcggccacaactcatactggtggggctttctttcccctgagccaccgaggccaggagtgattgattgggttaagctccggcgcaccctgagtctgtgacattcatgggtagtgcctgttctatgaagaggggccagctggaccaggaggatgatccttacagtgctaggttcttcaagagcgggtactttaaatggaagat

SEQ ID NO: 282518 - DNA, 887 bp, Zea mays
cgccgctcccctccgcggcctccgccgagcccctcttcgtcgaggccaagctccgccagcacatgcgggccgaggagcgccccgcgcgcggcgccgtgcccaggatcgcctacctcgtctccggctccgcgggggacggagccgcgctgcgccggacgctcagggcgctctaccacccggcaaacacgtacgtcgtgcacctcgacctcgaggctcccgccgccgagcgcgccgagctcgccgctgccgtccgcgccgaccccgtctacgccaggttccgcaacgtcaaggtcgtcacacgggccaacctggtcacctaccgtggcccgaccatggtggccaacacgctgcacgcggctgccatcctgctgcgcgagggcggtgattgggactggttcatcaacctctccgcctccgactatccgctcgtcacccaggacgatctattgcatgtgctttctgagttgcccaggcagcttaacttcattgagcataccagtgacatcggatggaaggagtaccagagggcgaagccagtgatcatcgaccctgggctatacaggcctgcagaagtctgacgttttctggataacagagaaaaggagtgtcccacctgcgttcaagctcttcaccggctcagcatggatgatgcttactcatcagttcattgaatactgtatatggggatgggacaatctcccaaggacagccctgatgtattacgcaaattttctttcttcaccagagggttacttccacactgtcatctgcaatgtccccgagttccgcaacaccacagtcaaccatgatctacatttcatttcttgggacaacccaccaaagcaacaccctcattatctcacactcgctgacttcgatggtatggt

SEQ ID NO: 282519 - DNA, 358 bp, Zea mays
cccacggtccgcccacgcgtccgccacgcgtccgtccaggtccgagaccccgggcaatggctcccggacaaccttaaccgagggaagctagacaactactactggctagtcgtggctctggaggtggtcaacctcgtctacttcttcatctgcgttaagtactacacctttaagccattggagatggtgagcggtgaggaggttgagctctaccaccatggcaatggcaccgacgacgccaagaagcaaggtggaagcttagagtgagcaaatccggatcccaacaagaaggcttggggtccggatgaaataattgtacttcgacatctctttaaaaaaatcgcacctatcttaaagc

SEQ ID NO: 282520 - DNA, 657 bp, Zea mays
acgtctactcgttcgcccacgcgtccggaccatggcccggggcaatggccatggccatgcgagacagggagggaggagaagttaccaagtgtctcaagcaaccctaccgcccgcccgccggccgcttcattgcatttcctccgctccatactcaccacgacacaccgccctcttcccttctcttctctcaagaaagaaccagctagcgcgcgcgcgcacatacaagcctgaagcctccccatacccgccatgtctgcgtcgccggagttctacaagccagcgccgccggcgttctcgccgtgcagctcgccgctcctgctgcacggggcaggggcggcggtgggagcagtagccgaggagagcgccgccgcaaccgtgtcgcaggatgaggaggaggactaccgctgccgtacgccgacgggcggggagagccaggtgaggccgccagggacctgcccgccggcgccgctgaagccgcgggcgcccgcggcccccgcgccgtgccggagcgcctgttcgaggtggaggtgttcagcctgcggcttgaggagctggagcgcctttttggcgcccgcgccccgcggtgcctgcgcccgcgccgcccgttcagaagaagcgccggaggggggcctgcccggagcccaagaagagatagta

SEQ ID NO: 282521 - DNA, 577 bp, Zea mays
tttgatgccaagggagttgacgaaggggaaggtgtacttgaggaaattgttcactacctacgagatcctaagcgttttacatgccttggtggaaagcttcctaaaggtgttttgctggtgggaccacctggaactggaaaaactatgctggcaagggctatagctggggaagctggtgttcctttcttctcatgcagcggtagtgaatttgaggagatgtttgtgggtgtcggggctaaaagagtgagggacctgttcaatgcagcaaaaaaatgctctccttgtataatattcattgatgagattgacgccattggtgggagcagaaatcccaaggatcaacaatacatgaagatgaccttgaatcagttgctcgttgaactagatggctttaagcagaatggcggggtcattgtcattgctgccactaacttccctcagtcacttgacaaggcgcttgttaggcctgggcgcttcgaccgtcatattgtggttcctaatccagatgttgagggccggcggcagatcctggaggctcatatgtcaaaggttttaagagctgatgatgtggatctga

SEQ ID NO: 282522 - DNA, 513 bp, Zea mays
ccctctcgtccgcggacgcgtgggttacaaaggaagcttttgaatgggttattggtgagattgaatcgaggtttcttcagtctttggtggcccctggcgagatgattggatgtgtggctgcacaatctattggagagaaaggatatagccctctctctccatcatatagccctgcatcaccaagctatagtcccacctcaccgtcttacactcctggctctcccacctacagtccaacaagcccgaattactccccaaccagcccgacgtacttcgcctaccagcccatcgtactcacccacatctccgagctacagcccaacatcaccaagctacagccctacatcaccaagctacagccctacatctcctagctatagtcctacatcaccaagctacagccccacctcaccagtttatagcccaacctcaccagcatacagccccacatcacccgcttacagccccacatcgccatcctacagtccaacttcaccatcttatagccctaca

SEQ ID NO: 282523 - DNA, 494 bp, Zea mays
acgtccacttgttcgcccacgcgtccgagcatacggaaggggtgtttctaataatcagccagtcaaggaaaacacacctgactattgagccactgatgtggggtttcattatatcggggcgtattggaaaccttagctaatagtgttcattagatatctccacaacttacttccatgtcaagaagctaagcagacattagttttaattctattgacgtactatatattactttggctgctgttaccatcttccatgtcattgttctgttctttaaattatatagtatatgatatctataagaacttgaagtttgtataggggaacgagtacgtggcaaacttctgctgctctgataaggttcaatttattaacagttcttctgtaaagcatagaaacgcttacttttaacacagaagatcaatgacaagagtctggattttttatgaaactgaaaatggagataggagtcaagcatttataatgtaactgatgc

SEQ ID NO: 282524 - DNA, 622 bp, Zea mays
ggtggacgaggagatggagaagaaggtgcagcagtacttgcagcgcaagggtttccgcctcactgagcttgcgctccaggaggagcgcaaccgcctctccacctccgccatctccgacgttgcgcttgcacggtctgacaatgatccagcgagatactacgatggatatagcagattaagaacatgggcatacagttctcttgatcaatataagcacgaattacttcgcgtcctttatccagttttcatccatagcttcatggatctagtggcagaaggacatatgcaggaagctcggtcatttttccatacatttcgggaagatcatgaggtgatgcattcaagggatcttcagaagctggaaggcgtcctgtctccttcacacttggaggaaatggaattggcccggtcttttaggaaaaataaatttaaaattaaattatgtgagtattcgtatgaattgcttctccagtatctccagaaaacacaagcccttgtggtgcttggagtaatcaatgagcacataacttttgaagtatctcctggtcagccctcattaatctttgatgaccctgatgttgttgctctgattgggacaagtaaggacttggcaacacagata

SEQ ID NO: 282525 - DNA, 613 bp, Zea mays
ttttcttttcacgcgcccgatacgcgtgggggcataactcccctcatccggggccttttaacggatctgacgccgtcgtcttccactgggtcgcgctcctgttcgctacgtcgtcagaaatgcaggcagcgccagcaggtcttgcttcacgctcctcgcggatggtggcccctccggcccgcgccgatgcagttgaagctccttccgaagcacaaagattaaatagagtttggaatggtcttttagacgccattagacacatgcaagtctcagccgatgagttgaggaggttgaccagacgcaaccatgtgcctgagtatgtagagcacctacgcaaaaatagattatgaagcccatgtgagtgctgtcactgaaattgcacaaggtctagaccacgtgagcacagatctggcggaagttcttattgtgtctgcaacctcttcttgaagattatgaagcccttggtttgtacaatgatcgtcgtctaccgcatatgaacgagcgtatatgagatatttgtttgcgagagagtctgtaccactaatgcatgtatcttatgaattgtactgcctttctgtcaagtctgtatcttatgaagccttagttagttgcc

SEQ ID NO: 282526 - DNA, 825 bp, Zea mays
ccacgcgcactcaccatcttccacgccgccgagtactctggggagaatggaggcgccagcaggtggactcggcagcaggtggcctccacgctgccgagttcccatcttccctcacgcggatggaggcgcctccagcaggcaccaatgcagttgaagctccttctgaagtgtagagattaaatagagtttggaatggtcttttagacgtcattagacacatgcaagtctcagctgatgagttgaggaggttgaccagacgcaatcatgtacctgagtatgtagagtacctgcacaaaaatagcctagttaatgccatgagctgttgtcactgaaattgcacaaggtctagaccacgtgagcacagatttggcggaagttcttattggtccgcaacctcttcttgaagattatgaagcccttggtttgtacgatgatttccaatgcgatggtgaagatatctctgtggactcggatgagatcaatgatcgtcgtctatcgcatatgaacgagcgtatatgagatatttgtttgcgagagagttcagtttgccattgatgtctgtagcttatgaagcccttagttagttgccactgttgttcctggtacttgtatgaattgggttatgaaaatgaagagttgtgttatgagttgtattttgtgatcatataatggcttcatcttcatgtgataattctgcacctgttgtcactgttgttatgagttgtatcttatgaagcccttagttagttgccactgttgttcctggttcctgtgtgaattggggtatggttatcaaaagcccccctatgagttgtattttgtgat

SEQ ID NO: 282527 - DNA, 407 bp, Zea mays
gatgagcagactcggccgcgcctctgctctctgtgccgtgcccctggctcagtggctctaacctccctgtgaacgacgctggtattcaggatggcatgggtaaagctactcacgggggcgcgggagaatcaccagcaggaggcgagggcgacgctgttccagcagctcaggcgcggcctgcggaccacaaggcccaacaagaggaggtgcacaggccttgagtgggtgaattaggcctatgactatgtatcgtggctccactatatatgggttgttcgtagacagggagagggcgtttttttggctgttagaactcaggcggcggcggcgatccgaggtgatcgtcttccgaatcggaccgcactttccacaccaccataatcaagcgtgtgctccgtcttaatcct

SEQ ID NO: 282528 - DNA, 885 bp, Zea mays
tgaaacagtagagacatctgattttagtgccttggaggctcctgcaagtgtcccagatgaaagccctaggatggaaatgaaacatgatcctgaatcggagttgatcgacactactaatgcagatgctgagcatgtaactgaccaaaaggctgaaaatgatgtggacgagccttttatgtccttggatcaacaatatgcccaagctgatgatgcatcaagggatccctgtccactccctggaaaatttgaaccgtccaatgaggacagtggcgacgcatacaattctgagcagacactggagatggaaggtaaaaggtttgtggcaagaaagccatgcaatccagcctttgctgctgcccaattgaaatttgaagagctgagtacaaattcgacagtcagcaggtccagcagcccaccgcatctggatggggtgagcaagtcaaggatgcacactcctagttcgcaagaagattacacgccaaagcaagatggcacaggcatacaagaaagctcagttggtcatgatactaaaatgagaattgctgcatcagaatgtgggactgaaatatcaatttcatccacactggactcaccagacagatcagaaggtgatggtggggagatcgtgttggagattggagctctggaaaacagaaactatgtcactggcaaagctgataaagactccagtattgtccatcccggggtaaaagatgctcctgaagcagaagcccagccgcagaaggaagtagaagagaatgggcatgttcctgcccttgaaacggaagcccagccacaaaaggagccacatactgaaccggaagtggcagatttgcatggacaattggaaaaatcggtcacatcttatgccacacctgaagggac

SEQ ID NO: 282529 - DNA, 721 bp, Zea mays
  unsure (1)..(721): unsure at all n locations
tanttttttttttttttttttttgcatagaaggcttgctttttctttattttcatagttcttgggtttccttggacatctaacccataggtgcatgttaaatacggccttattggaacagaaatacaaattttgtacaacagtgacagcagtcactcatttacagactcaacttcaaaagcatgcaccaggttcggcaggcactgggaaaaatgggatttctggatccatagcgcctaaagcctttcagactgcgagcaggcagcccaagttcactagacaacttcggtcacaacaaggtaatggacaatatgcacaacagatgccggttgtcaggttctcatggtgcaaaaaaggcagctggttcttgaagacccgcagagatcagcaaaagctttctgcaggtgctcatgtccactgttcagtggcatatatgtggggctgaggcacactggtttcctctttcctgatctgaatatagttccgtaaacttgggttgccacggtgaaatacaggttgttcacatgaaacaatcatcagcgttgtccaagcagtggtcaagcaccatacgaactctaagcttgcaatccaagcaggggtcatttatcattcttttcacttgtaggatcactccagcactttgtagtctgacggctctaccagatgaggcttcacattttgggtatatcaagtttagaacgcaccacagtgtggcaactcgc

SEQ ID NO: 282530 - DNA, 531 bp, Zea mays
tggatggctgttcggccttgggagagtcggttccttggcacttacgggacagatgggatttttgtagttaatgaaaccaggcaacctgacagaagtgcaaccaagaccccatacagaaaacctgttaaaaagcatgattcaacccttcaatcaaacatgttgaaccagaaggtcttcccatcaaactcagagggtggtggctcctcgacaaaccgacccagtggtttggtatctactaaatctagactcaagcttttacccagagaaggttctgaggaagccccgtctcgtccttcactaattgtgcggtccactagtaatccgaaggagaggatttccagtattaattcaaaggagaggactggggacttggattttcaagttcataaaagatcctccttgcctggcattggtccagaagctggcaaacacctgacaaagaaaggcatggttaaccgatccctgaaggccacaaaagattcccaaatactggggtcaaggcatcatcttgccagttccattgatccagtt

SEQ ID NO: 282531 - DNA, 551 bp, Zea mays
aggaaaacaaataccttgcttggactcgctgccgtcgccgtcgccaactataaaccaccccaacccaaccctaccgtttcgccggcgaaaccggggctggcggcgtcggggaccatgggggagtacgcggcggtgaagacctcggtgtggtgggacatcgagaactgccatgtcccccgctcgtgcgaggcccacctcatcgcccagaacatgagctcggccctcgccgccgccggctacaccggccccatcaccatctccgcctacggagacaccaactgcgttcccaaccacgtccagcacgctctctcgagcaccggcatcgcgctcaaccacgtccccgcaggtatcaaagatgcaagcgataagaagatcttagttgacatgttaatctgggctattgacaaccctccaccggcaaattatttgctaatattctggtgatcgggacttctcgaatgcccttcataagctagtgatgagaccggacaatattctactagcacaacctccaaatgtgtcttaagtgcttactgttgcagcaaaacatg

SEQ ID NO: 282532 - DNA, 526 bp, Zea mays
taaccctctctggaaccagggtggttgtcaagcggtgttggagttgggagtccttgccattggtacaagagcaagaagcaaggacagggaggggcgagaggaggaagaaagcgagggacactagaaaggtgcttgctttgtttccagttgcttcttctctctccctgggcgggagagaaagaagcaggagaggatatgggcgagatggtcgtggccgggtatggcatggacaaggctctgcgggccagcgtcagcttcgacacgccatgcggcgcgctgctgcgcgagcttgagcaaatatggacagagattggggagcgtgaacaagataaagatcgcatgttccttgaactggaaacagagtgcatgcgtgtgtacctgagaaaggttgatagtgccaatgctgagagagcccagctccctcagtcactgatggccaaagaagcagagcttaaagctctagttgcttctataggggaaaatggcccacgaattaccgtggatgaaaagcacacatcgttgaaag

SEQ ID NO: 282533 - DNA, 453 bp, Zea mays
ctcgtcgtcgtccatcctggctcccgcgccggcgccggcgccggcggtgacgcgcagcatcaccatcgcccgcccgccgtcgctctccgtcgagtcctacagctcctcctccgtcccgtcctccccggccagcacgcccgactcgccgctcgccgcaggtgggctccctctgtttttggtcgcctcgccgccccgttcttgggctacaaatcgtttctgtttctagttatgtctgcgcactgctgcgcagcagcgcaggactggatctccgacgaaatgggggcagtaaaagggatggaaaaaaagtatataaattttgacgttctattcacgttggttttttttcttctacgccctcttaagcgcgacgcagtcacagatctgccgctgcacagcacgcaatgccttcgtgatagcagatgatggttcgtgggaacttgggtggggagggtg

SEQ ID NO: 282534 - DNA, 417 bp, Zea mays
tcgtaacgggacccacaccgcgtccatcgccgcggggaggtacgtgttcccggcgtccacgctcgggtacgcgcgcggcgtggccgccggcatggcgccgaaagcgcgcctggcagcgtacaaggtgtgctgggtgggcggctgcttcgactccgacatcctcgccgccttcgacgccgccgtcgccgacggcgtcgatgtggtctctctcagcgtcggcggctgttgtcgtgccgtactacctggacgccattgccattggggcgttcggcgccaccgaagccggtatcgtcgtctttgcttcggccggcaacggtggtcccggcgggctcacggtgaccaatgtggcgccctggatggccaccgtcggggctggctccatggactgggcgttcccggttaacgtgcggatcggcg

SEQ ID NO: 282535 - DNA, 409 bp, Zea mays
tcgctgttcgcgtgggcggacgcgtgggcggacgcgtgggtgcggccctcgtggcatttctcaccaaggccgcccgcccgccctagactcaacaagctggaggtaggggaatgatgaccatcacgggggaatgggaaaagaaggattgggagaagagacgtccgtggaaatctctgcaccgggcgagattttacacgtgcaaatagatgtggtgcgctgataggggtctgttggatgactattttttattattttttcctaaattaagagttgggaatagaaggattgggatctgttggagatactcttaggaatctatcctaattaagggtattactttttttggcagctaagtgatggtccatacataactaatattttctcctcaactttcccttactgggatctt

SEQ ID NO: 282536 - DNA, 418 bp, Zea mays
attcattaggtggtgtatttggtgatacaaataaaagtgagctcggctgcatttgcatcctacgcattggcttttccaagcaacttccttgctcttgtggacacatatgacgttatgcgaagtggtattccgaatttctgtgcagtggctctagcacttcatgacttagggtacaaggcatctggtattagattagattctggtgatctggcctatttgtccattgaagcacgaaaagtgtttagtgcagtagagaaggaatataatgtacctggttttgcaaagatgctcattactgctagcaacgacctgaatgaagaaacaattgatgccctcaacaaacagggtcatgaggttgatgcctttggaattggaacttaccttgtgacgtgttattcccaggctgctcttggctgtg

SEQ ID NO: 282537 - DNA, 578 bp, Zea mays
tgcagcaatcagcttcaaggatcaaggagtctcaattgaaggaagaaacccttcaggcagcaagatgtggccaattagatcaaaattttgatcaacatattccttcaccagattttgaatttgctatggaagaatttaggcacttcagggaagtagttggtagctgctatgttgatccagctgctctggtaccagagtctttggatgacaattcagcaatggaaattatgttggttcaaagcgcaactgatgctgaagtcatcgaagaagtgctaaatcgacctactgaagttcttgttcaaggtccagcatcagaagttgttggtccatcagttgatgtgatttgcaattgttctgatggcatcaactcccaaagagatgcatctctggctgttcattcattggaacctgcaagtgacgaccttagaagtactgaccatgttgaggagaacacagttggctcacatatacggggtggtacaagcaaacatttaggtgatgctgcaatggaagttgaaactggaaacaggaacactgctttggctgattcacctcactttgacaaaccagctttgact

SEQ ID NO: 282538 - DNA, 378 bp, Zea mays
cgcgatcttcttctgctccaagcaaagccgcacccacctcgacggacggcgagcagcaagagggcaagcctgtaccctatcgactcgaacctcggagcggcggatcggtactcgtaggcagtggcggacatggcttcggcggcggtgatggtgagctcggcgggctccctgctggcgatgctgcaagagccggcgcccgagctcaagctacacgcgctcgccagcctcaattctctcgtccacgccttctggcacgagatctccaccagcgtctcctccattgagagtttgtatgaagacgaggagtttgtccagaggcaacttgcagcactagttgcctctaaggtatttttctacttgggcgagctaaatgatgct

SEQ ID NO: 282539 - DNA, 646 bp, Zea mays
cacagctttgccgcttgcctccgccggcgagggaagggacgaggcgccgagccggcaaccgttttcggggttgctggcggcgattggctgcggttccgcatcaaggctggtcgaacgctgcccctcctgattggtaggtagctcgagatggatctgattcttccatataaggttggggacctcgcggagtccaaatccttggtgagcggttacagaggtgcatggtttcgctgtaagatacataatatgcgtgtcaggcttggatacctggagtgttacttggaatacattgattatccaggcgaaaaaaaggaatgggttaggctctttcgaaagaactctgcaaggtccaaccaaaattcaagtgatagtattcacaccatgataaggccttcatttccaaaatggtattttgtgcatgaagttcctgagcagttcccaaatagtgatgtcacagcaattgttgatgaaacctggcaaattggtgatcgagttgattggttgaaggcaggttgttatcggtctgggacaattactaagataatcaatgaagatctggtcgagatagagctgccggcacctcccataggtgaaggaaaatgttataaagctaaatgtagtgatctgaggcctactctcgagtggt

SEQ ID NO: 282540 - DNA, 354 bp, Zea mays
ttgctttaaagaaggctccgtcgacatagaccctgaagcgccccccgcgtgggggagagcagattttagcaattggttacaggacagtgtttgccatcgggtgcaaggagaggtgggtttccttaaatgatgccaggtacttggaaaatatcctcctccttttgactggtcgacaattggacacggccactgaaattgctgcctcaaggggtgatgttcggttggcaatcttgctaagtcaggcaggtgggtcaattgtcaaatcgatctgaccttgcgcaaacactggatcagtggaaaatgaatggtctagattttgattatattgaggaagactggttagaggtatatatg

SEQ ID NO: 282541 - DNA, 441 bp, Zea mays
  unsure (1)..(441): unsure at all n locations
ctttcgttcaaactccatcagccgtgaacatgggcttcaagcgcagccccccgccgttcctcgccgtggccaacaagaccaacaggcaggtcttccgaggtctcctgggagtgaacttcgcctctgcaggatcaggcatcctcgacacgacggggagctccatcatcccgctgagcaagcaggtggagcagttcgccgccgtgcggcgcaaacatctcgtcgcgcgtcggcaacgggtctgctgctgccgacgccctgctgtcgcggtccctgttcctcgtcagcaccggcggcaacgacctgttcgccttcttcgcgcggaacagcacgccgtcggacgccgacaagcggcggttcgtcgccaacctcgtcgcgctgtaccagaaccatgtgaaggctctgtacgtgctcggngctcggaagttcgccgtgatcgacgtc

SEQ ID NO: 282542 - DNA, 406 bp, Zea mays
ctgacgcgtgggcaacagcagcttcaacgctgccaatcatttaatgagcagaagcctccgatgcatccacagcaacaacagcaggaaccacagcagcagcaatgcgtccaaacaccacaggatcaacaaatgcaagaacagaagcatctgcacaacttccactccttgccagatgcattatcggccttttctcagctttccccagccactcactccccaccttccgcattgcagacagttccagcattctcgcatcaacaaaacttcccagatacaaacattagctctctctcaccatctactggcccttcaatgcatggcatgttggggagattaccttccgaagcagcttcgagcctcccatgtgtggcaatgaacgcccctgtatcggtatctgacccatggt

SEQ ID NO: 282543 - DNA, 443 bp, Zea mays
cggacgcgtgggggagaccagggacttcgatggacacatcctcttcatcgaggaggaccactacatcttccccaatgcgtaccggaatgctcagctgcttgtcgatctgcagccgaagatgcgcccccagtgctacgctatcaatctggccccgtccgatgtgcacgtcgagaggcgaaggttgggagagcttggttgccgacaagatgggtaacatcggctatgccttcaatagaacagtgtggaggaagatccatgccaaggctaagcagttttgcgcgtgttgacgagtacaattgggatataaccaagtgggcgacggcgtacccgtaggtcggagctcctgtttacagtctcaggggatctaggagaagcgctgcgcatattaggcatatgccgcctgctccaaggccagggttggagcacatgtctgcgaggataat

SEQ ID NO: 282544 - DNA, 513 bp, Zea mays
ttattaaacaattaataatttattactggcagaagggggaagaagagatggtggacgaggcatgggagcgggcggtggaggcggcgctgcacgccggcggcgagtgggagctcgtcgccggcgcggagcctgacgcttgacggcgccgtcaagtgcacgcacgggcggctgccgcgcggcagagatactggagcggcaccagagcctggagcacctttcgatcgctggcgtcggggtcacgtcgctcgagggtttcccgcggctgcggaacctcacgcggctcaccctctccgacaaccgcatcgccggcggtctcgaccacctcgtcgccgctggcctgtcctcgctgctgctcgcccatggcagccgattcctctatgcgcgcgctccctgtttccccgtccaaagctctatggtgtccggctccttgcgcgccctgccgagcgccctacccgcttcctgctcgccgagctcggcttcgagttcctatctcccatgccgcggcactctact

SEQ ID NO: 282545 - DNA, 490 bp, Zea mays
gcctcgcgttcgcgttcgcctagtctccttccttttcctctcgctctccgcctccatcagctcgagccgcttccttccacccaccacgcaccacctgacctcccttccctcatcggctcctcctcggtcccactaggcaggaacgccgcgcgccgagccgagctagcggccggaatgcccgcgcagaagcgcccgctcccgtcgtctgcctcgcccggctccgacgccgacgtcgaggaagctcctggcgccgacgcggacggctgcggcggggccgaccaacggtcgccgaacgtgacgctgaacggagtggaggagcgggacggcgggccgctgcaggccaaggaccagcgccacgattccgacgctgacgacgaggaggaaggagaccgccaaggcggcggcggcggtgacgggagcgggagcggaggcgacgacgactgcgacagccagtcgtcgcagagtgaccgcgtgatggactagtttacgc

SEQ ID NO: 282546 - DNA, 261 bp, Zea mays
cccacgcgtccgatgagatgatgcttgataggtataagcttgtggcccttgatgtgcataccttgcacttgagatttagttgtataggccggtctcaatgcaggcatgcaacgtcggctctagctcagtaaccttttcctttcacaaagtttagccgtgttgtctgttttgtattggtgatagtgtaactttgaaaaatttcctgcttattttacgttgtttgggttgaaaaaaaaaaaaaattaaaaaattaattttaaa

SEQ ID NO: 282547 - DNA, 510 bp, Zea mays
gtcaatgcaaccatgacaccagtttccgttctgccaaccttttctgtaccacctgctgtgccaccctatggcgtgctgtctgcacctgggtttcctatgccaccattaccgcccggaccaccacctgtcccactgcagatgggttcatcatcatcgcaagttggtggccctcaaccatttgtctctggacttttgagtaaccttatgcggcatggtgtaatttcactggaaccacctagccaatcccaggattctgttggagttgacttcaatgtagacctcaaggtacggaatgagcctgtcatcaatgctttgtatcaggatctttcaaggcagtgtaaaacttgtggccttcgatttaaatgccaagaggagcatcgtgctcacatggactggcatgttacaaaaaataggaattcaaagaaccgtaagcaatcttcacgtaaatattttgtcacggtggaggaatggttaagagctgcagaaacagtaggaaacgatggagttcct

SEQ ID NO: 282548 - DNA, 426 bp, Zea mays
ttgactccacctggcttgcgtcctcccgttgtgcagccagcaagccagactcctcccctctccgaagactccgatcgtccggattcatccagatccgggcgttctgagtcctgccgaggctctagatcgcgtcgcgcacgatgcgacgcgacctgtcgcggtcgcggtctccgccgcgccgacgttggcggtcgccgtctcccgcgcggtaccgcggccggagggggcgcagggaccgaagccccagtcccatccgtagcaggtccccctatcgctcctcgtataggtgaccacacctcccgttacacgcagaaatctggcgagtcttcgttttattttttgggggttttgtactgaaaaaaaaaagaagtgaggcgatgctgaccgccttcattgaaattttggactattgcttgcttgatgaaa

SEQ ID NO: 282549 - DNA, 482 bp, Zea mays
cggtttcgtgtgcgagcaccggctgcagcgcttgatcgacgaggcggacgccaaccccaacgacgcggccaagcagagcgcgctcctgcacgagctcaacaagttaagccctgaagatgtcattatgaggtttgaggagcgaagccatgctgtggatagcaggggggctgcagagtacctgcgggcacttattctcactaacactatagcagattaccttccagatgaacaatctgggaggtctgacaagcctgccagccctgtagttgcaagagttgaaacaacgtgtatctgggaatgaggacagacctttcatgaaccctgggatatcagaaaagcacacctttacatgttgtaatggttgaccccaaatctacaggtagatcaacacgttttgctcaagaaatcttctcaacgatcttgtttacaattgctgttggcgtaatgtgggtgatgggtgctgctgcacttcaaaaatatat

SEQ ID NO: 282550 - DNA, 870 bp, Zea mays
gcaaacaagcactccgctgcagttgctgatactggcgaagtattcacctggggttgcaataaggagggccaactaggatatggcacttcaaactcagcatcaaactgtatcccaagaatggtggagtacttgaaaggaaaagtacttagaggtgtttctgcagcaaagtatcatacaatagtgttaggagctgatggagaggtgttcacttggggccatcgccttgtcaccccacgacgtgtcgtagtagctcgatgccttaagaagggtggaaatacaaatctgaagtttcatcgtatggaacgacttcaagtgatttcagtggctgctggaacaacgcacaatactgctttaacagctgatggtgctcttttctactgggtttcatcagatcctgatctaaaatgccagcagatattttcaatgtgtggaaggaatattgtgaacatctcggctggaaagtactgcaccgctgtggctacatcaactggtgatgttttcatgtgggatgcaaagaaacgtaaggacgaaacgccaattttcactcgggtgcatggtgttaagcgagcaacatttgtttgtgttggtgaaacgcacatgcttgtgctctcaagtatataccatcctgagtatccacccaaacctaaaagccaaggcttaaaatccatgttagaatggaacggtggaacagaagagctgggtgaagatatcctgtttgatgatgttcagcccaacagtggtttatcaggaagcagtggtgaaatgagcaaaggtgtgcctagcttgaaaagcctctgtgagaaggttgcagttgagtatttattggagccaaaaaacgcattacagcttcttgaaattgctgattccttg

SEQ ID NO: 282551 - DNA, 415 bp, Zea mays
gcggctcgccagccacctgctcctccagtcctctgggcatccctctccggctctccgcctctccccctcgtgaggaggtgaggagaggagaagcaacagagggggccgcggcgaccgaccgaccgaccgacgtgtcctgagtcctggtgctggtggtgggtgcttctcgttcctggcgggtccatacacggcggggtgctagctaagggagaggtgccggcgtcggcgtcggctgcgaggagcaggagcagcaggccaccgacggattcggagatctcgccggagaagaagaagagatctgcatctgtgagtgcccctccctactggccgtgcccgtgccgcgctcctcgtcacccgggatcgcgggaggcccaagggacgatggatcgggccgttacccgtcacggggttccgc

SEQ ID NO: 282552 - DNA, 389 bp, Zea mays
gctgttttgtcacactcacacagagccgagccgagcccaggctggcaggcaggcggcccagcccaccaccccacccccgcgtcgcgcggcgccgccggagccagagcgagagcgagagcgagcgatggacgcgctgccggaggcgtggtcgcaggtgcgcgcgccggtgatcgtgccgctgctgcggctggcggtggccgtgtgcctcaccatgtcggtgcttctgttccttgagcgggtgtacatggccgtcgtcatctccggggtgcgcctgctccgtctccgccccgaccgccgttacccgtgcgaccccctccccgaggacgacccggagctgggcttctccgcgttccccgtcgtgctcgtgcagatccccatgttcaacgagc

SEQ ID NO: 282553 - DNA, 284 bp, Zea mays
tcttctgatttctggattgaggctatcttcttcgttcggccttttcctttccccccaattggcttgtcgaaatgaagagagatatgggtaccctttttattgcattgagcttaatacttgtgggagactagtgaatttgtatggttactaggagacgcatcaagatcaaactcgtcggcctctaaagtgctgctaactgttgtttacggactagaggaataccaaccgtatcatagaacaaaggtggcaaataaaaaaatcaaacatggaataaatttggaccc

SEQ ID NO: 282554 - DNA, 453 bp, Zea mays
ttctttggaagagtgtgctataagttctacattagaaaagtagcatgtaaatctataaaatcaattgccatctctcgccccatgaatttgagatagacttatatatacaaactttggaaagttgtggaatgtcatattctaaaaaaatagcctactctattagttagattccaattcctcaaaatgaagggaaacaaacgggccttagtctattccatatcttgaaagagcaatcaagatgactttctctcttcttctcactccaacttggcttaattttgatccaaccatttatttgggccaagtttgtgtttgaagttgtgttttgcaggcatcaactattcacccccctctaggtgctctcaaattccaaaaattgggttttttcggggcgatgattggtcgcgttcctggatcggagacctcacctaaccccaggaggaaatcgtggtc

SEQ ID NO: 282555 - DNA, 623 bp, Zea mays
gattggaatgggaggacctttcgggatgatggctggatctatgccacctccgcctccattgtccaacattctgccggcaggttttccgcgaccaagtggaggcccacctcctccacctccacttccaccagctcagagccagccccagcagcagtctcctcaggcggcacagcaatcaccaacatcaactggattctttcagtcatcgggcatggggttctttccgcctgcgcaggtgcagcaatctccatctgcccaacgccagtgactcaacggtggctctggcattcatgggcgtaaaggcagcggcgcccttgtgtgttaactttgtacactgaacaatatttcactctgtgtcgagcttaaacgtggctggctggtcctgcaagcgaggcagggccaatggccacgaattagagagattgtagaataggcatgcgtcctctgctatgtataactattcacttttttttgttttgttttgtttgtctgagtagttttaacttttcctttttcccgtttgcattgatcccccgaggcagaagaaagtgactttggaaagaaaaaaaaactggtgtttgcccaactgatggaaacagttttaggcctgaaacagctgtggg

SEQ ID NO: 282556 - DNA, 468 bp, Zea mays
gttctttcctcctgtgcaggtgcagcaatctcagcctgcccaacgacagtgattcaactgtgtctatttgcactcatgggctttaaggcagcaccttgcattaactttgtgcattaaacaatatctcaccgagtattgagcctaaacgttggctggtcctgcaagcgaggcacggccaatgacgacggattagaaagattgtagaataggcatgcacgttgtagaactatccccttttttgtccgagtagttttaactcttcctggtcatgtcaagttgctagacttcgtttgtttttgatccggtctgcattgttcacccgaggcaaaagaaaacgactttggaaaactggggctgaaattgggacctcgccaactgacaggacagttttatggctgaaacagttgtagaacttactggtcttagtctcccagatatgatgtgaactgcccctttggcatgctgttt

SEQ ID NO: 282557 - DNA, 390 bp, Zea mays
tctttcactttgccctccgtctccagcgcctggtgtccgcctgccgcgcgcgcccgatgcagatgccgacgtcgcggccgatctgacgccatcggtcgccggccatgaggcctcgccgccgggccctcttcccgttgcacagcgcaggcgctggggcctgcggtgacccgtgggccgactgccagacaccaccgccggttcccagcactcctgattccggccctggcccttccccatcgctggctgcctatggcgatctaccgtgccctcccgttttgtcgccgtcgccgtctccgtcgcctgctcccgcgcataacggtaggaggaaccagggagggacccagggatacgggcccccacccggtgcaggcgaccacgatcgatggcacc

SEQ ID NO: 282558 - DNA, 572 bp, Zea mays
ctcttggatacatcaatggaccaccatatcctgggcctatccctcccatgtattattacatgcccactgtgcctatggattcgatgagaagtccatcacactacattcaaaatcaaccagctcctaatcctgttttatccccagaagctgctgagttaagatctaatatactaactcaagtggagtactacttcagtgatgcaaatctggagcgtgatgatttcctgaaatctttaatggatgagcatggttgggttccagtttcaaaacttgcagatttcaatagacttaagaaaatgaccgcagatatacacctgatattggatgcactgacaagctcaagtcttctagaagttcaggatgacaagattagaaggcgttatgattggtcaaagtgggtctcgctttctggtacatcagttgcgagcccatcatctgccagtgtgaatagcagtgtgggtgagaagaacattggtggtttttcaaataaggatgcttattctgaagatcaaaagacgcattgtgcattcaaagatattagatgtaatacaaatatgggatgggggaaaaag

SEQ ID NO: 282559 - DNA, 725 bp, Zea mays
ttttctcacgcgtccggattcaaccaggtaaccctattattacccctattgttttgaagaaagagaacgagctttctcatcatattttctattaaaaatgtggggttgatggccaccatgttcgaaaccttagctaagtacataagtacgagaagagggcgaacatcgttgaatacctcaagccagggacgggacgacgtgcggaggacggcaagttgaggatggtgggtgactttggacagcggcggaggacgtcttggtcgcgatcgcgtcgtggacaatcgttggcgtttatgtggacgtcggcgaagcggatggtggcacgcagactgtggctccaaggcggatggcggcacgcagacgatggctcgcggtctcctaccactgctcccctgcgccctcggtcaccacccctcctcgctggcggcgctgtagacgtcggccaaggtggacgccggcacagaggatggcggcgcgcacacggtggcatctgcagcgtgcagactttggctcgcgattgcctccacctcctcccatcacccacggggaatgttgctcggggttctgggtcgggggagcgttccccgtgtgatttgccggggtcgctgggagcattggcttagggaagcatgctccaaatagattgacaaatttccccgtagccctcggggcccgtttgtttgccttcattttgaggaattggaatttaactaatgcaataggct

SEQ ID NO: 282560 - DNA, 731 bp, Zea mays
cagatagctctgaattaaatgatagaaagaatgatatggataatagcgacgtggattcaaggccaagaaagaaaagggcagaaaaggctaaagtcaccaaaaaacagaaaatagttacaaatgagaggaaactgtcaactccaaaggctaaaaaggttgcaaaacaagatttgggtagcagtactgaagaacagggtggcaattcagcagaagaggataattctcattcatccgctgaggaagataataagagaaaacggcaacagactccagcttatgggaaacaagcagagcatctgaaatcgataatcaagtcttgtggaatgactattccacctactgtgtatcggagagtcaagcaagctgctgagaacaagcgtgaggcctgtttgataaaggagttacaggatatacttgaaaaggaaggattgtcaaaaaatccttctgaaaaagaaattaaagcagtgaagaagagaaaagaaagagcaaaggaacttgagggcatagacatgagtaatattattactagttcgcgtcggagaagtacatcaagtttcatacccctgccaccaccgccgcaaatagaagtggatagtgatgatgatgaagacgatgacgatgatgcagaaggcaatgatgcagaaggcgatgatgatgatgcagaaggcgatgatgaagacgatgcagaaggcgatgatgatgatgcggaaggcgatgatgcagaagacgat

SEQ ID NO: 282561 - DNA, 795 bp, Zea mays
cccttgcgtccgcccacgcgtccggatctctgtccccccggccccgagcgcaccagattcacaccgcgcccgcataggtgcgtgtgcctgcggaagctggttgctgctcgcgctactagctgtttcgcgcggtgatcaacaatccggccgcgggagcggagctaggaggccgagagacacaatgaacatgttcgatgggatggagagtgctgggtacggtggcggcgctgggccgatgggcggggtggtgcctgtcgcgggaccccaagccgcggctgcggtggacgcccgacctgcacgagcgcttcgtcgaggccgtcaccaagctcggcggggccgacaaggcgacgcccaagtcagtgctgcggctgatgggaatgaaagggctcaccttgtaccacttgaagagtcacctccagaaatacaggcttggaaagcagaccaagaaagacacgggtttggacgccggcagagtggcattcgcggcgcagggcataaatttctccacaccagtacctcctcctagcattccatctacggccagtgataatacggggtgagtagagtaggtgtcaaaacccaaaatcatatcctgcatgtttttgcttcctttaacatcagtacaaaagaacatgcattcgcggtctccctgagacagcaatagttctttactaacaatctagaagctcgattctgttgcattagcaaaactaaaaagaaccatgggcatgatgtacaatagaacggaattagcagcagcatgcagtcggcatgctctgaaataagatttttttt

SEQ ID NO: 282562 - DNA, 441 bp, Zea mays
gtcgaatccccctccccaacccaagggagcgcgcgcgtatgcctcctccagatccaaagcaacaagcaacagacagcgaggggcaccggggtccgccgcatgtgtgtggttcatggaggatcatgctttcctgcttactgcattagctcctgacgcgccaccctcccctggcgtgcatggatttccgttataattacccacatgattattggtaaagaaagatagggcaccgcttctaatttgatgggcattccgttaccggctgaacgtcaacaacaggtgcttttcagcggctcgggcaaaaggcgacaagtcagtgcagagaagatagtgattgaactaaccccactacaggaacagatgctgcaaagtctgaaagaaaggctaaatgtgccatatgacgaaactcggacagatcatcaagaatcgcttagggctcta

SEQ ID NO: 282563 - DNA, 585 bp, Zea mays
ccctctcttccgcccacgcgtccgcgtctctccatcgtgatctctagaatctgccagcatgtctctcgcttatcctctccacacactcatctctccctcacggtgccctccctccattttctgctggccgccgctgctgctctgctttccatggcggcgacctccctttctgctgcaaggaagtttttcctgccctggtgctcgtggctgctatttctctggccatgtcgagtccctctcctccctaacgctcacccctcctcaggtccgtgctcgtccagctcgcgcccactcccagctcggtctccacctccgtttcctctccctgtccgaccaagcacacctcgtcgtcgatttccttcactggaccgcgccctgctcggcttcttgcagcacatgtccagcccatgcgcccaaggtcatggagcagcaacaactatgaaacccccttcgtgtcgcgccctcgatgtgctcgatgaaataccgcaacaagctccacctcgatctatgccgacccgatcaccacttcggccaccctcggttgtaattttgcactgtctgggatggtgctaaatgccgtagggc

SEQ ID NO: 282564 - DNA, 561 bp, Zea mays
ctcctgcgtccggattttgccaataagttttgctgcaagggcctcaaggatgcctgtgagcgaaagcttgcttctttcgtctcttcaaggcaagatgctatagacttcatggagtgcgctcttgagctgggctgttccatccttgctgcttcatgcttgcaagtgctcttgaatgagcttccagagtgcttgaatgatgaacaagtggttaggatattctcttctgcaaataaggcacagagattgacaatggttggcaatgcatctttctccctatattgtcttctcagtgaagtctccgtgagtaccaacccaacatcggatgtcactgtgagtttcttggaaaagctggtagagtcggcatcagattctaggcagaagcagctggccttacatcagctggcatgcaccagatatataaggaaagattaccctgaatctgagtgcttgttcaatgctgccttttctgctggccatctttattcgttagtgggtttggctagattaggcctctctgaggggtaataagcattttgctctcaagttgctagactcgtgatg

SEQ ID NO: 282565 - DNA, 760 bp, Zea mays
ccaggcaaaaaaatatggttctttgcaagttgtctgtcaaggctacctgttacagggtcctgctaggggttcaacacttgcttttcatcccttggagcatttgcattctttgagttttcaccggcctggtgaaacagttcttcacattgctggttctactattgagcttaggtcacgtgatacaagcttagaggttgctgagatgcgcaatgcactctttgctgaggaggaatcgactgctttgtccacatgggcagtggcatccatttgtggatgcctcaggttggaacatgtaatgacactttttgctgccgcactcctggagaaacagattgttattgtctgttctaatctgggaatgttatcggcttcagttttgtccatcttacctctaatacgaccgtatcagtggcagagtctcctcatgacggttttgcctaatgacatgatggattttctggatgccccagttccatacatagtgggcgtacaaaacaagacatctgatgtgctcaaccggctaacaaatgccgtagtcattgatgccaacaggaatcagattaagtcctcttcagtcccacaactaccacagcacagagagttgctttctgccttgcgcccgtatcattcaatacttgttggcgaaagttatcttgcaagaaaacgccctgtttatgaatgcacagatgcccaggtggaaggggctaaaggtttcttggcagtgcttagagactaccttgacacactatgctcgaacttg

SEQ ID NO: 282566 - DNA, 666 bp, Zea mays
cagaaagtcaagatatagaaaaacagtacaggaagaaaatagtagataaaaaaatcctcttcaccgtttcctcttccttctccccgtgcgagctgtcactctgaagccgccgccgcctcccgcctgcctctccatctccgtccacgccgcgtcataaaaatcccccttcaaggcccgacctagcacctaccctcgccacccgcccattccagttcccaatccgatcggtgcacgagctccgaatccactatccctgttgttggcggcctccagctcccgctgggaccatttccgtttcagggaggcggtctactctgtatttagatccgccccctccttgcggtagtcgggggagcggatttaggtgaacaagcatcttgatttcttttgaccccccaatctttgctctacccaccgcgtggtcttcgcctttaaatcctctggaggtggatagacggacgaggcaaagccgaaggcaagaacggtcgtttcaagtatcctgctaccggcgtccgaaggaaccttcaagtgttccagtggaggtattaggagtggtggggaaaaagggattgtcgaggtaccgacgtctgcacagagctcctccagaaatctgaaatccatatgtctgatgcctcagaaagcctcttaaaacaaggttctgctcct

SEQ ID NO: 282567 - DNA, 364 bp, Zea mays
cggacgcgttggcggacgcgtgggcggacgcgtgcgctgtttctagtggtacgggggttgtgagagctgcagtctaatgttagtcgcaggtatcgtagcggtggtgatagtgttatgaagatgaggcatttggttttgtcccacgtggtggatggatggattaatctgggcgtttagagagttttttctttttgatgctggatttgatttagtatgattggtgtgcggtcattactattattacttattttgtgcgttgctgtacctactgctcaccggctacgagggattattattatggatttatgatgttttatgttattgcgtcttctttgtgcaatcctatgaaacagtttgtagttgc

SEQ ID NO: 282568 - DNA, 467 bp, Zea mays
gtcgctcgcggagcagacgtgcccgctgggaagcgtggcgaccgtggtgagcgtcgcgagggcgtgcctgcacaaggacccgtccaagcgacccagcatggtggacgtagcctacacgctgtccaaggcggacgagcacttcgccgactactctggtgagagcgtgtcggttgacggcagcggcgagatcgctgctcggtgaaccatcatccttcgtttcgtcgtgtactcggtcctagtcagtagtaatatggtttttagccatcagttcgcgttgtaaatgttgttgcgctctattgcagtgctcagtggcaaaatggagaggacagagacaaatgacagggatgtctgtttattgcagagatctccctatatatatacatgtgtacaaagggcatttaacccttggatcaaataactgtaggatcaacggtgggatgggtcttgatcatattgcattgttttgt

SEQ ID NO: 282569 - DNA, 588 bp, Zea mays
ttcttcagggctatgtgctacattgattttggattgccagtagttgaggatgttgacttgccaaatggatcagctggagctgcagagaagtcggacacaaaaaaaattaaaaaagcaaggcacaaacgtaaggcccatgatgaacagtctaaacaagagaaaaggaataacttaagtttttgtgcgtttaaagaaccagtgctctttgttgggcacctactggacagttcaattttaatagtagagaagcgatggatggatgtagttgaaggttttggcgcaccggttcacagacatatatatggcacatgattctttctaacatcaaactttggcgcccgtgacaagcagaccattatttttgtttttgcattcggcctcgagtatgttaccggttgaaagggctccaagttttgcagtacaaagtggcagctgcatctaatctttagaattggggactctggcaattgtgtagtgttattttgttctcgagtaatgcagtttttcataccttgtccctgcgcaaaattgtcaaatgtaaaaactgtataactatgttattgttagtttatatctgctgttcgtccc

SEQ ID NO: 282570 - DNA, 330 bp, Zea mays
tgtggtgccttccacggggctgcggctgcgctggcgccggagcgagcaaatatccttgcccccacgagaccctcgcacagtcgcacctctccgacgtgaccggcgccgcagaaccaccgggtcttcccttgtgggattattcaagaacatggagagaaagagaaaccccattgcctttttggatgtatctgtagggtgatgagccagatgaaagaatgatatttgagttggtcgctgatgttgcaccccttgcgactgagaacttcagagctttatgcacaggtgagctgggaattggacacaaggctataaagcccttatgttacaagg

SEQ ID NO: 282571 - DNA, 566 bp, Zea mays
ggcggaggccatcgtttggggcggggaccccgaggccgcggcgaggcggcgctgggatctgcccggcaaggtggccgggaacattgcaatggggaaaattgatatgtctactgacgaagaatcagattgtgtagctatatgtccacctaacagaaatgctggtcacgaggaagttgtgagtggcagccatgatgaagattcttcaggaaagcaagagaacccttatgctgtgaactcacatatggacagcaatggccaggaagatgtgtctgtaaacctagacctgctcaagctgattcatcagcaggaatcttctgtcagcaattcaccaacaaagcctgcagtagctagacagcaagggtctggccatactgtccttgagccatgcgctgttgcacctgaaagaagatcatctggagcagggaatattgctcgaattcctcatcccaccagcagcggggaaaaactttcggatatcagtagctcctcaccaagacgcatggcaaaaaagagtccatcagtcacacccaggaagcctctccaatctgacaacacttttcacagtc

SEQ ID NO: 282572 - DNA, 462 bp, Zea mays
cctttgcgtccgcccacgcgtccggccttgaaacaactctgcgtcgacgcgcccgcgctggagtcgttcgccctgcactgcaacgtcttcgtcaccaaccgcgacgcttcctgtgaatgggattgggatactcctgttgaagtcgacttactcggcccgccggccctccgggacgcgtatctgtcacacatcggctgcgacacccgcctcgacaccgagcataacatgctctacccttccttgtgcctcgacgtcgtgctagcccggatcctgactatttgctccgtcgtcttgctgcatgttgattcactcagctggctcgacccattcaaagacatgccgaacctagaagagttgcagctgctgatggactacgaaggttactgccttgaggccgtgtccggtttcttcaagctcatcccacttccagtccttcaacggctctttgtgcgtctccatatt

SEQ ID NO: 282573 - DNA, 259 bp, Zea mays
cgtgattgtatttagactgcatgatccatgcctcactgattcccacgccttagggcaaagtgtactgtacaagagaaagaggggaaaatgattaggagtttgtacgcatttcttaacttctgtggacccatttgtttgtgcattgttctgtgaatgtcctgatgacgagttcctgcatatggtgctcgataacggttggttgaattgaacctgaagtgctggatggatgaaaaaaaagaaatataaaaggaaaaacaaa

SEQ ID NO: 282574 - DNA, 901 bp, Zea mays
tttatacaccccagctggtgccttgccctgtggtcctcgctccttgatccactcctcctgcagctcctctccccagcctccctctctttctctgtccttggtcctctccccagcagcctccctctctttctctatccttggtcctctccagataacctgacgcagtggtcacgcttgacaaggagagagaaaggcgttgcagcagctgatccgcgcccgcccggccgggagcgcgcgcaggcgaaggatggaacaatacgacgggctctttcctcccgcctacgtggacgactcctcatccctcctcctggtgcccaacgccaacggcactgcgcaggaggagagaccgcgagcgaggcgcaggaggcgtcgagcagcgaggtgcggcggcggcggtggcgagctggacggaggaggggaccacaagaagcggcggctgaccgacgagcaggtagagatgctggagctgagcttccgggaggagcggaagctggagaccggccggaaggtgcacctggccgccgagctcgggctcgaccccaagcaggtcgccgtctggttccagaaccgccgcgcccgccacaagagcaagctgctcgaggaggagttcgccaagctcaagcaggcacacgacgccgccatcctccacaaatgccaccttgagaacgaggtacatgccatcctacctctcactctttgcctgtgctccaatcctcttctctgttcatcccccatgcgccatggatcattgacggcgttgcagtatatatataatactgagcatgcatttcgtgggcacatgcacggctggcaggtgatgaggctgaaggacaagctggtgctcgccgaggaggagctgacgcgtttcagatccgcgggcaaccacgcggtctccggtgat

SEQ ID NO: 282575 - DNA, 614 bp, Zea mays
ctttgcatgtcagaagacaacagccaacaattaaaggatggagatggggaccgtgttacccaaggcctgggaactgtatggagccttatcttgggtcggcctccgcttcgccatgtttgcttggatattgctctgaagtgtgctgcccactctcaagatgaagtcaggggaaaagcagttagattggttgcaaaaaggctctatgatctaacatatgcaacagaaaaaatagagcagtttgccatagagagccttgtgggagttgctaatgagcatactgtggacacagatattaattcgaaatctttgaaagaatctacagctgagattgaggtaggtagtcagggaacttcagtaagtggctcccagatcccagatactgagttctctgaaaatgggccattcaagacatcatcggtttctacaaaacagtcagcagtatctgtatctgaggcaaagcggcgtacttctttgttctttgcactttgcaccaagagatctagtcttcttcaacatctgttcaatgcttatggaaggtccccaaaagttgtcaagcagtgtatccattggcatatgcccaaccttataagaaatctggggccctcgtgtcctga

SEQ ID NO: 282576 - DNA, 620 bp, Zea mays
tgttgctgtcctcgagtcaatggatgacagcaataaaggatacactgagatacttcgtcaaacttttatgtatccgttcttgtcgattggagatgataaacctgttgttgttgtcacacatggtgatagactgtcgatacagcaacgtgttcacgttcaagctgagttagcagagctactagatattcctgcccagcaaatttatgatataccaggatccgatgatgaccaaactgatatggctgtactggatatgctacattactgtgtccgacatgcagagcagaacctccctgttaagttaaactaccatttggaggtgcttgggcgtgaaactctcaataaaatggcagagcaattgatgggcttagatgcagtcattgaagccgccattattttcctatgcatcctggtcctgctgcttcgattttccgataaattggtgcagccgtagctacgttctgcacttgggttgtaactaagaaaacatcatggtgactacttgtcctcagctagtagagtaccctaactacttttatgtgtgcattgtatatattgacagaacgcactgtgctggaaatctgtatatatttacaataatactaaatccgatctcgaat

SEQ ID NO: 282577 - DNA, 405 bp, Zea mays
cccacgcgtccggtcgcgagctcggccggcatgagccatggcgacggcggaggctgcgctgctgctgctgctcctgtgcgcggcggcgttcgtggagcgcggcgcggcgctgcacctctgcacggaccggctgttcaacgacacgaaggggcggcacgacgacggcctgccgcacctgaccccgacggaggaggccacgtggatgtccctcctcccgcgcaggctccgcggcggcggccgggccgagttcgactggctggcgctgtaccgcagcctgacgcgcggcgacgggccggacggtggagccggcaaggcgggccccgaggggttggctgtcgccggcgtccctgcacgacgtccgcctccacggcgacggcagcctctcctccatgtactggcgggcgc

SEQ ID NO: 282578 - DNA, 876 bp, Zea mays
ggacgctgggccgccgctttccaattccaggccatcaagacgtagcagctccccttgcgtctgcgcacgccaccgaaggatcctcgccgcgcgtgcagtgcgatccgaggggaggggtccaaggccatgatgaagagcgtcagcggcaccggctcggccgggagccggagcgatccgggcggcagcggcgagctgtcccgcttctccgtcgccaccacggcgtcgtccgcctcgcagccttccgcgaacggtggcgcgcgcgggatctccttcctcgacgccttccggtcctgcttcgtgcccccggaggcgcgctcgccggagaactccatgtccgacgaatcccccccttcccaccgactctcgcagtctttgagctcacaaggttctaacagtgggagcgtgtttgggagcaagcgatcgattaaaggaatgtatagtcccatgcacaagagttctttggatagggagatccctggcagcacaaaattctccttgccacagatccagaaagcaacaaagaacttctcgccaaacttcaagattgggcagggtggttctgggactgtatacaagggtcagcttgctgatggtactcttgtcgctgtcaaacgtgccaagaagaatgtgtatgacaagcatatgggtcgtgagttctggaacgagattgagacattgcaacgcattgagcacctgaatttggttaggtttcatgggtacctggagtttggtggcgagcagttgattattgtggagtatgttcccaatgggaatcttcgagagcacctcgactgtataaatggtagaatattggaattcttactgagattggaaattgcaattgatgtggcttatgctattacatatctttatacc

SEQ ID NO: 282579 - DNA, 471 bp, Zea mays
ctggacgcaacccaagtagtacgcaagccgaacagatttttcccatttccctgctctcctcgccctccccacgaaattccctgcttgatcacgccgatttcagctgtttgcaacacttcctcttgtccgatttttattaactcgtcgactccacctcaccgaggtcaaatctttggcatcggattctgttctgtgctgccttttggtttcggcgccgaattcagttccgattccgaacagttagcagctttcagttcgagcgcgtcggaggcatccctgattccggcgatgtcgttgcccgcgatttccatgtacaccagtccgccgggcgcggtctactcttcggagttcgacccagcctcccgtggctcgtcgccttgcaccaccgctgcgcccccgccgccggccgcctcgtaccgcttgccctccggcggcggcggcctgtcttgcctcttctccacgccggcagct

SEQ ID NO: 282580 - DNA, 522 bp, Zea mays
ttgagttccaactccaacacaaagacattacaaagttttaaagctgtgctcgatgagagtcgcgtgatcaaaaggaatggttatggaaccttggatgtgccagaaccaacatggtttattctaagtggacatcgcctgctgagaaaagagtatagggctatacttagacgtttgagaggtagagtttgcagggattcacatcactggtctttccaagcaacacaccttgtcaccactgagatgcgcagaactgaaaaattcttcgcagctgctgcggctggcaggtggatactgaagcctgattacttgactgctagcaatgaggctggcaagttcttagaggaagagccatttgagtggcacggtgaaggccttaatatcggtgatacgatcagcttggatgctccaaggaagtggcgccagctgcggcagcgtactggctatggcgctttctatgggatgcaggtcatcatatatggggaatgcattgctccaacactggacacgttaaaacgcgcgatc

SEQ ID NO: 282581 - DNA, 526 bp, Zea mays
cccacgcgtccgctcttttaatcttttttttctggtgacgcgtgacaagcaagcagctggcatcttgaaatcgttatcgcagctatttcattgcgtttgtaattcctactaagacaagggaaatgattagaaaataaagaaacaagtaaataatgtgccctgccgttccccccacccacctcaaccgcagggctgcgacgccgccgtcctgatcgcgtccaagaacaacgacgccgagaaggacgcgccggacaacgagtcgctcgccggcgacggcttcgacaccatcaaccgggtcaaggcggccgtcgagaagaggtgccccggcgtggtgtcctgcgccgacatcatcgcgctcgccgtcagagacgtcgtctacctggtaaccgccgtcaccacccccttcatgtctcgagtcagtcagtcagtcccgtcgtcgtcccttgaccagctggggacgtatcggtattcggtggtgacgaactggcaatgcaggcggatggcccctactggcgcgtcgagctcg

SEQ ID NO: 282582 - DNA, 511 bp, Zea mays
aaatgctcacgcagcacggactccgatcggggggctctttgttcgcgtgtcccagcgaatcgccgccatgccgcgcccgatggcctcctcctccgccaggggccgggcgaaggattccgacccctcatcatcctcggcagcggcggattcctccatggcatccctaatcgagcgcgccacctccaccacggcgcacgccgtcgacccggtgctcctccgcgccatcaaatcttcggcccgtgcctccgatgccgccatccgggacgcgttccgcctcatcctctccctcatgtccaagccccactcccacgtgcggctcctcgccttcagcatcgccgacgagctcttcatgcgctccaagctcttccgctccctccttgctgactcgctcgacggcttcctcccgctcgccgtcgggttccgccgagcaaaccccctcccgccgccgaccacgtccgctgccttactccggaaggccgccgtccaggcgctcgagcgctggcaccatctc

SEQ ID NO: 282583 - DNA, 479 bp, Zea mays
aactgatcaaccgtggcatgcacaaactcccttgaagaaaaagtaaggtcttgaggattgtcaagggaaaggaacaaaagaagaaaatcaatacctctgccaaaagcctcaaccatgcctccatgcaaggtaagatccaaggtaatgatcaagccacacttcacactaagcaaagtaagaagtgtagtgaatgctttgaaatgggcacttgattaggtcatgtccctatattaaagaaaatggcttgattattaacaaggatgataaacattgttttagatgctctaagaagggacatttagttaagtcatgtccctatgtaaaacaaaaaggcatagttttagaaaacaaaatatttactaaccatgtagcaagaaagaaacatggaaaagaagaaatcttcaagacatgaagatcgcctttgctacatattgccgaaagaaaggacatcaatgtaaggattgtcctattggtaacta

SEQ ID NO: 282584 - DNA, 292 bp, Zea mays
agcaccaatcgaccagcgttaggaggagattttgctgttcataggagtagggttgtcgtcgtcgcgccgaacctgtctgggttagcaaataatgaacctgacgctgcccttggcatcttgtttttgctcgacttctgaagcgtcatgacgccaaacctgtcgctggctcggcacactgtatgcgcggatgcgtgtgaaatcgatcattttttttgtacctacactcgtggcttctgtgatctccagagctatgcaaaactgtccaagcctttcgcgtgccctgtgtgtggat

SEQ ID NO: 282585 - DNA, 760 bp, Zea mays
  unsure (1)..(760): unsure at all n locations
gtcccgattctggcacgccgccgatcgccgcacgtcggtggatccttggttttgccggtggtgtttagataagttccttcaatgcatcgtgttgggagtgctggtaacacagctggctcgactcgaccgagaaaagagaagcgcttcacatatgtactcaatgatgctgatgataaaaagcattgtgcggggatcaattgcttggcttatctagatggatccatatttagtacaagtgatcatctttttagcgggagccgcgatggtaccttgaaaagatgggaattaaataacggggatgcaagcttctcaggaacttttgagtctcatgttgattgggttaatgatgccattatagttggagacaagcttgtttcctgctcctcagacactacaataaaggtgtggaattgcttctctgatggtgcctgtaccaggactctccgccggcattctgattacgtgatttgtcttgctgctgctgagaataatagcaatattgtagcctctggtggtcttggtggtgaggttttcatttgggaccttgatgctgctcttgctcctgtagccaaatctgtggatgcaaaagaggatgaggttcctaatggaaactccgggcctgctttgacaacactgtgcagcataaattctagtagcaatattgctttctctaatggtcaatcacatgggtacagtccaatagctgccaaaggtcacaaagattcagtttacgcactggctatgaatgatacangaaccc

SEQ ID NO: 282586 - DNA, 510 bp, Zea mays
ccctttcgttcgcccacgcgtccgcaaagggccattcacagtcaatgtcgagcagactatatataggaactaccagaaactcactcttcaggaaagcccaggaattgttcctgctggaaggcttcccagatacaaggaagtcatacttctgaatgatctgattgactgtgctcgtccaggagaggagattgaggtcactgggatatacacaaataattttgacctgtctttgaatacaaagaatggtttccctgtttttgccacagtggttgaggcaaactatgtggcaaaaaaacaggatctgtttgctgcatacagattaacggacgaggacaaagcagagattgagaagttgtcagaggatccatggactggagaatggactatcgaatcgattgcaccatcgcatttacgggcatgaagatatctagactgccattgcacttgctatgtttggtggacacgagaagaatgtgaagggaaaacatcgcctgagaggcgacatcaatg

SEQ ID NO: 282587 - DNA, 740 bp, Zea mays
  unsure (1)..(740): unsure at all n locations
ggaaagcaccctaacaaaaggacatgtttctggaaataggtgctaccagcaacctcagcatggtgaatcgtcctcagagacttcagaccataaagagcatattacaaatgcatcagaggatggtgttaagcatcagtcaggtacaagtgaggcaccttcagacacagcaaagcattctgcaccaggcacgctgttgaacgggaatgtccaagagagtcaaattttacaggaacataatgtggggagttccgaggacgatcaaccaggaggcctgttgtgcagcttagaaccagtggcacctcaaggggaaaacaaaaaccaggttaacaacccaggcctgttactggaatggcctggagatacaagtgagttggtcactggccttgaaaaaggttgctatgcgcatgctgagcagccacctgtgatgggatggactgttggacctcagatgcttcatcctaaatatggtattttagaagaagagagccaatttgagcctaatatcgccgacaatcatttaatcaggaagcctatttcgataaaaaacatcccaaggaatccactggttgatgctgttgctgctcatgatagaagctcgatgagaaaggtttcagagcttgcaccaccgactgacaagccgaagcctaacgagagacacatgttgctagaacagataagaaacangaccttcagcttgaaaccttgtgctccagcttagcaaacagcaatgagatcccctg

SEQ ID NO: 282588 - DNA, 461 bp, Zea mays
tatctactgtgatgacgagtttgaaagattacacagttgaggcccttgttagcacagttgaccatctgggttttgtgtcatacaaggtggataaccttgtcagcgagaaagctgtcgaggttaaggagactgaattcctagtgtcttcagttgaacagagggttcgaatttgccaacagacaactgaccaggaggcaagatcccagcaagctcttcttatcaaggcgcctaagtatcataggcgttacatattaccaggcctggatctactggaatcttccatccacccggtttcagaacctccacggtatagcaggcagtatacaggccgcaagatgcacaagtcccagtcttccatttctactccagttcgtcggcaggctacgatgaggcgtgaaccatctcctacacctaacgatcggtcgcggtcgttatcgccttttcgtaaagcacgagctaaa

SEQ ID NO: 282589 - DNA, 666 bp, Zea mays
ttcgttcgcgtgggccgaaattgagccggctacattgatggtggagcctaagtgtgaggagggcgatggttccagcttcgtgctcccaccaagccctccagaactgatgctcgaggaacaggacgattcagggttaatagctctaggtactggatcatgtaccgaacagcagagccttggagtaggagaggctgaggatcaggaaaaccctagcacaggcacagctcagcatggcatcatgatagtggagcgtacgggtgaggagaacagcagttgcaatggcgtttattcttcctgcccaccgtcatctgtcattgttgaatcgagcagtgattatctgtgttagttatgtagggagtagaagctttttttatatttaaagatctgacatgagattgttagttcctttgttgctggtggcatggggtttgattctgtaacttgtttcgccgtgattgtcttgataatttgagccacaagccccacgtttgagggtcttgaaaaccgggggccgttattcgccgacccagttggagtgtaatcccagcgttccgttatacagtctcgtttgtcttctgcctgcaccgaagtaactgctagctttgctggttgtggtgcctaaagccccttcatgaaacttctaacccaaaacctgtctgttttttt

SEQ ID NO: 282590 - DNA, 452 bp, Zea mays
tcttctttttggatgagcaaggtttaaagattgcggagaatcaagaaactagtcaaaagaacaggcgtaagcttgctgagaacacacgggatttcaaaaaggcatcatcagatgagaaactcagtttactcaattctttgctgaagagttatcaagaggaagttgataacctcacaaagagagcaaagtttggagaaaatgcatttctcaacatctatcagaagctctatgaagctcctgatccatatccagctcttgcttcaatgactgatcaagaccagaaattgtctgaactggagactgagaaccgtaagatgaaactagagcttgaagaataccgtgctgaagctgcacacttgaagaaccagcaggcaacaattaggcgacttgaagagcgtaatcgccaactggaacagcagatggaggagaaagtaagggagatggttgaaatg

SEQ ID NO: 282591 - DNA, 458 bp, Zea mays
tttgcttctcaagtttgctcggtgtcgctcgcgactggctctagttgtactcagccagctatccttggtgtgggggtttgatcgacggagccgtcacaacggcgcctatggcgaagccttccgtacagactcatttcgtcttggacgcgatggccgcggagagggtgaaagtcgcggagaactgggagcgggcgttggattcgttggagaacatgaatcagcgcctgggaaagttcgccaaggtccagcgccagttggtggggcagtcggaggtcgcggcgcaggcggccaagcaggcggcgaaggagcgttctgttctgtcgcgtcaagtggaggaatctgggcagctgctggcgcgggtacagctggaatccatggcggcggagacggagaagtccaggaggagcggatccaccagccccgtcatctaggtcttcaccccctgtttcagtccggaa

SEQ ID NO: 282592 - DNA, 443 bp, Zea mays
tgtccttccactcgttcgcccacgcgtccgtctgaagcaagcaagaagcggttgagtcgattatctacagctatagacatggattctccggcttcgctgctttgctcacgaaatcacagtctacaaagattgcaggtctgcctggcgtggttagtgtaacgaaaaaccgagtccaccagacacgcacaactcgaagctgggactttgtggggctgcactacaacgatcagccaaacggtttgctcgcaaaggcggctaaatacggagacgacgtcattgttggcgtcatcgactcaggcttctggccagagtcgcctagctacgctgaccacggctacggcccccctccttcgcgatggaagggagtctgccaaggcggcgacgaccgctcgttcggcccgaacaactgcaaccgcaaggtcataggggcgcggtcggtggta

SEQ ID NO: 282593 - DNA, 991 bp, Zea mays
tatttggatctggctctattactattcattttgaactaaagtttttaaaagccctaaattagggcgtgtttagtttttagggactaatttttagtcatttcaatttatttcattttagtccctaaattgtcaaatatagaaactaaaactctattttagtttccatatttgtcaatttaggaactaaaatgaaataaaatggaggaactaaaaattagtctctagaaacaaagcacctatttattgtgaagaaacgtttggatcgtgatccattaccacacctagctgcaccgaaactgtgcatttccaaaaacaaataagatgcaccctgtatatttctggttatcgattatatacgcatctttcggtacatcatggatcatgcttctgagtgaacattaccaaagatggagcactggaacagtttttcggcatatagataggcttgacatccggaccatatttcgtgtaagtgtaatgacactgccttcatatgtcatgctgaacactttcaggaataggcacacagtacattctcgtatcgcaggctcttgttctttagatgtgctcataacactgatcattcatttctttataatgcaggcagagattatggaaatgcagaagaatgaggtaactgttaattctaaacttcgtttgtttgacccctgtatattatcttgatgccctttctggtttgctaaaaactttggcagagatagatagagaattacagaatatagatagattcaggctgtaagcataccattccttctattactttgccaataaccaaagacgaaagaagaaaattccatattattcaaatataagccattaaatctcgcgctgtgaactgttagctgaacaaccggacactagattggttgtaggattcagttaggggatcacacattcacactttcgggcttgttcgtttcaccgttaatccatgtggattggttgggattgagccggtttaaattcatag

SEQ ID NO: 282594 - DNA, 505 bp, Zea mays
tctttccgcgtccgcttccgccaaaagtttcaaatctcttgctactccgctttctagctacacccttcctcttccttataaaatacgcaagagtgcagctgcgcagccgccgtcgcgcagccagccatggccatcaaagatgagccgctgcacatcctcttcttcccgttcctcgcgccggggcacctcatcccgatcgccgacatggccgcgctcttcgctgcccgaggcgtcaggtgcaccatcctcaccacaccggtgaacgcccaactcatccgctcggcggtagaccgcgccaacgacgcctcccgcggaatcgagggcgccctggccatcgaaatcgcggtcgtgcctttccccgacgtcggcctgccccccggcgtcgagtgcgccccggcgcttaacaccatggacgaccgcgaaaagttcttccacggggcccagttactccgcgagccgttcgaccggttcttggcggagaaccgcccggacgccgccgtgaccg

SEQ ID NO: 282595 - DNA, 435 bp, Zea mays
gcagggggatctccttgaacctttactgccgtgtgattctgtaaatcgtctccgtggctaccggcttttccttcgcacgcctcctgatttatgagaggcttgtgaaggcactttacatcttctccacccagtcattaattggcgtcgctggtaggctgttgtggttgtttggccaaggcttttgaggagaacgttcggactggagttctggtggtgtggaaagcagcccctcagacgagattccgcgtgtttaagcatgagaacggaatcacagtgagggctattgcttgcttccagccgctgcaaaatgtgccaggccgagtacttacgtcatcttatgaagcccgtgacgtaactcctctgcgatctgcacctgctgctgaataaacttacagcattaggttttttctccataacaactgaagtgggagaaca

SEQ ID NO: 282596 - DNA, 443 bp, Zea mays
tcctacgcgtccgcatccatccacgcacacgcgcacccgtccctctcggcgcccctctcccccctcctccactccgctgctgcctgcttgcctcctccttgccgccgcgaccgcgaccgccgttcgctgtcgaggccagaggagaggagtggtcaagtccgaggccacctgcccaccctcagacctcccccgccacaacgcgagccgcatcgcctcgtctcctccacgccatacacgcccgccttcccttccccggcgaccaggacccctcgcccgcggcgccagcgagctcccccggccagtcgtaggcctcccggagctcagcacgcacgcaggtgggtccagtgaggcctggttgtgcgcgttcctgcgggcgtcgtcggtgcagatccatggaactcagccgcccgcagcgcggatagtactgcacttgtgcaccagcc

SEQ ID NO: 282597 - DNA, 301 bp, Zea mays
tcctcgcgtccgggaaaatcccagtccagcgctgggcgcttcccttctgccttttcctttcttcttccccgaggcgccggccccgctcaggtcgggacctgccggcatttcagaactcctagcttcttctaggtcggggttgctgcgcgccttgcgtaccctgggttgagcaccattggagtggaagaaaggaatcatgttcacgagaaagcatgcttctcattccaactcaactgatgctgagcagcaagaagcaaagataaatgaattaaaatctgcacttggtcctttgtctgtccat

SEQ ID NO: 282598 - DNA, 696 bp, Zea mays
ttatcgcaacaagtcacaagtgggctctaggtgctttggctgagctgctggacaattctcttgacgaagttataaatggagctacctatgtgaacatagatgtgttagagaatgataaagatatcgataaaaagaagtccagaatgcttcttgttgaagatgatggtggtggaatggaccccgataaaatgcggcaatgcatgtccttgggttattcagctaagagcaaagttgctagtactattggacaatatggtaatggtttcaagacgagtacaatgaggcttggtgctgatgttttggtcttctcccgtagtcctggaaaatcaggcaaaaggcctactcaaagcattggcatgctatcttatacatttcttaggagcactggcaaagaggacatcattgttcctatgattgattatgaatataaacaaggctgggaaagaatggtccggactacattggatgattggaccacaagcttccaaaccatcattacatggtctccatattcaactgaagcagaattacttgaacagtttagttctatgaaagatcgagggacacgaattattatttacaatctttgggaggatgaccaaggggacttggagcttgattttgatgctgaaatacatgatattcaactcagaggtggtaatcgtgatgagaaaaatatccagatggcaaatcagt

SEQ ID NO: 282599 - DNA, 859 bp, Zea mays
tcgtctcccacgcgtccggtggctgtgtgacctgactcttgatagatacgatgtccgagagaagaaggtttccaagaagcgccccaggggattgaaagctatgcacgacttggacagtgactcggaataaaaaaacagagggagaagagatcactgaacatgagaagctgaacattagagagaaggccaggacagatgcagcagatggaggtcgaccataaagcttcctgatggaatgaggaccaacgaacgggtcaccactcctcgcgattgatactggagatcgatttgtccgaaaggactaggttttttttaaagcaaatggcaggagctctgcctatccattaagagagaggggagagagagagtaatttacaagaagtgagcacaataaaagcacgcccaaacataacgagggatcccaataagaagtcgtccctgctgctacataaaaaggacttgtagcgatcggaggacgaccgagatgtcaggaagttgcacggaagaacagagaggagagctgcaggagctggagttcctgaacattagcaaactattcaattccctggaaagcagcaacgctgttttgctattctctcatgttaatatgaatggcgagctagccagtcctggcgcgtctagtttgccttccgtagtttgttttttcccctctcttgtgctgtatgaaaggtcagtggatattctttcaggggcatgatgagactgtgtccggcactctcagtccagtgcgagtggatcaggattcaggcaaacatagaccggcgaccggactttatgtgttttcaggactgccagacttgtaaattcttgaaagtttcagtgactttttttatagttt

SEQ ID NO: 282600 - DNA, 371 bp, Zea mays
acagcgggaggggagaaccggctgtctgcagcgcccgatcaactgcctgtccaccggagcaacggggcgagagttgaccatgctggagagcccggccagagaaccaccggccctccgtgtttagaaccccgcgcggcctccggcggacgcaggccgcgccgcgaccactgggcacgctgctagccagctcttggcagatgatgacctgaccgccactattctgctcgctgggctaacaacggggcacgagaagtcctacagagccacacgagacaagaccccctgctccctgcggaccacctgctggacgagccatgaggacacgagggctatgctcggcaccggaccgtggtgaccacactggaagaggg

SEQ ID NO: 282601 - DNA, 549 bp, Zea mays
  unsure (1)..(549): unsure at all n locations
gggaaggcacagtttgttgtattttttaacccattagagcagacaagggatgagattgttatggttgttgtaagtagtccagatgtttctgttattaattcaaatgggtcctgtttgccaagtcaactttcccctgagtggcagtttgtcagcgatgaaaagatttcgactggtcggcaccgcctttattggagagcttctgttcctccactaggtttggagacctactatgtggttactgggcaggattgtgaaaaggctattcctgctgtagtgaaaacatacacagctgcacaggaatttccttgccctgaaccatatgaatgttcaaagctggaaggcaaaacagtggagatgaagaactccaattacactcttttttttgatacatgtcatggtctgctccagacagtaacttgtcacaagtatggggaacaaactgtggtaggtgaagaaatttgcatgtatagaagccatggaagcggngcatacttgttcaaaccacttggggaagctcgctcaattgttgaggaaggaggatatttcatc

SEQ ID NO: 282602 - DNA, 945 bp, Zea mays
tcttcgcgtccgactgctcataaagccgacggattttccttttactagagaggtcattgttggcagtattgtcatgttttatgggactctctctttatcctcgtccgattaatccacttttaaaaattaaaagatctcgaaaacaatgaattgacggattcgattactcaatatttgatcggaatagattcacaataattctaaaaaaaaattatgaattttctatttcataatcattcctaatttcattctaaaaataaaataaagaacctatattataatatgggttctgtgattaatcgttattacttcgattcgttagaacagcttccattgagtctctgcacctatccttttcctttggggtctagtctgagaaccacttggttttcaaaaaagggatttggctcaggattgcccattcctcattccagggtttctctgaatgtggaagttaccacttagcaggtttccataccaaggctcaatacaatcaagtccgtagcgtctaccgatttcgccatatccccattttacttttctttgaaaccaggattccttgtataatttaatccatctcttagttttttttgaatcattgaattcattattcgacgtagtctagcaactcatctctatttgagacaccccgctcgcttattgcaattcagaattgcattgattttatcgttgatatatttgcaattcaatcggaatgaatatatccaaaagtttttctctctcccgcctccctccttccttttttagagtattccaaatcatactataacgcttgatagtcggtctttttttctaaactgaattagaaatttcagttgctatgattctatcttctccgtagtgaactatttatccttaagttagtagcgaataaagaaacagaatatctccgaaaaaaaaaaaaagggggggcgcgctagaggg

SEQ ID NO: 282603 - DNA, 416 bp, Zea mays
cgcggtgagccccacggaggaacgggcgacccaaacttgccggattccttcctgttctttccaacccacctggccgaaccactccaccaaccacgaacctgaaaccctagccacgcccatgagcgacgacgcgaccgccgccgcgccctcttcgccgtcgacctccccttccccatcctctgcttcctcatcaggcgcctccccgtcgccttcctccccgcgcaccaagcgccgccgcaccgaccggtacgctctcggtttcgagttcgccccgcgactcgcgccctacgaactccctgaggaaccgctccccgacaagcacaagcgctcctggcccaactggacggagcgctccaccttggctctcctcgacgcctggggcgacagcttcgtccgcgcggggcgcagcatcatcc

SEQ ID NO: 282604 - DNA, 767 bp, Zea mays
cccctcgtccgcccacgcgtacgcggacgcgtgggggggcagattcgaacggtccaatcccccttccccaccgcctcgcgacgccctcgccgtcgccttgcccccaacgatccactcgcccccacaacgattcgcttcgcggagaagaagccacccgcgcctcgccggaaacggaagcagcaacccctagccacgctgaccctccacggcgccggcgatggggctgaagcggcctacggcgggagcgggggaggcagcagcgcagaccatcacgttgtccatgtcggccatgtgggacacggtgcgcgccgccatgagggaggccgaagcagcagcactggagccaactcaaaggtgagatactcttcgattggatcttgatctcgcttctcagttctaaatcccctgcagaaacgacgccgctggtgtccatctccggcgtggcgccgccgccattttcagctgtgtatcggctgtagctcagtcgacatcttctgctacagccctcccatctctgcagaagatggaaccgtggatggagggagcattcctgcggcggatggagcagcgggcctaactgcaggtcagttgttcgatcaattatgcaactcaccatactcagtcaattattagactatttgcttggtttgatttattttttactcggcgtatattttggttgatgtagtcagcatcttattgcatatctgtttttgttgttctatgtttgctttctatttcttagaagcatttgttacataaattag

SEQ ID NO: 282605 - DNA, 610 bp, Zea mays
cgcactttctcttcgcagaacaagcgggtgccgctgcaggccgcgctcagcgcgctctactacgacgagctcaagctccgcagcgccgcgacggccgacgtggtattggacacgcagtcgtcggccgccgggagggcttccgcgcaggccagggcggcggacgcggcgctggcgcgagagaacgaggcgctgcggtcagagctggcacggatgcgggcctacctgtcagggatggagcgcagcaaagggggccggtcaacgccgcccgtcctcgccgtctcggagggcaaagaaagcaagcttcctgggctccgtctcccgcactatgagccggctgaacccgtttagaagtggggggtggatggcgaaggttacgaccagtaacgccgccggtggtggacgccagagcaaaacgatgatgcagcatgtggtgacacccaagaggaggagggcatccataaggtaataatcatgagttcatgacgctgtcgtgtaattttaggaggataccgtgtgtgcatggcttgtagtttgattattattgtgtgtttttagtttattattgtgctagtatatatatgaatgcgcgtgtagtaccaagtggtttgct

SEQ ID NO: 282606 - DNA, 430 bp, Zea mays
gtccgcccacgcgtccgcttgcttgaatgtaggccccctcctctctctctcacacacctgttcttcgatctcggcctagctagctagctagcgagcaagctatagcttagctcggctagccgggtgtgtcgccggtcggctaggcaacgccgctagcgatcgcaaaatggcagatgcgggggagcggcggcgggtgtgcggcatgccggagaaggcgcagctgcacgttgcgatgctggcgctgcagttcggctacgcgggcttccacgtggtgtcgcggctggcgctcaacatgggcatcagcaagctcgtcttccccgtctaccgcaacatcatcgcgctctgcctcctcgtgcccttcgcctactttctagagaagaaagacaggccgcagctgaccctcaacttcgtcgttcagtttttctttctc

SEQ ID NO: 282607 - DNA, 314 bp, Zea mays
cttgctcgagtagttccctctcctctctgcttctcggcctagctagctagctcggtgcctcggccaaccgggcgtcgcgcgctggccggccggcctgccaggcgagaactagctagcagcgcaagccacaatggcagattcaggggaggggcgtcgggtgtgcggcatgccggtgaaggcgcacttgcacgtggcgatgctgctgctgcagttcggctacgcgggcttccacgtggtgtcgctgctggcgctcaacatgggcatcagcaagctcgtcttccccgtctaccgcaacatcatcgcgctctgcctgc

SEQ ID NO: 282608 - DNA, 613 bp, Zea mays
acggtctcctcctccttttctttctcccgtggactgcagcgccgccgggtagagatcccaaatctgcgcctcgaccaattcctccttcctccgagaatggtgatcctctatccagggtgtgttgctccaacagttcaccgtgattttctgcccagatgggtgctgctgaacaacagctcgaggatgtactgccatgtctttccagatagaacgaaaccgaaaaggcaatacaggcatcagtgggtgccttgcttctccaagggatcttcgttccaagatccactgccctctgtaaagccttcacgccttcttccagcagaggaactaaagacatatcccaacactgttcctgaggagatatttaacacgatcatactagatgactccgatgcattctatgtgctagaactgagcacgagtagagaatttagttcctctttggataaaaattctgcaatcttaatctgcctattcgatgtcgacggtgactccctattacaaagagtaccggcaatctatttgggtcaacctacacatggatttaagacagagcagcagatacccttccaaagtggttcagttgatatcgttactttcaaggggtcaaaactga

SEQ ID NO: 282609 - DNA, 494 bp, Zea mays
atttccgggttgtcctacgcggccgttcgtattcggcagggtgtaccagggcgcgctggcgtccaagactgaggcgcggtgaagaaggtggcgcacgggtccaggcaggggatgagggagtttgtggccgaggtcgtcagcatcggccgcctctggcactgcaacctcgtgcagctgctcggctactgccggcgcaagggcgagctgctgctggtctatgactacatgcccaacggcagcctcgacaggtgcctctacgactggagcaggaccgcgctgagctgggggcagaggtttcgcatcatcaagggcgtcgcgtccggcctgctgtacctccacgaggactgggagcaggtggtggtgcaccgggacatcaaggccagcaacgtgctgctcgacaaggagatgaacgcgcggctgggtgacttcgggctggcgcggctgtaccactttgggatgcaagtacccttcagaacaactcttaattttggata

SEQ ID NO: 282610 - DNA, 431 bp, Zea mays
tgatcctgtgcacacacttgtagggattattatatgggttttggttaggatttggaatggtttgttgtccacaacgatgatgcgtcagagctgtcccaaggattggatgatttccattcccctgctgccaattcgactaggctcgccgtctccgctctgcccaactggcaccaagcagccaatggaacttgagcagccaatggatgatttccattcccctgctgccaattctccgaactgcttcgacccttcaactcaatctgcatgtacccagtaaatgttcaatctgaatttggatcattgctagcaggattctttgcttgctcttctacttctgaaaatttcgcaaaatggatagataattccagttaattttaatccattacagtagcctattgtggcagcaaacagcgaccgggtgcggaagcccg

SEQ ID NO: 282611 - DNA, 676 bp, Zea mays
cctctcgtccggttggctacacccggcaaccaagggaggatgaaacctggtttttagcacatgagattgattatcctagcgacaatgagaaggcgactggccacacaagagggaacgatcgtcatgatcgccctacaaaggatgaagatgatgaccagtcatttgttgaggaagattcctacatatctggtgagcaatattttcatggaaagaatattgcacaaataggtacttctgagggcccaatggtccatgggattcctgataatgatatgatagctcagtatgatggccaacttttagattctgaagagcttaatttgatgcattctgaaccagcctggcagggctttgtatcgcagaacagtgagctaggtatgctaggcaatgggaaattccttaatgattccgaacgacctcatcctgatgacccttttgtggaggatgatcagcatggctctgttaggtcaattggtgttgggattagcagtgatgctgctgacattggcagtgaggtgcgagaaagtctgattggaggtagtagtgagggggatattgaatatttcaatgagagcagcttgagtgttagtggaaagagacattctcagcaggatcctgaaaagaagagagtaagtgctaaaggagtaaaacatgaccaaatcaattacgctgctgg

SEQ ID NO: 282612 - DNA, 435 bp, Zea mays
ttcacagcccattgaggccacacccaactacgaggacaactttatcctccaggggtctgctttgcccaacaaggacgacgaggcagacgaaagcgctggtccctgcaagttccgcaatcacgaccacaagttcgagtggaccaggctacagttccagtgctgggctactggcctcgcggtgaagcatagctacagcgtggaattctccggcgtcggtggctcaggcgaggagccaggctacgcttcccagatcgctgttttcagaagactggtgcacggccaggaagcgatgtgcctggacgaggatggcgatcagccttacgaggttctctgggagtggcctaacgcgtgtgtgaactaggtagattgcacgtctaatctctctagggcttggaactttgaatcgtgccccccgtttggaactgaataatatat

SEQ ID NO: 282613 - DNA, 401 bp, Zea mays
ggaacaaggaagcagccgtccccgtccagccttccgccccgcacgccgcgggccgtgctcctgccttcctacccgtcgcgcgcatcgccgattcaccggtgcccgtcgctcgcagacctctccctcgcccctcgcccagcttgtcggaggccgaaattgatttgctctgtccagctctgggctctgctgctttggcctccaagcgcgccatgtgtttctatcgacaataaaattcacaagtaagacaattcattttacatcagagttaatttagtacggcactcaaagatagaacgttgtaatgcaaaattttgccattactacctttagcaagggcacttcgaattactggataattggagctgtgtgcagtgggcttggccctagcagcttggcggagc

SEQ ID NO: 282614 - DNA, 610 bp, Zea mays
cctcaggccaggcaaagactctccgccctcccactcccacctcgccacctcctccttcctcgctcccaattttcttttttcccttccccttcggcgcggcaggattttctccatctgctttccccatttccgccgtattttattcgatttcgaggtcggttttctgttgcacagggagaaaggtcacgtccaaccgccgcgaactgcgcatgtgaactgtgcccgacgaggcgcgctgcggcacgggtgaggggagctgcgccggagcaccagccctagggttttcaccgccctgccgcgagatggacgtccgggacctgcaccagcagccgcagcagcagcaggctccgccgcgcgtgggatccccgccgcaggccggcgccggcggtgtcatgatgcagcatgccgccgcgttcggcgcggcgccgccgccgtccgggttgccgcaggcctcggcggccaacgttatgcacgggatgtcccttgcctttaaccctatggcttcgccggacgcctcgtcacccataagcagcatgaagattgtggacatgccgctggggtctatgtaccgccctgattccggcgcgacgggcttgcagcagcagcagcc

SEQ ID NO: 282615 - DNA, 435 bp, Zea mays
gaacgcgcggcttcctcccaccaatggcgcccttcccaaaaccctcgacgcgctgctctcgcccagatcccgcgcggcttccttcccccggctgccgagatgcatccctcttccccagctgctctcccccaccaaaccctcgacgcgcggcttcaacagagccccagcccgagcccatcccgccttcaatgccggatctcgccccatcgccaccaacggtgccccaaaccctcgacgcgcggcttcaacggagccccagcccgagcccatcccgccttcaacaccggatctcgccccatcaccaccaacgacgctgtcaagcctctggatcctccgcagacgacgtcaagtggtccaacatcgatgtccaagagttcatcgccttcgattcggtctacgggccccaggtcggtgctccccttctgtgctccccct

SEQ ID NO: 282616 - DNA, 423 bp, Zea mays
  unsure (1)..(423): unsure at all n locations
gngtcggacacacacacacagacacagccaagtgcctccgttcaacttgccaagttgatcgagtaggtttaagcccccacagcccccacccaataatccgccacggcaataaacaaccagcaccagcactccagcggcaacaataatcaaatcaaagatcaggaggggggagaaacggcttttctctagcaggccctccggttgtttttattatattgggtgctgttgtttgttgcacgtggtgggtggtgcagggattctttatttctggaggcaggaaggaggaagaagaaagaagaaacatcagaaccgagccgactatcagagatggatagagagagaggagctctctcttcttttgcttttggtattgctatcttgggatctgattctgtccccatattgggagggaggagggaagga

SEQ ID NO: 282617 - DNA, 475 bp, Zea mays
ttatatcttcagcttcttgccatcgcacagcgaccggaacacggtctcccttgtgtgcaaggtgtggtatgaggtcgagaggctgagccgacgagcggtgttcgtagggaactgctacgctgtgcgccctgagcgtgtggtgctgcggttccccaatataaaggccctcacggtgaaggggaagcctcactttgcagacttcaaccttgtgccgcctgattggggtggctacgcagggccatggattgatgcagcagcaaggagctgtgttggtctcgaggagttgcgcatgaagcggatggttgtgtttgatgagaaccttgagctgctagctcggtcattcctgagattcaaagtccttgtccttatcagctgcgaggggtttagcaccgatggtctagctgctattgcgagtcactgcaagctcctgagggagttagatttgcaggaaaatgatgtggaggaccgtgggccc

SEQ ID NO: 282618 - DNA, 436 bp, Zea mays
tcctggccggcgctcggcttcgagctcgcccagtccagccaccggtgacaaagctgctcgtcccatctccctggtgccgagcttcttcttccccacctctcgcagaccatgcgtcattccttggaagattcgagctcgcctaggtcgcccgccgccacccagctcggactgtgccctactccctgctcccggcgtcccaaccatggtcgcgcctcccctgtccttggagctcgccagcgccagcacctcgccggtgttttccccgtcacgccatgatgcttggcctcatcctgcgcgccgctcgaacctcaccgtccatgtccaccatgccctcaagattgcctccccagccagacgcacgagcttgctcctgcgtcaacctcgccgtcgtctcggacatcgcatcgccttggtgcatcagcaggacgtcagagca

SEQ ID NO: 282619 - DNA, 695 bp, Zea mays
tttcctctccccaccgcacgcatccagtggctgctgccgcctcgcccccgctcctcctcctctcccgccacccacgccgcgcaggcctcaccaactggtcgtcgttgcctaggggccagaacgcaggatccacagccccgccggccgccaccgcctccaagcctgctgcgccgctcactgtcaacctgcctcgccaagtcgcccggatctcgacgccccacctgcggccggcggcggccccgccaaggtgccctgacagagttcgtgcgctggctggttgtctgcggaagactctccctctggcatgtaccgatgcgatctctcaactagtcataagcagctgaaagtagttcacatatatacttaaatactcaatcaatgaaagtagtgcactaaaatttgttccgacatcaagtttgctaaactattacggcaacatctaagctatgcattatcatacaccaacgcagttcgatggtccagctgatgataataaaacgaaagctacgttgtctcctgctcctagagtgaactgagtcgacagaccacatactgacatacgccttgtcttcttgtaaatatagcagattttgcatcatctggacgctagatagtttttttcttgtgttcagactttcgaagttgaattgaacaaattataaggatgtttagaactgctactgaattgttagaga

SEQ ID NO: 282620 - DNA, 510 bp, Zea mays
ctctccctcaacttcagcaagttccccgcaaaaccgcagccggaggtcgccggtcgccaccaccaatggggccacccgccatggcgttccaagccctcaccctcacgccactccccttctcactccacagctcgagccgccgcgtccgcgtgcttgccgttgcggccgaccagactcctccgcccgcccccccttcggagccggcgaacagccctagccgcctccttcgcgagctcgcgcagcggaagaaggccgtatcccctaagaagaagcatccgccgcgtcgcttcatcctgaagccacctctcgatgacgagcgccttacccggcggttcctcagcagcccgcagctgtcgctcaaggcgctcccgctgctctcttcctgcctcccctccgcgccgctctccaccgccgacaggacctggatggacgagtacctcctcgaggccaagctggcgctcgggtacccgctcgcgccctcggagacgctcggcgaggcgatgactgccc

SEQ ID NO: 282621 - DNA, 402 bp, Zea mays
tttacgcgtccgcccacgcgtccgcccacgcgtgggcccacgcgtccggtggtttacaacgcaaataaacttgctgatctggttgaaaagaagaagaagatgcgaaattggcttgactattacctactaaagtatgagcgaaattcatcattgaggcctaccacaaagactggctttcttggatgttttggttccaaggtggatgctattgactattacaaatcagagatcgagaaaatcgggaaacaggaagctgaagagcgtaagaatgtcatgaaggatccaaaatcagttgtgccggcagcctttgtctcatttcgctcccgatggggtgcagcagtctgtgctcagacccagcaaacaagcaatccaacacttttggttgacagaatgggcttccgg

SEQ ID NO: 282622 - DNA, 514 bp, Zea mays
ttcacgcgtccgcccacgcgtccgcgacgaagcagcagctgcaacgactcctcacccaaatctgccgtgccgctctctccgccgtcatctccaacctccggggatctcagccgccaaatccgggccgtgctcgcgcttgggcatctgcggcctacgatggggagcgagtcggagcccgccaagggcctgctgccctacctgcagcgcgccgacggagctgcagaagcacgagcccctcgtggcgtactactgccggctctacgcgatggagacggggctgaggataccccagaaggagcgcaccaagaccacgaactccattctcatctcccttatgaaccagctcgagaaggacaagaagtcgtcgactttggggcctgacgacaatcttcatttggaggggtttgcattaaatgtctttgctaaagcagaataacaggaccgtgctggacgagctgacataaacactgcttaaaccctgtatgctgcaagcatcttctttgagattcttaac

SEQ ID NO: 282623 - DNA, 368 bp, Zea mays
tttgattacttcacatataaaaagttagcactgtaccgttgtagttgatgcaagatgaaggactgtatgccggagagggatttccaggagtgccagtttttcagtcaaggagcctggtcttgatgagtgacaacaagagatatcgtccagtttttttcagaaaggaggacttggataactcactgcaccggacctcccgtgatcagcaaaaacctaatcctgctgttaggtttggtgacactcaggtttcttctttggaagatatcattaaatctatgaaggatagctcctcctcaaaatgggatgatgttgtatttattcctcctggatttgaccttgctactggctcgacaccatcacagcttcgc

SEQ ID NO: 282624 - DNA, 390 bp, Zea mays
tttacgcgtccgcccacgcgtcccacaaactaggcagtagtgcactctacctatagctctctccgatccatgcagagctcggtggtcatgttgtcgagcacggtggcagcggcggccatggcatcgctgcgcaccctcccgctgccggtgctggtgcccctcgtcgcctcggggctcgtcttcctggccaccgtgctccgacgcttgctaaggcggcagcggccggtgtacctcctgaactacagctgccacctcccggacgcggagcggcaggtgaacctggaggtgtgcgagtacttcggcctcaagtgtcgccgctactccgacgacatcgccgacttcatgcggctggtgtacagcaagtccggtctgggccaggagaccttcgcg

SEQ ID NO: 282625 - DNA, 416 bp, Zea mays
cataagagccaactctgtcgctccgtggtacatcaccacttcacttacggaacggaattttggcaaataagaactttgaggaacaagttgtgagtcgaactccgcttggacgtgtcggagaacctggagaagtatcggcacttgttgcttttctttgcatgccgggttccacttatattagcggccagacgattgcggtcgacggaggtatgactgtgaacgggttttaccctcccaagccctaggcggcagctgccatgtttctttgtgctgaggaaacgacaatagctgttgttcttggttgttgagaaaaaaaatctaataaaatgtatgtacaggtaaggttgtcatgttgacactgttcattacattacataattctatcagggcaatgtgaagaacgttgtgtttagatc

SEQ ID NO: 282626 - DNA, 481 bp, Zea mays
ttctgcgggcgccgtggtcgtgttccggcggcggaggcgatacgtgacgcacagcgacgtgacggccagcctgacgctcgccgtctcccacaccatcaaccgcgcgcagctgcagggctggtacaaccgcctgcagcgcgacgaggtggtggccgagtggaagaaggtgcgcggccggatgtcgctgcacgtgcactgccacatctccggcggacacttgctcctggacctcatcgccggcctccgctactacatcttccgcaaggagctccccgtggtacgtacgtgtacgtgtctacctgctctgccgccccacatgcgtggaaacatgtacacgacgaggacgctgcagattgcgatttgatttctccgcagggcccttgatgtgttcatataatcagatcgtttaagtcgtaagtaacggcaccgcgcaagcttcttatcttgcgtctctgctttcgtgcaggtgctcgaggcgttc

SEQ ID NO: 282627 - DNA, 479 bp, Zea mays
tccggaatttctgggtttacttacgcgtcctttttatctccgctctgccaatataatgaatagcacagcatgctagtttggctgctggcttctgcaacagaaccaaactactagttgcttgcaagttgcatacaagaacaaattctgaaagatgctactagctagctatacagctacagcttttgtcactgttgttgctagctgcaaactaaaacttctcccacaccatgccatgacatgcataagcacacaacagctgcattggtagggaatctcaaactgttcttgcaagtttgcatcatgtcgtacctcgggaggagcataacaaaccaagcaaaactaacataaactctgcctgctgccaatgggttgatgaaagctaaataaaatagcaacgacgattaaaccagtactcacgcacgcgcacagtgatgattcaagtgaatgaaacagagaaaagaaggtggtggtgtggttgt

SEQ ID NO: 282628 - DNA, 598 bp, Zea mays
gcgttttagaggcagccctcgtggcgctgcgctccggtgccccgtctactatctctgcaccgctctcccgccaggcgggagctcgctcctcggagctggcgggtgcgcccctgccgcgcgcctctcgccggcgcctcgggatctcgaggtagcctgcctgccgcctggagcttttgaatctctagcggagcatttctattgttatgcttggctcagatccggtggtgcagggtgccggttgtggcgctcggcggcgtgcagggttcgctgatgccgatgcacagcgccaccgcgtcggcgctgctcacctccatgctcgggcttaagcctgactcttggggttggctctcccagggatttgctacacctctataacaagacacaagagccttgatttttcgcctttgcactagagcattccaataacatttttacatgccttgcgggagtacgcccttggacttttgctgatggaatctgcgaccgaaagcgtatggtcttatttccatgatatgcatcgatttttctcggattatctcttttttttcccccttgtatggagccatgggaagtatcaggatgtgttatctggagcatc

SEQ ID NO: 282629 - DNA, 237 bp, Zea mays
ttcgctgatgccgatgcacaacgccaccgcgtcggcgctgctcacctccatgctcgggcttaaacctggctcttggggctggctctccgacggatttgctacacctactataacaggaaaaaggagtatccgtgataagtgcctgtttttaaacctttgcactagaggattccaaaaacatttttacatgccttgcggagtacacccttggacttctgctgatggaatctgtactaa

SEQ ID NO: 282630 - DNA, 517 bp, Zea mays
aaaagatatgtacgctccctgcagatatcggaggtggtgaatcacatgaaggacttgattgagttcagccacaagaacggccttcgtcccacgcgcccgtatgagagcctgaacagctattctaaaaccatggcgaagtttcagaatatgcatgattcaagacagctcatggctgctgctaaccttgccaataaccagagcaacaccaaactaatggggaccaaacaagaagcaagtgcttctgcgaccaaccagactcctggtgtcggagccatcggcaataatgctcttcagcatgccacacctctaaacagctaccagaatatgctcagaagctccagtgcaaatccagtcttgctgcagcaggaggcatcgagtgtcttcaaaggtcctacagcaatgtacagtggcatacagctggaactgcacttggttaggtccacggaaggatctggctgcttacagctgtaccgcccacgtacaccccgagccccaaacccacgccgccgacgtacac

SEQ ID NO: 282631 - DNA, 572 bp, Zea mays
attcaagacagctcatggctgctgctaaccttgccaataaccagagcaacaccaaactaatggggaccaaagaagaagcaagtgcttctgcgaccaaccagactcctggtgtcggagccatcggcaataatgctcttcagcatgccacacctctaaacagctaccagaatatgctcagaagctccagtgcaaatccagtcttgctgcagcaggaggcatcgagtgtcttcaaaggtcctacagcaatgcacagtggcatacagctggacgcagccagatccttccgtggacctaaccaagtgcagttccaacaccctgcggcgattcagcagcagcagcctatgccgcagcagagcaatttccagggctttggtggtgttaacccacagtaccagcaccatgtgcttaatcagcttctgcaggaagttaagaacaataaccacgtgaaagcacagcaactgcctccagatgcacctaaagcgagcggcggtcttgcaccaggagttgctattcccaacgttgctgctgctggggagcagggacagcatatcaacagtaatacccgtgaccat

SEQ ID NO: 282632 - DNA, 1153 bp, Zea mays
attatggttaaattgttgcttacgggacaaaatcatcactttggaaatcctttccttagctggtcatcttctctttgctatggtgatattcatccggatgcactacttaacaaggagaagcacataaaaaaggatgagaaggcatatcatgttaacttgcttaattaccattccaacatggttgaaaccttgaagagttggaggaagagatggctaagttgcggtgatacagagaatttgttcagggataaccctagtaatcagatgccaggagttatgcagctgaaagctactaacagtggaatgcccatgaaggttgcacaaagaatcgatgtttcaaagtttatgtcatacatcaaagttagtagaacacagctcaaccatataaagagactgaagcaatctggggatggtattcagaccaagcatgtttcacgtgtaattggcggccttgataaatctcatgtgaaaccttatggagctttattaaaggatgaacacgggagactgcgcgagcattggctggaaatgtcttgcaatgatttacctgctgcctttgaggttcttagggaaaggaaggtgctgatggagaaatcaataaagttattaggccttgagcttcagcagaagaatgtatctgtcttgagaaaggttcgctgtgacttgtccttcaattctttttcttaagtctctaatttttgtcttgagggaagtgatttacttgaatgtgtaaaaaatacagtggatgagaataccgttgtatgcttacttctgttatgtatcttccccatttacaatgtatcatagcattcgccactatagatgagaataccatgactataaagatactgaattgtaatagaggcatctagtatgaaagccataggcagtatttcattatgaatggtgaattgccctgcagtgttatcttatttgtataagctaatatattgtcacatttttgtaagtatactttggtgtaatcttcataatgaaaataaattcttataaaaaacaatcttaatttgtttttaatacccaatagatgattatggtttatttatgtttgtttatgatgagaaggcagaccagttaacagacataatgaaagggctaggacaacctggtgctagtgaaaatgatggtaccccag

SEQ ID NO: 282633 - DNA, 529 bp, Zea mays
  unsure (1)..(529): unsure at all n locations
cccttttgccctcatcccctcaaacctccagctccccacctcccccgctcgctcccttccaggagctgccataccggcgacggctcccaactctccctccacatctcgccttctccccattcctctcctggcaagatctcctagccactgcgtccgcccccaccctcgttgcctggatccggcagtccctccatgctcatccgcgcctttcccgctctctcctcgaccggctcgctcccgtttgcaaccacccacatcccgttctgctacagagatagtcctgatggcgctgaaggaggagacgcagcagcggatggatgacgcatcgactggaggtcattggtggccactcacgcctcctcagacctcaccctcacttcgtcgttagcgcaggttcggccaacggcccccgacccgatcgcaggtcctcctcacggcgaggcacagttatagcanaagaaagaaaaaacaccttcctagcagaactgaagatgccatctcatcaagataaaaagaggaatatatcttc

SEQ ID NO: 282634 - DNA, 454 bp, Zea mays
ttttctttcaattatctgatgcaggcaaggcatctgttgcttgtttccctttatactacagcgccgccttgacttgaattcttactgtactagctcgatctgcataccattatctatttgccatgctgttcagggcttcttactcctgctagtgtactggattgcctaatattatcccctgcatttgtcatggtaatgcatcagatttgaagttcccctctgtcatgaaaatatagctttgaacaagatgtgtttattgcaaatttttcagcttagattccaaagatctgaaacgtcagcacactatgaatgagatttagccgggctgtagctatattgccttcaagtctatactggaaccttaattctttgcatgttgccatattctaccagtaggaaatagggaacacatccatagcttgatgccgttatgttgaatttgataggaaattgt

SEQ ID NO: 282635 - DNA, 511 bp, Zea mays
tgtttcactcttccgatgagcaaatccattcccacagccaggcattaaagagccacccccagatagaagagctgaaggaatcaggagagaccagtcctgctccatcttctgaggcgagcaagacaccaccactcattgtggaagcagattctaaccagaccttctcactgcaacgccccaagaacaagcagtgagcttcgctcaagtgttggaaggcccttgttctatctggtggtctgaaacatgagtgccactgagaaacaccactagtaggttttagttttctttagtctgagagagctgatatgtggcggagaagggatagacccctaggcatttggtttctgggagctaaatgcgaccggagagacctagagagattttgattctcgtgaaggttatactttggttccttgttggaatgaagtttgtaaaaaggcaaggttgggttaacgttggttagacaaaatgcataaatgcttaagttatttctttcttgctgagcttgact

SEQ ID NO: 282636 - DNA, 451 bp, Zea mays
ttttggctaacatatataatgaagttggatatagtggattatcaagtgaatgtttttctcaacaactgactgggaaacatggtggtgatatcatagctccacaatcccatgatcaagatcctaataagatgcttccagttggggattacttttcccagaacagttcaatggagttcttcagtggctatgaggacatgcattttgatggtgaccttttgcctcctggttctaatgataaagtatcttctggaattttgggtactgaaaaagattcttctgtgcctgtgctggatgttcctggtcgaaataaagaagaatcccccgctgggacttctggatttatagaacagaaggacaccagcaatgttacggatatgcttcctgatcttaatttgtatcatttggcttctacggcttcaactcactcaagccattctgttagtattgagtc

SEQ ID NO: 282637 - DNA, 421 bp, Zea mays
tttccttctcgccctcccagctccggccgcactgagctcattgcacgctcctgtgcccctgccgcgtctagctccagcgctcggtgtccctcagcccagctgtgtctacgtgctgctcgctccgagctccctgtgccatggcgtcagccgcagttcaccgcgctcggcctcccgtcttgccgcgagtcccggctcgaatctccatggccgcaggcctctggtgccgcgcgcgcgcccttgtcagggtcctgcgcgtcctgcgtcttcttccccgagctcggccgccgtgctctctgcgcgcgactctgctcttctgggtgcgcgcctgggtccctgctgagctcggcgtctatctctctatagctctagtttttccccagcacgctttcttccctgctcggccatgggagccgcgccgtcg

SEQ ID NO: 282638 - DNA, 348 bp, Zea mays
gattcccactctgccaccaacacgtacccaactcccacgcaggtcggttcagtaaaagctactagcagtagtgggcggtggttggcacatcgcagttgatacggaggcgtagcgtaggctgtactggttctcccgcgtcggcgtcgacggccgtgtccttctcgggaagatggtaatgggggccgcgtccgtcggcacgctgctcgtcgcgctcgccgtcctcgctccggcggtgatggcgcagagctgcgacgacgagctgccggctcagctcgccggcaacttctcggggctcgcctgcgcccccgtctggaacaacttcgtgctccggtacgcgcaggacaagga

SEQ ID NO: 282639 - DNA, 604 bp, Zea mays
ctcgtaggctcgtactggcacgtccccgctctgtcttctgcccaccaggcactagcgggtgcgggtccacgcttccaagggttccaaactctcggcggcgcaacaatggcggcgcggggccgggagcactggtagtttcgcatatcgcggcggcttgttgccacctcgccatcgcagattatggggatcaacggcgaggagtgggaggagacggtactgggcgacggcgttgggaggcggaagggtggtgctgaggcttccggtttggtcgcatcctcctcctttgctgaggggatgggggaattcgtgctgaggtctatggacgccaggttctccggatcggtcgacgacgatgaatatgtctcgtctcggcagccagtatttggccatagtaaatcgacagctactacttctggtaccattaaagggcaagataacgtttctgtaaggtcatactctgataggttgctgaagtgtgacctcactttggatatgctatcagaaaatgagaagataaagataaccgagagattggtaaagatccagaatgatggtacagtggaggtagatgtgacgcgcagtgctcttgttgcctcagaactct

SEQ ID NO: 282640 - DNA, 530 bp, Zea mays
cggtccgttattccttggtttacccactttttctcaacactccacctggggaccatgctcagtggagctttgagcaagcccatcgcaccgcaggctccctggaatctggtgaacggtattgcagcagcgggaacagatctaggatccatgaatctgatacaaattgtgacggtcgcctccggaaagatggggacagaagagaacgacaacataacagttaaatgattatgagtgaaacatttcgatacaattgttggagtctcctacacggctacttctacttatactccagctaaacaatccactgggcttgacacaagggcactgggccagcgaagcctcttgggctgtgaagcagataaaactgacgtgaaattcctgcctttgtaccgaagttctaaatctccagctatagtggacgctacaactagagaccacagctgcacagaacagcggctgggatagttgacttttagcacttatagcccgatttagtgcgccaaatctgctaatcaagatgtgatttagta

SEQ ID NO: 282641 - DNA, 476 bp, Zea mays
gaagattgttacatctgaaatcgattatggtctgaacgaggaattcagggtgatcccaggactgggagaatatggcgaccgctacttcggcacagacaattgatggatcataccactctatggctgtgtgaagatctcacttggtccctggatagggatggtatcttgcaagtaatatttaatatggaggcgtaattgtgtttaatagtcggcatgccttagtaacatgtagaaccttctgcataaagcttgaccaaggacagcgggatgctagagaaggacctgtgaacggagaacgtggtgtgtgttttgtcttgtacgggtgcagaaacattgatgttttcaaataagtgtgtttgatccaaatactttacggtgaagtcatgagattaaatcggcaaagccctttaactctgttgttctattgggtttttaattccaacctacaccagcttgctcaggataatatcagacac

SEQ ID NO: 282642 - DNA, 719 bp, Zea mays
acctgccggcccacttgctgcctatgataaactgtcacttaatcgtgtcctattggccttcgatgacatggacttgccatgtggagtcctccgtctacagccaaaaggaggttctggacgacacaatgggaattggacggccagctggccagatggatcctaaagcctttgttcttcagaagttcaataggactggtcgtgaacggatcgattcacccgtgagagagggtgtcgatattctgaagatggtggctgcgaggggtttgacagaggcggcaaaactgacaaatgcggaccagaagtataagcatctgagatcacatggtatccagactaacgatgactagacaaagcttactagggggactactcttttcagcacatctcccgatattcagactaaagacgaaactcgtttatggcctgttgtctagagcatggtaggcttgagaaacaggcgctcgatgagcccctttagaccgtcgctgaacgtgaacgcgtccttgttgtcaccgtacatcaacggcatgctggcggttatgtcggcaactcgctgcactgctgcaagtagtttgctgttctcaaagcgtgctccgtttatagttttccatgcatcttcaatcagggagcttatctgtgcaaaggcaacctcagctgtgacgccatgctcactgatgtagcattcgaaacgaaccctccccgtcgtttttgttcaaaaa

SEQ ID NO: 282643 - DNA, 533 bp, Zea mays
cttctacagccaaaaggaggttctggacgacacaatgggttgaagagtgttatataccactttcgtaagaatcgagaattttgccgattaaggattggaattggacggccagctggccagatggatcctaaagcctttgttcttcagaagttcagtaggtctgctcctgcccggatcgattcagccgtgagagagggtgtcgatattctgaagatggtggctgcgaggggtttgacagaggcggcaagactgacaaatgcggaccagaagtataagcatctgagatcacatggtatccagactaacgatgactagacaaagcttactaggggggctactcttttcagcacatctctcgatattcaggctaaagacgaaactcgttttatggcctgttgagaaacaggcgttcgatgagcccctttagaccgtcgctgaacgtgaaccgcgtccttgttgtcaccgtacatcaacggcatgctggcggttatgtcggcaactgggtgcacggctggaagtagttaactgccccc

SEQ ID NO: 282644 - DNA, 294 bp, Zea mays
cccacgcgtgctgagacatgctctctccatagagcatcgtcctccggtacaactgcacttacagcaatggtttttggaaggtctcttctggtcgctaatgccggtgactgtagggcggttctttcccggtgtggcaccgcagtcgaaatgtccatggaccacaggccttgcagtctcagcgaaaaactgcgcgtagaatcgcttggtggctacgtggacgatggctatctgaacggtctgctaggagtcaccagagcacttggtgactggcatctcgagggcatgaaaggagct

SEQ ID NO: 282645 - DNA, 658 bp, Zea mays
aaacctacaccacaaccagacccaaaacctggaccacaaccagacccaaaaccagaacccaaacctacaccacaaccaggcccagagccgaaacccaagctagcgcctcaacctgagccaaaacccacgccgcaaccagatccgaaacctgagccaaaaccaacaccacaaccacccttcccacagcccgagcctcaaccagatcccaaaccccaacccgaaccatacaagtcagaccctcgaccagatcctaaaccccaacccgaaccatccaagccagacccccagccaggacctaaacctacaccagagccaaaaccccaaccagaaccatcgaagccggagccaccgtcgtctcttccaccaccatttggcacgggcgtcgtggaagggaactgagaggagcatagtggaaccgatcatcatcgtggatgccatctatagcttttggctatgactgataagtaatactgtttgtgtaagagtgagctctcttttttatatagggtgtgtgtattgtgtgtagtactatatttggacgatgtgtgtgtacccaccttttcccgtgtgtttccatcagcatgcatccatgatccatgtatatgtcttgctaagtttgtattatcaatgaataaaagaaacatgcctttgtatgtct

SEQ ID NO: 282646 - DNA, 539 bp, Zea mays
cggcaggtacttttccttaattccttggtttacccacgcttgctggcccccgcgtcgcctccgcctgggcgactcgcccagggcggcgccccgcacccttgccgccgtcgcccgcaaattctctctcccctccccttgccgccaccggagggtctgccggaggccggcttggcccctaggatggcggcagcggggtgtttcgcgtgaatctggtgggagatggcgcgacacatcggcggtggagcacgcggcggcacggtacctacggtggccgtagccgtgctggggcgcgccgtggcgcgcgccacagagctcgttgggcggcggctgaggcccaggcggccatgcgtggcgggacgccgctgtgagggcgtcacggactgcctccgcgcctcgctcgtggatctgctccgatcatcgccgtcgtgcgctgtcggtggggctagggcgacgctgagctgtgcttcttcgaggcggaggccatcgacacgtgtgttggcgggcagatctaagcgggggtcggcgcacaacggcatggg

SEQ ID NO: 282647 - DNA, 435 bp, Zea mays
aacgggcctacaggccacagaccgaggggtccgtttacgcgctcgctcctttgttccgcggacagcaccgtgccgagtgccgaccggtcggaacggaagaaaccatccgctcatccctgatttcttttgtcccggtcaccacgcctgctctctcccttgtcatcttctggcgacgactgggcgactgccgacggctgctgctgccgccctagaccaggtggccagctcttgttcgggaccgttgctggcgacgagaatccaatagcttaacccctatgcaccaagggaagtcggatcctcattgctggtacaatgagcaggccgaatacccgcaacaagaacaagaggcctcgtactgatgaatccaatagcccatctgtggctgttttcaagaagatacattccactggtgatatctcaaaaagcgatatctgt

SEQ ID NO: 282648 - DNA, 853 bp, Zea mays
cggacgcgtgggtggacgcgtgggcgccgatccaacgggaatgtcaccgacgcgacgcgctccagtcccctccatcgctgcgtccaccttctgtagtccagttgtagccgcttgccgatggcgcggccggcggcgaaggcgcgggtgccgaagcacttggtggcgctcgccgtcgtcgccatcctcggcctcgtactcgtcgctgactacctctgggcttcgtcctccgcgtcgtcctcggccgtctggtcctccaggcttaatctccacaccggacccgccggttcgacgccgcccgtcgcgaagaagattaaggaggacaagaaatctgtaggttcgactggcataaatgcaacttttgcggacttgccagctccagaactgaaatgggaggtcatggctgaagcacctgtggcccgtttggatggcgctgctatacagattaagaatctcttatatgtatttgctgggtatggcaccattaaccatgtgcattctcatgttgatatatacaatttctcggataatacatggggtggaagatttgacatgcccgaggacatggcacattcacatttggggatggttactgatggaagattcatctatgtggtaactggacagtatggtccacaatgtaggggaccaacaactcgaaattttgtattggacacagaaacaaaagaatggcgtggcatgccaccattgccagttcctagatatgctccagcaacacaactttggagaggcagacttcatgtgatgggtggcagcaaggaggataggcatgaacctgcgcttgaacactggagtctcgcggtaaaggatgggaaagcattggagaaagagtgga

SEQ ID NO: 282649 - DNA, 631 bp, Zea mays
cccacgcgtccgcccatgagatttttcgctgggatgaccgtgcacgagacgaatcccgttcggtaaccgataccccaagtcaaggcggatcatccgtcagtccgtcaccgcagtccagggagcgagcgacgacgacgccagggtcgtggtgctagttgcggggtcccggcccgtcgagtccgcctccggttctcccccttctcccgttgcggcgactccggcggcggagacagaggagcctaagcaggaggaggcggcggcggcagcagcagcaggtgtgcaggccatggctgtcacggtagtgcgggacgtcgagacgggcctggacgcgagcaccagcgaccgggacggtgacgccggggacaacccttcctggttcacacctaagagactacttgtcatgttctgcattatcaacatgctgaactatattgatcgaggagcaatagcaagtaatggcgtcaatggtacccgcaaaagttgttcgggtggtacatgcacctcaggctcaggaattcaaggggacttcgatcttaataatcttgaagatggtacattgtcctcagcatttatggttggactgttggtgtcttcgctgatatctgcatgccttggtaaaagatataatcct

SEQ ID NO: 282650 - DNA, 280 bp, Zea mays
ccaggacgcgagcgacgacggcgccagggtcgtggtgctagtcgcgggttctcccgtcgattccgcctccgattccctccctcctcccgttgcggtgactcctgctcctgcggcggaggccaagcaggagtcggtgtcggagacggaggaaactaagcaggcggcggcggcggcggcagcaccagcatcagcggcaggaggtgtgcaggccatggcggtcaccgtagtgcgggacgtcgagacgggcctggacgcgagcaccagcgaccgggacggtgac

SEQ ID NO: 282651 - DNA, 581 bp, Zea mays
cggacggtgggcggacgcgtgggtttttaaaagagcacaaaagaatgatgaaaagaaacctatgtacaggagacgcaaaggagggggagggaggagaagggaggtagtattgctatctaatgactcgatcattagataagcaaacacgctcccatcatcagcaaaagcatcgagttcaagttgtgtgtatacgccaagggctcgcggcaaaaggcaaaaaaaaaagtcagcgttcctcattcatcaaatccccttcggcaatcccgagacttgttcctgctggaagatttgattgcatcagcaatcatgagggctaccgtggccttatggagggcaaggtcagccttctgcatcaggcagtgagccttttccctcttgagcttcgccacggaagcagcgtgctgtgctgcgcttgcaccctcccgcagtttgagctcctcaatatcaacagggggcgagcccggaaagagatgccctgagttctgccagccatgaatgacagtgcttcaatggtcagatgcgctccgattaactctctgagggcggaaggaaggcgacggctggtgaccatcagagaaagc

SEQ ID NO: 282652 - DNA, 562 bp, Zea mays
acgttcttttaggccccccacgtcgccggctcccggcgatggcgccgctgcccttcctgctgggtttcctcctcggcgccctggcgctggcggctgtcgaggcggcggcgatccttctgctgctccgccgcctccgccgcagtcaggctgcggcgggggacgcgctaccagccgccgacgagctgcccggggaacgccccttcccctacgagaagcagggttttctgtggatactggagccagaaaaaatgccaaaactcagtaatgaccgcttatcggctggaggtcctagagagacaaaagacaagaagaatattgcggaagtttttcctgcaaagaagatggctaaaatcaagggaaactctctttgtttgtctggtcctgatggctcccaagcaaccattgagcttttgaactgcacggtacttgcagtttctgcatcaagtatgccctcgcgtaaatgggccaagaggttcccagtaaaattagaaagcaggacaatgagatttataatgaagcaaggtgtgctatcttatacagacacttcctgggagaagaatca

SEQ ID NO: 282653 - DNA, 600 bp, Zea mays
ggacgggcggtggacgtcggcagcgtggcgttcaccacgtccctgaatcttctctcgcgcacaattttctcctgcgacctgacgaacctcgacgaccacaccggatcgcgaaagaattccaagaggtggtgacagagatcatggaggttgccgcgagtcccaacctgtcggatttgttcccagcgctggcttgcgccgatctgcaaggattgcgacggagactggcaaagctctttgcacggctgcaccaggtgttcgacgtggaggtcgaccggaggttgtgcgagcgtgatgctggcgatcgccggaagaatgacttcctcgacctgttgcttgacaccgacggagggacggcagcgttggaccgcgactcgctcctgtcattattcacggatttgtttgctgcaggaagtgatacgagctccagcacagtggaatgggcactgacggagttgcttagaaacccagtcccaatggctaaaacgtgcgatgagctcctggcagccactggcgcggcaagaaacattgaagaatctgaaatcgagcagctgccctacctccaagccgtggtaaaagaaacttttcggctgcatcctcccg

SEQ ID NO: 282654 - DNA, 600 bp, Zea mays
tttttcgcgttcggggaaaatggcgtgcgcagttctagcttgtagggcgacatggtggcaggcactgggatctcgtcaccgatcaagaagaggaaattctcaccgataatttgggacagggatagcccaaagccaccgcattctggtgcagccagggacaagaaatcggtagaatctgttccttctgagctccctccgccgccgccgctgccacaagaccacatcccactgagcttgtctgtggagaagtcacctatggatgtagaaactactgttggtacagagagtgctgagcagttgccggaacatgaggtcaataaggtgatagagcaggaagaggactatccaagtccaacaatgaggaacatatcgacttcaagatgggcgggtgcaaatgatgatgaggaaggtggggcagctccaatgaagaagagaagtgtttcacctgcagactcctctgtaccaggtcagtggtaacgagcaagcccagaacctggtgaagtctctggaggaagggcaatgtctaggtcatctgattcagggaaaataggtaatgatgagaaagaagattccgaggtcgataaagatgactatatggat

SEQ ID NO: 282655 - DNA, 626 bp, Zea mays
cggccagcctctcggtcgaacgaaaaaactgcccacggctagctgccacgcgctttctcggagagatcgacaagctgcaccctcatatcattcatcgatggcgagccttgggctggtcctgcttgtcgccgtcgtcgtgtccgcggcgctcatgccaccgtccgccgtcgcgcagcagctgacgccggactactacgccagcacctgccccaacctcgaggccatcgtccggcgctccgtccagcagtccatggcgcagtcccagatcgccgcgcccgccgcgctcaggctcttcttccacgactgcgccgtcatgggctgcgacgcgtcgatcatgatcgtgaactcgaacggcgacgacgagtggcggaacaccgccaaccagtcgctcaagccggaagggttccaggccattctcagcgccaaggccgccgtggacagcatccagcagtgccagtacaaggtgtcgtgcgcggacatcatggccctcgtcgccagagaagccgtcttcctgagtggcgggccgtactaccaggtggagctcggccggttcgacggcagggtgtcgaccagggacagcgtccggcttccgggcgtcaacttcaccctggaccagctcaacgcct

SEQ ID NO: 282656 - DNA, 510 bp, Zea mays
ttggtgtgctcggtggcgccatgttcgtctcctcggtcgtgctcggggtcatcgccatccgcctcggcggccaggaggtcgccgtccaccgcgccagcttcttccgggacgcagccttcctcttcctggcgctcgtcgccgtggccgtcgtcgtcgccgcgggccaggtcacaatctgggccgccgccgggttcgcctcgctctacctcgtctacgtcctcgccgtcgtcttcaccccggaccgctggaccagacgccacgacgcgcacgcggtggatgaccccgcctccgccgctgccttctcggagctccacaacgtcacggagaccaagttctacaccgaccaggaagcccgagatccactgctccccgacaccgcaccgctacttcaatactacgccggcgaagaaacagcaacagcaacagcaacgacggctccactggcaacaagagcgtcttctggaccgtcctgcgcgtgctagaagcttccctgaatctcccgcgcggctg

SEQ ID NO: 282657 - DNA, 454 bp, Zea mays
ttttcttttgaaggcctgaagcaccctcactttccccactccggagctgcacgggcacgcacgcagtttatccaacgccactgggcctcaacaacaacaatctcccaacgccgccgctttcgccgcatcaagcgctagaactaggaacccctcccaaaggatctcaagaagacaaggacaccgtcgagtcgccgccagtcgctcgatggggtgcgggcagtcaaagatcgatcaagaggaggcggtgtttcgatgccgggagcggaagcggctgatggctgacgccgtggcctcgcggaacggttttcccgccgcccacacgggctacactgtccgcctgagagagcaccggcggcgcgctatccgatttcgcccaaggcgaggcgccggaccctagcctggtgtgctcccatacccaccacgctccggctgtggcgacgtcatctgtctcgac

SEQ ID NO: 282658 - DNA, 633 bp, Zea mays
tcttccacgcgtccggtgaccacaaacataggggggattttagggcgtacaccgtgagtttatctcatactttcctttgttattcatatctgctctttgggtcttccccagccgtttgtctgaatataatttttttaaggatctgtggtaataactggtgatctggttaggtccggccagcttgccgcatcccatgttttgcaagtttttttacaactcgaacaggattctattttcttcccgaggcaatttcgagctggcaataatagttctaaccttgaacaacgagccaagtctcggagtcaatattggatgctgccatgcacatttcatataaggtagcggttccatttccttgctgacataagttcccttatctctgatagctagattattggataacttgtcgatggcacaaaaagtagcacgcggataaccataacaaaggggacagaaacaaagcacaaaagttgtaggccccagtacaaaagggatagaatcaatgactgctgctgacgcacactacactactaggtactaaaatattagaatcatcactgctgactcggtctactaggaaagacgatggattcttgggtaaaagcgcaaccagcatagactctcatggacatt

SEQ ID NO: 282659 - DNA, 567 bp, Zea mays
gtgagtcagaagcagaattagatgaaacatgggcgatgatgcatcatgagtataacatgcaggaacacccgtggctcactgatctgtaccagcaaaggcataaatggtgctcggctcttcataaggatgcatttgatggtgggatcgaatcaatggataggaatgagagtttgaacaatgttttgagcaacattgacgatgaatcagcttcgctttccacttttgtccttgagttggataaacttgcagggagttggcgtaaaactgagtctttagaggacattcagtgcaaccaagctgctccggagtgtacagttaagcataacagaattttgcaacatgccgctgaagtttacacacataaggtctataagtctattgaaacagattttctagatggatgtagtgctacttcatatcaggcagctcagtgtaatgaaacattgcataagtttgagttccttctggaaaatagtccaaatgtttcggtagttttccttaacacctctaccatggagttgagctgtacttgcaaaaaatttgagaccatgcgtatactttgttcac

SEQ ID NO: 282660 - DNA, 508 bp, Zea mays
tgttttgcttcttgtacgcagggcaagatccacaaattaagcatccgaaaacaaagtaatccttactgaatgcacaaaatcacgtcaacaaaaatgaattggatcaaaactgtgtcttttttttcctttccgatttcccccccccctgtacatttgtactctatacatattacaaaactgcatcaagattagctaatcctcaaaaacgcggatgccaatcacaggatgtaaagagcaacaaggagtgtctatgagctaaggatgttcaggagagagaccctgctctggaccaatatcctgaacaggtgtcccgctccgctctcgagatctccgacgctgcactctaacgcctgtaactggtcctcctcgcagacaactgcttttctcttggagaacgcctttgagacaagtgactgcttcagcacttcaatttgcttagacaagtgcagcaagttcataatatccattgcggttcaatcactgattcataatatccattgtatgtcat

SEQ ID NO: 282661 - DNA, 444 bp, Zea mays
  unsure (1)..(444): unsure at all n locations
gaacaggtgtncacgtccgctctcaagatctccaatgctgcactctaacgcctgtaactggtcctcctcgcagacaactgcttttctcttggaaaacgcctttgagacaagttactgcttcggcacttcaatttgctttgacaagagctgcaccgtggactcaagtagagagatggcgatctccctggccttggtcagtagcctgaccattgcacagtctgtcttgtcagaaacggccttcttgcttgacttcttgaaagactgcttagccttcttcaccaagcggctgtaagactggatcttggcttggacggttgcaccatccccttttcttagagccacttgcagctcttggataatggccttcaactcaacgaagatctcctgcatggtgttgcagagatccagcagctcgagagaagactcagtttctccgtccagcat

SEQ ID NO: 282662 - DNA, 483 bp, Zea mays
cttttccgatgttcccagagaggcttgccatgaattctatgagcttgcagcagggtaaagaatgcaaatctgtaactgtatctgttattttaaacctagacgggagtattgcagaatatactttagaaaattcagtcatcaaacctacttatatgttgacgtatgagagtgcaactgaattgctttacatgaacctggaagaagaggaagaactaaggattcttcaagaagctgctaggattcgtgaacagtggcgtcgtagccagggttcaatagacactgcgatgatagagccacgtataaaggtgtcaaatcctgatgatcctgaaccaaatatcaatctatatgttgtagatcaagccaatccagcaatgcagcttgtatctgaaatgatgatactttgcggtgaggcagtggctgctttcggttttgacaacaacctccctttgccatatagaggtcacccccagtccaacacagcag

SEQ ID NO: 282663 - DNA, 857 bp, Zea mays
gttgggagaactggaaagcatttattccttacagacaatgatgatggtagacgcccacttctccttcgaatggttgatgactctgatgatttacagttcagatcggcgttgcgttctttcaaacggcgcgtacatatgctaatgctaagcttgcccatatggttggatggagaacatcatcaatccgacgtcagcatgagttgccaaaacatcgtcttcttgttcgtgatgaaaagtatccacatattgtttatgttgaaaaggaagttacagacaacaatgaaacgaaggcccatgctggtcattatggtccagaataggagatgataagaggccttacgcaagttccgtgggaacgtgttgatgtgagcgtccagaaatcgcacccaaagattagttgcgcataacacaattcaggtgaaaagctattggctaaactcggatggagcagacgtgatcaaccacatgatggacaatttcagcgtctagtccatggaggcatgaagcctacgttgtgtcgatggaggttcagtctacgctgtgggtttgacgaatgtccgtcgaaatttgttgatcagtgaccattcaattttgcctaggccaatttttccttctaggttgcagtttcccatcccaggaaatgtggttgattctttaggcccgtttgctgcaggcccagagcagagccccgccctcgatgcttatcatcctgcaccatcagcaaggctagttcgttcaactgtatcataatctgtcccctcctttgtatacttgtattccgcaactaagctagtaaatagatgttgctggaaatagaattcttctatctggttcaattggagttgaagttcgaactg

SEQ ID NO: 282664 - DNA, 334 bp, Zea mays
tttcgtactcgtgggcggctgtcgacagtctggtgaacatgattagactggaggacaacctaacgaaggttcacgtcacccttgcccacaaacgaggccatggtgtgtctgcggtcgcaagctatggcatctaccagcaccaggaagtccccgtgtcattcaacgcattgtactacactgacaagatggccgctctcgaggcacagctgggagcagttaacgatcagccgatcaattccaggaacgagtggccacacgccactctgtggacggctccaggcgtcactccgaaggaggcaaacatgctgtcgaacctggctttaaaaggaaaagc

SEQ ID NO: 282665 - DNA, 471 bp, Zea mays
ataaaatggtggttttttcaaacaaagaaattgcatctaacaaatagtcactgagttgaaaagcatcatcataactcatttacaccaacatgcctggctgtgacatctgtgctgagttggttaggcggcaccgtagcctatgtgagaacgaccatgattaggagcaggccttagacgtgttctgacatgggatagactgtagatgtgaggatttgttaactctagcctaaaattcgctcccattggaagttgaacgatggacctaaggagggctaatcaaaccacctaaccaattcagctatctcagcttgaggccctttcccttctttggtaaaatatatatttatacttgataatggcttcttagatgaataggttgaacattctgatgatcaacagtgacttcaacacctgaaatattatagctgtcacctcaataatataatataatatgatgttgcttggggggca

SEQ ID NO: 282666 - DNA, 563 bp, Zea mays
ttttgttcgcgcagcgcgcctacgcgcgcgcgctggccgcgtgggcgcgacggtgcctcggcatcagcaccgcggcgcggccaagtagccacgcgctgccgccggcgttcctggcgtgcatggagtgggggcgcgcggtcgacgcggccactgaggcgcgggtgatggacggtctggacttcttcgtcgccggcgtcgggtcggtgtgctcgggcgcggctgccgggatggagggcatggctgggcgcgtgctgtgtgctggcatggcagcggtcaccggcgccttggcggagttcgcggcggcgtctggcgacagctatgacgccgctgtcgcagctgtcgtcgccgcggcgcgtgcgccggagcgcgggaaagaggacggcgtgggacaagtgccggaacgctaggaaagtgctgcggccgttgccttgttggttgaccggcccccgtgacgtagagtggctctgctccccttgtgatgacgatgggtagggtaggagatggaattaaccatgcagctacgtatgtagtcttgtgattgataagaatgctattacaaggat

SEQ ID NO: 282667 - DNA, 447 bp, Zea mays
ggaggcgtcctgcaaattgacgcatttacatgacaatctcgatgcatgctacacgtctctgcgtactaatgtgaaactagatcaaaatcttggcacgtttaggagccagtgtccctgcccaggccatcgattggtcgactccatgccgtatattgcccagctctgtcgcttggctcactggctcttaaacgtgggaaggcttgatctagtttgagattggtgcacaagggcatgtggcatggatcaagatcgtactataaacgcgccggttatgcaaggacatacactatattttctaagtcttgggagatttgatcatgggcaccgggtaccagatccgtgtactgatgtacagcgggtctattggaagcgggaagatattgttcgttagatcggacttgatggctgcacgtaaaggcactattgaggggataaattacaggaact

SEQ ID NO: 282668 - DNA, 442 bp, Zea mays
ttgacaccccgggcgccgacgacccccacgccggcgccatcttcctccgggcagcccagctgcgccgcctccctaacggtcagcctgatccctacggcgtcctgggtctggaccccgcaaaccccgcttcacgccgtccggatgccatccactcacaatatcgccgcctctctttcctgctcaatcggtcccaccaggaccgcccctgctcgctcgccttcgccgaagccgcccggctcgtcgctgatgcctgggcttttctctctgatcccgttcttaaatcctcccttgacgtggacctcgatgccgccgccgcagctcgcgcgtaccactctcctccaaatctaccgcagccgcactcgcagccacatctgcctgcacggttaactccgccggtggctgttcccttcccccgagtgactccgccgttggtttcttccct

SEQ ID NO: 282669 - DNA, 823 bp, Zea mays
  unsure (1)..(823): unsure at all n locations
ctctcgcgtccggaagaagtggaaacgacctgatcgtttattgcggtgttccggttctcgctgttctaaattttttgctacagtaaggtacccctgcctccttgattgtaggtaattcacacatgagtttatgttttaggttgttctttcctggaatactctatgtcgactaaacaatttaggttctttcgagttacattacatcgatgtaatcttcacacaaagtctcaacaatatttggttgctcacttacaccccaccctagattaacatgttctgaattttctttgttcactgctgcaattgacacatgctaaatggcaatttctttataatgatccaattgagtttgtaattgcacatgtttttgccaagtttcatcaagtactgctccaacagaacaagcaatcatggaatattgagctaaggcactggagtctcaagaaaaggtctaggaatcctaagaatggatggataacgatgcttaaatatggatgacatcatttatgtcttgataaccatctacaggccggtgatagtgttttttgacgttcattcatggggcccacctttctaatgtgtaagtaagataactacgttgatcttaatctgagttgtgtgttgatggtcgatgtagtaaagaaggggcacttagacattgttgttcatggatttatgtactgccaacaaaccttcacttctgattcttataggcggtgcctggttctaatgacttgcatgtattttatgcattgactacatgataagacccgtgcccgttgttgacccccccaaaaaaaaaaaaaaaaaaaaaanngagtna

SEQ ID NO: 282670 - DNA, 619 bp, Zea mays
ctgacgcgtgggggaacatatgatggatttaataatgcgatagaagaagttactcaccttgatattgatcagataagtccgctaagaatggtgcttactgcatctgttgcttttcatgatcaatctgtaaaacctggctcacctctgcttgtcagtgtgtcactcttatctcatcttccttctccagttgtggttgatcagttggaggttcagttcaatcaatctgactgtaactttgtgatgcatagtgcacaggaagactcactcccttcatattcaaatttgcatggccaagttattcaagatacttcttctcttactctcttcaccaatagatggatgcggttgacacatgaagtaaaatcaggaaagagtggaaagctagaatgtttgtctgtgaaggcgacaataagcaaacaccttgtgatttgctgccatgctgaaagccctgcttccatggaagacttcccattatggaaatttgagaaccaagtggagacactgcccacaaaggacaccactcttgccttctctggacagaaacttattcaagttgacgagccagatgctcaagttgaccttgtcttaaattctgctggccctgctttagttggagagt

SEQ ID NO: 282671 - DNA, 583 bp, Zea mays
ataggattcgagtcatatatagagaagagagatttgggttctgaaggatttggcgatctactcgcatgcatacgaaattccaacatacttcttcagaatactatacattttgtgacataccgcaacaatcttaataagatattggccactgcttacctaagagaaccatggaagatgggcgttcataaaagaaggggtgttgtatatcttgatgttcataagctccctgaaagaccaaaaagtgaagttgagcgtaagagatgttattggggctattcttttgaaaaccttgccactgagaactcattcagcgacgatggaaggggtatcgatgcaaatgtagagttttgttctgtaataaagacaaaattgggtgcccatcggattgtcatgggtgctgagatggactgctgtgatgcaactgatgatggcaggaggttctatgtggagctgaaaacaagcagagagctggaataccatacagtggaagcatatgaaagaaaagctacttagattttggattcaatcgtttcttgccggtgttccttatgttgttgtgggattcaggaatgatgctggcata

SEQ ID NO: 282672 - DNA, 461 bp, Zea mays
cggttctcgtgggcggacgcgtgggttcgcgtcggtgttgcttttcaagcgcctcgcctgtccctgtcttgccctttgcgccttcgtcaccgcgacgcgcttgcgttttccaatccttccttgtcttatactccgtttcgactttgagctgggtcgatttcttcttcggctgatctgttccgctgctgctgggcttccttgttctcgcagatctccatcgggcgttccgctttcgtgcgacgcggggagcgggcctgtgttcggtggcggggttattgagtttgccgtttatttttttcctgcaattcatctagttatcgtgtgcaattcgtctagtcatcgtgtcgatcttgtttcgtctcgcctcctcagcgtgtgggttgcaggattggatccgatcttggtgtggggagttcgtcatgtttgcctggactcggaggcaggtcagttttctgtcagat

SEQ ID NO: 282673 - DNA, 575 bp, Zea mays
ttctttcgtccggtttcatgtgcttccatgagtgggggtaattgtactgttggagcatttgttggtgcacgatttttgtatcggcagcatgctgataattgtgcaatgttaccgagcggtcctgcaaaattgatttcagggaggatggccttctctgcgtttagtgttgtcactgaatgcattaagctgtcccctctatatgactttggtgaattctgtgtatttgattttggggaaaggaattgttggttaaacgcgtttttgtttttgtaaggattggatttagcatttcacttggctgctctatcattatggtgggcagaaatgctgatgtgcaaacagcgtaggcgagttgctactgtgtttgtttgggactggtaattccaccactacattacctctttaggtgctccataagggttcctttggagcaaggataccgggggctccaatatcctccactatcattgctcccaaacaagccctaaaaagggaaaggaatgtaaatgtaatgtaatctctgtaaaaacagtcatgatgatttttataataactctcactgtgcatgagctttc

SEQ ID NO: 282674 - DNA, 431 bp, Zea mays
gttccgttgtctcgctcatcgagcgcttgtaggagccgctgtccggctccattgtgctcgatgggcacgacatcaaagagctcgacgtcaagtggcgccgccgccagatcgggctggtcaaccaggagccggccctgttcgcgacgagcatccgggagaacatactctacggcaaaggcgacgctaccgcggaggagatcaaccacgcggcgaagctgtcggaggcgatcacgttcatcaaccacctccctgatcggtacgagacgcaggtcggcgagcgcgggatacagctgtccggcggccagaagcagcgcatcgcgatctcgagggcgatactgaagaacccgtcgatactgctcctagacgaggcgacgagcgcgctggacgccgagtccgagaagagcgtgcaggaggcgctggaccgcgtcatg

SEQ ID NO: 282675 - DNA, 371 bp, Zea mays
tgtcctcgcgtccgcgactccacgaagcgaagccgcgcaacattctcttccgctgcgcctgcgcgcgcgggaggacgaaatacggcaagaagctactcgagaaaggccacgcacgatgatggcgtgtcggcggctggcgagggacgccgtcgcggcctcgctccggcggggcgccgccaccgagaccaccgcctccacgcccgccttcttctcctcttcctccgccgctgcgtcctcctgctcctccggcgcaccagtcgccggcagccccattcgccacttcctggcgcgctattcaagccccgctttccagatccagcctagcgctgcggcgctcggcccttcgttcgccgcgagagtggcccttggtc

SEQ ID NO: 282676 - DNA, 835 bp, Zea mays
ttcttcgcgtccgctcagtcgcggctcccccctgccgatctaacgggaacgcgtctgacagcttccacgcgactgcaccgtggcacccgaggctcgcccccgctgagccagcggagcgaatctccatggcctccacatcctcctccaggtacgcgaaacatcgtcggatcggagaggacgatgagtcggaggaggttgaggaggaggccgaagaggagcttgagcggttcgatgatttcaccattgcttcgtcatgggaaaagtttatatctgagatagaggctatttgccgtcaatggcttgcagatggcgcaaagatcttaatgcaaaaaggtgcagagggtgttcctccttttgaaaacttatatatgatcaagcgtgaattgaagcatgggaaaagagtctattctatggagtaccatttcatgaaatctgtaaaaggtcaaaactcatattgggacgatgatacacatagcatgcagctctcatttggagttgatgagtttttgataattgctccgctgagtgccagtggtgtgatcctcgatgatccagaatcaactaagcttttgagttctgtagcaattgctctttctaattgtggcagcaattggccagcgtttgtaccagttcacgacccttcacggaaagcctatatagggattcaaaatttgggaactgtatttactcgaagatttgaagctgaccgaattgtagtcaagtgccaataagactcatgcatcttgaggggttacatgagctatttctatcacaattttgtctatcctcgtcagattctccagctagggtaaaggttcacttctcaatgaagctt

SEQ ID NO: 282677 - DNA, 415 bp, Zea mays
  unsure (1)..(415): unsure at all n locations
ttctttgccgatggatccaaggacaccagcgtcggccctctccgagctcccccaatggccgccgcggggatgttctgctggtccacaccaagtgcgccgtccacaccaagctcctcgccaacgacttcctcctcttttccatggccgcgagctccgctagacaccgctgtcttcgaccctgctgcgccaacaagtgttcgaagaagagggaaatcgagcgccagatggccacggccaagctattcgcggaggaacagctcgccgaggatgtcgccctcaagagaggcatcttcgtgggggctggttgttttgctgagaaaaaaataccgatcatggagatacatggagccaaatgttatctgatataccagcttccatcgcttggngtttttcttgttggctacctgtaatgaat

SEQ ID NO: 282678 - DNA, 639 bp, Zea mays
gaacaattcaatagaacagttgatagtaaagcagaccaagaagcatatcagcactcctgctccccacgattcctattcggtcctttcagttagcagttctggaaagtatgttgcaattgtatggccagatatcccttcttttgctgtgtgcaaagcaagtgattggtcagttgttgattcaggcacagggaagctttttgcctgggacacctgtcgagacagatatgctctggtagagagtgcattggccccaagaatgccacttgttgtgaaaggtggttcttctaaaaaggcaaaagaagcagcagcagctgcagctcaagcagcagctgctgcagctagtgctgcttctgccgccacagtgcaagtgcgtatcttattagatgatggaacagcacatgttctgcagagatcgattgatggtcgtagtgaaccggttattggactgcatggtggtgctttacttggtgtcacataccgcacatctcgtagaatcagtcctttgacagcaacagctatatcaactgttcaatcgatgcccttatcaggttttggtggaagttggatcatcttttgcatccgatgatccgttttttttctaaggaggggcctcacaaaattttcaattgtacagctggg

SEQ ID NO: 282679 - DNA, 465 bp, Zea mays
ttctcgcgtccgcccacgcgtccgcctttgcgtacaagcccctctctctctctgtctctctccctctccctcccgtatggtctatgccctcccaccctctttcgtagcgcttcttcctatgcctctcgccggaacggaacagcagatagcatctcaatctccagtggctgtgggcatctttccttttcctgccataggccctaggccgtgacgggagctagcttctcgcttgcgggcgtgcttgctccggctatcatattgcctgcctgcctgcctgcctatgaaacctctccggccaatggaggagctacctcttcttcttcttctctagcctttctcgtctctgatccacccattgaccttcggtgcgcccggccactctgcgccggcctctcgcgtgcgtttcgtgtgagtgctacaggcaagcgaagcgatggacatgaactagagccgcgagaaagggat

SEQ ID NO: 282680 - DNA, 510 bp, Zea mays
tcccacgcgtccgcccacgcgtccgcccggaggtccttctaccggacctgggggcccacacgctccacctccccgagcccaagactgccgctggcgtatccaccggtgcgctctcctccgaccttgacgtcgtcgttagacacgatccgttcgagcttgccgtccgccgtgctgggtcgggcgatcccgtgctctccttcaactcccacggcctcttcgacttcgagccgatgcgggagtccaagccggagcacgacacgtgggaggagcacttccggagccacaccgacaagcgcccccgcggcccgcagtccatcaccttcgacctctccttctatggcgcggacttcgtctacggtctcccggagcacgggtccacctcgctcgtcctccgccgcacccgcggcccgggggtcgaggagtccgaaccctaccgcctcttcaacctagacgtcttcgagtacctccacgaatcgcccttcggtctgtatggctcgatccccttcatga

SEQ ID NO: 282681 - DNA, 778 bp, Zea mays
  unsure (1)..(778): unsure at all n locations
cctttcttcatggacgggtcatcgagtgcaaaagatggccatcatgctgttgctggtaataagcgaaaacatgaaaccttagaagttgatgaagatgattcaataattgcagaaagtgaagtactttggcggataaattttgagagattcatattttgtttaaagaagaagttttgtgcagaacgaaagaaagcaaagatgaggctcggaacacttgctatatgggaagcattttttgaggccaatgtaacaaacaacgacaacaagactgtgacatcaccaatagatggaattttggaaagagtaggacaaaaggaaggaggcatgtcaatgactttggatcacataacaagtgtgttgaatgatttagagtgcacttctaccgctaataacccagaagaattcacattcgatttgaataaattggttgagacatgtcgaaacgatgagatagagtctcttgtgaaaaagaaacatgggcaagaagcttatacaatctttaggttattgctgaaacaaggctgtccagttgagacggatgaaataactgacaggacaattctagacaagcaggttgttcatgaaactctatacaagctttggaaagatgaatacatagattcagagagagtcgcttcaacatcagcaacaggaacaggaagcgctcagttctttgtttggagagtacacaatatttatagggaacacttcatggacgatctttaccatgctgctttgnacttgcgccagatggtcaattatatggctgaactactac

SEQ ID NO: 282682 - DNA, 514 bp, Zea mays
tgattgggttcaagcacgattagtcagtcttgagagggaattgggggatctgtgttcacaattgcagacaactaatgaggatgcaagcaaaagtagtgactatttggaatcaagtgatatacttgagagttccttgaacgccaaggagaagattatttcggagttgaatgcagaacttcgcaacattgaaagtactttatcaagtgagagagaaatgcatgtgaacgagcttaagaagttgactactttactcactgaacaggaaagtgctcttatggagttgaagaaagaactccaggaaagacctacacaaaaactggtagatgatctcaagaaaaaggttcagattttgcaggctgttggttacaactccattgaagctgaagactgggagcttgctactaatggtgaagaaatgagcaagttggaagcattgcttctagacaagaaccgtaaaatggagcatgagctaacacaactgaaggttaaaatatcagagaaaacaagtgttctt

SEQ ID NO: 282683 - DNA, 630 bp, Zea mays
cccatgcgttcggtcatatcagccatccggtaggagaaatcatatgtgattccctggacaagctcgccatactgggtctcccgatctggattactgagttggatgtcacagcagagaacgagcacatacgagctgatgatctagaggtgttcctccgggaagcatttgcacatcctgctgtggggggaatcatcctctggggattctgggagatgtttatgtttcgagagcacgcccatctggtcgatgctgatgggacaatcaacgaggctggcaggaggtaccttgctctcaaacaagagtggctgacccgtatgaacggcagtgtcgatcaccaaggagagtttaagttcagaggataccatggttcgtacacagtggaagtgaacacgccttcaggcaaggtagctagatcgtttgttgttgacaaggatagcccggttcaggtgatcgctctgaatgtttaatgtgtgggaaatcatgcgcctgtcctgtattttagcgatgtactgaggtgttgaacacagatagtttcatagctgatgccacgccttcagtgtacagaatattttcacgtttattctctgttctattttttgggtgattataacccgatatctcctttcccat

SEQ ID NO: 282684 - DNA, 268 bp, Zea mays
aaagagatggtgtgaagcatgctaggaagatgtataagagatgccatgtatctggctgctgcttttgtgttacattgaaataacaactgttatattgcttgctttacctcggccaagcctcaagttcatgcaatactgcatagcgctggaggcgaaccttgcatcactcggagacaacggcgccctcaaagatgctcggcggctatatgattcagcgctcgacctgtatcgccaggaaagagaagtgtggcggactactacgacctgg

SEQ ID NO: 282685 - DNA, 474 bp, Zea mays
ccgacgcgtgggccggatagtatcggtccaccacgccccgtaccccgaactacctgacctgagagagagaccgtgcctccctcgccgccgccgccgcagcatccctagtcggagaagatggccgagaagccggcaggtcccaccccgaggacgaggatccgaggcggtctcgcggcctcagctccctcctccaggaggctgtcttccgtatctttcaccgcggccccgagcaagatcaagaaggttcctgaccctccaaaggccgtgaggccatcaagagccacacctgccaagaagcggccacaagtggatcaagctcagaagcggagagaagaggtcgctgctctgcaggagcagcttaatggcctgcaaagtaagttgcatgaaaaagatgaagctctaagatccgcagagaacttgatcggacgagttactgcggcgaatgaagcagttgatgggctgaggagccagctc

SEQ ID NO: 282686 - DNA, 987 bp, Zea mays
  unsure (1)..(987): unsure at all n locations
ctcagaatagtcaaagatgaagtgatgatctacaaaatgactaaagcagagtttctgtatcaggaacagccgtttgatatggggaaaagaagaaaagaaacaaaaatgtccctgctgttgtgtggcatctgacaagggttatcgaatttcttggtcggcgcacacccattatcctcaaggaaaaggatacacggtgctccctagtagcaatatgcaacgttctcctgcttggagagaaaataaccctcgatttagatatcaagaaagtgttggagagccatctcatccatcttgtccagaggccccttttgtgtggcaatacacaaatgcagttggaacagaacttggaactatcagagttcaataaacaagttcttggtgtattgccgaagcttacatgcagcttatactttgatgtgacattttctagctcttgtggcttagagaagacctttgaaactgcactggttggttttcttggtgtccctctacgccatggctggttggtagatccccaggatgctgagttggactcctcgatacggagaagctcctactccaaactttcgtataatcttgctatctatgaatcaattcgacccaaggcaaattcagggcctcaaaagcatggtcgatatgaagatgatatgttctattcagcgcttgcattctctaaaactggatcagaaaaagaacttgattctacttcttgtaaatctcgacaacacaagtgttcaatttttctgcacaaaactatatttgcaagttcccgatacttcgtttctttgttcactatttttaggtgcaacaatctcaacatttttgcagggccctcagctaacccgatatgggtaaatggaagtttatatatgttcaagtgttacctcttttgttgcttttaaaactctgnttatattattgggtgcagattctcttccttacataatgacctcagagcgttacaacctactgtcctgatctggaatg

SEQ ID NO: 282687 - DNA, 515 bp, Zea mays
ccctcgcgttcgctaggttgagagcgaggaggttgcaaagggaagctgaaaaccctacatccattgtttcatctgcaccagatagtgggcagcctagaaacaatacacctgatctgccaaggcgctcttcaagcccatttccctcagaagggatggatttattgcgacagattgcctttgctggtcttgaagactcagagaggtttgcgactgctgtcagtgaacttaggcgaatcgcttggccaagccactacggggcatcaacttcatcaaacccaccaacaaatcctgagcctattgatggaactcattttgccatggcactggctgcagatcaagcttctaattcgagcaccatggctgtcattcaggaagacgcagcttttgctgaaagtgctggagaacctagtaatgcccggtcttcaagatccctgtgaagaagaagaggaaggggtgccttacgttctttggatgtggatggtggggacctacatcagaataagagaaggcgtctg

SEQ ID NO: 282688 - DNA, 550 bp, Zea mays
cgttttaagctcggcgtcgtgcctcgggcgatccaggagctgttctctcgcgcttcggaggacggctcatgcgcctactctttctccatgagcatgcttgaggtctacctggggagtctcagggacttgctggcagcaccgaggcatcctctcttcaggcgaacagagtgcaaagcagcggcgtggtaaataagactgtcagttcagttcacctgcaaaaacttcaccagaccagcagtaaatccattgaaagatccccagcacgggaattaaattttccatgtcccatcttcttcgttcgtgtacttggtcagtagtagtagcctcagcatactggcaacgaaaggtggcgccgtggaagtggaggggctgacggacgtctcgacgccggacctcaagaacgccagccagtggtaccgcagagggcggcgagcccggtcgacggcctggacgatacgtcaacgacgccttcagccggtcgcactggctgacgaggatcaccataaggagaaggatgaggcatggaggaagaggagaaggagtcagcaag

SEQ ID NO: 282689 - DNA, 542 bp, Zea mays
cactttagcagcagtaatgagtatgatgtgtatggttttgaggatgctcctgtttctacatcatctaaagatgatgaacaagatctgtctccagttgcacaatctgctgtggagcatgttccgaaaagaggaagggaaagagcttacaataaacgccctaatcaaatcgttcctggtaaggcaaaagaaccaccaaagagaaaaagaacacgccacagctccactgttaccgagccagatgcacacagagttgttgatgcaccagaaaactcaagaaatttgatccctgatatgaatagattggatcaagtagaaatcccaggcacgtcaaaccagattgtcacctttgaccatgggggcaccacaactgaagctttacaacacagaggagatgctcaagtacaggtccatcctcctggtgctgaggttaatagcttctatagtgctccaactgcaaaccctactcctataagcatatatatgggtgaccagcctataccttatcaaaataatgacagcacaaggccgagatctgaaaatag

SEQ ID NO: 282690 - DNA, 524 bp, Zea mays
ttgagcgagaagccgagaagcaggtgtaccgcggaagccttcttctccagttctaataacgcttggccctctccttaaccttaagcagcagccccccgtggcccgggccaggaccaaccaacagacccgccgcgcgcccgcctacacccgtgacgcctcgccgagaaccacgcgcgatccgcccggtcgacgaggggcatctcgctatctcgtcctcctgggcgcttgggagaacggcaaccgccagccggccgagccaaggccaagccatggtggagtccagtggccaccggagcaccgtccccgcggccgtcggcttcttcagggtcccgggcctcttcgtgaggctgagcggcaagggcggagcgagcaatgccgtggacccggaggactcggtctggagcccgacctccccgctggacctgaagcacgtcatcaggtgcagcccgtcgagggcctgcctaggcctcgtcgacgccctcaccgtcgacgggaccggttccctgcactcagggggcaggagc

SEQ ID NO: 282691 - DNA, 538 bp, Zea mays
aataattggatactggtattggctctccctgggggaatctctacccaaatggtggggatggtccaagctcttggcacatgatatacgggatggacttaaacactgacaaaggtcttcttttggtggcagataactttggttttctttacttcctggatagacgatcaaagacgagaattggacatccaattcttatccataaaaagggtagcaaggtgaccagcctacattgtaaccctgcacgacctgaagtgcttctaagcagcggaaatgatcactatgcccgtatttgggatacatggaagcttgaagccaactctccccttgccagccttgctcatggaccggctgttaattcaggatacttttctccacgaagcggaaataagatcttgacaacttgtcaggacaaccgaattcgtgtatgggactatatgcttggtgatctgcaatccccaagtagagaaattgtgcacagtcatgatttcaatcgtcacctgactcccttcaaagctgagtgggatccaaggtttcagtt

SEQ ID NO: 282692 - DNA, 420 bp, Zea mays
taccacgcgtccgcccacgcgtccgcttacggctattttttgcttgggcttgtcatcgcggattatgtgttgggggtactaacttatccaatttactaattcttgtatatgaaccatgatacttgcgagactgcttcgaacctgtgacatggtgacttagagcaactcccgctattgtaccagccctgcttcaaacccgtgacatggtgacttgagacctctctcgctattgtaccaggccagcccggtacgaaccataatactatgttaatataatattcagatacttctaatttaatctgcagttgtagaaggtaatgagcatgttttaacttcggagattcaaccagagatagctagaactacaacactacaactttcatttaatcaagcttggttctgctttatcttgctatgctc

SEQ ID NO: 282693 - DNA, 513 bp, Zea mays
  unsure (1)..(513): unsure at all n locations
tttttattggccaaaatccaacccaggggctgggggaaacagaaataatcctggccagaggggaccacgagatgtgcaacctggcatggaaaagcgagtgcaagatcagggtcctgttgaaaccaacagatacgccgctcggaggcagccaataagaggagacagcagccaaggaataccccctcaaggtgatagaaggaatgaaaatgganggtcgttatgagaaccagagacctcttgaacagcagcataaccggccgttaccgaggttcaaccaaggtggattatcacaacaagatccaaggaacgaaaggaagaagttcttttccactaaataacaaccaaaggcaaccagcaggtggcgggtgatcctaatcgagcaagcaagagttttggggatcttcagtagtactcagaaatctggatcatctgagcagaggaagttggatggtaatcctggtaataccgacttcgctaaaagcttgggatntttagttctgggaaatgaggatg

SEQ ID NO: 282694 - DNA, 715 bp, Zea mays
acagagtatgcttgcggcaaagcttgaggctgctgaggaagaaggggctgaggatgagaacgagggagggggcaggaagagtgggatggataagttatcgaagaaattcctcaatgaattctggttgaacgatgaggatgatactgatttgaggatggcaaggtttgagcggctgttggatcgcagaccagagcttcttagcagcgtgctgttgcgacagaatccacacaatgtggaggagtggcacaggagggtgaaactctttgaaaaggatcctgcaaggcaagtagcgacatatgttgaggccgtgaaaactgtagacccgatgaaggcagtcgggaagccccatactctgtgggtggcatttgcaaagatgtacgagaaacacaatcgtctagatagtgctgaagatatcttcaaacgggctactcaagttaattataaggcagttgaccatttagccagtatctggtgtgagtgggcagagatggagttgcgccacaacaattttgacaaggctattgaactgatgaggcaagcaacatcagaaccctctgttgaggttaagaggcgggctgctgctgagggggatgagcctgtccaaatgaaagtgcacaaatctttgaaactgtggagcttttatgttgatactggaggagagccttggaaccttagactctacacgtgtagtttatgagagaatactggatttacg

SEQ ID NO: 282695 - DNA, 767 bp, Zea mays
ctaatttttctgggggatgaacaagagatagaagaacttatggtcggccttgaaacctacctggttctacaatgtcctgtcataatataccagacatttccaaatctagattatttaaacattttccagtgtcttatgttcttgagtcagcttaaaagtgttgcaagcatcttggacaagctgatttatggaagcaaggatgatgctctccttgcataccaaactgcttttgatcttgctgaaaatgaaaactaggctttcctcctgaatgtgcggaatcaccttgatgcactgagttcacatacttctgcccacgtggaccttgacagcggaccgactgtaccaagtaatcaaactaacgctgctacagaactgtctggggatgtccagatgagagatgacataaacatgccaaatggcagtgctaccactgtggattcaaatgcaacaacacatgctgacaggctgacaaaaatcaagggtatactgtcaggagaaacatctattcagttgacattgcagttcctatacagccataatagatctgatcttcaaattttgaagactataaagcaagccatggaaatgaggaacagtgtctgtcacagcgcacaatatgctccaatgcaatcatgcatgcagggacaacagttgataccttcctcagagaaaacttggaatggctaggtagggcaaccaactgggccaagttcagtgccactgctggactaggtgtcattcacagaggacatcttcaacaaggccgt

SEQ ID NO: 282696 - DNA, 549 bp, Zea mays
attacgcgtccggttggacctgacaattgccactttttacatgttttaactcattttttttctgggaaacaagtaattctgaagttaccttggaagtcctttgcgcttttgactggtcgggttgcataggccattgttgagaggtgatttggcctaagaatgggggctccaaaacaaaggtggacttctgaggaagaggctgctcttagagctggaatagcaaggcatggagttggaaaatggcgcacaatattgaaagatccagaatttagttccaccttatgctaccgctcaaatgttgatctcaaggacaagtggcgaaacatgaatgtgattgtcagtacatcgagttctcgtgacaaggcgaagtctgcattgaagagaatacgaactattcccaagaataatgagcacaccatggcaattaccagagtttacttctgatattgatgatgagattgttgacgaaaagcctatagtatcattgcctagtgaagcaaagacacatcaagttcgaggaaatctcacaggctagataatatataatgg

SEQ ID NO: 282697 - DNA, 596 bp, Zea mays
  unsure (1)..(596): unsure at all n locations
atagttccacctgaccccgtcagctcttgttggcggttttaaagatcgctgcgatggattgttgcagttcacgtctcttcctgctattgccttatctgcaattgagagtatgaagctcactagaagcgttcaaattgatcgagtcttctcccagtcagtcacagttttgtctggggagctgggctacagaacagacagtacaactggaattgatatcgcccaacaagatgaaacctgctgttactctcaagcacagaagcttattagcgtttgtggatgggagcctagatggcttcctaatgtccaagattgggaagagaattcgacacgctctgccagaaatgcaggctcagctgaaccagatggccaattccattcccattttcctgagcgtcatcaaaattcaaactctgtgtcaattaagaaagacaaggggaaaggtaaaatgcatgtcaaagattctggatgcagcatgaggtcacctttgctggattgcaacctgtgtggagctacagtgagaatctgggacttcagatctgtgccacgctcttctcatgtagtctgaatacatcgacatgcctgatacangaaggaag

SEQ ID NO: 282698 - DNA, 448 bp, Zea mays
cgacatagccgtagagaggctcatctcccaggatacttttcatgaggggagatgaaagcgggataagaaaaaggagactaaagttaatcaggaaacaaggcctcgtccattccagaaatctatatatggaggatataaggctggttcagatcgaagtgggagagcaaactctataggcggtttcaaaggccctgccaaaaaagaaccagagttacatgcttcaataaactcgtcagccttagatgtcaacacaagtgccacttcagaaacattttctgctactggcaatgttgcccaggctgatgctaagaacactttccagcctccatctcaagtgaaacatggctggggcggtgttccaggtcgcccttccatggctgaaatagtgaagatgggccggcctcaagctaaagatgggagcagatctgttgcaagtagcattgacatg

SEQ ID NO: 282699 - DNA, 523 bp, Zea mays
cccactcgtccggctctcgctccgcccctctctccctctctcattggccattccgcccgcatgaaaccccaaaccctcgccggcatcgccgtcgccgcagcagcgcccgcctagcccgcccctctcgccctcgccccccctccccgcgccccgatcccgcccgctccgcagccgatcctgccgggagcacgaccgatgacgatgaacggcgccgctgcaccggagcgctcgcccccagcctcgcccccgcctctggtccaggcccaggcgcctccgtcgccatctccgactcagccgctcgagtggaggttctcgcaggtgttcggtgagcgcagcgcccgggaggaagtccaggatgttgacatcatctcagcaatagagttcaataaatcgggacatcatcttgccactggagacaggggtggacgagttgttttatttgcaaggactgatgtcaaagatcatgcctctagaaaagatgctgagaaagctgattattctatcagcaggcatcctgagtttc

SEQ ID NO: 282700 - DNA, 477 bp, Zea mays
  unsure (1)..(477): unsure at all n locations
ccacgcgtccgccgtcttcggggggcacatcaaactgctattctcgcttttctcacgagcgcctcctngtgccgctggccgcccgcctcacgggccgcccgcaggggctcacctcgctgcagcgcgtcggggccgggctcgcgctcttcgtcgccgccatggccgttttcgcgctcgtcgagaggaagcggcgcgacgcggtccacggggcggaccacgtcgccgtcagcgccttctggctcgtcccgcagtacttcctcgtcggcgcccgcgaggccttcgcctacgtgggccagctggagttcttcatccgcgaggcccccgagcggatgaagtccatgagcaccggcctcttcctcgtgacgctctccatgggctcttctctcagcagcttcctcgtcttcgccgtcgacgccgtcaccgcgggcacgtggatcccgaacaacctcgaccgcggcaggctcgacctcttctact

SEQ ID NO: 282701 - DNA, 850 bp, Zea mays
ttctttctgctctcaaggctcataatactagggaggtttatacgcactccaagcgtgggaagactagctgggcttttttgggaggaattatgcttagcattacaggtacagaagcactgtttgctgatctctcatatttccctgcacaagctattcagattgctttcacggtggttgtgtttccatgtcttcttttgcagtatacaggccaagctgcctatatagctcagaacaaagatcatgtctcccatgccttctatttttcccttccagattctgtactctggccatcattcattgttgcaacagctgctgcaataggggctagtctggcaactatatccctgacatatccgactatcaagcaagcacttgctctagggtgcttccccagagtgagaattatccatacttccaagaagtatctaggccagatatacagtcccgatattaattggatccttctggtattctgcattgctgtcactgctggatttaaaaaccaaagccagatagcatatgcatacggtactgccgtgataatggttatgcttgtgacaacatttctcatgatccctataatgctgttggtgtggcgcagccactggaccttggtcatcctgttcaccgtgctgtcactgtttgttgaaattccgtacttcaccgctgtggtgcggaagatcgaccagggtggctgggttccacttgtggtcgctgttgccttcctcatcatcatgtatgtatggcactatggtacgctcatgcgggatgagtctgagatgcacagcaaggcgtccatggcatggatcctaggccttggtccaagcctcggtctggtcagggtgcctgg

SEQ ID NO: 282702 - DNA, 519 bp, Zea mays
  unsure (1)..(519): unsure at all n locations
gctantgaaaagcatattgacaaacttatggaagaacctgctgaccagataatggaaaaatcaattgaactacctactcaaaagataactgaaacaccaactgatgagccagctgaaaaaataaatgaaacaccaactggagaaccagctggaaaaaaaagagaggcggttatcggaaaataccgcggggacaccaaaaaacgcaaccgaggagacacatgaaacggcagagaggaactaattgaagagccagaagaaactatttctgcttcatcaactgggctaaagcagggggaaaacacctcacttgttgaaggaagcagtgcagacgatgaggaagatcatttggagtgtgcagctactaatcttcagcctggcaatgacacttgccttgtatgggaagaggttctggaccagaaggatctggtgtctctgcctgctgtttacgtggaccatttgtttgatagatgctttagattttttacatgttttgttgtgatattaaatttatggtttaat

SEQ ID NO: 282703 - DNA, 468 bp, Zea mays
gtccaaatccctctctcctccctcccagcaccagccctggctgctccaccgagctcccatccatggctcctgtcttcttccttctacctctcctactcggccagatccttctctgcgcagcggcgacaccatcaactcgtccacacccttgtccggcgcgcagaagattgtgtccaagggcaacaagttcaccttgggcttctacaccccaccccaaggtaccaacacctcctccaaccagggtaactactacatcgccatatggtacagcaacataccactgcagacgacggtgtggatggccaaccccgatctgccggtggctgacccgaccaccgtcgacttgaccatcggcagcgaccgcaacctcgtccttcttgatcaatccaagaattggcaggtgctgtggtcgacgaacataagtactagctccaattccaccatcgctgtcctccaagacggcggtag

SEQ ID NO: 282704 - DNA, 354 bp, Zea mays
tcggagcccaagctaccgacgccgccgatccagagggaacccaagccatccccgccgccaatccggacggatctcaagccatcgccgcagccaccagagaagaaggctccatcgcccgcgccgcagccgtcggcgagcccgcagcttgtcatcccagggaccaacaaccgaccggccccgcgccctcagcccatgcctggcttgaagaaagccgctgccccgtcatcgtcttcatcacgggcgccgctggaacggtcaaggaaagaggagaagccgcccaagagaaagattgaacagaaggaacatcggaactggattccgagtgtcaagaaaatcatctgcgactgtgcttaa

SEQ ID NO: 282705 - DNA, 480 bp, Zea mays
cgcatcctccgcttcgtgtcgtctgccctgctgcccaagcctccggaggttctaccggagccggctcactctcgcgacaccgccgcggcctccggctatatatggacggcgaggaggcgccccttggcgcgctcaacctggctgagtacgcccccgccggcgcccgcaccgtcgactgctacaggcgtatccgcaagatcggcgagggcacctacggtgaggtatttgaagctgtggatattattactggggaaagagcagcacttaagaaaataaaactggatgatggcaaagaagggtttccacgccaaatcttgcgtgagattaaactattaaaaaagctggatcatgagaacatcatcagattgaaagagattgtagtatctcctggttctgcacatggaacaggcggatcagatgatcacatctataggggagatatctacatggtgtttgaatacatggaccatgatttgagaa

SEQ ID NO: 282706 - DNA, 662 bp, Zea mays
gtcccgcccaaagaacagtgaggtatgcaagaaagatgcagtcgttgaaacggtgaatgcaagaccgtctaatgcacggcactcagtggggacttattccactgttgaaagtggcatccaagaaactggactcagtccaccgagcgtcgagcagtggagctcgccggactcgatgaatatccaattcaaccggggcttcaagggctgtatagagtacccacggacgtcccagaagcacagtttgaaggcaaagctcatggaggcacggatggagagccagaagatccagctccgccaggtcctcaagcagaagatctagtgcaggccagaaccagaggacgaaatattgtaaacctagattttaatccaaggaataatggcaaggagtacctagatgcttcattttttttctcctgttttagagtaacctgtaatgcatgtacaacaagggctagagagaaaaaaaaggacagggatggccttggtgggctgtccggactccggagcctttgctgcttctgtatcttactttagttttggtgttatggtcggatctggtaggctatggtgagatctagcatgatgtataatacagacacaaacaagcagcaacgttgagacaaattgcatccctttgtaaacagttctccggtgttttccat

SEQ ID NO: 282707 - DNA, 438 bp, Zea mays
tgaggtcgtgaggagaggaaaatttctcaccgccgtgcagccatgtcggtgcaggagtacctggagaagcacctgctctcgcgcaagatcgaggaggccgtgaacgcggcggtccgcgccaaggcccccgacccggtgctcttcatcgcgggccacatgcggcgggcggcgcccgccgtgatcacgagggttcgggcgcgccagatccttgacgggcacggcgcgcccgctgccgaggctgagttgcacaccaacaaggccatacaccgagcatccgcggccggctcgggcgcgctcgagggcgcccgcgtcgacgcggacggtgccgccgagaggcggaagatactcgccaaggtggtcgccgactcggtgcggatgatcaatgacaaggtatcggaggcgctcgttgggatggatccgaagagcagtcgaagatcg

SEQ ID NO: 282708 - DNA, 446 bp, Zea mays
gacaaatcacgaagcacaaaactttcctggttgtaatcttgcaaagttctgttcaaaaatgtgtatggatgacgcaaaggtgcagaggttggagtttgatcgcgttctttgtgacgtgccttgtagtggcgatgggactgtccgtaaggctcctgatatgtggaggaagtggaatgctggtatggggaacggacttcatcacctgcaagtggaaattgctatgcgtggtatgagcttgctcaaagtgggtgggaggatggtttattcgacatgttcaatgaaccctgttgaaaacgaaggcgttgttgctgagattttgcggagatgtggggactctgttgaacttcttgatgtttctaatgaactacctgaattagcccgtcgtcctggacttaacacctggaaggttagtatacatggttaaatgcattatgatgcccttcatg

SEQ ID NO: 282709 - DNA, 605 bp, Zea mays
gggcattacctgagtgctactgcaaagatgtgggctagcacacacaatgacactcttaatgcaaaaatgtcatcagtcgtcgatgccctttacgattgccagaagaagatgggcacagggtacctgtcggccttcccatcggacttcttcgattgccttgaggccatcaagtctgtctgggctccttactacacaatccacaagattatgcaaggtcttcttgatcagtacacagtttgctgggaatttccattggctcttgacattggtgataaagatggcttatttatttcaggggaccggggtgaaggaatgtcatacagaattatagcattgagaggcactgggaatctctcaatgaggagactggtgggatgaatgatgttctctatcagctctacacgataacgcacgatatgaagcatttgacactagctcatcttttcgataagccatgctttcttgggttgctggcagttcaggctgacagtatttccggttttcattcaaacacacacattccaattgtcattggtgcgcaaatgaggtatgaagttactggagatcctctttacaagcaaattgccgtattctttatggataca

SEQ ID NO: 282710 - DNA, 685 bp, Zea mays
tgatatgactgataggctagtagtaagctacaatggtctcagcattggcacagttcgagatgcatttgagaagtctcttggctttcggttgcaaaagatgaatcctaatactgattatggctgcttgaagacttttggttcttgttttagtgaagacattcgtatacctgctggtacaaagattgacttccggcaaacatctgatggccagctaataactgaaattgatggcaaacaaattggcactgtccagagcaaagatctttgcagagccttcttcgatatgtatattggtgaccccccagtttcagtggagactaaacaagacattgcgcaaaatgtggctggactcataagaagatgctagggaaacgggaaaactaaatcgaagaacctggaattatttcattcatctatacaaggagaggacatataaacagaaaggaagccaggagaggatcgattgtatttatagtggtagactgtctttgtaagctataaacataaagcatatgcttggcaaaggcctccatgcctttcatatggtttggcatctttgccatttcctggctggctggcgtgctgtatcatgtcgacaaatatatgatacagtaaaaagttgtacaacaagagcatgtttctgtgccccaagtgaaaaatgacggggttcagctttgttcatccc

SEQ ID NO: 282711 - DNA, 461 bp, Zea mays
atgaagtgttcatgggtcctcagttctgttcttgatttatatgtatcttctatagaaaactggatccgagctggagtctatggcctccctctgaaatcaaatctctctctctctctatctttctctctctctatatatatatatatatcttctatagaaaactggttcacagctggtgttcatgcattttggttgaaacagatgaagagaatactatcatgaatgcatctccaatacattttgttaagctatctctggcacaaaagaatgataacatgatttcttcatggaaatgtctaggtggtggagagtagtttacttaagataagttgaattatggcttacacctcgttagagttctagaatatgatttggtagattgaaatttgtggctgctgtctccccagtctgctaaattttgctcttcggctcaatttcactttcatattatctttttcatg

SEQ ID NO: 282712 - DNA, 379 bp, Zea mays
cacagatgcagatcagcaggtacagatcacagcaggtacagatcagcaggtacagagcacagatgcagatcagcaggtacagaggcacagaggcgtcaaatgatggggaggcaacctgcggcaacaaagcagaggacactgttggattggaggctatcagcttgcttgcaatgcaatacgaggaggagcagagcaggtctctccatggatgcaagccaggatgtgtgggactgggactgggaggtggtcatgccagaccacaggagcttctccacgagccaaagccatggcagcaagaattttgacgacaaagaaacagaggagcacgatctgctgtctccgtcgggaaacgttgatgtgcaaggcgagtgcaaggaca

SEQ ID NO: 282713 - DNA, 365 bp, Zea mays
ctgaccgtgggtcgaccacgcgtccgctttcccttaccagggacggatcaaagcaccgtaataagtgtccatatagctctttcaattgcgcctattgtcttgtgcgggctatatggatcaaggaaccctctttgcagcagaggtttgttttgtgttctgctgctagtagtcgcatgtcagtttaatcttttgagttctggaagctgttggtcccttaggtgtttgggagatccttttgaatcgaagcacacacactcaggtgctatgacctttggcatttcatagttgcatatttaactggtgtgcgaagagcaccaggatagcacccttgcagcaggaacttacttttggttgcttttctgttg

SEQ ID NO: 282714 - DNA, 481 bp, Zea mays
cagctcctcctcacctgcggcaagacgccgccgccgggctacacctgacaccgtctgatctggaccagctggcagcccccggctcatgcgtccatttatccgtgaacatgggttttggagtgagctagcatccagttcatcggtcgtttgaagagagatcgacatgagaggatgtcgtctgcttcgtcgttccaagctgaagaaggcacgccggaggaggaagagagtaacaacggccgggtcgatcagctaacgatggatcgatcatttttttccccatatttattgtgttgcgtctgctgtagtttctaattttctagatgtgctttcggtttggtctgtagaccctgcagcttgatttggttaagtttgatttgatgcaagggaaatgggtggcggttgattgctaataattcccgttgatatttgtcatgcgtacgtgaacttgataacaaaatgcatgatgtcttctctttgcgtg

SEQ ID NO: 282715 - DNA, 448 bp, Zea mays
acccttgtgtcgtaccctgggggctgatcctagacacgccgccctcttgttccccagcgcggcggaggttcgacgcgaccggcacggcggcagcgcacagccccgacgacgaccctctccactgccttctccccggtgaggatctgctctcttccttccctctcctatcctctgctctcgctgccccaaactctcgccctcgatctcgctcctctccgctctcgcaccgcgacgctgcgactccgctcccgtcctcgtgctcactgctacggagtcggatccagttggggtcatcacaggccgccgggccctccgtcgcggttacaggagggtgatgggaagggctcgtgcttccacttcctctgctccatccggcaccgccggcggcaggtcagggcttcctgctggtggcgttggcgatcctgacagtgcaggggcgttcatgagc

SEQ ID NO: 282716 - DNA, 512 bp, Zea mays
agcaagtggccctggggaactaccgcggcttcgtcatgtccgcacgggtccagggcgagggccggtgcagcaagccgacggtggaggtcggggtggcgcacatcgggtgcgccgaggacgcggcggcgttcgtagccctcgcggcggccgtggacctgagcatggacgcgtgcaggctcttctcccaccggctgaggaaggagctctcgcacctgcaggccgacctactccggtgacccaccgggccggcggcaaccgcgaatcacgagcgaattgtacagaagtagttgaggcagacgtgtgctttgttgtagtagttcgattccggtgatcaactagttgatcgtggtcaccttttcttgtgagcgctgaatgcctttgtgtggtgtgattttttggttggttgcttcgctttagccatgtagggtgtccgcttttacggatctccccaattttaaaagattttttttttgtgatccgatgaactatggcttccagtccttggttttcct

SEQ ID NO: 282717 - DNA, 377 bp, Zea mays
gcggcggccttcgtcgccctcaccgcggccgtcgacctgagcatggacgcgtgcaggctcttctcccaccggctgaggaaggagctctcgcacccgcacgccgggcctactccggtgacccaccgggccggccgcaacccacgaatcacgagcgaattgtacataggtagttgaggtagatgtgtgctttattagcgtgcgtttgtttgctggagtagttcggttccgctgatcggctagttgatggtggtcgcctttttttttcgtgagcgctcagttcctgagtacggtgtggtgtgattttttttggctggttgcttcgctttagccatttgtagggtggttcccctttggatccccgtaaccccccgcaattt

SEQ ID NO: 282718 - DNA, 339 bp, Zea mays
ctacggacgacaactatccctaatcgccagttcgccaccagcctacgcctctcccctcccactcggccactcccagtgccagccgccgtgcgctcgctcgcgcgcgctctctttctgggacgaccagtgggatatctccaccgccgccttacgccaggtgcggaccttcgccgatctcttcgccagcgaagagcgtccatcagtaaaaatggtggcccttgcaaatgaagaggccttggcccatgatgaagatatcatggatgatgttgattctgatgttgaagaatcggactcagaagacgattcaggtgaagaagctcaggataagccttcagacaa

SEQ ID NO: 282719 - DNA, 562 bp, Zea mays
  unsure (1)..(562): unsure at all n locations
gcccaggnccgcgccggcggcgttttcttttacaatncccgcgcctgctgtccagacccagcgccgcctgcggttgtgagcgcgaacaggagagagcgggtcttcggggcgagcgccacgcgcagacggcggttgaggagcctgagaaaaccctggtcttccttcaagatcctggtggatcgcgcccagctccgcgaaatttccttgatgtctatgtaggttcgtcctaaagattcgattttgttggctcttttgatccgacgcagatccgtacggttctcgcctgattctgcaattcaggcgccaggaggcttgctggctgtttttggattggtgtcttctcccatggggtcttgcaggtgtaggagggtgaattctgtctgattaatcagcggagggcaagcggctactgtggctgcgcgaacatggcgggcgagcaggctccggagggcagcgggaccagtaggcccatggatctaaaccctgtttctcggactccctccattgcccaggcctccagtctggctaggcacagcgatgattgccccgacgttgatgccca

SEQ ID NO: 282720 - DNA, 490 bp, Zea mays
cacgctcaccccagccggccagccttgttttcatccggctagcggttcacatcacctgcgtgacgataaacatcctcttccaaatcgtagtctagcccgtgcccaaaaccctagcgaccgccggagagctcgtccgaatcgaggccaccgaggggaaattagatcgcggcggacgatggagagccctgcgaaagaggaggccgggggagagctggcaatggagatcgagtcgtcggtcacggcggaggactggcgccgcgcgctttctcgcgtcgtgccgtccgtcgtcgtcctccgcaccactgcgccgcgcgcctttgacaccgaggtcgcgggcgccagctacgccacgggtttcgtcgttgacaagtcccgcggcataatcctcactaaccgccatgtcgtcaagccaggacctgtggtcgcggaggccatgttcgtgaacagggaagagatccctgtgtacccactgtacagagatcctgtacat

SEQ ID NO: 282721 - DNA, 430 bp, Zea mays
cccacgcgtccgattggccccaacacagcgttggttgtctttctacacatactgtcagctgcatcagaatttgatgagcttcctgtacggcacaatgaggacaatttgaatcgaatactcagcggaaatgtcccgtatccagttgatcaacaccaccttgatgatccacatgttaaagccaacttactctttcaggcacatttctccagagcagaattgccaataagcgactatgtcactgacttgaaatcagttcttgatcagagcatacgcatcatacaggcaatgattgatgtatgcgcgaatagtggatggcttacgagtgcattgacttgcatgcatctcttgcagatgatcatacagggtctttggtttgagagaagatatgaaaccctctggatgttggcatccatgaatgatgatatattag

SEQ ID NO: 282722 - DNA, 389 bp, Zea mays
gaagaaagaccgaggaacacaggttgctcgtcttcctcctctggctgtgagatcctatccccctctcgatttcccctgcaattactcacgctcccggattgatctcgccggtgtagccacgggtattacacggctcgagcctgaccgtcccgtactgtcgcacgaaccctaactactagccgtccctgccgccttccccttcggaggtactactggattcaacaacaaccccctctctcgggtcccgggccgacgcgacgaaagacaaaggcagcggaggtggcgctgcagtccaccagttcttggcaacgtcgccaccgtcatcggccatggttcttggcaacgtcgccatcgtcgtcggctccggaattgtcggatcagtacttaca

SEQ ID NO: 282723 - DNA, 452 bp, Zea mays
ggcatacacaatcacagaaagagtaaaaaggacaaggaaaggttctgcaacttcttccatgatgaccatcatgtgcaccctgatgacatctttgaagctgtcttcggggcacattatggttttacttggtctcaaatatcgtgggaagggtttcacttcagggacaaatcgttcagatttagatggagcggccgtgaatcacgcagagagagaattccatgtgacagcgaagatgaagaaagcgcggatgagagcagagaaacagccagcgttggttcacatgctcacagggtcatccttggattacaaccatgtggtccactaactctagaagatgttaaaactgctttccgggcatctgcgctgcggtggcaccctgacaggcacccggggtcatcacaggccatggctgaggagaagtttaagctgtgcgtgaatgcgtacaattcact

SEQ ID NO: 282724 - DNA, 594 bp, Zea mays
ctcacgcgtccgcccacgcgtccggtcaacacagatgcaatcttcacagcagcccatgatgcaaatgtcatctggtcttcagcctgggcagactgccattccactaactcagtccatgacgatgcattcagctacacaaagtggtattcaacaaaacccattgaattcagtacaacaatctgtgcaaccattactccatcagcctacacaatctgtagtgaggcagcagcaacatccacagtccatgcaccagcagtcttctctgcagcaaactcagccaactcaacagcccaacattcctttgcaacaacaacaaccacaattaatgaaccagcagtcaaatttacagcaaaatcagttaatgaatcaacagagtggtgttgtggagacgcaacagcaacaaaggctgccagttcagtcaaataatcttttgaatatgcagcaaacacagcagatgatgaaccagcaatctatgtccttgcaccagccacaacaattggcaaaccaaggaaatatgtcaagtctacatcagcagcagcatcagcaaaatcagcagcagcagcagcttctcggaactgggccaaatgcccgtat

SEQ ID NO: 282725 - DNA, 557 bp, Zea mays
  unsure (1)..(557): unsure at all n locations
tctttgcgtccgcggacgcgtgggttcattcgagaagctgctgcccaggtcggccgggatcggccggcgcctggtggtgcgggcagacattaaggtcatatcgacgggcgaggcctgccgccgcgggctcgctgccggcatcgatctgtttggaaggcggctccgtggggtatccgcccacctccgagcccagtttccacgaggaaacccgcccgatctccagacgtcgggcggctatcccgacttgtcttctcctactcgtgtggtcggcgatgctagtgtacccatcatcgccattcctccatttgtgatcctgtccagtggcaatagcggtgggagcagggatggaggtagaggcggctttgggcgggcgcagcctgaccgacgtcgacgacatggtgggagtttgtcgtacaggccaccgagcatcttgccccaacctagggtttgcctacttgagtgagaagagatgctgtttgtggaagaagaccggngccctatttgattcacacagctcgcctgccaggggccatgcccncatctccacctttgagcgc

SEQ ID NO: 282726 - DNA, 608 bp, Zea mays
ttcttctccacgcgtccgtcgtgttccagtgcgtagaaccattccgccgccacaggtatagaatgcatttgatcatcctagatcatgatcgcccacgctagaatgattaaaaaatggattagaaaaatcacagataacctaacgattgttaagttattatagagtgggtgacgaatattattgctctacacacaagatgtgaatccaagatccatgtgcaacttatatgttttcttataaaaatattaaaattgtttttaattaatactctatccattcttttttatttggcgacgaacggtccaaattagtcaaataaaaatttggaggtagtgtattattaatataccaggatttattcggtaccataaagttactaaattttggtatagattcaactaaacttaaatttatttgacgaaaaacaagaattgcacttttgtttggtatagatttgactaaactctttgattctggcccgctgccgccgtctccccatcacactaccattgccatcttgccctgaggttgcgaccccctcggccgcgaccccgcctcagtgcctcaccccggaccgcatctcctgcgctcgcgctacgaggacgggg

SEQ ID NO: 282727 - DNA, 608 bp, Zea mays
tttttcgattactactgtaatccccaccacaccacctcccggatctcagggtgggtggagtgcttcttggcgacctttctttgcatgtcaacgcagacaaaaagaacagcgccgccgcctccacgaccacgaccacgccggtcgccgagcctccgtctcctcccgagagatctcgcagccagctagccgccgtacgtggccacatggaggcgccgcggcccgtcggcggcagggcgcgcaggcccacccctcccgccggcctgggggccctccacgacgacttgctcgagcgggtcctcgcgcgcctcccgccggccacctacttccgcctgcgcgccgtctgcagccgctggcgcgccgccgcggcgtccccgaccttcctccacgcctgcgctcgcgtcccctcccgggacccatggttcctcatgctctccgactccgactccgggccccgcccgcccgtcgccttcgacgccgccggccgcagctggaaccgctgccacgccgcgccgggggctgccgtgcccgtggccgcgtcggccggcctcgtactctaccgcgcgccggccacgggcgcgctcaccgtcggcaacccgctgacaggcgcg

SEQ ID NO: 282728 - DNA, 334 bp, Zea mays
agcccacagaacgcacgcgctaccttttctctctctacgaccttccccttacctattcgccgtccctctctcctgctgccctccccccgccgccgccctacggcccaccccgccgacgcgccacctccgtatctctcttccccgcctacgcgggcggcggatctccggatccgcgcgggggagggagatctggattggatggtcctctccggccgcggctagtccggccggagctgatccgacccgccccggcggggcagtccgggcaggatgtctgggaaattgcggactaaggcggtgctgatcccggtgagaggtccggcctggctggatc

SEQ ID NO: 282729 - DNA, 663 bp, Zea mays
ccggctgggacgagcgagcctcctctccctccttgtcgcgtcccacataactgtgcctcctcgccgctgcgccccacctctgctcaggcccacactgccctgatcccgccggagtgcccgcacgcgcgcccttgcctgggccggccgccggcgaggggtctgggcggtcggtcgacgtgaccccccccgcacgcgcgctgtctcttcgtcgccctgctcttttcgaccggcctcgcctcgctgtccgcgcgtggcgccgtgtcggcggcacacgccggcggcggtgcgggaacaaggcgagggcggcgcgccttgtcgccgtgcggactgagcatgacttgagccttgagatttaggatgtgtacagaggggctgtattcttgtgtataggttctctttctatcggtcaactgttgctgattcggacggaatgttggaggatcaatcttgcctgatatcaaggtcgctgccgggttcctgtgagcaggaatccagactagcttacatgacttaccacctacttgagatcacgaggagtaagcgcccgccctgggaccctgtcgattgagcacgacgtcgtggcagcattgactagaaggacaaagtgcctctgagcaccagaacagcgatgcgctggattctcaaggaagtaatggtccaggc

SEQ ID NO: 282730 - DNA, 677 bp, Zea mays
tcttttctccgagcgttcattcaggaagctgcccggcgacgcgccgctcccccgcctcttccttgccgccgccgccgccgccgccgcagacgcgcggcacggggcggtgcccgtgcaaggcgatcggggccgtaacgctcgactgcccctccacctcctcatcctcaccccagcggtgagtagaacaaggggcggtggtcttcactgacatcgcccaccatgctgcgccggtgcatgcgggatctgcgctcgccgcggtctctcgcgagggtctccagaccgatctccgtcgagagtccaacattccttaaatccagaagcaactctacaaaggcatctccaaagagttcacagaatgctgccccaggtcctcaaggacaaccttctcagtcgggaagtaatgtttcaaagcttgttcttggaactcttggggtcggtgcagcagctatgggtgcacatcaacttggttatatagatcttcaatttaaggacaagacattgccttttagcttaaagaaggaagatgtcggaaaggtgttatatgaagatctgaagattccttctgaacagaaggttgaccagacacaaaacatgtcaggaccaaacactgagattgttcaagagaacaataatgagactcatacttcaaaggactttcgaaatggtggggttggggc

SEQ ID NO: 282731 - DNA, 510 bp, Zea mays
tttctctcgtccggtcagggttttctgcagatgaattggttgccagagagaactttgacgtcttatgtcttcaagagacacacttggaggagcgcgatgttgacctttttaaaaacctggtacatgaatatgattacacctgttggtcatgcagtgttgcaaggcttggttattcaggaactgctgttatatcacgggtacaaccaatctcagttcaatatgggcttggcataccagagcatgatcaggaaggcaggcttattaccttggcgtttgatgatttttacttggtcaatgcttatgtcccaaattctggccgtggtttacgtagactgaattacaggatcaatgattgggatccatgctttagcgacttcataaagaaactggaatgttctaaaccagtaattgttgctggggatctaaactgtgctcgtcaagtattgacattcacaatcctcaagcaaaaaccgaggcttgaggtttcacaattgaagagagagagtcatt

SEQ ID NO: 282732 - DNA, 600 bp, Zea mays
  unsure (1)..(600): unsure at all n locations
cccacgcgtttgccctctcgtccgcccacgcgtccgcccacgcgtccggatagactaaacacggcgcgccgggccgcgctaccatgcttgccgccgtgcagccgccgcggcctccgccgtcatcaatcttgctcatgctcggcaggcagatccacataagacgggaaggagaaggagggacatggcggagaaggaagcaccacggtcctttctcgctcgccttcctcctctagatcgttcagcggacattggaaatgaagagaagcagcgctgcgtcgtcatcacgcatcatgcagatccagtcctcacagcccccctgctgatccagctttgatcctttttctaccagtgcgtcaagccggaactgttcatcaccaggagtcaggctcagggtttctaagatcctcttcattcggcattgccgtggtttcgctcttctcgacaagcatatcgatcacctattccctcctgcccacagcctactacttcctgcctcgatcttgcattgatcccatcactcctttttggcggctttcactttctctattatcgcgaggacgacactggntttaatttgcaggaattaacggtgagatcagt

SEQ ID NO: 282733 - DNA, 577 bp, Zea mays
tttttcgtggtgaagaaaggcgggagctggagagcaacgagacaagcacggcggtgtgccgtgtgcgtgcgcacaggcactagagtgagacagctctagaagagagcaagccgccgccgccgccgcatcatcgtgagaagcggccactcctacctctgatcctgatacaaaatccaggccagagggcaggagcctccaaaagagatccactcccccggatggcttcttgcctctgcttccgcagacgccgccgcccaatcattgcctcctctgtccccttcttcctcctcctcgtctccttcctcgcctcggcctcggcctcttccacgacgacgacgaagctgctaggcagcggcaataatgccacgcggcgggtggcgttcagctcggaggagctgcgcgggttgcggagcatcacggcccggcttgcgcggctcatggacgcgttcgtcaagacgatccagagccccgacggcgacgtcatcgactgcgtgccggcgcacctgcagccggcgttcgagcaccccaagctgaggagccagaagccagaggaggagcccgaagagaggccgaggag

SEQ ID NO: 282734 - DNA, 467 bp, Zea mays
tctttgacgcgtgggcggacgcgtgggcgggatgagtcacctcgctcttagggctgatgagcgggcgtttgaggactggtggaggaaggccagcaacagtacaaggataagagaaaagggatcaactgtgtcattattttgggggcttggtgcctctggctgcatagaaatagagcgtttcttatgggaatcatccattcagagggtgcagcaacatttcagtgacgagctctcctgttggctcttggtgcgcgccaggagtttgggtcagcttggtctccctagttccatgaggttggctcgggtgggtgaagtggtgcgactcgtcctctcatgaggctcgtcaccttgagcaacatgccgatcctgcagcagctgcacctggaggaggagctcctgcgccgcacatcggacaactggtgtgtcatcaacgatggcatggcccctgctaccattctcacgggact

SEQ ID NO: 282735 - DNA, 483 bp, Zea mays
ttctctcgtccgcccacgcgtccgcggagggagaaggcagctcatcggcagcagtgtggagcgtcgagaacgatgacagcgaagacatggcacccagggaggagatcgtccttgaccagctgacattcgttaagtttgtgaattttagtgggacatggtgccagctgcagttgctcagcttcttcctggataagtcccctgtcctccagcagctggtgctggtcacgccggaaggggaggaagctctgggagacgaccgactaaaggtcatctatgagcgggtggccgcattggagaaggcgtcgagcgaggcaagcattaccatgtgccggcccaaggaagacgataccccgaaccatccacacacgaggtacttccacgaggagtatgaaactatgtaactatgctatataagcatgcatcgatcaggcatatgcatgattcaaactctttatcaattaggggtgaaaacgggtcaggtat

SEQ ID NO: 282736 - DNA, 668 bp, Zea mays
tctgcattatgggcatcctgatgtatttgatcggctctggtttttgactcggggtggtttaagtaaggcatcaagagtgatcaatatcagtgaggacatctttgctggtttcaactgtaccttacgtggtggcaatgttagtcaccatgagtatattcaggttggtaagggccgtgatgttggcctcaatcagatatcaatgtttgaagcaaaggtttctagtggcaacggtgagcagacccttagtagggatgtctacaggcttggtcatagactggatttctttcggatgctctctgtgttttatacaacagtagggttctacttcaacacaatgctggtggtcttgacagtttatacatttgtttggggacgcctgtatctagctctcagtggtcttgaggctggtatccagggcagtgctaattcaaccaacaacaaagccttgggtactgttcttaatcagcagttcatcatacagcttggcttcttcactgcattgccaatgattatagagaactctcttgaacaggtttcctacctgctatctgggatttcttcacaatgcaaatgaatttttcatctgtgttctacacattttccatgggaactaagagccattactatggccggacaatccttcatggtggtgcaaaataccgtgctac

SEQ ID NO: 282737 - DNA, 430 bp, Zea mays
tgttcaagaaatacgagacttttccttcactggaaactcccgagcccgagtcatcaccctagcccgactcatccattgaagcgagccaggtggcaaatccattaatataacttctggaatcccagcaatagagctggcaaggttgaagtgaagctggaatggatccgatcttcagtgtggaaagagcttcaatcctctgtagcaaggaaaagccgatccgctcttgtcttgccttaaatagctggaagcgaaagcagttctcgaggaaggagtgccgtagtcttgttcgaaagtcaagtcattctacgagtttgaatcggttggcttgaaaggaataggttcagtatatcggtcaaaaagaaagtctagatgcaccgaacttgtctagttgttggaaagggaaagctggaattcccactagtcaacatgc

SEQ ID NO: 282738 - DNA, 670 bp, Zea mays
  unsure (1)..(670): unsure at all n locations
catccatactttgagaaatgtattggagcactagatggcacacatataccagcatgggttcctatttatatgcaagataggttcaggggtagaaaacactacccaacacagaatgtattagctgcggtggactttgatcttaggtttacgtatgtgttggctggatgggaaggatcagctcatgattcctttgtgctccaagacgcattgtcacgcccttcgggcttaaaaattcttgaaggtcattactttctagctgatgctggggatgcagcaagacctggtatactacccccgtaccgtggtgttcggtaccatcttaaggagtttcagggtactagacgaccagaaaatccaaaggaattgttcaacctacgtcactcatctcttagaacaacaattgaacgggcatttggcacacttaaaaatagatttaagatactaacaaggtaacacttttgacacaacaaggtctatggtaatcatatcagaatcagagaaggaaaaactaaaggtattctgtttttctattttaattttatttccacagcatggtccatgaatattactaacaaacatataaccggatgcaggatagagcaaggaggctcctttcaaagcccatcaaattcttcaatgaaatgtangagctattccttgcagtagtgct

SEQ ID NO: 282739 - DNA, 475 bp, Zea mays
tgtaccttcatggtctgtaacagctgttgatgctgcatgcagccatctcttaaggtacaacacaatgcgcaatgtccttttcatggcaatgacagagttccaaaagcttactgaagaaccagactggactttcatcagagcacaagaggacaaaatggcctttttgttcggtgtggatgatcactggggcccactatctcccttagaagagatatcaaagcccgccccaagggtcaccctgtcggttgaaacagaaggtcacacacatggttactgctgtacagaggctggatctgtctgggttgcagactacatcgcaaatttgattaaaaaccaaatgctcctttggaacaactgaggttcatttggcagatgtatcataagactcttttctccgaaaaaagtgaatagctggagtgtggtggaacttattgaggttccggttttgataatctagtccccatttttttggctt

SEQ ID NO: 282740 - DNA, 699 bp, Zea mays
gagcaatggcttgtcatactcaccaccaaagctcacaactcctccacctactgataaacctgctatcagctcagctgtttccacttccatatttgccgtatccagcagcagtccagctatttcatcgtctcctgcatttacgggatttagtttttcttccagtgctccggttggattgtcattggtaacatcagctaaatctgatggcacaactgctgaaaataaggcagctagcaccttatcatttggtatagggggtacaaaagctgaagtgaaatctgttgcaccagatgcaagcagcaaggcatcatcggaactttttatttcacctgtgtcatcaagtattgcaagcttttcaagttcccccgccacatctacgcctactttcaccgcagttgcaccttcaagtgatgctgctggaatatctgtggctgcaccatctagtacttccactgcaccaggtttacagtctgcttcaaccccttcatttacatttccgagctctggaaacaacctttttgggttcagctccccagcccaatctactggcctcagtacatcgtcacttgctggtagtacctctcaaccaccagctgctagcacactctttggtagtaagccgacgcagtcagacggaacaatacaacaaacatcccagagatcaaaaccacaatgtggctcaccattcccggtcatgac

SEQ ID NO: 282741 - DNA, 425 bp, Zea mays
  unsure (1)..(425): unsure at all n locations
gtcccattcgtcgctggcctcccgccgccgctgccgtctgccagcacggacagcgtccagacccggctgtcgaagctgctgcacccgcggtcggcgaaggcgaaggcgtcgtccgggccgatcacgcgtcgggacggcccgtcccgcgtgcacccgccgatgagcaactcgtgcccgatcatcgggcggcacccgccgggccagaaaccccccaccaactggcgcaaggtcctggacgcgccgcccagcaccgtcggcggcgcggggctggaccagcagtacgcgaacgtgatcgcgtccgcggaggagcttctgcggatggaggccgaggggcgccaggaggaggcctccgcggagcgcgccgagatgtacgagatgctcccggcgaagctccgcgcggcggtccggtcgaagctgnggagtgg

SEQ ID NO: 282742 - DNA, 472 bp, Zea mays
tttcgcggacgcgtgggcggacgcgtgggcggacgcgtgggctccgcgcagcaccagccgccatccccgcccgccatctgcgcgcgtctggcgtctccctcgcccccgctctcctctctgctgtccacgccctctgctcgcgtgtcttccagccacccgcgagcagagccttcgcccccggatcccacgcccgcgagcagagctgctgtccatgccgtcggatccgctcctccctcggaaggagaatctccaaatcttgccaccatccccgcctaccatctgcgcgcgttggccgtctaccggctacgcgcatgtgactgtcgttggatcccaggtgctcgcccaattccaagcgcccccgcttcgagcgtcgcccccaacaagacgtccggatctacgctagccctagctcgcgaggtcgacgccgatggatccaaggacaccagcgtcgcccctcttcgagctcccccaa

SEQ ID NO: 282743 - DNA, 515 bp, Zea mays
tctgtattgtattgtatgcttccgttgcccataacttatgttttccactggtgtctgaaagtgtctatatatgaacaagaatcgatgaagtgtacagttgccctacacagtcataatacatgaacaactacaaccaatttgttccttttgatcaatcacaaatttgatctccattttccctatccttaaacacattccctccctgtcaatcgctacattctctacacgcttatctctctctgcctaaacacctctttaggtgaaaatgtaaacatacaaaataaaaaattgtacaacaaacatattacagtacaagttactaccaaccagacgttactgacctcagtggtcaccagtagagcttcaccggtggcaccttgaagcccggcgcctcgtcgaggaatggcaccgcctctggccgttcctggaggtcgcggtagaactggtactcggcctcgtagtcgtgcaggtcgagctccttcttctggttggtgtggtaatggtgcttggccccc

SEQ ID NO: 282744 - DNA, 467 bp, Zea mays
catgtacgctagtcgaacacgaggataagctcctgcagccagtggttggttggttggtttcctcgcccgtgcccgcgcgctgagctgaagcacgatggagatgatggctcgaccgcagcacaagcgctgccgctcatcacgcgtcgcccagcggcagccgatccccatccccacatgcagctcctgccgccatcaggccaagaagagccgccgtagcgcatggagggtcgcagtggcaagccgcgacgcccccgacggcgacgcagaggccggcgcgggccagggccagggccaggcaccgacgggacggcgggcccggctgtcggcctggcggcggcagcgcgtgccgctgccggacggcgtctccggcgccggcgtcggcgagttcctgcgccacccggacgccgtcgagtccatcctcaacaccggcgcgctcgaaagcttcgcgcccgcggtgcccggcacct

SEQ ID NO: 282745 - DNA, 505 bp, Zea mays
  unsure (1)..(505): unsure at all n locations
ggcgagagaagcgagcgagcgagcgaggaagctggagcaaaacaagccggtggaccaagtattcggtgacgaagctgaggcgaaggagaggaggaagggaagggccacgatcgaagagtgagcgcgtctcgtttgatctgggaattcatttcgtacagtgctaacgactttgatacagaggcataaacaatctagcctaagagaagaacactggaaccatggtttcaaaatcatactcagatctgctagacctgacctctggagatggatttgactttcgacaaccttttaagtctcttcctcgtgtcgtaacttctcctggtattatatctgacactgattgggatacaataagtgatggtgattcagtttggtcagcatcttctactgagaggaaaataatcgttgccaacttcttccgttgaattgacaagagatgaaactgggtgctntncttctattgatcatgatgcgcttctatgcaacttaagatagttttcaaatg

SEQ ID NO: 282746 - DNA, 887 bp, Zea mays
tgccaagatggaggtcagcatcaccctccttcgtggagtcactaagcttggtttcgaggtactccttggggggctttgttgagaggaggacacgtcctttgagttgttcaggtgatggtaattctttgagctcatgggtgtcgtctggcgggtagtacagtatgttgccaaatacttcaacaaccatcttggcaactttctcctggagttgagaggggaggtggtcttcaagtgttatgatgacaggatttgttgatggatctcaggcgtgtttcttgatggatctcaggcatttgatgagagaaactggggttgtcagtgtcctgccgtgcacgatgttgatgtcgtcaatggttgagatccatcaagaaacacgcctttgttgcatctccctatcctgtcatcataacacttgaagaccacctcccctctcaactccaggagaaagttgccaagatggttgttgaagtatttggcaacatactgtactacccgccagacgacacccatgagctcaaagaattaccatcacctgaacaactcaaaggacgtgtcctcctctcaacaaagccccccaaggagtacctcgaaaccaagcttagtgactccacgaaggagggtgatgctgacctccatcttggcaaaggaaccggtgatgacgcggtgtggggaaaagaagtaccggattttcggaccgagatccagtctgctgaaaaggacgacgagaacgacgacgttgatgatgaggaagaacaaaaactgcagccccatatagctccacagtataaacaccttattactatcagagcagggaagccaaaagactctctagctgatgccttgaagagtgatccagaaaaagttcggcgtctcaagttgagcgagca

SEQ ID NO: 282747 - DNA, 366 bp, Zea mays
accaaccccacacccccaccaaactaccgaagcggaagggggggaaaatccacgcgacgacgacgcggcgaaacgaagggaagggaagcaggagcgagacaaatccccacccggctccaaaccctagccacctcccccgtcctgtccccagatctcgctgccgtctgacccgcctcgcttcgatgtgacccggccctagggtttgagacgtgttgcggtaggggtgttctcaaggattcacgacacgagagagattcggggaggcgtcgacggtgcgagcacacatgaaggacccggcgcaccgcacgaaggtggtgctccggcggctgccccggcgatcgcgcacaggccgttgtggaccagtcg

SEQ ID NO: 282748 - DNA, 428 bp, Zea mays
tcgtccacgcgtccggcccgtccggccgtcccaggcttccccagctcaggagtcaggtcctcacgccgcgcacgggccagagacgacgagagcgcgcccatccggacccggacagagctcgcctgcgcctgcgcctccaccgatcggcaagcgggaggggagatgaggggttcgtcgcggaggccggtcgccgtggtgatggcctgggtgcgtcgccagccgcccaaggtcaaggccttcctcgccgtcgtcgcggggatggctgcgctcgtcttcatccgcttcatcgtccacgaccacgacaacctcttcgtcgccgccgaggccgcgcacgcgctcgggatcgccgtgctcatctacaagctcaccaaggagaagacctgcgccggattgtcactcaagtctcaggatttgactgcattatttct

SEQ ID NO: 282749 - DNA, 691 bp, Zea mays
ttctaagtattgccatgcatggctgcgaaacatgacatgtgggaatccagattgtctctatttgcatgatgtaggcagtcaggaggatagttttactaaagatgagatcatctcagcatatacaaggactagagtccctcagatggcatctggtgtttcgcaaagacgcacaggcactgtgttgcctcctccaggagatgatttctcttacagtgcggtggtttcagccaagcatacatttaagaatggaacacttaataccaccagtcagcccagactttcacctccaaacagtagttctgggaggtccacgcttgcatcagctgcctcatgggggcagcgtgatttgaatgccaggacaacagctactggagcgacatcgtcacaatctcatacaaaaccaaaatcagaatcacaaagtagtccattttcaagttcttcagtattttcctgtacaaaaacaccctcttcatggaatgatgatacaagtacagcagcaaaaatatctgaaggacagcaactgtcagaaaaagagtctagaaccttgcagccgtataagcctggtatttcaaaggaaacacaagctttatcatcactggagtcatcactggacatagacttctcaacaataccttcagcttggaatgacgatgacattgtagtaccagatgtgatgccaacaggaagtgat

SEQ ID NO: 282750 - DNA, 421 bp, Zea mays
tgctcgccgtttccctctcttctttgcgacggcgaaaatggtggagaacggcgtcgagcagcccctgttacagggcggcggccctcctaataacgccgggcacgcaaagccgcctccgggagctaggccgccaaggaggttccgacgctgcaggacggcgccttccaccgacgcggcgcaagaatctcccccgcggagccaagcaggacccgagcctgcagcgcggcaccacccagctggcgccgcccaaggagcttctgcggggcgcgcggccgagcttcaggctcgtcggcgtcctcctgctggcgtacctcctggccgggaccgtagcgttctacctcgccccggcgaccgcaccgggagccgcgtggtggacgcgctctacttctccgtggtcaccatgacgaccgtcgggtacggc

SEQ ID NO: 282751 - DNA, 419 bp, Zea mays
gaactgtgctgcactgaagccggtggtcctcatggagagagctccacgagttgttaaaaacagctgatccgccttcaattctgcatccactggtatttggagttgacgtacggccgccatatcagcccttaatcctacgtatttaaataatggttgaactagtgtcctttactattttccgttcatgtacttgggaaatgataacacaaagttcttccgcctatatatatagccggttgtacgattgccctggcatctatataatattgtcctgtaaggtaaccacgcaacttcctttcatgtactacgtagctctatattactaatacaaagcatgttgtggacttctatgagataaaaaaaaaaaaaaataaaaaaaaaaataaaaaaaaaaaaaaaaaaggggcgggcccttttaa

SEQ ID NO: 282752 - DNA, 561 bp, Zea mays
gtttgttttattggagcatacatttacataaaattagaatggcatttccatacacaactcacgagctacttgcaacaattgttcagttcttaattatattaatattatccgatcatatttcagagcgttagttctgcaggtgaggtgcttgtgacgtggaaatgtagggagccaggatcatgatgaatgccgtcatcttgaaacatccctaagttaaaaacattggcaggggttagccttttttgccgtgatagaaaccatcaaatgaatgaaattctttcagctgattgaaaaactcttgtctaaacttatgccagtgattttcttttaaatcataagcatgaagtgcatcattttacattttactgtccttacaaagcaaaacactagcactggtctgtcatcatccaagcacgccatacaattactatttctaactctggttatctgtacacttatggttggaagcggtgcatttttaaaattggtcctttatctctatatttctttacctgagtagacacatgtatttggagatcttctatgtgaatttttactact

SEQ ID NO: 282753 - DNA, 633 bp, Zea mays
ggtgcccatgcaattggcttaagagagagacggtggattgcagcaaagttgagaatgccatgctttccttatgattatccagatagcaaagcgtatgcatcatacatgtccaaagaagctgctggttttgataaagtagttgagcgccgccctgttgccaagagaccaccaagagttcctgtgcctcctttatggcactgtatcatgacttgttttcgtaaagattatgatggcatattgggtgttcttgaagtagacgacttggtgcgggctaacatggtattacctaaaacctcttctgcacattgcgaatctggagacgcagaaccatcgcaagcaaatgttgcatccttgcaacttcatgtgccaagaaccacccaaatgttgagacagtatgtggaagaatttgataggaagtatctgagctcatcatctgacatgaaagtggattctgatgaacccaacctagcttctgatgacactgtcggcatgacacggttcgcgagtgaattatgccttacaagggttctgatccgagctttcaaggaaggttcttttgaagagggtgccgttgtttgtgccccattacctgcagatctttcagcttggaaaatcagatcaaaggaagaagag

SEQ ID NO: 282754 - DNA, 528 bp, Zea mays
tcaagtctaaacacaaagatgtattctctgccaaggagaagtttattcatgccgagtatgtagacaaagagttcttacggaaccgtagcatggatgagaatcagctagctcagcagatgtggaatagtgtagctgcaaatgacaagaaagcagcatacagtctcattgtgagatcacgtgccaatgtaaatttagtttacggagagatgccttctagcccatttttgactcttggaaaggcacttcagcaagagcaaccggtttcaccgcctgatggaagtcctaaatttttcgattgcaattcacatgacaagatttctcctcgggagcccctttcccctgctagcacgagttcacgcacagatgacatggaggacggttgcgaaggtctttccttgctccatcttgcatgccgtgttgcacacgttgggatggttgaattacttttgcagtatggtgctagtgtaaatatgaatgattctagggagttggacaccccttcatcactgcattttgaaaggaagacat

SEQ ID NO: 282755 - DNA, 621 bp, Zea mays
tttccgtttgttgcggtggtactcacctgatacatgactgacggccttttagtttcagaagccaaaagttgaaactaagaatccagcggttgagttgccttttgaaaggctgtcttttgaggaaataaactaaaaaactgaaaagcatgttgatatgagcttttctggcttttggtgtgctaaaaagctaaaattttttacagaagtcaatagccaaaaagccaacagccggaagtcaaaagctagcttcgagccaaaatcccaaaactgcagttcaaacaaacaggccctgaagggaatgactctaacgagggctgcccacctgatggaagctcaattgcacatctcgatcgggaattacttccaatcttcggtcacaggctcacagcgtgatgcttattgtttgtatcctcgtcacgagactccatgctgctggatacgatgacctaccgcgcatgatgctggctcgtagttcctggagcttggccacaaggagaaccaggcgcctacatggcgcgaagatgagcgtcattggaatgagccagacccctaatgcaagtatcaacatagctgtcttctgtgagtagagctctaaatatctgcgggtttggcttccttcac

SEQ ID NO: 282756 - DNA, 571 bp, Zea mays
tttccgtccacgcgtccgctctagtctctatgctacagcaatctggccttgttactttattttatgaaagcatattgtacctgggaattgtttgtacatccctttgttgctgggtcatatgggtcagaaccattcgcaatgggacatacatgattaatcaaacatgaatttcatggatagtcctcagaagttatgaaagctgtttttttgtactgggatactctcttgcttattttcagttaatttcatgttaagctttcttgattcaactcagtgcatgtgatgtttcacttgttttgcgtaaccttggaacatgtggggaacattttgaatgtgtgctgaaaaggctatgtctatttttattagtatgttaagatcgtgattttatattgattttcatgtgtcaacaaggtcaataagatttctcctaagccttagcgtgctgggggttttgaatggttatgtgctcccatgttagcattgtgaagttcactgactattgactgtgtaacatctataggcacgttcaagcttaccttgcagtttacagaagattaccaaacaagccacc

SEQ ID NO: 282757 - DNA, 609 bp, Zea mays
ctcctcagtgggcgtgggggcgccgcatggaagccatggacgtcaagtacaagcccgtcatgttccccaacggcgccggcctcaagaagccgaagccggcggcggccgtggcgctggccggggagccgctgtaccgggagtgcctcaagaaccacgccgcgagcctgggcgggcacgccgtcgacgggtgcggcgagttcatgccctcgccgggggccaaccccgccgacccgacgtcgctcaagtgcgcggcgtgcgggtgccaccgcaacttccaccgccggacggtggaagggttccccgccgccgcccgcgcccgcgctcgctggcgctcccgccgcccccgccgccgccgccgagcgtgctgcacggccagacgcaccgcggcggggaggatacgcccgaggaccgccacccgggggtagtcgacgccgacgaccccgattccgactcggagggctcggagtacgacgaggagcggtcagtgtccccgccaccgccgcaccacgtgccggcgccggtggcgcagcaacccccgccgccgtcatacttcccggcggcggcgccgcaccagcacatgctgctctcgcttggtccaggcgccgcggt

SEQ ID NO: 282758 - DNA, 598 bp, Zea mays
ttcgattagttgcgtacggactggcgccgccacttagtttccacccaccaaacttcacggcttcggcctttgcccttcgcattcgtatcgtatataccttgggcacgctgctgcagcggtgggtgctcggctatcttcaagagacaagagtggagcgcgccgaagagcagcgcaggggggagatgaacagcggcgtggacacgcaggcgcgggcgttcgcggacgaggtgcgcggtagtttggagacgaaggactggatgctggacctcggccacccgctcctgaaccgcgtcgccgagagcttcgccaaggccgcggggatcggcgcagtgcaggcggtcgccagggaatcgtacttcatggcgactgaaggcgacggaggatctgtgtccggcgcaaggaaacgctcgttcccggagctcaatgggacgaacagtagcagcatcaagtcggcagaggccatggtacgccacctggctacaaaatcagcccaccagatcttgtaattgttgtttgtgatttttggtcttcatcattcccgtcacaggtgaaaagcgtgacgcaagagtcgttacagtggggtaacactttccacaca

SEQ ID NO: 282759 - DNA, 790 bp, Zea mays
gcattttccactgcccgtgatgcgctcaaacccccgggtgagtccaacgccgccaccgtggtctctgcagagtcgcctccccttgcaccgcagtccggagaccgggacggccccgccgtcacagccggcggtcgagcggaagggtgacgagacctgacgaggctccgtaggtggcaggccccgtcttcctctacgtcctccctccgtctcgagaaccagatgtccgagctccgcaggcggcaagccccttcttcctccacgccctcccctcaccggcgcgggggagcaccgcctcagcccggccctgctctccgccctccgcttccgcccgccgcgcctccccgggtgcgtcgtggatctggagacctgcaccaccacggcatgcgacgactaccccaaccaccgtggatccacgctgtctccggcgccgtcgacccgacaacacctcgtctctctctatgtgtttcgtggggtcactgtgctgaaaatcaggaagaccccaatggtggtgtcaaatcccgaaagaaggtttagactctagagtatgaactgaacccacttgaactggagtttccaagaggagaggaggtcacaaagcttctttacttgattggaacttggtttctcttattaatatgatcatcttcttctttgctattcgatttgctgttccaaggaaaggtatgccataagcctatgatgactaatgttttgtgcatgcttcaagtttcaactatatatctactactctataaggacccaatgtgggcatccacattgcttcatcgtg

SEQ ID NO: 282760 - DNA, 536 bp, Zea mays
  unsure (1)..(536): unsure at all n locations
cctttgtttccggcccaagccaccttttggcgtttgtgttggtaatttgtgttttctgcacaagccaagtcatcaggtatattttagacgtaggattatgccattttgtttgccagtctttgaacaacttgttagatgcttcagaggctgggacaatgacgttgggagaagaatgtaactagctgttctagaggcttatttgcaagtgaattgctgggcatattcacatcttcatgatttgaagcctcaaggatgttcatatagcatcgatattggagctgtctcctgtgcaatgtgagacattccaactactacttggtatacttgtaagctgaagttgcttatacagtcgagaaacagaaccaaggtgattggtgtggaacaccactttgtagcattcacagtaacatagcattcctggtgtnttaccttttcccaattcagggtggaagttggaactctttgagtaggtccagtggggattagcttcgtggcacttggtgcttcttaatcttggcagtcatgtggagggagag

SEQ ID NO: 282761 - DNA, 537 bp, Zea mays
tttgtttgtactggtgaaggttgcccatggcgaatgcatgcttctaagtcccctgcaaagaaagaatttatggtcaagaaaatatctgaaagccacacctgtgaatctgaaacagtcaaaagcaatcggttggcttctcaacgatgggttgctagtgtcataaaagaaaagttgcgtgatagtccaaactacaggccaagagatattgcaaatgatcttcaacgagagtatggactatgcctgaactattcacaggcttggcgtggaagatcaattgctcagaaggaactttatagtacacacgaagaggcctgcagtcagttgccttggttttgtgaaaggattgtagagacaaaccctggaagtgtggcaactgtagtggccttggaagattcaaagtttcgtttttttgttgcattccatgcatcgctccatggttttgagcatgggtgcaggccgctcctttttcttgaagcgataacttgcaaagccgaataagcactggaagctactggctgctgcttcagttgatggtga

SEQ ID NO: 282762 - DNA, 435 bp, Zea mays
cttatagtcggttacattcttggtctgcgtcaggccgttttcctggtcctttcggccagattcatgctcaacatcatgggtgttaagtccggatccccgatgcaagggcctgcggtgcgctacctaacgataaggtcccttggtgcccccgctgtgctgctgtctctggccatgcaaggggctgtccgggggttcaaggacaccaagacaccgtatatacgctactgtggttggcgacgcggcgaacatcatactggacccgattttgatgtttggctgccatatgggcgtcactggtgcggctattgctcacgttggttgtcattacatgataaccgtgatactgatgtgccagctcgtccaaggagttcacgttatcccacccagcagtaaatctgtgaaatttgggaggttgctcggatgtggattcctgct

SEQ ID NO: 282763 - DNA, 409 bp, Zea mays
agcgccgacgcgccatcagtgcaatccttgcgaagatcgactatgatgggcttgactactggatggtcatagcgtgcggggctctgatccccagctttggccgcgtcttcaggcgctcactgcggttggacgtgcggaagagcgtcgttggcctgctggtaggtgttgccttcgcctccgtgtgcttgatgtcgactagattcatctgtctgcacactccttactgtaactcggctccagaagccgtcacataactttgttgctgccccgtgctgttgtaaaacacatgtaatactagtgtaatggcgatacaaaaggaggatgtggaagggttacgttgcgtcgaagagatctcttacggcgatacaacaaagggaaatggatgttgaacagaatttgcctttttctt

SEQ ID NO: 282764 - DNA, 628 bp, Zea mays
tttgtcttccgtgctcgccgccttctcggactaggggggttcggctcgagatctgatttcgggcgccggaggactacatggaggttagggagatggcgatggccgcggcggctgcggctgcggcgtccggcggcggaggcgtcaagctgccgccgcccaatcccaacctgccctacagggaggactgctggagcgacggcgagactgcagctctcgtctccgcctggggcagccgctacgtcgagctcaaccgcggtaacctgcgccagaagcagtggcaggaggtggcggacgccgtcaactcgcgccggggagcctccgcgcggcgccgcccgccgcgcaccgacatccagtgcaagaaccgcgtcgataccctcaagaagaagtacaaggccgagctcgcccgcaacgcgccgtccgcctggtcctacttccccgagctcgaccgcctcgtcggcccaaccctcagcgcctccgcctccaagagacccttggcgtctctgcctcctcaattcgctttgcccatgcatccaccagccgtgcggaggcccccgtcgccttcgccgtcatcgtcctccccgccgcagccgcctatggctttgcctctaccaattaccgccgtgggtcc

SEQ ID NO: 282765 - DNA, 576 bp, Zea mays
ctgtccatcgtctcactctcatctcatcaccgctttccgtttcgctcgtccgatcctcatcaccagctcgggagggaggtcgggagagagcacggacgatgtggcacgccgcggcggcccccaacaaccttcacccggccgtcgccacaacatcggcccctgcccttcgccgtgcgaggtggcccatcgctcgaccctcgtcgtcggtgaaggtccagtcctccaccaggaacggcaatggctccgctgacaacctggaccacctgcagagggcgtccaagggcaggcagcagcggcagggggcgagtgctccaggcccgagggctagaagggtcgtccgcaccacaccattcgggctgtggtgggacagcttcccggaagcgaggacgctggaccagatggtgcggaccatcatggacgccgacgacgctgacaccgacgcccgcttcgacggcgtcgtgcctgcggcggcggcggcggcccccaccgccgtgccgcgcgccgaccacgggcggacgccgtgggaggtcagggagcgcgccggggagtaccttgttctgttcgacatgccaggga

SEQ ID NO: 282766 - DNA, 461 bp, Zea mays
ctcaaaacactatacaaaattttgatcaagagggagcttacgaccaatttccatcctccaggcaatacgtgatgaatcaatgtatgatccacgggaaagaattgagatggcacagaggcagtctctttaccggccatctcttcttggcctgcctaaagctgatgcgaaggcctaagatatggtgtttcatcctacctgatgagagcttgcaggagccaggaggcgcttactggtcttcaagatccttacgtgcctcagatgtgtgttgtgtcatgcgtgtacactaatacactatagagttgggtgatggcatatttagcatgccaggataaactttattgcccgtgtctgaaatacaagctgttgtgattcaaatttatgtgtcacttagactggagtaaagatgtgtgtgccttttattttatgatggcttcagagtctcaaaattcggtgtaagatta

SEQ ID NO: 282767 - DNA, 467 bp, Zea mays
ttgtcgcgtgggtgcgcgtgcgcctccaccgccggaaccccgaagaagagcatccccctccttggagattttcagtaaccgttcctgctcgacgccgacggcatgccgaccgagcgcgtcgatgtcgcggtctcctcacggacgctgctgcgggcgtccgacccgcctccggacttccccgcggtgctccaggcgtccaacctcgacctcatactcggttgcttccacatctacctcatcgacatgtaccccgccccggtcgcgggcttccccgccgtggtagctgccgcgcggaccgccatgcccgctttcctctctcgcttctaccctttcgatggccgcgttgtcgccaacgccgacaccggcgtgcccgagatcgcgtgcgacaacaccgacgcggagctcgtggtggcgcacgctggagtgaggctcgcggacgtcgactttgcggacgccgaccgctcgct

SEQ ID NO: 282768 - DNA, 527 bp, Zea mays
cttcagctggccttagagttatcaaaagggttgatcagacactacaagagctagcggtgaatttgaagcctaaggtcccaacgatagcagtttgcatagagcatattgaactgcggaatgagctactcacattgcttaacctacaaaagcagctgcaagatagagaggctgaagtttcagctaaccgggaaagttccttcacagaggcaccaagcacacctaagcgttctaatagggacattgatcggcccttcatccctgatacaagtgggtttacaggtgaaagagcaggcaaacgggatcacaagcggaagtccactggaagatttatagatgcgcctccatcaccaccccagtcgaagcggcctagaaaattgaagggatctgactgatagtgctgttcaaatgtcaggatgaaaactctagtcaaacaaccaaggtgtgtcatatcatactaaagttaaactacgtgtttttcatgattatttagtcccgacttaagagcttgagattgacatttacatcac

SEQ ID NO: 282769 - DNA, 510 bp, Zea mays
tcgtgtactaaacagcagagaaatggagaaggtcaacgtgttccgcggcagggtcaccaactggatcttcatcgcgatcatagccgcgacggtcctgttccaagtggcgatcgtagagctgctcggcacctttgccagcaccgtcccactcgactggcggctttggctgctcagcgtcggcctcgggtcggtcagcttggtcgtcggtgccgtcctcaagcgcataccagttgccaaatcgaacggagctcctgcgagtcccaacggctacgccccgctccccagcggtcctgacgacatttagctgaagaagaggggatgcatggagagaagaagtcgcgtccgatttttgcgtcttgtttggaataagtaatgaaccactggctaggctcagctttagcagattggtctatatatatatatatatatatatatatgccttgtcctgcaattacacgatcttactgtttgctgattgttctatatatgaatgaacgcgatgcaaggcac

SEQ ID NO: 282770 - DNA, 486 bp, Zea mays
  unsure (1)..(486): unsure at all n locations
ttcacgcgtccgcccacgcgtccgggaaagggcaaaggtggggaaagaccgaaacaggcgacagaaatggcgacagagaagcgcagccggcggcgctcaccgtcggccgccacgccgagcgcctcgctgacgtcctcctcaaatccagaagccgctatattgcactcaccttccccatcgctggacctcatccccgacatcacctcccgcctgatctccctcgaggacttcttcgctctgcgcgcctcctgccgcgcttaccgcgccatccttccgccgtccagcgaggccctcgcctgccagtccccgctcctcctcgtctcccttttcccctccttctccgaggcgttattccacctctcgctccgccgcctccaccgcttccgcctcccctggggccaccacctgccccccttccgncgnacccttcactacgcgcacgggtacctngtcaccgncactaccgngtcctcccactaccccccg

SEQ ID NO: 282771 - DNA, 656 bp, Zea mays
  unsure (1)..(656): unsure at all n locations
ttttgctgatgtttctttgctgaatcctatcctagttcaatgcaagacctcaggcaagccattctatgccattgttcatagggcaactggttgtctggtggtagattttgagcctgtgaagcctacagaatttcctgccactgctgctggggctttgcagtcttacaagcttgctgccaaggcaatctctaagattcaatcgctaccaggtggaagcatgcaggccttatgcaataccgtggttaaggaagtcttcgaccttacaggttatgacagggttatggcttacaagttccatgaagatgagcatggggaggtctttgctgagatcaccaaacctggtattgagccctatctaggcctgcactatccggccactgatatccctcaagctgccaggtttctcttcatgaagaacaaagtcagaatgatctgtgattgccgtgcaagatccgtgaagattattgaagatgaggcgctctccattgatattagcttgtgtggttcaactcttagagcaccacatagctgtcaccttcagtatatggaaaacatgaactcgatcgcatnccttgtcatggctgttgtggttaatgaaaatgaagacgatgacaacccgagtctgaacaccaccacacagcagagaggaggaactg

SEQ ID NO: 282772 - DNA, 475 bp, Zea mays
ttttgatcctatggaagcatcgcaatgcctgcgtcttcgaaggtttgcagctgagcatgtggaatgttctgcatgctctcgaagatgaacagcatctctggtgtctcgccggagtgcaaggactgcagagtttaggcctgggctccctgagcggttaggtggcatttcctggtctggtctcaccatttctatttgctgtaagagttttgttcttgtaagcacagcccctcacggctcgggctcggtccggaatgagggggtaaaacttgtacgggaggccacttttctggtgcttagtattaaaaaggtaatacttgttctcatgaaagtgacctaacaaaagttataggtacaaatatagactggagtgatgttgttaactcaataccaaaacagcaaagcattgggttttgagaatacttcattcaaggtgatgaagaaattagctttcgccatgtgaagtctttcaatctca

SEQ ID NO: 282773 - DNA, 554 bp, Zea mays
ggcctccttccctcttcttcgcctgcacctgcacccgcccccgacctcaccctctgctgacctcgctcccctcccgtagccgccggagccctcatcggtttatcctcccgctgccacctgcaacagccccgggcggagatccatcctaactctacgtgcaggtgaccccaagtcctcaagtgggtggcgcaaccatgcccaaggttaagaatccccacgttttcatggacatatcaatcggtggaggtagcgccgagaggatcacattcgagctatttgcaaatgtagttccaaagaccgcggagaacttcagagcactatgtactggtgaaagaggccttggagcgtctacacagaaaccactctattataagggaacatatattcatcgcatagttaaagggtttgttgctcagggtggtgatttttcaagcggagatggaaaaggtggagagagcatttatggtggaaaacttccagatgaaaaacttaagctactgcacaatcagcctggtgtcctgccatggcaaattctggaccaggcaccaatgggt

SEQ ID NO: 282774 - DNA, 344 bp, Zea mays
aacagaacgacggtggaaccctggtctcctccctcttcacccgcacctgcactgcagcacacgcgccgccgaagcgctctgcccacctcgcttccctccagtggccgccggcgcggctcagcggtccatcctcctgacgccacctgcaacggcgccaggcggtgatccattccaactcgcggtcatctcaagtgggtgcggcaaccatgcccaaggttaagaatccccacattttcatggacatatcaatgagtggaggcagcgccgagaggatcacatttgagctactcgcaaatgtagttccaaagacagcggagaacttcagagcactctgtactggtgaa

SEQ ID NO: 282775 - DNA, 552 bp, Zea mays
ttctttactgcaaaccaagccttccccacgaattctcacataatcagctccttggaggcagcaggaaagaagtgccaccaatatctgtcgagaagctgaagggaggccaagaattgcatctgtctatgctgatatagagagaagggttgggggcttcgactttttagagtgtaataacaaggacttcagggctctcagaatattgggtgcattgaacgcgagagatgctaagaacaagaatgacagcagtggcagaccaatggctactcacagaacaggatatgacctaaccacctctggaagctatcaggctcctattgtggtcatgaagcctgcatgaaccactgaaaagcatggggtttcacttgcttctgttgcccccatagcaggcctaagaagccttagaaagttgccagctagatattcatctttcactggcaccaatgagaccagcacacatgagagtattcatcttcggatgtcaagagctcaattgaagtctgatgaaactgtcagcaatgccaactcgccaagcctacaagctcatccagt

SEQ ID NO: 282776 - DNA, 532 bp, Zea mays
ttctcgcgtccgtaacatgcaggcccctggttttgcatctgcatcgacagcgtaccccaacccaccattaatggccaactccacgccttactatcctgctattggatcaagttcaggtgccccgccggtatcgtttcaggcttcacagcagaggccacagtatggcatgctccctggtgctccaccgcacgcaccaccagctggccaaccaatgtacttccagaaataagtggtttcgattcaatgttatcaaagagcattcacgcatattacctgcaactattgttgtccgcaaatgccatctggaattttttttggaagtgcattgtaactcttgtaacttacgagcgccctacgcaagaataccccaggctggctggctattaaaccgtcaaaaatagttttaacctattagcctgcgtggtatattgttatctcaatgccgagttgttttgatgcctcaagtgtttggaaagaaagtatttcgaaaccgtggtttttggatacagctttaagatgtcatgacatgact

SEQ ID NO: 282777 - DNA, 429 bp, Zea mays
tcctctcgtgcggtaagtccaggcacaaaagttccgcttactggaggggatgaattcatattcacctcatgcggcaagcatacttatattcttctttatcctttgaatgacaaagttcctaaaacggtgctatcatctgctgttagccttctagaagctcctgttgctagtgtaaagcgtatccgtacagataagagaacaggagacacttcagctgttgctggtacagagatgatgacatctacatctaatcagaaggatgtagcagcagtacctcccgcgtcagctggagagaacagccaatgagtactgcggccaatggcatcatctgcttctgataaatcgaaagggcgtgctgtgagccctgaaaaggaatttgcgaatggggaaaatgctaatgaggttaattctaacatcgaaaactcttca

SEQ ID NO: 282778 - DNA, 599 bp, Zea mays
cacgcgtccggcaaggagcaaaacgttgatgcagatgagaacaactgcaacgagcagaatgatgattcagagaaaggaagtggtaaggaagaaatagatggtttcgagaaagaccatggtacggaagaaaagaatgattcagagaaagaacacaataagggagaaaaggatgatcccttggttgcgaaagttacaaagttagaaccagagagggtaataccgttggcactgaaggccgtttcacttgtattcgataggatttttgcaactgctggtaataatgctactgggtacgcatctgctgcaagcgctcctgtttcgttgcgaatgttggtgctatacagccaagcaggttggctcctggggaagggcggtagtgtggttaagcaaatggcagcagataacggctgtgaaatccgtgttttgaaagacaaccttccgtcatgtgctctgttgaatgacaaactttgccagatcactggagagattgactcagtaaggaaaggtctcaatgctgtatctgaagtgctcttagctcatccacccaaggaaacagatgcagtagctgatgttcgatcttctggatcatcgtcacgttc

SEQ ID NO: 282779 - DNA, 715 bp, Zea mays
aggatgtcagagattcataatgttgctatagcagacaatcatggtcgggtccataatttatctcggtatcaggccaggtggaacaaacctaggcctgaaagtgcgacaattgatgaggaactggcttcgaagttgaattctatggcagctaaggaaaaactgtactgcgaaattgcttcaacggcagaatcgggatgggatttcagctctcgatggatgaggaattctactgacatgacaacattggcaaccacttacataatacctgtggacttgaacacatttctttttaagatggagctggatattggtgccttggctaaagtcgtaggagataatgcgacttcagaattttttttaaatgcttcgaaagcacgtcatattgcaattgactctattttgtggaactctgagatggaacagtggcttgactattggcttcctggtgatgcagactgtcaggaagtacacgaatggaagcctaactcacagaaccgcaacatatttgcttccaacttcgttccgctgtggctaaatgcataccattccggtgcgtccttgacttgcatgtgtgcttgtttctaatgcctgagtgtgcaatgctttattatggcaatttttaagaccatcccagctacatgtttttcatatggtaactaaaatatcctgtgaactgaactgctgtaacgaaggactggaaagtaaccatcggcaa

SEQ ID NO: 282780 - DNA, 630 bp, Zea mays
  unsure (1)..(630): unsure at all n locations
tttgatgtctcagagattgcaaacaaaacaggcactggtgagttacagagaaaggaaaatggaactgcaggaagcagaacaaaacggtggtttgtatcctctctgaatcctccacccaagaggagggaagtctcagccgtacgtagatttccacctggctgtgggaggactgctgttaccaccacagtcagcggtgttttggaggtctcacctataagcacatttgctcctggtcatgggagatctggtgttaataccacaggcagtggaaatgaggggttgccttcagaagccacccctgtcaacaataatgatgccttggtggcaagttcggttttaggagagttggcttctccaacttcagcactagaggcctccaataagaaattggaaagcaagagaatagtgggtgaaggacatagcaaggctcacaataaggtccaagttcaagatgattttgccggtaccaaacaagatggtggccagcgaaatgttgttccaaaagctacgccgaggagtgtttctgatgggaagatgaaggggaaactcccagcacataaagcgaatcangtagcacaagatgtgatcgttgggtagatgaaaaataaacttgatggaagctttcaaaga

SEQ ID NO: 282781 - DNA, 917 bp, Zea mays
tttttgtgtgcctttttttctgaagaaagttcacaagcttccgaagtctataagccattacaagacccattgatttctcgctgtgttgatattattggcatgaatgaagacaaagcttctgtcagtgaaaaactaacatttgctgcaaaaggagttctatcaaaagtattcccaaagcctcgtagagcttggttgcccaccggctgcttgaaactaatggatactctacatcaagctttaccgagcatgtcccttattgcttcagacttcagctatcttccagacgttagcatacctggtgacagggctccattggtttcatcaaagaaggatgggaagacatcagatcatcgcaactactttgatgctcagggtgacgcggacatcttcttcccaaccgacttccggctcctggagcagatcgaccataactgcgctggcttctcaaaggagcagaagaatcccggcgcattcaaacccgtgaagaagaggagaacgatcatacttgatactgcagccttcatggaggagtttggcatgccgctgaagacgaggaccaaagacgggtataatccgcttctcggcgatttcaagaacacaaagttctatctcagcgtccctacacacaacgttcctacccatagcaggaggaactagtcttctttccttttgctgatgtgtcacgagtcaggaaaagacgtctgacaggctagaatcggtctgtcattttgagtagtctgaatttgcaagttttcttaccttaaggtgctgaaaattttatagtttctcttttctgtagaacaaagtttttattatcatttttgacattgatgcatgggtaataaaaggcggaagaagactgactaacaaggagtcaaaaaacaacaaaaaaaaaaaaacaaaaaaacaaagaaaac

SEQ ID NO: 282782 - DNA, 301 bp, Zea mays
gtccttacgagctcaccggagagaagaatgcgagagaagggtgcgagagagagggttagaccgtcaacctcgagctcgtgtcacaagcacaacctcactcggagctccgcagaaggttaggaggggtatcctgcaaccaaggaaggtgcacggatgatctatcgggcgtgaagaaccgccagtcgaatgcaatttctcgctggacctcgcggatccaccatgggccgctgcgtaccgtgggcgtctatgtcgacatcgtccctatctccgacgagccagtcaccgaggatccaggtgttca

SEQ ID NO: 282783 - DNA, 476 bp, Zea mays
ttacaccaaagcctgatttgcctgctatacaaaatgttgctgttttacaatctgtggatacagctgcaactgatgcaaatgctagtgaaactggtactcgattactcaccaagagaagtatacatgaattagttgcacagattgattctaatgaaaagctggatcctgaagttgaagatgttcttattgacatcgcagaagattttgttgagtctgtcacaacttttgcttgttctttagcaaagcataggaagtcaagcacattagacgcaaaagatgtactcctacatgcagaaagaagctggaatatcaccttgccaggcttcagtggtgatgaaatcaaactgtacaagaaacagcacataaatgatattcacagggagaggcttgctctgataaagaagtccatggcgactgacacgagaaactctgctgcccaagctgcagctaaccagaaaaatcagactccgaaacca

SEQ ID NO: 282784 - DNA, 617 bp, Zea mays
ccggccaccttcgccagcgagcgcctcccggcccccgcccgcgaccaccgcgcccacggcgaccccgccgtcgtcatcgccttcgacctcgacctcgaccccgacccctgcgacgccgaccccgagcgggccgagtctgtccgcgaggggttctaccgccactaccacgtcgtcgtcgcgttccccgtcggggcaggcatctacgctttcgagtccttctcgtccagggcctgggcgtgggcaaccggaagcggggtcgccgacgctgaggccgtcctgccaggctccggggtcggcgcgctcggctgcgcgttctggcgcaccaccatgggcctgttcctctgctacgaccccgtctcgcgccgcgcggacctcgtccccgcgcccgccgaggtcatgcagtggccctactgggagcttggcgacatggacggcacgctctgcgtcacttgcatgggacgcccgcgtcgacgccgtcgtcgtcatccgcctcgacatcgtgagcggcgccatcaactggactctggcggggtatttcgagggcggctgcctcaggggccgcagggacgtcacgctgctccgctcgcagggtaaggcggaggtcgtcatgtgggacc

SEQ ID NO: 282785 - DNA, 1512 bp, Zea mays
accgtcgagctcgagccgaccagaatggccgccgccgatgcatcttcgttgcctccgtccgccatcacctgccgagcggcggtggcgtggggaccgggccagccactggtgatggaggaggtggaggtcgccccgccggggcccatggagatccgtgtcaaggtcgtctccacctccgtctgccgcagcgacgtcactgcctggcaatccaaggcaggcgcaacttgatctgttccccagagtcttcggccacgaggcatccggagtagtagagagtgtcggtgaaggtgtgaccgagttccaagtcggtgaccacgttctcactgtcttcattggggaatgcaagagctgcaagcactgcgtctcagggaagagcaacatgtgccagaagctcggtctggagaggaagggtgtcatgcacagcgatcagaagacacgcttctctgtcaaggggaaacctgtgtaccattactgtgcagtgtcaagcttcagcgagtacacggttgtccattccggatgtgcggtgaaggttggcttgaccgtgccaatggacagggtgtgcctgctgagctgcggtgtgtctgcaggactcggtgcagtctggaatgtagctaatgtatcaaagggctcaagtgtagctatatttggtcttgggaccgtaggactctctgtcgctcaaggtgctaagcttcgaggggcgtccaagattataggagttgatactaatcctgagaagcaagaaaaggggaaatcatttggtgtcacggactttattaacccagatgaattgagtgaacctgttcaacaggtaatcaaaaggattactgatggaggggtggattactcatttgaatgtgtgggtgattctggagtagtctccactgcacttcaatcatgttctgatcgttggggagtaactgtaactcttggcttaccaaaaggaaaactagaagtgtctactcattatgcatttcttctatccggaagaacactgaagggatctatgtttggaggatggaaacctaaatctgatctaccttcattggtggataaatatgcagcaaaggaaatccaagttgatggcctagtcacgcatgatataccattcaatgaaatcaacaaagcgcttgagttgatgctagaaaacaagtgcttgagatgtgtgattcacatgccacggtaacagggtcgaacagctgcacataataatatgatatctaccatatgtggcatatctgctctttctaccttgatcatctttgtggctcaaccgttcaagtactcatcagtcatcaccacgccggagcttgagtttttgtccttttctagtcccctggtaaagttgttgtaaatccagctatccatcaagaattatcaggagaactaccctgatttgcttttgtatcttcaaactttttcttctagaattgtcttcttatattgaatctttaatgtctgttctgttattttaatgccccatgtacaaaccatcaagcaaatattgttcttccc

SEQ ID NO: 282786 - DNA, 242 bp, Zea mays
cccgtccccggtttgactgccgagctgattcgtgtgggcgtcaatggtgaacaccgggcgcttcgtcgtcctcgtcctcgcctaccgcctcctggtacccctcctctcaggctcagctgaaccggaccacaccaccaaagagtcgtatgtcgtatacatgggggagcccgtcgggcggccgcgacccagaggcggggcaagcggctcacctgcacatgctgtcgaccatcgccccaagcgac

SEQ ID NO: 282787 - DNA, 515 bp, Zea mays
ctcatgcgtgcgatggaatggtacaataacaaagggaggcacaccgatctgccgagctcgatgcttccctgtaggaaaggtacttaacttcatgctgcctgagtttctggatagcactgctaggacaagtctagatatgctttctaagcactactatcaagctactggcagctgggtcgtattttttgtcccagaaaatgatgcggacatgacagcttataatgatttcatgagttatctaggtgataagcagcgtgcagcagtctgtaagcttggagagagcagcaccttgtttcttgttccaccttcagatttctcagagcaagtactgagagtgcctggaaatgtcagcatatctggagtcattctgaggtttcagcagtcaaatccagattacagctcaccaaatcgcagaccattggatagagctcacccatcttctgcaagtaattttaacactgatgtaagaaattgtgaagatctgcatgcactgagaaggctcaatccttcagata

SEQ ID NO: 282788 - DNA, 426 bp, Zea mays
cccacttcgtccggccgtgtgactacacctatgctggtgctattgctgcatgtggcgagctcggggcactgaagcatggaaagcagcttcatgggcatattgtgcagcttggttttgaggggagcaattctgcaggaaacgcactcattaccatgtatgctagatgtggtgctgtgaaagaagctcatcttatgtttcttgtgatgcccaatattgactctgtttcgtggaatgctatgatttcagcccttgggcagcatggacatggtagagaggcactagaactctttgatcgcatggttgctgtaggcatattatcctgataggatctctttcctaacagtattgacagctggcaatcactctggcctcgtagatgaaggctttcgatatttcgagtccatgaagagggactttggcattata

SEQ ID NO: 282789 - DNA, 841 bp, Zea mays
gtctctctcgcccttctcccgtctccgctccgcctccgcgcgtccggcgagaccgcgagagcgagacgatgggaatgctacaaattccccttctgagtccgaccctcctcatccaatagtaccacctgctcgctgctccgccaccgctctcgctcgatcgccccctcgttcgtcggccttcgcttccagacctccgagtcctcaatctgcagctttggtaattggtcgtatagtccctcatcatcggaatggtggggtcacttatctttcccacacctaatgtggatccgaaggcagagaatcctaatgagatggttacagcgggtgtgctttcaagccttcagaatttcctacgcatgtgcctcatagccatcctctcatatggcccaatgccgaagcacattgcatttattatggatggcaatcgtcgatatgctaaattcagaagcatgcaagaaggagcgggtcacaggatgggtttctctacccttattgcaagtctaatgtactgctatgaaatgggtgtgaagtacatcactgtctacgcattcagcatcgacaattttaacagggacccaagtgaggtggaatccttgatgcagttaatggaggaaaaaatcaacgaactcttagagaaccgaagtgtaatcaacaagattaactgtaagatcaacttttggggtaacttggacttgttatatgagccggtgcggttggcggctgagaagctgatggcgagcacagctgggaacacagggctggtcttttctatctgcatgccatacaactcgacttctgagattgtcaatgctgtcagtcaagtctgtgcggaaaggatgga

SEQ ID NO: 282790 - DNA, 370 bp, Zea mays
tctgtctcttgcacaagcaccagccaaccaggcagtgagccagccattactcgcaagcttgctggctgctgaaggcgcagcagagctagcaaaggcttcccatccaaaggcggggggcgactctctcaggcaaaaataaaagcttgatgtgaagccgcttgctctgcgattgctggttgcggcgggctgcagcgttgtctgaggtgcgtggtcaagtcgacgcgaagatgagcaaggaggacgtgctcaaggtgcagacctgcgtgctgaaagtgaatatccactgcgatgggtgcgagaagaaggtcaagaagatcctccacaagatcgatggcgtgtaccagagcagcatagatgcggagcaggggaa

SEQ ID NO: 282791 - DNA, 335 bp, Zea mays
ctcacaacaacctcccctctcccggtcctctctctcgccccaacccccacgaatccccgcttccatggcggttctctctgtccccgctgccccgtcgctgcagctccctttcccctccctcatcgatgtggaaaccgcacacaaactgcaggcgcgtcttcgttcttcctccgcatccggctactggctcacaccgcctgtcctctcctccgtcctctggctctggctcatggatgatgccaccaacacctctcctccgtcctccccagtggcggaactgaggcctggcctacccgggcacgacttcgacggccccgcccaggtaagcacgacac

SEQ ID NO: 282792 - DNA, 389 bp, Zea mays
ctgcaagagtgacaatcctgatgctgcctggtacacacagatggaagcctgtgttactccactgcctgaagtgagcaaccagggagaagtggctgggggagcggtggagaaatggccagagagggcgttcttggttccccccaggatcaaaaggggcatgattccaggactggacgccaagaagtttgacgaggacaagaagctttgggagaagagggtggcctactacaagcgcaccataccaattgcagagaacaggtacagaaatgtgatggacatgaacgccaacatgggtgggttcgctgcttctctagtgaagtacccgtgtgggtgatgaatgtcgtccctgttaactccgaccgggacaccctcggggcaatatacgagcg

SEQ ID NO: 282793 - DNA, 337 bp, Zea mays
ttccacgcgtccggagatattgatgttaatgctattcatgatcatatggctttaattaaacaacaaaatgatcatatagcaaaactagatgctaagattgccgagcacaacttagaaaatgagaaatttaaatttgctcgtagcatgctttataatgggagacgcccgggcatcaaggatggcattggcttccaaaggggagacaatgtcaaacttagtgcccctcctaagaacttgtccaactttgttaagggcaaggctcccatgcctcaggattacgagggttacattttattccctgccggctatcccgagagcaaaaataggaaaattcatt

SEQ ID NO: 282794 - DNA, 427 bp, Zea mays
tgctcaagaaaaatagggtttcggcggcggcagttgtacctccactcacgccgccatcgcctccgaaccccactccccgatccagacaaccaccccgcctagatccggatccacctagtgcatcacgaccgtggctaccggatctcacagcctccgccgatgctgcgccgccgccatccccactgaactccgaccagcgcctcgtcgaggtcttcacccccttcctcgagaattcctcgagaagctcatacgcctaccggatctcacagcctccgcatatgacttgatgagcgagtcaacggggcgcgacggcgaggaggggaggacgtggagcgcgcggaggaagcagacgatgagcgggagtgtgaggaacgacgcgacgacgcgggacgccgtggggagcgagacgggatgtggaggcggctga

SEQ ID NO: 282795 - DNA, 381 bp, Zea mays
tttcttccagtctaacattcttagacctgtcctataactcgttcaatggagaaataccatcgaaggtgcaagacatcactgaactgacagcattgcttctccagaacaactctctttctggacccatccctgtccttcgcctccccaagtcgagacatttggatttgagcaacaataacctgagtggacctataccaccctccctgcagaagttcccagctacttcttttctgggaaatgcctttctgtgtggatttccattggaaccatgtccagggacaccacctgcttttccatcgtcgccatcgtcccaaaatgccaaatgaagcttttggaaaaagctcaaccttggtgtcataattgcaatagctgctggtggag

SEQ ID NO: 282796 - DNA, 503 bp, Zea mays
gttaccagtagagtctgttgaaagttgaaaccttgtcaatcagcctatctcaatacttacataacttcttggttagaaaactacagacattactacctgattggagtattggatacactcacacacactaaggaaaaatatcaatttatagtgcaataaatgctattacttgactattgtatgaatttgcttttttgtcactgcagagttttaattcaagcgacagcatcttctgtggtgtgtttgatggccatgggccatacggtcattttgttgcaaagaaagttagagattcacttcctgtcaagttgcgcacacaatggcaaactagtgctaatgggggctctagtcctcatcaaaatggaagcatcaactccgaagaaacagggtctattgttgacgatgaatggggtgatggtgatgacactgaaaagctccctgagatgtttcttccactgaagcaatcttacctaaaagctttcaaattgatggacaaggaactc

SEQ ID NO: 282797 - DNA, 586 bp, Zea mays
accgcccacgcgtacttggctttcctcgcgtccgatttgacgattccccaatggttccaggtcactggattttctggtggagggcgtgttatcgatggttatggtgctggtgtggagagtgccaatgttatagttgatgggcaggttgagagccataacacatagtctttggatactatagactcgatcaggttacatccaagaagtatactataactgccgagaaggatcattataagttcaaccgtttggaggattttatgattttaccaaatttggcaagtattgatgatatcagatcagttagatatgatgtatgtggtattgttcgaacagttactctgaattcaaaagcaatggttactttaacacatggaccagaaaatgtaaagccacagcggaaattagtgggtgaaaatggacatttttgctttgaggttcctgctggtgaataccagttatctgcattacctgtagattccgaacgctcttctagtcttatgttttcaccgggatctattagcgtcaatgttaatagccctgtgcttgatctggtattttttcagtcacatgtttttgttttatg

SEQ ID NO: 282798 - DNA, 254 bp, Zea mays
ctgttgaagcattcggttttcttctttcttttcgctttttttttctatgtttttcattgtttttcgcttattgagagacggacagagagagagagggggaggaaggaagcatccatctacctagaatgtgatgcatcagcaaaacctggtggagaggaggctgctagaggagatcaaaattgatggcacctcctcaccacagctactacccaacccccccttggcgtcgcagggagacgacatagctgtcagcc

SEQ ID NO: 282799 - DNA, 146 bp, Zea mays
tcgggtgccagccgagccgagccgagccctgctctctcctccagctccccaaatcacactccgccatggccggcacgtgcgctcacgtcgagttcctccgcgcgcagccggcgtgggcgctggcgctggccgcggtgtgtcctctt

SEQ ID NO: 282800 - DNA, 536 bp, Zea mays
ttccactcgtccgcgggcttcggcgtctgcgtcaagaagtcctccttcaccaaggccggcctctgccgccgcctcgtcctcgtctgcaacaagtggggcaacggcaaggaggacgcctgctaccaggccaggcccacggccaagaccaactgccaggccaccgtcgtcgccagactcctgggggacgacttgctgcacctcacggatgtgaacctggagcacaaccacgcgctcaacccatccgccgtacgcttcctcaggtgctacaagacgctgcctagcgggttgagcaaagatctcgcggcgagggctgccagaggggaatgctcggtggcgggtgacatcgatgtcccgatatttgatgaatgggggcggcttaagaccgggcaagctgatgtcctggccatcaacgctttcttcacccagatgcaggcaaagcttccaaactccttctatgtcatggacttctatgtggagggccatctgaggagtgttctctgggctgattccagatccagggcagcgtatcagtattt

SEQ ID NO: 282801 - DNA, 210 bp, Zea mays
ttccatgcgtccggccggctccaccgcaccaactcccagggcctcggccacggccacccgcacccgtccccgccggcctcccccgccgcgccggcgcagggcgtctcgtcttccgcttcctcccgcaccgtcgaggccctgtgagtgtccgaggccaaagacgggcgaggcgtggggaaagtgagaagatgatgggatatacttgtcgtg

SEQ ID NO: 282802 - DNA, 186 bp, Zea mays
tgtgctaatatcgtaacgtgttattgtgtaagcaatttggtacttgaagcctgcctgcatttggatttggagcggcatcagaagttttttaaagtatttattcgtagaggggtcgatcgagctcgccctttttttgctgcaaatatataattcacattattactgctgcaaacataagattacgtt

SEQ ID NO: 282803 - DNA, 767 bp, Zea mays
cccacgcgttcgcgttttttctgttcatagagcttgcccttgttctctgcttcatcactctgtactaccgccacttgcaatccaagaaaacgagccctctggagccgaccgaatggccagtagtcgggcacctccccggcttggtcgccaacatccaccgcttccacgactgggccaccggcgtcctcgccggcgtgggctgcaacttcgaagcccgcggaggccgcaccggcctgcggtacttcatcacctgcgacccctccaacgtgcgccacatcttcacgtccaacttcgccaactacccaaaaggcgaggagtacgccgcgatcttcgacgttctcggcggcggcatcttcaacgccgacggggagtcgtggcggcgccagcgggtgaaggcccagatgctcatgaccggccctcggtttcgagccttcacggcgcggtgcagtcgcgacaaggtggagaggagcctcctgcctttcctcgcccaccacgccgccgcggacgacgaggcgaggccgcccccgtgcgacctgcacgacgtgttcctgaggctgacgttcgacatgacgtgcactctcgtcttcggcgtcgaccctgggtgcctggcgctcggcctgcccggggtccccttcgcgcgcgcgatggacgatgcgctggagacgctgttcctccggcacatcacccccacggcgtgctggaagctgatgagcgtgctgggagtagggcaggagaagaagatggccgcggctcggaggacgatcgac

SEQ ID NO: 282804 - DNA, 380 bp, Zea mays
taccgggatgatggtggtgggcctgactccgaactacaacgagtgctccgttgctttcacggcgtgctatgccatctggaacctattctcgggattcttaataccaagaactagaattccagtctggtggagatggttctactggatttgccccattcgcatggacgctcaacgggctggtcacttcacagtttggagatgtatccgagacgttcagtgacggtggggtgcgtatagctgacttcgttgaagactactttgggtaccatcacgacttgctgtgggtggtcgctgtggtggtggtcgcgtttcctgtgctctttgccttgctctttggtctctcgctcaagatattcaacttccagaagaggtaaataaaa

SEQ ID NO: 282805 - DNA, 369 bp, Zea mays
atcgctcttccatgggatatggcagggacggaatccagatgaggatgaactcgtggcaggacggcgtcacgggcaccaactgccccatccctcccggatggaactggacctacgagttccagctcaaggaccagatcggcagcttcttctacttcccgtcgctcggccttcagcgagctgccggcgggttcggccccatcaccgtcaacaaccgcgccaccgtgcccgtccccttcgaccagcctcatggcgacatcaccctgttcatcggggactggtacaccaagggccacgttgtttctcagggccctgcttccggatggccttccctacgaaatcgttggagttagcaggcgaaactatcgcttc

SEQ ID NO: 282806 - DNA, 414 bp, Zea mays
atccaacggcattctggttctagggagcccgcaggacggcacctctgcggcgaccagcgtgaagaaaggggatcggaacgcctccatctcaaaccccacgaaggcacgaaccctctcttcctaggttcatcgttcctcctccgcgtccttccttccctccgcagcgcggcgcggcgcggcgcgatgatacagctgctcttcacgctgctagcggcggagggcgccgtggcggcggtgctactcttcaagacgccgctgcggaggctggccgtgctcgcgctcgaccacctcaagcggggccgcgggcccgtcatggtgcgcaccatcgcggccaccgtgcttgtcgtgctcgcatccagtctccacagcatggccaagatccgcggccacgccgaaggggagctcgacggctcc
